United States Patent Application Publication US 2014/0057251 A1 - sequence listing, part 4

SEQ ID NO: 4329 - DNA, 1672 bp, Cannabis sativa
gttacaatggtgaaatttccttaaagatggaatataacatagtcttacttctaaataatatgttcaaacaaatgaattcaatcaaattacatggtttcagttaaaattatacaacaaggaagaagtcatatagatatcgatattctgatatggcgttttttgatctgtaacaatagctacaatatgatgacaatttaatttaccagagataagcattatgcagatgaaaaaaaattacctgttaactttcacattcccatcaaatatggcttgtcctttagggtgagatacaatacatttgtgaagttgtcgagaataaccacgaggatggtctaaaactaggctactatgaagatcctgtgtttgatcaccgacagacaagtgcaaggtcgataactcggttactgtctctggtcccaattgcttgacattgacattgtgtctgctgagctttccacccgtgctgatctctatgagctcgtaagtgctagccgagtcctgcaacaattaactccatcaatctactgcagctagaaaagttgatagtaaattctcatatttggtatggaaagaaaaatgtaatagaaaaacactcaattgaacaaaattttcaaaatcaaacttgaaaaattgatttacttttttgttctccacacttttttttactacatttcccctacatttttctttcctcgtcaaaatctaactttcaaacatagcctaaggaattatgtgacaaacattactacaacaagagagaattccttacactagtaaataacagcaaactcattcatgggcataaactaggtaaaatgcataaattgaacagattttccaaaccaagacaacattacacaagttatccatagttgattttacaaaccatgaccatcttaaataaacaaactacgcaaaaaaaagcacgtttggatagaaatctttcatttcttgcctaatactttaatgaaataacaagactaacatacagtagtcaatacttatgaatatgaagtaattatcatcatctcctgtaaacctgccaaaattacaatttcataccaaaaacataaacaaatagaaaaatggaagcaaaagtcacctggcgaactgaagtccactttatatgggcagcattcaaagactgagtttgaacataagaatgcttaacctttcctccttctccaatcacaacatccaaaacagcattagcccagtaacacttattcccatctccacccaaaaactcctcaattatctcaacctcaccaccattctccaccaaaacaagcaccctaggattagaaattggcattttctccgaacccttttcgcttccttcaatggaaaagtaagtcaaatgaattggactctcaactctgcaaccagaagggacatacaccacagtcaaatccggtgctccaataccgttaatggaccaaaacaggtcaccttctggaccattcccagcaaactcaccaacccttttcgctatactctcttctgatagctccagcaagctacccacaaaaaccccatttggcaactcagacgaattcgataccgaattcacggcaaacccatcagctataattaaatttgggaattgggtatctgtagaaaaagttagagactttggtggatttgggactggttcgatttgagactgttt

SEQ ID NO: 4330 - DNA, 821 bp, Cannabis sativa
gtgaacaatggagaaagatccaaaggtggcatcggaagaccccaaggtcgatttgtttgaagatgatgacgagtttgaagaatttgagatcaacgaaggtattctttcactcttatgtgctttttcttttctgatcatgttagaatcgtgctaaaacttttgtgcttctagttgtgttagtcaggtgacctagaaattgctatcgtcggtagcctaaaaatggatatggaattttattattgatgattttagggattttttattccctaagttgattttagggatgggttcttcatggcatgggctaattggtcgtgtgaggtttttcatatcagattattatatttctagaaagaatctgtttatggagattggttatggtatcaggtttaatctttctaaggtagaaagagagtattttatgaggaagtgtcccagtggaacatgaaggttttgagggattcttttaaggtgtttcgatgtttaatcatttaggtgtagagactctgtggcagggaaaaggatagtatttgttgatgtttgttctgtgggaagaaagactggatgaaaggaggtacatctgcattagttggggatggaaaagggagaggaacaatcgaacttttcttttgttgtatggtagtagaaggcttgaaattagttgataatgtaagaaaataaagaggaaaaacgggtttttgtttggagagtgacatttctattacttgagtataatgtttctctcctgaactctacgatttggattgataaacttttgactcaaaactactgatttgaattccatttcaccctattaaagt

SEQ ID NO: 4331 - DNA, 4582 bp, Cannabis sativa
ttttttttttttttttcttctataactggataaaaacgcaaaatatacagaaagttatccaattaaattacagtagactgatccaatctcaatcgatccaatattagaattgaatatccaattataattaaattggatcggaggtaaattttgaaaattcaattggatcagatcggttgggacatccaatccaatacataattaagcgactaaactgatccaatgatcatctaattatatttatatatatttttaaaatacatttataattttatatattcaatatattttatttaaaaatatatattataattaatttaatatacatttaacatacgagattaatgaaaaaaaaatagatataaaatgttaattctcatcttcctaaacattaataaaattgtcaatgcttattgaataaattttattttttagcggttttattatgagatcatgagaattaagttggactaaactaatgtttattatgtatgttggattatatagttttaaattatgttttgtttatatatatttttctttttaatgaaattatcttaaatggtagttaaaataaattggatggatccaatttaatctaataaaaaacgagtcgatgcatccaatggttggaaccgattcaatccaatacatccattgaattggatcggatcggatgacttaattcaattagattggattggataacaaaattcaatatttaataaataattggattggatcggttgagtcaaaatctaatgaatgtgatctaatgaatacgcattgtggatgggtttactgtatttttttttttaaaagtatgttttgtatatatttgtaatattatagtttttatttgtattgcaaatttaattatacttttttttaccattaacaaataaatatttaaataatttaaataacataaatttgtaattaatttacataaataatgtataaatcaaatttacatgatagtttttcacttttactatatgatatttaactattacataataagtttcgattttagtgaaatagcaaggaattaacatagttttaaattttatcgttcccatagatggcgccaaactgttgacggctagaactcgtcaatgatcttagtagccagaacctctaagtaattatgtcagaaaataagaaagtagatgagattgaaatggaacttaggaaaatttgcaaaatagcaatggtcaaaaaagataagctcttttgtatcacttcaaaggtatttattataaagaatttacaacccacttttcaaataaaaaaaatgggatatttataggctccaatattttgaaatacactagcggtcccctggggacaagcatgacgtcctaacgttataggttgcagctgcaggaggtagtcttgcgccttatacagttatctagtatcaggtggtctcaagatataggagtggttcctgcaatgtacccttggtccggatgtcaagatgtggaggcaagatcacccatcctctctgttgcaatcaggccttacaagtggcgtggttgtaccttgatatgtactcatctgcgtgcttaccatgttcttttgattcttcttccaacaactttttctctaacatttatgtgttggctgcatggtgtgtttgccgaatagcatgttgaacatgcatgtagagtagcctgctacaacatgcatgtcgagtcgcctgatggagtgcacgccgagtggttgctgaggcatgcttgcagagtgggtgcatgatgagtgtatgtcgagtggctacttgtacatgcttgcatagtaggtgcatgatgagtgtatgtcaagtcgctgattgtgcatgcacgtcgagtgattacttgaacatgcatgtcgagtggttgcttgagcatgcatgccgagtaactatctaggcatgcatgtcgagtagctacttgagtatgcatgtcaagtagctacatgagtatacatgccaagtggattgatggtgtgcatgtcgtgggtcactcgtgactaccggtggaagctagtcccactaatctcttaaatcatgagtgtttactaaaattgaaggttagttttgttaatttttagggttaacaatgaaaaaaatataatttgctctttttttttgtaatgataatatttataattgtaatattattataatggaaaatgtatagttgaggtggacaaatcaactagcaaatttcatattccacacattgatcagctataatattattatcgtgtcagatgatggttgtcaaattaatgtatcaaccttacataatggtcataaaattatagagctacacagagaaaagctgtaaaaaagaaaaaaaaggctatttgtagcttgatcctctaaataaataaacgatttatatatagtcaaagtataatagtataacctttcaaaaaaagaatataatactataaaataaattatttttaattaatttaaaaaaaatatatattttttaattaatggagaatcattaatgcgatttgattatacgcaaaaattgcgtattcaatattatcccattagtattttaaaatataatacatctaatttaattaatttcagtcatctaataattattggatgttggattggttcaatttttctaatagatgtagtattttatatatatttattagtttgttttgggtttattcaatattggatcggatcagatctatccaatattttaagtccagtatatattagatttgactggatccatccaatctaagaaaaaaaagagtaaaattttaatgatttttatatatacatataaattttacgtataacagtataaaatctaattactcatccaaactaaatgaaaatactaattagatcatttggatgttagatgtattatatttttaattaaatatttaaaaataacatttaatctgatccggtcataattaaatattcaatgtttgataatggattataattagatcagttaattcttattaaattgaattaatttatgcacatatatgttgtcccatataagaaaaggttaagaaccaaagatcttatcataattaacttgatattattaagccaaagggcatttcattattgtttttgctgtccttccttttttatttacacccttatattgtaataagtcgatatatagcaaactatttaccaaattgatagccacaattaattgttaccactgtatattagtgtctctatctgtctatcaattaacctcatattgttttttattttgacacaagggagggccccttttacatggagaattattaatattaggtgtagtttccaatccaaatccggttagttattaaaattagtaatcatgatattaatcttttgtattggtcatcattaatctcatgttatattattccccaaataattactctctctctctacaaaaagtcagtgcaacttattacaataattaatttcaaatttataatatttctctataagttttcatcattttaaatgacctaaataaacttacataatttttatatgcgatttataaggtgcgtaataagagtgtttgcagtataagtggtgcgggttgtagtcttttttttaaatcaaaccgcatatacagtttttataatttttcaaaccgcaaaaatcacaccacgaaaatgcagtatagtgttgtgcggtttacactatcatcattatcaaatattattataaaaatttaaaaatcaaactaatattgctttaacaatacaaaacaaaaaaaccttattaaaattttaccatcataacatgtataataatcatcaaattattttattgaattttctttaaaaaaataaaataatatacacatatattatatatttattttatggaaaaaaaacataaaattcatattgtaaagattggtaactttataatatagcggtacgatttgaactgcaaaccgtactgcactgcatgatttggcaaaattacaaaccgcaacggcaccgtaaaagattttaaatcatattttttttatgcggtgtggtgcgatgcgagtgatttatacagtgtgagtatattgatgaacacccttagtacgtaatcatgtaatttaagcatcaacccaaaaataatttcttcaagagcaattacaatagagatacttatatgtagtatatttgaatctacaatattaaaatatcaaacgaggccatatatttataaatagagatgaaattttaatggttacattaaatatgtaatcacgatggttatatttatttttaatctttattagatcatagttaaacgattataattaatttaaaaattaaataaaaataattaataaattatctgtaacataatacaaatttgacttcatttattttcttataaatattaattaattataaagaaggtcttataaaatattttaattaaaaattaatttattttatatagttgataaaaattaatttaagtataaaaacaaaatttttagtttgatataacaggccggttatataaaaatgtaacctcagttacatttttaatgtaatgattgaatattcgtttatttatatg

SEQ ID NO: 4332 - DNA, 2033 bp, Cannabis sativa
tgggctaaaatattgtctgaattacataattacacgtagtgtatagtctgaatttctattgaatcaattctccattattacttattgtttgtttgttgggataataccattacattttctcattgtatatatctctgtcattactgtcaaatattacacttatttgttttatagtgataaataatccaaaaactgcacaatttcttaagaggtgaagttaataatatcatttctcactttttagtcaaactaactagtttaatatatatagtttgaaatgtctatattgaaaatgatcaaatgcattaatcatattaaatagtgaaatgttttttacgttcaatataataacaaagagagcaaatacaaataaaacaacaacgttacgtcgatcaattaaataattctctggctataattaattaaagagtttaatttatttatttatttatttattttcagtacctagtaattaataatagtttttttacgtacatactttttatgaatttatatgatgaatacatataggggcacaaaaagaattagtaaactatacatcatgaaacgggcgggaaaaatctcatccaaaatcaacaatataacactaaaatatttatcgtccttaaagccgtccgaagtgaaaaagaagttactaattaaatttttaaaggagtgacacatcgatcaaagtcgacaaaatattattagaggcaatattttgtcgctcttaaaatagtcgtctctaatatttaaaattgttaccaaaccacactatctctcttggttgagcaaaatatgtaaaattttcattgtggacaaattcacatctattttggtaaaaataaaagttgtatatttttatttcctatataacaaaatcatcgcgtccttaataattagaatgtaggtacaaaaatatgactaagcaatatatagaacaaaaattgtttgtcttgcgtaaataatccgaaatctcataaaatatattgatcatgtgctgagcttgttaactattataattagacattcataacaacgtctttaaaataattcaaaaggtaaattatgaagaatatatgttaaaattgtattacatccaatgagttacataaaagcttaaaattttacattataaatagtacttatttattcattattcaaacaatattttaataatttctctttcttctttattttctatatatatttaatatttttaatttttttgtttatataagttaaatatattataaatatcatatttaaatcatatatatacacatcacgtttatatgattgtgttggatacggccagtaggtatatatagtacctaaatgtagttaatatataaaaatagtgatcatactagctagtacctatatatatatatgtatgtgtatatatatgtgtatacttataattataagcttctagattgagcattaataatattaactataaccacttttgtggaggaaacgggtatgcatgcactataaacttcacatcaaaagttgcacgcttcacccatactatagtgagcaattatatatatgtatatctccatatttatattagatagtgttaattataattttttacataatttttaggttcaaaattcgttatgatgataattataatataattcttgtaattttttaaaaattttaaataatttacaatatcaaaatcagaatttttggtatttcaatctattttgtgtgtttaaaagatttcatacatatattcagcactatatataaactatttgaaattttttaaaaatttataaaaatgtattgtaacagaacaagcactctcatgaaattttttttttaaaaaaaaatcatgcatgtgttttgggtataaaagatcgattaagagtttgtaataaaaaattagcgggtcacccctcttatgtatacaaaaaaatcatacatattatatatgtgcttaattattatattgaaacctcctaaaaactgacttaagtagaagggactcctataaatttatatatatatat

SEQ ID NO: 4333 - DNA, 1281 bp, Cannabis sativa
aagaaaataactttgttttctgaaaattgaaatagaaaaagacaccaaaaatttctgagggaatgcatgtttgtatatcgaattttatcatcgaatttcttcttcagctctgtatgtatttcaaagtattaatattgcagagcaactatgcagaataaatcacatgtctgacaatttgagctaattcgggttacgaattattttcatttccttatctttaaattcttaccaatgagtccaatttgacttgattgaggagtgagtttagtattttattggggagaaaagaatatacaaccgaccaaccaaatcaaatacatgaagaagtgaaaactcaacttaattaccaactaattcaaataactgtctgttatgacagttagtatccaagctgaaccttgtagttctcagttaaggacttaagagagagattgagaggtgaattgtttagtgaaaaaagagaattgtacagattgttttgtgacactataaatcatcttgtttttaatctgttttgattattcttttattagatctttgataccttttctggttggtttatatttggttcttgccagatgctctagctagtgagaagacttacctcaatcaaatggttaaaactaaataataagagttagttttttttttttgataagtaataagagttagtttagtattgtataaaggccgtattgtattaaatatcaagtaacacattgtttggataaaatattttattgtattaattacgttcacaaaatttaatataatgtggatcgtattatttaatacttaacaaatgatctgcattattataatatttacaaatagtccaaagttagggatcctggccccagtctcgaacaccaaatttggaccctgactccgacttgaactagaacctacctggacccaaattcgaaccctaacctgacctcaaactcggatccgactccggatccgactccggacccgaatggaggtcggagttggaatcgaatttatggtattaataatataattttatacatgttattaatataagtcaataccaaatataatattgtattgttataatatttgcaaagggttcagggttagggaccctagccccggtcccgaatagtggacttggatcccaaccccaacccgaactagaatcatgtacccagatcaggcttccaaacccaaatcttaatctcgacccgactctaaactcgaatctagctccgaacttgaacggaggtcggaattgagattgaagttatagtaatgata

SEQ ID NO: 4334 - DNA, 1608 bp, Cannabis sativa
  modified_base (598)..(607): a, c, t, g, unknown or other
ttggtattggtacacaaccgtaaatttgcttaaaaatttaagttggatttgagtataaataaatacacaacacttcaaagtatgttatttttgacaaatcacatgtatactaaaatatcatagctttattaaaactattaattaagacaacaccaccattgcttagtcttgcgagtcggctaatttggctcgacttttctttatggcaataagcttttctgcaaatctgcaatagaaccattataatgtgcatattattatgatgaaatatataattagtatattaacattttaatgaacccaagtagtttgtgaaattctacaatgtatctcttgaaagggtgcactgatacactcttatttgtatcggtatctagaaaaaaaatttggtttgaattattttttataatcgtatacgttgtaattatttaagacatcctgcaaaattttaagaaattcgataaaattttaacacgctgaaaataagattcaaagaatctattacgtgtgtgacttttttattttatacgcatgtcaaataaacagtttgaacatttaattctatattgtaaattattctaaatttcttaaaattttnnnnnnnnnnttaaataactataacatacatgactataaaaaaatgaactagaaaatttttctagatgctgaaacagttagaggttataccagtgtacctattttagtggagtgcattgtaaaagcatcttatactcgtagtacaacttttgtgtagtttatcgttttcataataatcaattttcgttcaactaagaacgaccccaatagcataatattttctactcactttgcatttatttaactttgtttgctaaattaattagaaattaaacatgtagaaataaaaaatttaacgaattacttatcgagtgctagttggtaagtttgattttgatcgacaataatacgctgagaggtaggtagattgaggcgcgtaactggtttcttcaacatgtctttggcgtactgctccaatttatccatgttttcagggcttgcgttatccatggctgcaagttcttttggtaatgtagaatcctacatgtagcgttagtattattacatacattattataaaaaaaaaaaaaaaatcttacttttagtaataattaaaaataattttattcgaaattattaagttctcaaaagtaataatctactagagagaatccaattacctcactcactctcaacataaattctaaactaatatatacaatgcttgctaaaattatataatataattattgtgttttgagttaggagtttcactaacaactaagaatgtaaaatttgtattatatttcacataaaaagtgattttgtaatatatttgtatcaaattttagtattgtaatttaatacactgcaaaatttgatgtaaaatttaatgcttagttaatgttattattaaaaatataaaaaataataattttattataaaagcaataaaaaataaatgtaaaaagtttataatttaatgctatcattaaatttaataataaaatattaaaaatgacataaaaataaatgtaaaagtagtagatttattgtgaaataaattttaca

SEQ ID NO: 4335 - DNA, 522 bp, Cannabis sativa
aagatatgactattatctcttaacctgtaaattaatattaataataataataataaacctaataataataatgaattaatgatcatcaaaataatcataataatatcgtaatgtggctagtggatttatttaattttatcctaataattgttaaaatatatcccatatttgacgagaattattgggaaagtttgttttatttttttcaaagtttgtattattgggaaataaataatgatgagtcaaataataaatatataaatacatatgtttgagggtaaactacaaaaaaattaaaaagaaaagcatatataaaccacttctattgtgttcataaaatattcaatctaattcactttaattcaatctgtattcgcaaaatataaatagttgtaaaattaattagattagaaaatctaaaatttacacttgtgcagatgtacaaaagtaacaaatctcatcaaatctacaaaaatttatatatttatatgtatttaaaatatactagaagaaagttacgtg

SEQ ID NO: 4336 - DNA, 702 bp, Cannabis sativa
accacctccatcatctgaagaagatgagtcaagcaattctctatttcaattcggttggaaagttgtggcagtaggatatgggtgcggattcttaattgggttgctcattggaaaaattgtgattgcaaggaaaccaaattggttagtgatgatctttgggaaccaaataaggatgtgacaaccctagtggttcctaattctcaactccactttgatgtattttaatcttgttgtgttattctatgtgtggttgtattttatgcttttgagtaataagttgtctttcttatttgtaaacattcatatgttggatgtaataatacatgtgtctagctagcttacaaatcaaataatcttattaataatgaagattggtttgttgagtgtgtcttcaatttttttgaggaaatagtttcttaacttgatcctataaaacaatgcagttataacttttcttgtaagatgcatttgattatatatttttatttactatagtataggaaatgttacctttgaccctacacttaacaaaaataataaatcaactctccaaggttgatttagacattttctttcctttttgactccaatcaaaactacacctttttgaacttacacaaaaaccctattcgaagaatctcaaacccttgaatctttcacagacgtacaacacaatcggaactctaatagagcttcaagttt

SEQ ID NO: 4337 - DNA, 968 bp, Cannabis sativa
tttgccaagttcttgcaataacaattcctgttccattctttgcctattacctctggccttacatctttttaccagaacatacaataaggatatcaccaatggtaaagtagctgttactcctattataattaatagccatatccacatttgtactgcatgcatggaccaaataaaagttctcaacaaaattttgatactgatcaatattaactagaacttcatatgaagcaagaaaagagaggtttcacttataaataattacctccagactgaaggagatgaatctttctcaaactagccaacttgttatcagtaaaggttgaatctttggaccaaatctcacaaccagtaccaatgtcatcatttgtagaagcataagcaacacaagaacaatcctttaaacacttttcccagcaatcaaagattgtgagattatctttttcattgaacttgaacacagtaccagacatggctcctactttggatacaaacttatcattatcaaggctactgcttctgcaggaaggtagcttctgctccacgcaaccaaatctcaaagaagaagaagatgaagaactcaagcatgaaacttgtgtaaacatgagattcatcccatatcccttgatttcaccatctgggctcaaactaagtcttgggaaaattgtgatttccttacttactgagtaattcatgtaagtctcttcctcatttgaagtatagctaaatttgtacttgaaatggttacagaactcgtcttttagcgaatcaaaacacccatctcgccatggcccactttcccaatagttgtttcctctccaccacacgatcatttggtctgagtctacagcaagagtaaatgaacccaaagcaggaaaatcatcagtcctccaagaagtcagagtcagattgagcccagttctccggtcaaatccgagcttcatttcaggcaaaagggtatcagtaggata

SEQ ID NO: 4338 - DNA, 977 bp, Cannabis sativa
ttttattttatttaattccaacaataacaatattattatcattgccttaatcaccatcatcatcattatcatattatattagggcaaaaaccctagctaggtggataggtaggtgaaggagtgggagcccaacattgagacctacaagtttctccttggcaatattcaggtgtgctaccacaatattcaaatatgctacaacaccttcctggattacatggaatgtctccaaaaagaggcccacatctatgatctggtctttctgggcctgaaggaggtattgggcttggacatggtgggctcataggaggaaagtatggcccacgaatacttacacttgtagcagagaaaacataaagagagaatagtgagaaaaaaagtataagaatgtttaacttcataattgttattatgagtttaatttctttgaagagatttgggagtgtgagttaatggaaagagaactaatgaggctagctatttatagtgtagttttgttaattactatgccttattagctgttcttgtgtcaatataatataatatatatatatatttatattatgtttttttgtcatttgactctattcctaaaacaagtactatacaatatggattgcaaagaactataatgagaagaacaatgaatttttatttttgcaagtatctatacatagtgacatttgttgaatatgtattagctgttaattacttaggctttttatttaattgtataggaaaatgagtaaaaattgctaaaagctacacgacatgaaaaacatagacgtggtcctatgcatacatgatatgatactcttattaatcttggttccacaaaaaaatataaaacaataaaaacaaaatcatgattttattatatttagttaaatattaatagtaataattggtgataatttttgtatatatatattgtcaactaaacatgttcaacaaaggtggacgtgccggagtggtta

SEQ ID NO: 4339 - DNA, 1994 bp, Cannabis sativa
acggctttaatgccctttgtttctgcaatcaatacaatagggaaagttccattttttaagcaaaggaatatactggaagcaatttcctattggctaaagcaatgacagaaagatattctttgtggcccacatcatgatatcaaatcattttcccaatcattaataacggtaataggatctgtctagtcagcatccttaatttcatcttctaattgggctgacattgggcctttcatttcaacatgccccctcaagctgtgctgtgatgagtgacaaacagtaagcttgtccttaaggtaatgaaaggctgtaatgggcagagactttgtcaatatgtcagctatttgttctttggatggtatgtatctcacttcaactgatttgttcatcactttgtctcgtataaagtgaacatcaatttcgatatgtttggttctcgagtgaaacacaggattggatgcaagttgtcgtgctctagagttgtcgcaccagattatggctgtgcaattgtgttctattccgatttcagtgaagagtgattgcaaccaagtgacttctgtgcaagcttgagcaagatatctgtattatgcttctgtgcttgatcgggcaatagatttttgtttccttgaactccagcttatcaagtttccaccaaaataaacacatatacctgaggtggattttcgatcatcaattgaactagcccaatctgagtcgtaaaagctttcgatgatgggattagttgctttggtgaattggattccttcaccaatacttccaacaatgtatcttagtatgcgcttgcatgcaagccaatggttttgggttggtgcttgaaggaattggctcaatttattgacagaaaaggcaatgtcgggtctgctcaaggtaaggtatattgtagcgctccgatatgacacttctgtattgagttatatcttcaaacggtgggttgtcctgcaaatggagtttgttgctttgaatcataagtgtaggactttgtttggcttccaacatgtgtgttcttttgagaagatccaaggagtacttggtttgagacaagtgaagtccatcttgccccctacttgtctcaaaatcaagaaagtaagtcactgagccaagctttttgagtgaaaatggctggttcaattgggagataatctggaggacacgggtggaactgttgcctgtgagtaaaatatcatcaacgtaaacaagcacatagaggcgtgcatctccttcagataaaaagaatagagaggtatctgagactaaatttttcagtccaagccgaagaagagcagtgcgaagagtgtcaaaccaggcccttggggcttgtttaagtctgtaaatagctcgattgagtttgcacacagctgtaggaaactcgggatcaacatagccaataggttgagacatgtatacctcctcttccaaagtgccattaagaaaagcattattgatgtctatttgttggacatcccattcattggtgacagccaaggataggatgacacgaatggttgaaggcttgacaatggggctaaaagtatcaaagaagtccactccgggttattgttggaagcccttggccacaagacgtgctttacagcgttgatgagtaccatctgagttgaattttggccgaaagatccatttattatcaacaacatgcatatgtggtaatcgaggaacaaggtaccaagtattgttctttttgagtgaaaaatgctgctcatccatggcatgtttccaaaccggaattgttaaggctatttcaggtgtggctggggtggatagggaaagggctgggagatgagggttttggagaagagaggtaaagaaggtgcggggtttgaagatgccggcttctgatcgaatgaccataggatgggagggtacgggtggtgcaatgttggggcagggcagatttgtggttgctggtgagatatttggagtgttttttggtgtagtaggggagtgagagtgactgg

SEQ ID NO: 4340 - DNA, 987 bp, Cannabis sativa
tgggcacttgctcggatgggagagtcttcttcttcttgtgcagcctctcctgctccgaatattcttgagcatactgttttgctctagcatcacccttcaacttagcctcacgcttgagttgaatgagctccttctcttgctcgactccctcagtctggcccgggctggatttcttcttcctccccttcacggacttgggtacaaaatctgccgggtaaagcttgtacttcacaaagttggcctctgtagtcaacaaagtgatattccgagcagcatcacgcatttggagaattctcagggccttttccctaagcctgaatgtgaatggaggacggcagtatacggggatctgctgaaatacagtgtgagcagtctccatgccctccacaaagtaatacttgttaacaaaacccccaattttgctaacttccgtgtccacggtacccttcagccaattgtcatccaactgagagaaatagaagtaccccgacctgctctacttgggggtacgtagagttcaaatcaaagagccagttgatgtcgtgtggagacggcacacccgatccttgaatggcgtagaggacgaacagggcagataagtatttgatgcacttaggtgtgaactgggtgggacaaagatggaagtagtccgcaaccctcttgaagtacgggtgcaaaggcagcatcggcccttgctttgtgtaggcacccgaccaagcacagtaccttgccttcagatttgttgcccgataatttgaagacagaaggaagcactcaagtccgcccagatacccgaccttctccaaattttttaagtggccctcagttacgatggacagaggacacacccatctagcccctaaggcaccttgcttcttatgggggaccgcctcggtaaactcctcggtgacatagtcttccccctcgaccaagatgtcacccagctcggacattagctccctagactcattatatcctccaaaacgt

SEQ ID NO: 4341 - DNA, 601 bp, Cannabis sativa
tccccaacttttacaaatttcaatgtataaatatttgttttataggaagtatcaagatatataattattaaatatatatacaagagtattaaaaatagtcttagctgctaatgtataaaaaaatatttatgtataaaatgcatgagttatttatttaattatcaattaattttgagataatacaatcatatatacatttgttttcatccaaaatttaatacagaaattaaaaacttctgtgttagtttctaatgttgaaatttttgacctacaaaaaaaaaaaaaatcacaaattttcggagtacagtcacaagagtgaagaataccaatttagagagagaaagagatggagattgataaaactatcgttctagttgtacacataaaataggattatcttaattattatgcataattcatgagtcttgcaattcaaaatgataaaataagatttggtcgtaaatttaaatataaacaaaaattatttttcatcacaataaaatttgtgattaaaaataaaaaaaattataactaattataaattatcattcttaataatgttataactaaaaaatctgtaacaaaaagtattagtcacaaa

SEQ ID NO: 4342 - DNA, 598 bp, Cannabis sativa
tgaaccatagagccattcaagaagcaattggtcattgactatctgttttactcaaaagttggattaatttcacctgcaacaatctcactaccatcaacattagtagcgactcatatatattcttgtggtttagaaagagtacctttaaggtagccatcaagtctgtgcccccgtacaataacatataccatagttctccataatgggaagttgattctatcaaacttcaatgcaaatggatgattcaaagtgctcccgaatggacgcacaaatatgcttggagtctgagtttggctacctcttgtagtatttttttgtccaccatttcctccagagattgtagagtcaccttcaacgactactcgaggagttttctctccattaccgaccatggataaagaagacaaatacttacatatactccgataccaagttgaaaaatacacacaatattagaagaatattttctcaactcattaagtttgaggctacgatatttcattatatagaggaattcgatatacaggaatattcgagacttttcacacatgcattctataacaaattaggggtaaaaaattaaagaaaaaggaaaaaa

SEQ ID NO: 4343 - DNA, 786 bp, Cannabis sativa
catttgttttaccaaagtatatatctatagagccttgacatatttcaatgaattgagtagattgtttttttatttaagaaaaggcgttaatattaaaaaaagttagatcttcagtcattacaaaaaaaaagtctaaagatatggttttgacatctaactaatcatattaattgtgggtaaaagctcacttagttatattataagccaaaaaaatacaagattgagctacattagaaaacacacaactcacaaataaagaaaaagtgcttaaacagtgattagaatagttttcaatttctcatctggacttcatcatcacttacgaatcactttctacaataataaaattgcaccccttctccactgctttttctaacgccaaacaacaagcagcaaccccgccatataaaacatcagtaaaatcaagtcttaacgtaattacccaacagattatctcctggatcactctagcaacaaaaagaagtagattgtttttttttttgctggttttcttacatagctagaaagcttatataaaacagtcttgttcttttattttgtacagtttgatcacttttaagatggtattagtatagtgccttttatgaaattatatcagtctctctccattggaagaagctcgaagaacaaacaaaataagcacaatttcattttaataaaatagatgctaaaagtcccacatgggaaatataaacaacatttaagtgatatattatagcttagaaaagagaactgctcgccgggcctagtaacgtgagcctgtaa

SEQ ID NO: 4344 - DNA, 1020 bp, Cannabis sativa
tataataggtaaaaatgtaaatatttatattatggcaaaagaaactggcttccaccaaaaatagcacctattatttaataattacccaaatttgtatcacaggatttttattatatacaatgtgttcatatataccataaacattataagtacttagcgccaaccatgtttatcttgtttaagattgttataattaaatattttaaagtatttaacactataccaatgtagtttgttgtgagtggttagcaatttttttattatctattaaatcaaaatgtatggataccttcttcaaaaaaaaaaaatgtatggataccaatattaaattgtaataataacagtatattgttagacaataacgtctcaaaatttaagagacctaagacaaaatatgaaaattaaaataaatattctttattttattttattttattatttatttatttatttattttacttttgagatattatttattattaaaattttgacaaattataatttagttcttctatatttatacgataaatgatttttcttaccacataaactaatttaaagtaatatttgatattataatagtatttctattgaaatcctatatattttaagtctttttgtaaaagcataaaaaataaatcaataatatgtcaaaaattatgttaattttttttaaatatataattttttacttttaaattcaactaaaaatgtttagtctacacatttccaaacataaaaggaatatttgctcaatccaaccaaaacttacatattattacttcttttactataatgagcggcattttaaataattttaccattaattttctttaatatatttttaaaaatttaaaatattacaaaatttctacttacacattaatacttattattattattcaatttttacatgtagacatgattttctcactctctcttgtcacttacatattcattttctttttcttgtttgttctactcttttaactttcatcacatctctctctctctctctc

SEQ ID NO: 4345 - DNA, 1334 bp, Cannabis sativa
gaccttctcgatggccttcacaatatccataccttcaacgactttgccgaaaacaacgtgctttccatcgagccactcagtcttggatgtacagatgaagaactgagatccgttggtgttaggaccagcattagccatggagagaatgccgggaccagtgtgcttcttaacgaagttctcatcggtgaacttggagccgtagatcgactcacctccggtaccatttccagcggtgaaatcacctccctggcacatgaaatcgggaatcacacggtggaaggcggatcccttgtagtgcaagggctttccgctctttccaactcccttctctccggtgcagagagcacggaagttctcagcggtgcggggaacgacatcggcgtacagctccatgacgatccttccagctggtgagccaccgatcgccatatcaaagaagaccttagggtttgccattgaaagattaagggtttagctttactttgaagattgttttcagtgaaaatgaaagagatcagagttgctagggtaagggcctagggtgcgtggacgaagacttatatagcggtcaccgctgcgaatatctatgggggtttgattttcaaccgttgaattaagacacgtggcaatatcgtaagcaagttgattcaaccgtggttgggtttgaattgttaactagggttaggttttaggatccgaggggtaaagatgggtatatgcttttgtcgctgtttgattggataagagccttcatgggtacaaattgagataaaccgacgtcgtttaggaaatagtggtcgactccttcctcggccatttgggtaaaaaaaaaattaataatttcataaaaaacacaaaaaaaaaaaaacaactgaaaaaaattagaaaaataccattgtattaaattttaaatattttattatttttataattttatatacagaaaatacttattaatttataaataattttttgttatttatatattatttttttattattactttaaatgttatttcttttattgaaaaataccaatataaaaaaaaaataaacataatgtaaaaataaattttatatattttatgtaattatcatgagaaaaaaaaaaaagtcttaagctgcaggcttttatcaccaacatttttttttttttttgagggagcttttatcaccaacatgtcgctctctctttttggatatttgattggttaaagtggacctcacttggtcagatctaacggctacttttctcaggaaaaacaaaaataaagaaataaagaaaactctataaagatctggaatttcggatcacggttttttttttttttttt

SEQ ID NO: 4346 - DNA, 1505 bp, Cannabis sativa
cactaattaaggctatatatatatagagagaggtctttaaacttttaatttaatttctatatgtagaatatatatatatttctaaaaggaacattaatcttatctcatttatttgcactatacatttataatattcatgtgttctctccaccactaattatatatttatttcacttgtcttatcctcataatgctacataagttgctccaaaaataaatataagatagataaaatatatttctcaaaaaaacaaacaaaaataaaaggttggcaactccaattatgaataatttcaaaggctgcccaagtggggtatcatggtcggtgccggctatgcctatttttatttttatttttgcattattgcttagtctactatattggctactaaactagtatttaagaaacactcaaaataatgttttacacaacccatattcatcaagagctagcaactgagccaactcatcatctctttataatttcctttgtcgaaaaatggtgaaattgactttgggtagctttggtgactgtttcagctctacttctctcaaggcctatcttgctgagtttaatgccacctttattttcgtttttgctggtgttggatctgccatagctttcggtaagagtatatatagtactaattaactcaattgttatatttaataactgtgtatttttggttgatcaattaatatattatgatatatatttttaggtaagctgactagtggaggagctttggacccagctgggctagtggctatagcaattgctcatgcatttgcactgtttgttggagtgtctattgctgcaaacatctcaggtggacatttgaatccagctgtcacctttggattgaccatcggcggccacatcaccatcctaaatggccttcactacatccttgctcaagtctggggttccatcctagcttgctttgtccttaagtttgtcactggagaggtatatatatatagtataattatataacatcatcatcataatcataacaaaaatattatttttattaattttgctgaagtttgaaagattaaaaatagtgattcatacagaagtagtgttccctaataaaaaattgaaacattatttgttggggctgaattttactacctctcatatatactatatttgtattcttcaattttttgttacatattataattttagaacatgttgataaacgaataattcaaccactcaggtccttttcttacaaatcattttatttgtttgattaaaaaaacaattttgtttatgatactaaatatatacatgtacaaaccaatataaaaataaataattaatgatataggtaaattatgcattaaaaaccattacatgtccataaaaaaaaccattacatattgtcacagttttcttttcagctaatctaatttatttcagttgcgattttttttttttttgaatagttaatctactattttaaaatgcattaatatatgtttttttttttttt

SEQ ID NO: 4347 - DNA, 879 bp, Cannabis sativa
attggaagataaatttaggaaataccaagatgcaaagtatgaaaaactaccaggtatgattaagatgaaaagactaaaccattccaccctaatgtcctaaactcaaaattttcacaaggatttaaaaatccacatgtcttgcaatatgatagtaccactaatcctatcacccacataaacaacttgaatacaataatgtgggcaagtaacgttttaaacaacttgcaatgcatattgttcctaacatcattaacaggggcaacaagtagttggttcgacaagttcacccaccattccataacttcgtgggagcaattgtcaatagatttcaagaagcaattccaagctgtaagagatcatcgactagaagcatcttcattaactaatgttaagcaacaaccaagagaatcccttaaggtgtacttaatccattttagtatggctgcatccaaagtccgaaatttgaatgactgtattcaattaacatcccttcacggtggaattacaactgacttgtcaaccgttggggcagacttatgggataatttgcaaggacgcccaataagaaatatcaacgagtttaatgagagagcatagatttttgtgcaaaaagaagaagcacaggatgaagtcaagctgttaaaatctagtttgggagataaacccataaccggtacaacgacaacgagcaccatgactacaatagtgcaaaatctgaatggttcaaatatcaaaaggaaggacgagtcaaaagacttatccaagggtaagaagaagcaaaagcaacatgaaaaatatgttccaatttattcagtgtatactaaattaaatgaaactcgcgaaaaaacatctacctggccaatgaaaattgagtcgcat

SEQ ID NO: 4348 - DNA, 905 bp, Cannabis sativa
acgttggttgttttagatcttacaacatcacttggatcagcatcgatagctaattttgccaaaatcgacgttaaaatgtcttaaaaactgcctccaaagcccatatttatagtagtggtatataggaccattgaaaatgatggattcgttagaggattcattacctataagttataattcctcaattcttttgatgggtgtagccatgggaaaatggggtccaaggcaaactaaaaatatgaggccccttaatttttttttctttgaaaagaaaatagaaaatttaccttaaaaaatctacataaattaattacataaaatgtaacttctatgtatttttttatgcaaatgtattaatttaaaatttataatcaagtttttccatttagtctttttcaatagataacataacgaaattacttaatccatcttgtgaatgagtgataaatcacaaagtaaaataaaaaaatagtagtcaaaaatcgcttggggagtagaaagtttaagaatggtgatatgaatatctatatatttacatgataacctaattttaacaaagttttaagtaattacatattgttaataatatatataaatataataataatacattataaaaataattacgtgaggtagcgtagtagtaagagtcctactaaataaacttatttatttaaaaagaatgccaaaaattaaacaactagcgaatacaaattctattacattggctgaactttgtgacttatattaacataaaatttatttattatatttacataaaataatttattttttcgggaccctcgtggggtgggggccctagataaaggcctactatgcttactcttaaaattagtcctaagtatagccgacgattttttaccgtcacctatattataggtcgt

SEQ ID NO: 4349 - DNA, 1721 bp, Cannabis sativa
ggcctctggattaggtggactctaagcacaagcctaacctacttatactcagaactgggtctgttataataaacattttgtaaaaattttaaaattttcaaacaataatttacagtgtttgaaaacaaagtgtttgaacttaaattgaaaattgaaaatttcttatatattatttgtatgtataaaaggaggatgtgattgagtttagggattattacaaggagaaaagggtcaaaacgaatgagagcataagtagaccaaatgagacaattaaggaatgcaccaaacgacagtgaaaatggcataaactccacactttttgttgacatcaccaacttctgcaatatatacaaaataattatacattatataattaattataatatatacaatcatatacatatataaatatatatcattataataatagcattatataatttgcttttgcaaagaaaaaaaacaacaatatctatatatagtgtgttataattataatgtatttttttaactaatacaaacaacactactcattttaaaaatattttataaaaatagtacgttgagcttaatttatcacaagaaactaaggtactaaattttttaacgatttacaaattaaagcaatcttgattgtaattttatattaaaaccaattaaaaattcaaattcaatatatatataatcaatttaaatgattaccatgatagacaaaggcgaagagtacatgataatactagagaaaataccgacgacaccaacaatcaaagatctcttcttgtatgtgtgaaatagagttagagacaaagtagcgagaagagctacaacgaaaagctcgagaaatatcaatagaagaagtttaagtctttttttcttgtcagaaaagatcaagaagatgataagtaggataatctcgatcacaactcccaaaaaacttatagtaagtaccaaaatgctcccgggatgcacaacaggcaacccgtagagagtccatatcatgcaactaaataaagttgcaaggtatggcattgccgagtaatcttccaccgcccctttcttccatattcgaacaaatgttggtctgtataaatatttatatattacaaaaatattaataaatataattgattaataattatttataatagtaatcaaaattatgatcaatatatatataatcttacactggtgataaaaagaagaaaaggcatatgatgtttcctgaaaattaagttaaatcattaataaacaattaatcgtatttatgacactaaaacttaatttgaatttgtagaaaatctaatctaatataaatatatataattattatacctatgataccaactagagttcgaagagcttcatcagaaatcattgtgtgtgacttgtattaatattgatcacacaatgaaattttaaaagaacaagttaatatatttataagaatattggtatgtcaataaatttgatctttgttgtattgtatatatatagactatatagtacatatatatataggtctagctagatcatcatgttgtgtatcaaattttttgcttttacttttggtatttaataataattaataattaataaaaatgtataaagtatagtcgtataagggattttttaatacgtggtaatgatggagaataagagcgaaatatataaggcaggctatgagctggtgatgataatgaaactcaatttaattaattaat

SEQ ID NO: 4350 - DNA, 555 bp, Cannabis sativa
caaggaataggtgggacccacttgcgttctcccaaattaggatggaatctacttgggacacatacgatcaacagtgacgaaatcagaagtaaaatttacgtgggacggttatctatttttatagtgaaatattaaaggtatatgtggtgcctagtaccttttatagagtatcataaaactattggtataatttaatatcaaatctcaatagaaaaccaatacctacctcatggtagtattgaaaatcatagtgcttaatagcaatactgaattatatatttatagaattaactataataaaatataaattaatagatgattatgttaaaataaattttagtgtcgtattttaaattaaatgttaagttcaaatcacatcaataatacaaaaagtaaagtggaggtatgaaatttttaacttttaacctccttaagatttaaatatagatttaccaatacaccaaacgatacaatttgataatatacacctcttaaaatttttatttggacttacattaacttaaatttgggttgatcggatagtgttctttgttg

SEQ ID NO: 4351 - DNA, 3272 bp, Cannabis sativa
ttcaggttggcctccataggtgtagtcactggtttgcatcctaaatgtccaagatcttctagcatttgcaaaagcataatgtctttgagatatgatgatgcccttgggggacctagcaacttccaatccaagaaagtatattttaggttgccaagatctttaagttgaaatttgttgttcaattgagctttgagagcctccatttcaaccaaactgttaccagccaatataacatcatccacatagataagaaggatgatgaacttgtctccactatgcctcataaacaatgaatgatccgtagcggaatgatggaagccttcctcaagcaaaacactagaaaacttagcaaaccattgccttgatgcttgctttagtccatatagaggtttttttagtttgcatacaacatttggtggaagctcccccttaggattataccctggaggtagagtcatatacacctccacattaagatctccatgcaagaaagcattattaacatcaagctgatgtaaataccatctatttatagctacaagagcaagcacaagtttcacagttacaagcttagtaacaggtgcaaaagtatctgtgtaattcaccccttcttgttgattgtaacccttagccacgagtcttcatttgaacctctcaatagacccatcagcattatatttgattttgtaaacccatcgacaaccaatagcatgatgttctgcatgtagggaaacaatgatccaagtgtgatttttctcaagagcatcaatctcacaatccatggcattatcccaaattggtatgcctctggcttgactaaaaaattcagtttcataatgactagaaatggccaaaacaattgctcgaaaagtgggagacaacctgctataatttagaacttgagaaatagaataaggtgtgacttttggggattcctgcaatatcttggcagggttagtttgatccaaaaaaacagtgataatcttgcaaatatgatggcttatgtgatgttctaatgagtctgctactgtgcagattattcccaggtatatcaacattattgggggcaggaatgggaatattttggggatgtatatcagaattaataggagaaggtacagaattgttaggggaataatttttatgttgtgatatatcagtagcagaaacagaaaaaaaaaatttgatgctcaacagtaaatgcatcaggagtgtggaagagaaaaatagtctcatgaaaatgcacatctctagaacaaaatattatattagaattaaggtcaagtaacttatatgctttcataccaataggataaccaagaaggatacaaggggctgcccttggagaaaattttgatctgttattagacagggtagaggcatatgccaagcaaccaaaggcttttaaatgagtataatttggaagcttggatttaagaacctgaaaaggagagatgttcttcaaattgggtgtaggtgttctattttatgagatgtgtagcagtagaaacacacacattttaatacacaagggggatacaagattgaaacaagagagcacgagcaacatttaataaatgttgatgctttctttcaaccacagaattttattggggtctatgaatgcaagaatgataatgcatgatgccaagactattgaacaactcaacaaactgcaatttcttagcattatcagatctaacagcttaaatagtattttgatattgagttttaatgagctgaatgaagttaggaatggcagtttatgccttagccttagttttgataaaattaacccaagtatatctagaatggtcatcaacaatagtgatgaaatatttgtgtcccccaatagtaagagtattaaaaggtccctaaatatctatgtgtataagatcaaagcattctttagcaatattatgattagaaacaaaaggaaactttctttatttggtataatgacaaattgagcaatgaatgttaggacaagattgaccttgaaattgcaattatttattcaatgaattagttttaatacaagagggatgtcccaatctataatgccaaattgtatcaatatttattttggaatcagaaaacaaagaaaagatttggggactgattttctcagcaggctcctcaaggtagaataacttcccaagtctcctagccatcccaatctgatgtgtcttcaatgtgttctgaataacacaatagtcaaaataaaaaaatgaagacacaagctctggtttcaagcaaggatgaaacagataataaattgagatggaaatcagggacatacaagacatctttaaggacaagatcgggtgaaatcacaatggttcctaagcaagaaaccttaacagcatttccattgggtaaattaacataagaaaacttagaatcggcataagtattttgaaaaagggacaaattgcgacacacatagtgagtatcacatgtgtcaagaatccatttagaggagggtttagaaaggattttaccagagaattgtgagacagatagttggttggtctgttcattattctgttgttctgagccagcatattcatcaacctttgacattgagcaaatgtggccataaaatcatgctccatccctttgcactacctcatcattatattcataatatactcaatggacaatattcaatagtaatattgtgatatacttcttcttcattttatattttttttaggttttttttattaatctttaattttatcatcttaccaattcttatacaaagagccacatacaatataagtaaatttttattaatcgtaagtttttttatattattttattttaatttacgtaaccatctttttgtattatgaactattttattcatgttgtttaattatgataacattaactctatttttcattacactcctaagattaattattaaaaggttctaattatccactttctttttatttaaaaaaaaaaaagaaatttaatgaatcattcaagttttaaatatttataaatgcattcatttacttaaaatcatatttatatatacacatgaattcataaacttaaaattattttaactaacaacaatatattatttattaattatacatatatttattataattaattacatatttataaaattttcacactataatataatcattaattaaactattttttagataagttgagacataaaggagtaacatagtggtctaaaaattggtagaatgtacttttttttcctcatttttcttatttt

SEQ ID NO: 4352 - DNA, 1077 bp, Cannabis sativa
ctttgggatcctgattcgttgcctagtcgggtgttgaagcataaatattttcctcattcatctattttggcggctaatgattgaaatgggtcatctcatttatgatcgagtttgatttgggggcttgaacttttgcgtaaggggttgaggagaccgttggggatggaactagtattgttgtttttagagatccatggcttccaaggcctagaacatttcgtcccatcacttcgaggccagaggttaattggttggttcaagaatttattacaacgggtggtgtgtggaatattacggcgttatcacaggtgttcttgctgatggatgttaatgtcattcttggtatttctttggtaagtgagtgttgtggggatggttggtattggcactacaattcagatggttattattcaatgaggagtggatattcacggctttagactaggtgaatgagaataaggggtgttcaaccttggatctgagcttggtggaatggtgtttagaatttgaaggtgccacaaaaggttaaaatctttgtgtggtggatgtattatcgagcacttccatcgaactctcaacttattaaacgaaatgtactagttcagccgatttgtgcgaggtgtggggacgaggtggagactccggagcatgctttggtgttttgttagccattgattctcatctgggtttgtttggggatttggaggaagttggattatcatcggaatgggccttttattgagttgttggtgtggttgttcaacaaggtatcacaagatgctttttccttggttgctatggtgtaatggtgagtgtagtatgatcagaattctgtgttgtttgagaaaaaatagtctagattagaggtgcttgtggagctcgctgtagtagcgttggaggagtttcaaggggctggtgtacgggtgttggaggcgatggtgacttcgattgggggtgggaatgggatgggtggggcagtggtgggttcttccggcacaaggtctcttctcactgtcgtgtgatgcagtagtggtgtcaggaaatggttttgctggtcttgggggtgtgatctgtgat

SEQ ID NO: 4353 - DNA, 1174 bp, Cannabis sativa
gtaaaattaatatatatttttctcctttatcgtaatttaatttaattaattaattaattttagacaaattaaataaaagagtgcgtgttttgtttttcaaactacagcctccactaagctgtactacgcgtttcgtttcgcgtttccatttttatatttaaaaaaacgtcatttctataagttcttctttctctcttttctggttactatttttctttttaaaaatcccaactttgaatctaaacggactctgagtcgagttgagctgcgtagacatggccgagttgaactcgggctctctctttctcatcaccttcaacctcattcttctccttcttcttacttttatacccttttcgatctctcaaacgacgacggcagcggctcctcctcctcctccgccggccaacgaaacttgtaatggaatctacttatcgtacgcctacaccgacggcgagcgtatcccaccgaatctaaagaacgatcgatcacgtcagccttaccggtttgagtctacgttgactgtgctcaacaacgggcttgaggagctcaagtcgtggaaggtctttgttgggtttcagcacgatgagtacttggtctctgcttcgaatgctgttctcgctgatgggaatagtattcccggtggtgtgggtaatggaacggtttttgctggttttccgatgacggatctgaaaacagctattgagactgctggagacgagacccagatgagtgttcaggttaaattggttgggactcagttcggagttgcctcaccgagtgttcctctacccactaatatttctctcgttaatgacggctttgtttgtcctaaacccactatgcaaggtcagttcatttagcaagattttgactgttctttcaaaaattgatttttgagttttggggttttaatggtagttctgaaaatttgaatttgaattagggttagttaagggagaaaaataaaataaagaaattgagtaagcttaatgtgatgaaagcttttatatgtcattgtatttaggtattaaatacaatgaacaagtgttaaatctatgattttgagtagttcatttaattgttttgaaagtaggtgaacatagtcttgatttgaattttagacatttattttctgaattattgtgtgaggttgaccatgtcaacttctgtg

SEQ ID NO: 4354 - DNA, 793 bp, Cannabis sativa
acttgactaattgagcttaattttcaatatttctaacagaaaaaagaaatgcttacattttttcttttatttctcaagaacataaaacaatttatagacaaagactgaaaagtttacaaaattataaaccatgaggactgataagacaaaattgaagttgatcaataagttctctgtttctactccatatgttttaaatcacaggtaatagatcattaacaatgagtaaataccaacccatttttccaattgactaaaaatttagtctaagcaaactaaaaatgtcagaacaaacgaagctgaaagggaagtaagcacatgctataacagacgtaccttagagactacatgaaaagtgtcgagcaaaagctccaagacctctctggcggaagcagcatccgatctctgcttcaacccattcttcaaagccacaagggcgccctccacagagctcctgaactgttcgatcttctctctgagttccaccaatggagcccgcatacgcacgacggcagaatccacgtcaacaagcttggtgctaagattaacgaagtcagcataatcgcggttgatcaggtcgataagctcgtgattgagagatgacaagtggctgtggagctcggatcggagagtgtcgaagggaacgaaggttcgtaactcggatatataagactcagaatcaaaattgggagatagaaagagctcgggcttgaaccagaggggatgaccgtcgagcgggtctgcaaagaggtcattggcagatctaggtggtgatgggaccgtatccgccatt

SEQ ID NO: 4355 - DNA, 1471 bp, Cannabis sativa
gcgctaaggccgtgccatggcgccaacatagggttgctgctctccatcaacacaaacgaagccatgcttctttctcctgacttgattaggagtcttgagagggatgtttgtacgtatagacatcctttgtcattaacggtgtcgtttttgatctctttgaatattcttcggttgaccaaaaatctcatgatgcggtgaaggttatggggattgcagcttaaggctgatgataagtccaagagagagatggggcgtccatggctttcgatggtgtcagctattcccaactcaatggcacatttcactacagccatttctacgaacccgaatacatatttatagatatcgattcttgctcgctcttcttcttctttctcatttagtctccatgttagttcatcatgatgatctccttcttgtatttcatccatgataagtactttgtatgacttgtggagttttacattcaaggtatagttatatatatataggacatgtttgtataatatatattatgttggttttgttcccatatttttttataccttaattgtggatctagaggtgatagagtacttacaaaatatgatagtgtaatggtggaaatatatatattaaagtaaattaataatatatatttatatatatagtaattaaattcaataagtgctttttcactttttcagtgttttgagaacaatttttttttctttgagagggtatatatattcatttaaacaagatcatccaataattacaatattttgtattaactataaatcattatatatttcaatatgtatgctcagttttgaactcgtgaagaattgcatagagcgagaacaacttaccactacaccgcagtcaaacacgatttatatgtatatatatatatattagaacacaaaaatgtcaggggggtcagctgcccctgccccatgcatttgatagtttaggtaataaatattagtatattctttttattttcaattaaacaacaacccaaattataattttttttctctaaacttttcaaactatttataattctctttaatttattgaaattgttagatttaaagagtttcgtctaatttattaacagaaacctaacattgatagaagtttaggaacacattttggtatatagacaattatcacatcagtaaaatttaacgaaatttgacacaagtttttgaatccaataatctcaatataacctaaaaaaaacttttagagacacgatttgatccatgtcaaatttcaagataaaaatcatagttaaccttaaatatgaaattatttattatttaaactttatatgataattactctatatataagatataagacgatgacatattattttaatattacttcaaatgctaaaaagtactaatggtactaagcatcctcctacgtgtcacaatattttaaactaaaattatagagctttaccccaaagggagcc

SEQ ID NO: 4356 - DNA, 2383 bp, Cannabis sativa
attataagacgttatttttaaaaagtgggcaagacgttataaggagtattgttattaaatatcattggtgtccaacattttttaaaagtgataccttgatattaatcatatttagtggtatttcttaaaaaaaattatattaaattatatgagactaatagtaataagatgatattagccactactagtgtcttttcttatttttcatgttgtaagcaccatgaatatatacttagtacaatgatattttatgattgattaatgatattttataaaaattattcatcacattatataaaatctgaaatttaattatataaataataataaagggtgtcttttaccatttctcctcttctacccatagttctgtcacaactcacaaaaatcaatggtggtaatggtatatggcatatatttgctacccaaaagtaccacatatgtatatttagtcatacacaataatagagaataaataatataaaatatatatctagaaattaagaaaattccagccttcacgacctgggaattgaaacttgattgtccactaagaaagaaaaagtgtaattccacattgaattaacaaacctcacattagtcatacactcataagatacattagttagttagtacgacattattacatgtacaaaataatcaaacattgatctttgaaaaatcccacacaactaatattaatcctaaccactctctccccattcccttttgaacaaactagactcaactacacttataaatattattacatatccaacacataaacaaacaaatatatacactaatactaaaaatggagaagaagagtgattccaccacttctttgggtgggctaggaggcctcgatttatcagaggccttctttaagcccattcagaacgctacactcctttctaccaccaaaaacaacatcaaaatctcaattattggagctggcaatgttggcatggccatagcccaaaccatcctcacccaagacctagctgacgagcttgtcttggttgacaccaatccagacaagctccgaggtgagatgctagacctgcagcacgctgcagccttcctacctcgaaccaagattctctcttcaaccgactactccatcacaagcggctctgatctttgcatagtcactgcaggtgctcgccagatccctgacgagtctagattgaatctactccataggaacatatctttgttccgacacatcatacccccgctggccaaattctcacccgaaacaatcctcctaatcgtctccaaccccgtcgatgttctaacatacgcctcttggaaattatcagggttcccaccaaatcgcgtgattggttcgggcacgaatctcgactcatcaagattcagattcctcatagctgatcatctagatgttaacgctcaagatgtacaggtgatgagattaatttgtttattttttgataaaaaatgtcccacatcgaaaacatgtgttgatacttctttcttgtaggcttatataataggagagcatggagatggctctgttgcattgtggtcgagcataagcgtaggaggagtaccaattttgaagctcttagaaaaggaacaaattagttacgaaaaggaaactttggagaatattcacaaacaagtgattgaaagtgcttatgaggttataaatcttaaagagtacacttcttgggcaataggatactctgtggctaatcttgctcgaaccatactaagagaacagaggaaaattcaccctgtttcggtgctcgccacggggctccacggcattggggaagaagtgttcttgagcttgccggctttgttgggcagaggtggtgtgttgggtgtcactaatgtgcatctgtctgaggaagaggagtacaagcttagggaatctgctgaaacacttgtcaaagttcagtctctacttggaatatgaacatggttttctgttttttattatatattataatgttgttgaaatttttttatgatgaataatattgcttgatataatttaataaaagttagaatataatcattatattatgatcacattttcgcagtaccaaaaggatatttgagcaaacaaatagaaattaacaaattgaaaaagaacatagcatatataagaaattataataaagtaatgaagaaaatgtgtaacactgtcttaactaaattaatctataaaccaattgatgatgatctctcgatctatatatatatgtgtgtgtgtatatatatattttttaattaagctttaatttttattttcttgaacaataattaaactttaacgttctgggtcacaaacagttagtattgttaatttgaattttcttttactttatggtgtccaataatactataa

SEQ ID NO: 4357 - DNA, 862 bp, Cannabis sativa
tatgtgtgtgtgtggcggggggatctgtttatattttctttgcggtataatttcccggctcttttctttcagagcatatgttgtgtccttaagaaaatgtaactggttcaaaagtgtcactatgttctttatttgtttaaacacttagtttaggacaagataatgatcacagtaccattactgtacagttgagaagaaccatttatatccatcagctccttccttgactcgttacaaggattcatctataccaataatgaagaaaaagctgctggagtctgttgttttggatgacaatttgatcaacaagctgaatcacttgacagtatccaaactttgtgtcagattaaacactttaaaagtaagtgcctttcatataaactagttctaaataaaccttaaaattttgatttgatatttttattttaaaatattagatcatattatcaataacttatctcttcagtattgaacctaatttcttgtgcatgattcctcaatgataagatcatttttcttagatgaactagttaatttaattgcttgcaatgatatatcattcatagctgcaatgaaacacatattttcaattattttttctatgataaaaaggtaaagctggtattttctgtgcaatttgtcttttatgtagagcataagctgcagtacaagtttttgggtagcatttcccctaaatattattgactaatttgctttgttgtcctatgcagtatattgagaaacaaatttttatacttgaagatggcattaggaaatcctgggcgcttgttagaaagcctaatgatggaaaaagtggtgagtttatgactgttttcaaatatggattctagctgttagagtt

SEQ ID NO: 4358 - DNA, 794 bp, Cannabis sativa
tgtaattaagttatattataagtacaaatgtgtaaagtacataaaattatttataaaagagatatataagcacgtgacacactaaattttttttaattagcattatttattttctccttaatttattcatttttttaattttttattaataacttcataaatattaattgatataaaatatatatttttatttattttttccacagttctatcttttttttttaattttttattaattattttaaaagataataactcacacatttttgttattttttttcaaacaacacaaattttttgaaaattatatgatacttttttaacatttatttaattaaagatattttaaaaaaataatcatttttttaatcacttactaaactctatatatatcttcttcctctaatgatgaatattttttttcacagacataaatactcatacaaatacttaaaatataaaaattagaatttgtaaaatgtatgcagatccgatatgatttttattaataagtagatcattaagaatctatatatatatgtatataaagttcttaaaaatgtgttaatgtgttgtttttagatcttaaaaatgtgttaatgaaaaaatttaaatcttaagatgaaatttaagattaagattgaaatttaaaaagaaaataatgacaactacagtgaaatataataattacaatataaatgaaatacggtaataacatattaacttacaagagatacaatgataacaataaatttaaatgaatggagtataaaaatagtgtattattagaaaaa

SEQ ID NO: 4359 - DNA, 647 bp, Cannabis sativa
ttacctcccattaaacaagacatcaaaccagcatgcgagtccatgcactctagcacccacagaggctatgaatcgcagtggtatgtcaatttcatacaaatcctcttcctgcaatgatgaattaaatggtatgtatttttattttatttcatttttataacggatataccaacaaacaacataaacaaaagaataaaatcctaagtcagatgaaaatcttggtaaaaatgaggaggtgcaattcataagtaatactaataccttgactttagtgaagtctatcaaatgagatattgaaggagctactaacaatcttggatcaaaagcatctactacaggctgtacaaaaacccacaaaaaatagaagctttagcaagacagaaataatcatgaagcaaggaaaaacaatgtctagagctaacaagtttgaaaaaatgctgatcaatgttctccagccctaataacaagcacaagaaagagattcccagaagaagtacaattttatcccggtatttgatcagtctaaggtgcatcacatttgatttagttcatactagggagttaaatttgattatctcacccaaatataagtagatgaacaccaatatttgatttaaagcattaatattttaagaatctaattcaag

SEQ ID NO: 4360 - DNA, 1567 bp, Cannabis sativa
taaaattttgatgttacatttttttaatctatgttgagaattatatatggctaaatattttactatttattttatgtgggataatgtctataatattcccccttaagatggtggctattttttttgctcaccaatcttgaaccgtatcagagtgggcatggtcactatttgtataggtgcgaatcagataagatcacttgcccgcaagggatatgactctaataccatattaagaatcatggaggtgatgagtggagtagcccatattcttatatataattcaatattctacaatttattccatgtaggacaatgtctacaataatttatttttttaattataagtaaaatcgtgtagattttaatgtgcattagtgctacaatccttattgtaattaggtaactacctgccattttgtatctcattcttattttattatcaacactatattcagaattatatttttcagtaaatttataaaaaaaaaaatcgtattataaataggaaagaagaaaaacaatttgtaaatcttcaatagattatggggtttttagacaatgtattgaaatttttaatttttttacttttttactgtgaggcggaattttttttgaaaaataatatgtttttttttttaaaaatactgtgttaagttttctatgttgtttcacggttgttttttaattgttctattgttattttaattgttctgttttgttgttttacggttattttataaaaagataatatttttgtaaaaaattccatgtggcagtaaaattgtaaacttttgctcaaaatttaatacttttgtaaaaattccatagattattgggtatatatctctgggtgggctctacaatattgatccaacttccaagcccagcccacttaacatggatccgtttccaactcatcacatccaaattcaaaccttatccaattttaggaaaccaatagaaaattgccacttaagcaccaagtatctgagtgtatccaaatctaccaacaccaagccacaaattgttcatgtggctgctgtgaaagttttgcttactcactacttttataattcatttcatcattttcactaaattatatgctttctttttcttccaagaataaaactaaaaattaggaaatttgtcctttaattttggctaaaaaaaatggcaaccacagttgctacttctctccctcaattcaatgggctcagaccccagatctcaactactcctgtcagaactctggttagtgcttctctcaagtttttaccatatatataaatatatgagtaggtgttgatttgaaaaggtttatacaattttcaaaatggttcttgaagatggtagtttttggtcaaaaaggaaaaataaaatctttttatttttattttttgtaattaaataatttataatgctttgattattagcataaatatgatcattttgtaattagtattatttttacttgtgcaggctgcagttcagccaatgaaacgtaagggcaagggtgctttgggtgctcgatgtgatttcattggttctccaacaaatttggtaaaaa

SEQ ID NO: 4361 - DNA, 1637 bp, Cannabis sativa
tagggcataaaacccaacatcaatgccatgggacaagagattgtgtctttgaaggaaaatagggcttggatcatagtcaagaaacaagttggataaagggtgattggatgcagatgggtttacaagcataaagaagacataccaggtgtggaggaagcaagatgaaaggctagacttgtagctagagattttgctcaaagggagggattagattataatgaaatcttttctctagtggtcaaacacacctcaataagattgttatttagcttagttattttagaagatcttaagttggagaaattagatgtcagaacaactttcttacatggtgacagaagaacaaatcttcatgaaacagacaaaaggctttgaaaaaaaaaaggcaaagaggatcatgtatgtctactcaagagatctctctatggtctgaaacaatcacccaagcagtggtacaaaaggtttgatgattttgtacttaaaaatggtttcaagaggagcttttatgacagttgtgtttatgtatagaaaacacattctgttagtgtctacttgcttttgtgtgttgatgatatgcttatagcaagcaaaagcatgaatgagatagacaatgtgaagaaaactttgagcaaggaatttgagatgaaggaccgtggctcagctaagagaattttaggcatagaaatttatagggacaaaaaacacagggtgctgaagttatctcaaggaagctacaccactaaaattcttaagaagttttggttttatgatgttaaactagtctctactgcttcatctcaacaaataaaactctctagctcacaaactccatcaactgaaagagattagtttgatggagaaaattccatacactagcatagttggaagtatcatgtatatcttatggtctgtacaagaccagatctatgctatagtgtgagtagagtgagcaaatttatgggaaaacctagtctagaacattggaatgctacaaaattgatacttaggtatctcagaggtactatagatgttggtctcatatatggcaaaagtaaagaaaataccaatgtggttggatttgtagactcgaattatgctagtgatcatatagacacaaagaggtctcaaacagggtatgtattttagctaaatcaatgcacaatcagttggaaatcaaatctctaaacagttgtgttgcattgtctacaatagaggctgaatatatagcatgtacagaagtagtcaaagaggctctatggctcaaaggaattaccaggaaaatggaaatagatcaaaggagtatacaggttcattgtgatagccagagtgttttacacttaataaaaaattaggtattccatgaaaggaccaaacatatcgatgtgaggttacactttattagggacattcttgcaagtgatagagtgaagttgttcaaggtttctatagaagacaatgttgcagacatgttgacaaaatctcttcctgcaacaaaatttgatcactgcctctgcccactgaatattgatagaagattgtgtgcctaaatcttgtaattacaaaggtaaagtggagaattgtatttgtatgcctttgcaattagtctaggatgacacttactataaactgtcaaagat

SEQ ID NO: 4362 - DNA, 893 bp, Cannabis sativa
tttgcctttgttttctccaagtcctcccctctaggggttcgagagcatatcaagagcatgcagagttttagggagaagaaaaggcatgataggttcttaggtaatcctattctcttcttcggaagtaagaagaatttcatgtacattaaagaaaatctagagacccagttagaagggtggcaatccaaactcttaccccaacgtactcaatgtctactcatttgatcccaaaaagtattttccttgagatggacaagatggtgcacaaattttggtggttgggagtgtcgtataagaatagatatcttgccattgctttttgggattctttgtgttcccaaagactggggggtcttatttcaaacgacttgaagatattaatcttgccttaatctccaagttgggttggaaacttgcaagtggggatcggacttttgtggtgtcaattattttgaggaaagtgtttcaaaagggatagctcctttcggtcaatcccttggtattttagcctcctttggtgctaaggatattttatcctctagagatctcatatggaatgaacatgttacttggtaatggaaaatcgatggatatttggcacttgctttggatattgtggttggagtgggctctctatagagaaaccttcaatccaagagtggaatttagtaaatgttatcttgcaaactatcttctagataagaatggggatggaactttggtcatttggggagagggtttcttcctagattggtgggggcgattgatcttactgttagattgttgttgaattcgaaggatgagttgatttggaaagattaagcctctttttttttctttgttgtctagtgttttaagttgtatctctgatgtggaattatgctggatttcta

SEQ ID NO: 4363 - DNA, 1017 bp, Cannabis sativa
tggggttcatgtttcccagaaagaccattcctctcaacacccatgccatgtagagggagagataagtaaataaggctttgagggagtatttggaagcggagaaggtgttggtatgcagacgagctactatgctctcggccataaggaaagctgaaatctcagatggccttcatactttaaccccagctaggcctataggggaagtggagggcttagggaagtatttagctcccaaggtggggagtgaagttgcgccatttgtaggtgaacttttggaccaggtggccagaaatgcctccaaactacccttgggcatttgggcatcgtgtagtagtgtcaacaactttgccttagtccattttgctaagcaacaggcggttggggtaaggctctaaaagattttctttttctttcttgttttttattttgaccttgatcatggtattccgccccttttttcttatctgcctattacattaggtggatttgttggcggagagggctgctggtgaagctggtatactgattatggagctggagcaggccagggcgaacaactgcgacctgggcaatgctaaggacacccttctggccgaacttactaaggccaaacatcaaattaaggacttgaagaaggaaatccagttgttggaaattaactatgctcaatagactctcctcatacggggtatgagggtcctccatgacatttatagggagactgtggagcgaatgtctagagtagaatattccaaatcgtctggtagcatccatcactaaacccccagaacatgacgcagacttcctttgttaatattttttttattgtttattgtttttcttacatttctccctgtcattaatttttttttatttgcagagacaattaacatggccctagcggcagggactggttgtaatagcagtaggatttttactatttctttttagagctttatttctaatttgttaggctttttaagggctggttgaatcttaaagtacattgttccaatg

SEQ ID NO: 4364 - DNA, 760 bp, Cannabis sativa
taggagccccgccactcactggaaagacgctaatagtacctaattgagaaatactaaaagacgctaatagtaccaaatacctttttatgtatttatatcactattggtccaactaagtatcgggtcccacagagtttaatataataacttttagaaagtatcgctagctaatatctagaggtgctaagtaccactggtgtctaattacaatggtcttcctaattatagatgttgtctccgcacagtacttatattttaatgtagtaattaataacaaatatgaacatattagaggatgtcatttactgttttttctttagaaatgatgaattgagataattatccaataggagatatgtaaagttattttataatttgtttcttgtaaaaacttttctaccatatgggaagtagctagggttttttattgggaaatttacacttagtattattttcgtaattttttacaattatattgttgcacgtgtttattacttttttactactctaatttatactcggtatactatgttttgttgaaaaaaaaattatttcattttaatcacacgcggtagtgcaaaattttaatctaatctttttaatatatttaacttttaaaaaaaaatttgatttgattgttgttataacttttgtgatatttttttttatttaaaattgatgatgaaaatatcacacccaaaacatatactatctcatttcaacttttcatcgtatttctcattcttctctctctctctct

SEQ ID NO: 4365 - DNA, 2039 bp, Cannabis sativa
atgtacaatgggaatgcatggattttttaaggtaaagcgaggcttgagttaaggagatctaatgtaacctatactttttgtaatgggtatggaatacatttcctgaattatgcaaggaattagggaaaagaaagtattcagcttcattggagatgtggtgagttgatgcttaactacttatgttttttttggatgacgtccttttattttcgtaaaggatatttcaagagcatttatttttttctacaaggccttcaactattctcgagtacatttggtttgcacctcaacaaagtaaaatttgcaatatattgaagaagagtagaagaacgagagatccagtgcatccttgatgcttcgggattcagcagaaagtcagttcctttcaaatatttatgaatccccatttgtgccaagagaatctcacctaaagaatgcagtatattagtgcaaatgttagtgagaattagacattggagtttgagaaatatgtcttttgcaagccgagcggttctaatcatctagctcatcactcctactggtgccattcttcaaaagattttatagaaaagtcaagaagattttacaggctcgggtagtatatcttcggactctgtgtgtaggtcgaagagtgattatggtattggcttaaaaatatatgtttgaatagaatactgctgccatggtaatgggcagctgcagctaaagaagataatttatgagttaaataggtacacaatgtgtatttaaaagatgagaattaatgcgaatattaagtctcgacacaaagctcccgatattgaaaaaaggttgtagagatcaaggataaggtgagaaatctttttgatctatccaaattttcaatggagaaatttcaatttgctcaaggttgcaaagttttttgtccaacacagaatagagtgaattggagcaaagaagtttggggtagactcaatactcccaaataaaattttactctttagatggccattcaaaacaaactgagaacaaaagaaaggttgcattatttcaatataataggtgatgatacttgttttctttgtaatttgcatgaataaacagtagacaacctattcttgggatgttattttagcaacgattgcctccaacagatgctatcttggctgggatggagagcttgttgcacttcccttcaaagtctggttagatggatagaaagagccaaacaaaaaaaggttcaagaagtgggtgtatacggcacccatagtagcctttgtgtatcatatttggtgtggccgaaatgaaaatttgtggtcttctacaattgaaagactgaagttggctgctttaaaagtatgaggatccattaaaaatagaattacttgtatttgggaaaaacatgtaacccaaaagatacggattggtttgtgtcactgtaaatggcacaagatcatagcttgtaaaaaaaaattctagtttaggtatattattggaagatgttgtttgattgtaaatgatattaatttggagtaataaaatattgctagttcaccaaaacataaaaaaatatactcattattaattatatgtctaattaaattatagtcataccaaaaagttataataacaaatacacattaaacactaattttttataaaattacaactcaaatagtgtataccaataaactaaaatattacaaggtaaaaaagaacactcaaattaaaccacaataatttttagctatatgttttccaacttgaatttgtacacatgcataggtttccaactttaaagttttggcaccgttcctccttactcatataatatttttgaaatataagattttgtaaaataaaaaaaaatcaacttatataattttctcataagtactcactatactactataaaaatagtttttccacacatttttaaatagttgtttaaagtattcccgtcaatttctataaccctcgcctatacgacaatagcaaataggaaaaattggcaacggttaaaaccgtcgctaatgaggacttctcgacggtttaaaacc

SEQ ID NO: 4366 - DNA, 707 bp, Cannabis sativa
tttttaattagtaattttgattatttattatcaaataaaatgaattattgttacagggtttgtttcaaattgtatctctgacatgttcaaccaaagctggtgaagaagtaactgtgaatgttacattgtctgattatgagtctacttcaaagttttctcgagtttttaggggagttgcacaactgctaattactgctaaaactcctactcaactggtgattgattttgattaattattgttcatttatttgaatcctctgtttactaatttatgatccaattaagtaactatattatgatgttataatgtgtcagatcattgctaatggtgatgatgagaatggtaagcactcatcaacaacagtgtcctcccctatggcaacaccagcaccctcatgcacacgacaacaagcacccgctccctcacttgcatgtgcaacagcacctgaattggcagctgcacgagcaccagtgcaagcacctgcattagcaccagtgccagcagcagcacaagtacaaacgcctgcattagcaccagcgtcggcccctgcattagcaccagcgccaacgcctgcattagcaccagcgcccgcgcctgcattaacaccagtgccagaagcagcacaagtggcacctgctttagcacgagcgccagcacctgaattagcaccagtgccagcagtagcacaagtagcacctgcaataga

SEQ ID NO: 4367 - DNA, 1074 bp, Cannabis sativa
tcacatattttggtcctaaaattgtttcccgtaccgccggagtgaccgccaccgccgccgcccccaccaccacctccgccgtgatggttcttcatgtgatttgcagccatagatgacccgacatttacgatgagctcgtgaaccattgtactagcttgcttaatctggtcgaaggttccctcgagctcaatattcctcaagtgaggatctgtttcgtgctctcttattgcaagttttgctcctgtggctcggcatatttgttttgagttcactccatttttcccgataatggctccggcaagagaagaatcgacactaattttggctgtggatgataatccgaaactggctgcaggaccgtgagaagatggaggcggttccatcctaccacccatccttcctccgcggtgatcatcgtatgatggtaatgttggcttgccaagctcccattccccgtgagcgaaatggcatttttcaccgaatttacagccttctcctgagctaaacttgttgcacaaacgggtcttgacagctggaggagaggcgccatctgggtaagatggtggaactacagggttcctattgggtggagggagggctgggctgccaccagcattgattagttgtgacacaaccttcaaaccgccaggaacgtaatgcaagaaatggcaattttcaccaaaagggcacccggaagtactgcatagaagtattaatcaaatgtgtcagttcaaaagttgcaaataaataaaagtgagaaatgaccgatttggaagaaaaaaaaaaataagaaaatctatgtaatttgtatcatctctattatctgccaaaaacaagaaaattgaaactatgaatctgttagatatcatgaggtccttttatttgaagagtttataatcttaatccatataaataaatagggcatataaacaaaacagcaggagtttaataaatgttaaaaggactggttgattaacttgtacaactttattaaatgttttcttgaaccccatgcagccaagtaaaaaattagtacaagtgaaacagttttgttgctggtaatccaaacgaaca

SEQ ID NO: 4368 - DNA, 982 bp, Cannabis sativa
cacaaaaggggctacatcccttaagtgaccctgaacacatgccttggcacaactcgcccagcccgctaaagaatcagccactttgttctcagcccgaggaaaataagagaagattacaagatcaaaacacttacaaagacttagacaggattcaaaaacagggtaagtgccccaagcaaacggcaagcagcctctcttgatggccatgattgccaccttcgagtccgattggacttggatctttatgatacttctctcttgagccacttgcataggtaacaactgtaaaccagtttctggggttcttgaaggggatcttcttgcaataacataattgacttttacatatatatatatgtacaatctttagaaatatatatatgaatgctattgaaggaatttagacaatgggaaatttgattttttatgtatattttaaggtaaaattagttagaaaaagtaaaagtataggtcattagtaaagtgtgtcaacatttagttatatcccataatacccctcacattcaaaaataaaattacaaattcaaactgtctgcattctctatttccctctcgcgcatcctcttctcagacccaatcgacccacggcatacccacaacgaatctcaatcgacccacgacaaatcccatcctcgaacctaccctacccacgactctcggcgcacagaccaccaaaatgagaccctaccgacgaccctcggcgcatggaccacaactatgaaaaatgtcaaaggtgagttcgtattatgttttttagttttttattggtttttttttttttttttgtgattttactattacagattgaatgttgctatgtgtatatatagcagaatctatgttttgttagatttaggggtttgaattgtcagatctgtgatttgggcaagaacctggttttcaacccaggaccgatgcacacccgatgcacatccaatgtaggtccaataggggccgatgg

SEQ ID NO: 4369 - DNA, 768 bp, Cannabis sativa
tgaaaaattatttgaccaatattagattaggatatcaatttaatttatttacaaaatacatggtctaaattattattaaaaaaaaatactagaacgagttagtgactatacgacacatgcactgtaagagaaatcgtaattataaatacttgacgtgcaccccaaactatattgtagataatagatatttactatagttccacatttttaagaaaaacacttattataattctgtatcatttcaaagattatctaactacaaaatattattctttcaccatttttatggctactcaaatattcatcatattggcttaacaactaagactctcacgagtcttagacaaaggctgcatggaagcaaaataatataaataaataaaaagcaagagaaacaaatttgagacataaatttatacatatatatacataaagcatataatcaaagtgtaaagctttgagtggaaactttatgaggtagctaaagtagtgttcttttggctttctttaagagtgcgctatccttttttaagttaaaggcaattattccattcaactttatcattttctttaccttcaactcattcttgtttaattcctcatttcttccaaatgtctcaataatcaacaagacatgcacaaaacaaaatactcagcactagctaaatcttttctgtacagagtggaccttccaccaatccctaaacaccatgtgtcattacctaagacacctactctcttactgctcgtttggaacgtcgtattaag

SEQ ID NO: 4370 - DNA, 661 bp, Cannabis sativa
tatatatatattccaaagattaaattttgtgtcgtgggtggttgttgcttaaagattgagtaacataattaaaaaaaaaatattaatactaagaaattaaaatactaatgtatgattgagtagaaaaagatatttcaacacaattaattttttggtcatgtgtataatattttaagatactatttagtctcaagaagaggatcttcatgaattcttgatacatatatatatagtataataattaattttatttaaaaaattgtcatcattgatctttttctttttcttcttttttttaatatattaataaatgaataataattcattcttattttcatttattagtatttgtcttcatttaaataaagagccggcctctcaatagggaagacttgaagaattggttaaattaatgctatattactctttaacaaaataagcaatttaaagtatttatttatttatttatttattattataattatggataaaacaattgaaaggaatggttattaatccatcaaaattggtttttactcaaatcatttttttaattctaacgttttaaagtactattaaacaaataaatgtaataaaaatgaattttattttatttcattaccttaattatatgttcatagtttagtgattccacgtttct

SEQ ID NO: 4371 - DNA, 945 bp, Cannabis sativa
caggacgtaacatcatacattcgtcagttacgcaccttctactagtggctggctaataataaacaaccaagcttcaagttcttttcaattttttttttatttttttttgaatgggaatggataattttattagcaaaccaaatttgcaattacaaaattatgatcagtccaataacaagagccaaacagcgggtggtgggtggccttgttagcagattgcttaacacgacaaatagtaacattaatcaaagaagataataaaactttacaatcttgtacaataatcccaaataacgatggcatatccatttgactttgcaaagcttgaatagcagtgaggcagtccgtctcaataatgatatttaacaagttggacgcctttatccagcttaacgcttcaaacgttgcgccatccacattaatcttgatcataccttctgctggttttgtccaaatttcgttgctgctgctatagtttgcagcggttaaaagcgacagctttaggcgaactttcattgaccaagagcttgatgtgccttagaaacaacaacttctgcatctgagcttgtacgattattccaaacaagactatttcgagctttccaaatggactaactgaccatcaatacttcttcaattacctctcctttgtgccgagaccagattacagaaaaacagtcaaagaaactggtaactgtcgaagggggaagagtcactgctgatctattccagcaagatttcgaaaaaagggcattcaaggaacaagtggaaggtggtttcagccgcaatatcgcaaaacaaacaatgattctgaactagaacgtgcttaatctgaagttgaacacaggttgccaagcaatctgtcaaagtgcgccaagcaaaatggagatctttaggtggaaccttaatcttccaaaactctttcacatattcgaaccatcatca

SEQ ID NO: 4372 - DNA, 1891 bp, Cannabis sativa
tgcctatatgtttatgcaattaaactatctaactataacgtggcgtttgattggaggtaatgaaatagaaaggaaataatttttactccattcttttgtttagttgtattttaaagtgttggaatatcattctaatggaatgacttttccatcattttagtagaatgactattcctttttgaagtggaaggaaagatcattctattctaattaagatgaggaaaaatttaataatttttttatcaatttatttttttatgcattttaaatttgatttgatttcattcctattcatagtttctcattcctttcaaccaaacgctacctaaatgtataattggtatattttttttaccatcaaatatttgtgttattgtcagataaattgaaaatgccttcattggctcaataacttgggtccaaaataatcattgatttggcttttgttcgtttttaaaacacatagtggataaaattatgaatcataacatgtgttcttagttcttcattttattttatttttttggtttttaacctagatctagaagttcactttctaccaatcaaagtacatgtattgctctccatgtctttccttttgcattaccctgataatattgtaaattgggattctcactattcttaattcattattatttgtgtatgttttctcttctctgaaggaactccatgaagttaagaggagaactgctgctcttcagatgcaacaatttgttggggaagaaaagaatgatttactggattatttaagatcactacaaccagaaaaggtatcactagtttgttttatttcaatccaatctttaattgagtttagtatatcttcaattgctgtcttcatctagtggatgctgttgtactcatcaatctagtaattgttgtaaattcaatttatgtattgtgacccataattaatatggacgtagaaagtagaaaatctttgttaatttgagtgttgaatgttcttagttcatcttgtgagaattttgacctctctaacagaagtttttgttttgtcaaattccttatttatgtagaagcatttagaagttagtaggttacaaaataagatcataccccatttctcctcacagttgtttcatcttcatccttgaatgcatgataatacatttaattgaagaaaacacaaaggctaactttaattagccctccgtcgttcttcatatccaccagtcgcatcagtgttatgtacaacgaattttattgaataaagttctaatgccgcctgtatccctccatctccaccggtctgtccgtgctagtatgtatcttgacatttttttccttactattttttagtctaatttatgacactggtttataggaatgaggtgtggcttttggtttactgttggactgctttgtgcaaattatatcaggttacagcaacttctactttttaatgagatttgcatggttgtttcacaatatttatcctcataaattatctcttggatataaagttttgaaatccttgatgtgtttgccacttacagtatgttaaatttctagttatgcttaatttgctttgcatggtcttcaatttttctcaaatactgacatagatcttctgtctacacaggtggcggagttatcggagcctacatcccctgaattgaaagaaacaatctactctgttgtgcatggtcttctcgcaacgctttctcctagaatgcattccaaggcgcctcctgtttcagagaattcctcaacaggaacagcaaatgttgaaaatggagattgtgctgaaattgtggaaaatacttccattcaatttcagccccttatttcattgactcgcgattatctggcccgactcctgttctggttaggccagctccttttgcta

SEQ ID NO: 4373 - DNA, 1950 bp, Cannabis sativa
tttgataaaaactgggctccttccaaacaaggaactccttctcctcgtgcccatcttactgaagtggatatgccccatgaatctcaggtatattcttctgctatgttacctgattttggtgatgaccatgtttggtttgctgatacaggcgccaatgctcatgtctccactggttttgaacctttggaatccaccactacctatactgggtctgaaactctcactgtaggagatggtaagcaactctttatttctcacataggattggccattttaccttcttatcattctcctgatattcatcttaattctgttcttaaagtccctgccatcaaaaagaacctagttagtgtgtcaaaactcactaatgataatgatatatttcttgagtttcacaagaattgttgttttgtcaaggacaagtcaactggggcagttcttctgaaaggacctgttaaacatggcttgtatgtgcttggtgaatctaggacctctccaaacattctgcagtgtcatcttgccaccacatcctctttgtctgtatgtagtagtactcctagtgaatttcccaattgtaatgtcactgctcaaacagtgcctcattgtaattcacatttagacattaataaagagttttcttcttcttatcatcctatttgcactgactatgctcttgtgtctactgttaataatgatgtcaatgtttggcatcaaaaattaggccatcctaatgttgttgttcttggcagaatgctaaaaaaaattccccatacaggtaccttaaatacttgcaattttgtgttgcttgtcaaaaagggaaaagtcacaaactaccatacgcagtgtcttctcgtcatgctacacagccccttgaactcattcaaactgacttatggggtccatctcatgagtcatctaaggatggtttcaagtactatgttcactttatggatgatcacactagatacacttggatctttcccttaaccctcaaatcccaagactttgatgttttcctaacgtatcaaagtatggtggaaaaacaactcaatctccctattaaatctgctcaagctgactggggtggggaatatagaccttttgctaggttcttaagggatcaaggcataagcttccaacatccatgtcctcatgaccatgaacaaaatggaagagctgaaagaaaacaacggcatataactgaaacaggcttaacctttcttgctaagtctagtttatctttggcttattggtggtatgcatttcaaagtgttgtgtttacaattaataggatgcctactgttgttcttgactataaaacaccttatgagtgcttgtttggttcactccctgattacaaactattaaaacgtttcggttgtgcctgctatcctcacttgagaccatacagaagtcacaaacttgactacagattcaaacaatgccttttccttggttactcacctcatcataaaggctacatttgtgaaaattctcaagggcagatctatattgcacgaaatgttgtttttcatgaacaacattttcctgcttacactcaaccgcatcacctcaggtacaacattcttcatcatttaatttccctactgctactttctcttttccagttggtaattcttctactaatacatcttctgggtttgttgctgcatcacactcaccttcaccttctgagctacctaccactgaacctgccctaccagaaaatgcccgacctgctacttcacccattttaccacatatcccacaaccgacacctattatccactcattcccagatattatccaatccccaaacacccgaattaccccaccagtaaccacaatatcaccatctgcaccagcaaacctaaatccaaagtcagtacctgaaattcccaatgcctcacctacacctaacacagaaactatatcagctgctcctacaca

SEQ ID NO: 4374 - DNA, 668 bp, Cannabis sativa
cattgactactggaaataggtacgtaccaccatggagcattgtcttcccagtcctagatccactcttgattgtattaacataaccgctcatagctcgatatacttcacgaacaatcaattccattctctggcaaaaaccacaccatttattgctaaaaaggaccaacacatccttattccaagcatcagagtcagattgattacatccacgaaccagctcagaaaaagtattgcttgttactcgaggtatagaatccacctcatggaaatctgtattgacaaatggtggttgcatggcttcccttgggctatgaagaacagattcagattgactatatggaagaagacttccattgagaaacctagtgagaaaatcagccattgaagaatagtttaaatcgttctcctctggaaagacataatgctgttctttagaaggatcaacaattaccaggcctggaatcttagattcaccagtcaaagtttgaagtagcctataattaccatcagaaaagagaaaagatcctttgaagcctgaaaattgaggctgttggtgctctgacatgtctacttgtaaggaactggcatctgcattgtttacaccttcatcaacatcaagtttatgatctgggatgagtttctcagactctacagggagctgttcatta

SEQ ID NO: 4375 - DNA, 1050 bp, Cannabis sativa
gctgagtcaaattgaagaaacgggcaattggagcacgagacagcgactgctagggctgcttgcaacgatgcccctcctaactaacttgacacatcgactaggcgacctcagggaagacctagaggctcgaggaccagaagacatgggaaaactcctaggggtgataattttaaaaatcccacgaatcctcagaatgatcaacctgggaacacgagggatatcccagtggatgaagagaacccccaaaatccaagaaacactggcaatagagaaactcaacctaacacccaggaattttctgtggaaatacaaaccataggaatgtataatctgaaaacccataatcatcttacatgaacgtggatgccagacaaaaatgacttggggatcaagggttcgctcaggacgatgtgaggggtgtaggcaatcgacatgtgataggtcaaccacgacattcgcgaaggccaatccaaaacgatagagacaacacatatacctacttaagtagaggacatgtgtcaaatctattttggagacaaaggccagtgtgataaaaaccccaggaaataggctcaagcactgataccagtgggtcgagatcaaggactcatgagcagagcagatcaactagaacccatgcacgtgaaggatgaacatggtgtggggcaggtacacgtttccactatcaagatgatcaagaaagcataagtaattctcagaggtatcaatctgagagttactctataatgaggtcaattagcaattacgaacgaagacatgaaaggcgacacgaccctgatctacgtgaacatttaaaccgtagataactggacttatgcgagcacttgaatcgtaacgttccagatctttgagactagttgaatcagattccaggtcgccaacaacaagtcgagcagcctcccatggatccaattcaactaagagtaattttgtaatgccctaatctataggaacaccacatgtgtatgtttataaactagtttatgataacaaactagcaattttgataaaatgtgatttaataaaatt

SEQ ID NO: 4376 - DNA, 1170 bp, Cannabis sativa
ctcctagggagtagcattgtccatgcccaataataatgaatggatattaaaataaaattgatcacaggtactcgacttgtatatgattaatggcatgaactccatattctgatttgggcaaccatattttctataaggctatcacattcagcttgggataatattttcgcacaaataggaattcctagatacttgaatggcatattgttcttgacaaaaccagacacatcaagcacttgctgtatttcttgttggtccatgccacaacaatagataattgattttgcctcactgggttgtaacccggaggtctgtgaaaaaagtttcaaccgttgtaacatatgaacttaaaatcctcaataataaatagaattacattattcgcaaagcgtaaattaatggtttatttttaaccctctatgtacacctttcatggaacttaataccatccttcattcccagtttctccatgatattcttaataaatatttcataccaagcacaaacaataacaggaacattgggtctctttgtcgtaaacttcttttggcctcaagaaattcattcattgatacattcatcatcaagctaaatttgggagttttaatacagatcataataatatgtatttcattaatcgttcttattgttatgtatatttatgtgtatatatattttggactcttggatccaatatattttttctgactttggggatgggagattcaaacttgagattttttcgtgaggagaagtgtgaaactactatggctatgaccactcttgaatcctattagattaacgtatgttacgttaaataaattattttaaaaaaaataagcaaagtatagtgatatttgcaacaattttattgtcttggagaaatttttgaaaaaaaaaatcaaatgacaaacctcttaaaagatcatcatttagggcaaaaaatatcttctttttatattttatatacatctatattttttttatttattttttatagaccttaatttagatttttaatggaaaattactttatatattattttttttatagcttaaattgcaccgttagttgcttcagtagttgctatataaatttaggttatgatttaagttacttcgttgattgctcggtgtatttccattaatgaaaaaaaaaaatattttgaa

SEQ ID NO: 4377 - DNA, 889 bp, Cannabis sativa
taaaagagtttcaataaggcttaaatccccttttatagatatttggagggatcaattaatcaatttgaaatttaaaattttggggttttccccaaaaaaagaacgttaggtttcattacaacagtacaaacgtcacacatgcaatgtcgtgcaactgtcagtgcgtaatttaaggttcaactttcaagatagcattaaatgtcccagacatcgaagagacattcgatcaagtcacatcggatcaaagatgagaaccagacatgcgtcacccatatgatcagcttcgtggctgactaagtccatgtgcgaccaggaagatcccacgcaaacttgggaggtaaatgttatccaaatttctgtatgatgatgtggcatccatctaggtgacacgtagaacacattttataatctggacgaacagttctacttttagtaggatgtataggaagagttgactctcaaggtcacagacagaagttgtgacatccaagtaaagtacgtgtggacatccgaccagcttccattaagtagctagctcgcatgcaccgatcagggcatgtgagatagaaatttcagagatatatctcatgtattctcaagcttgcaagtcacaaaactatccctaaattcatgggatagattcgtatctttagagaaaaaaaaaaaagcaatctgccaagtttcttgtttgtttattgtaattatagaaaataaattagtttaccattttatttattattgattttaggaaactaatatgatctaattaatccctataaatagtggactcatttcactatttagggacacgaaattcattcagaaagagaacactcatgagagaaacctcaatctaagagtaaattactcaaaaatcattgtaagagct

SEQ ID NO: 4378 - DNA, 785 bp, Cannabis sativa
gagatttgacatccctaaacataaatttataatgtggctatcagtccaaaatcgattgaaaactaaggataggttgcacaaattccacatgacagcagactctatctgcattttatgttcttagcatgagcaatcaactaggcacctgttctttaattgtcaattagcccaggattgtttacagatcatcaagagttggccgtcctagggtgccctttccactgatctggacaagctccttcagtggataaatcgagcaaaaatcagcaacttcaaaaagaaagctttggctgctggtgtagctggccttgtatattcgatatggtatgctagaaatgataagactttaaatagcaaggttgaaaatatagaaacaattgtaaagaaaattcagtatactgttaagtatagaatagattctttttggccaaagaaagtgagtcaaaaagatagataatggtatctaactttgtaacactctagaaatattcttgaggtctcttaaaagaagagatactctttctttgtaaatgtttgtgaattaatacattgttgatttatcaaaaaaaatattttaagaaaagcctgataagaagcatgttagtaggttgatagctaaataagagtatattcaattcccatgtaagcggtaattagattttgactttgatttctaccagacctagccgactcatgaatgtgcagggttgtcctatagaatggacgccttgcaagaatcatgtacttgggcttatatgagcgatactggtggcaaatggaaagat

SEQ ID NO: 4379 - DNA, 1537 bp, Cannabis sativa
tctcttccctcagatttcttcctctctatgtatattcttcccctatttattgtaatataggttggaaattaattacattcaagttcaaatccgataacaatattcccagaaattgtgggctttaattatgctccaacgtaaataaatgcaattaatatttgaaaatcacacagttgtgatttaaaccatttttaaggaggtcaacgctgtcgtggatggaaacttcctcttagggtcatcttgttggaggcatctcgccttgtacatggacgaatgactaattagcttacatgcattctagcaatggcatgagcaccagtgtactgagaaaactcaagaatttctctttgatcataacgtcttgtagattggacaatcatgtccttcaagctattttacttagtcattataatgtcaattatatgctaagtatttaagaatcgcgtcgtctcataaatactttctttgcatgctgcgaggtaaatacctagctatgcgttgtctatgtctcctttgggattatgccttctgacgtgagatggtttctggtaaatacagaatttgatagtttgtacgtccttgtctcgcttgaggctatgcaagccagcaagttacaaacaaactctatttattctatatttaatgtgttgtactattttgcatttactgatataattatcatcatattcgttcattcatattccttgagactgacacatgtcactttgtgaagtagcagcaaaattttgggtataacaattgctccttaaaaagtctttttttttcaataaaaaatactttttaaatgattaccgtgggaattttggtcataatccaatttcaaaatatgcatgcgtttaattttcgcagttttgtggttttgagggacatcatcagcattaatgatccatcttttccacttttcttccacttttacccgttggatcttctacactttaatctgacagtaactaagtttagagtataaaacggtaaggaattaatttttccaccattttttccttttcaaaaactcaaactttctgaaaaattttcatcccaacttcctgaaaccttgcacgcccttcttgtctttagcattctttgtgcgaatttcctcggattttcttttcgacctcatgtgttcaaaaaattcatcacgccattctctccatctccggtcacaagacttttcatcacacgactactcgacttcaaacagtaagtttctcactcttctctatttttctttatttttttggtttatgatcatttatttagcatcttttcacttcattcggtttagtaattttggtttaagttttctgggttaattttagggtttaggcgtactataattttaggtttaccgtctccttgggcctctggtttaataaatttcatccaaaaattgggatttttttttttgtagaaatgtcccaatctggttcagaagtttattctctagagtttttataaacagaaagccctaaagaaatagccctcccattccaacctaaaagtttcaaacctcggt

SEQ ID NO: 4380 - DNA, 859 bp, Cannabis sativa
atatatatatgaagtagtttaatcccttaatagttatgccctattgggagtgagtccccacgtggccatccctattattgaaaaaaaaatgagtaataatcgttcttatattttctaatcacattgaatttatgcacctataaaagaagtttctattttaagatattcttatcttcaaaattataaaagaaaatttctattttagtaccaaaaaatgcatcgtaattatttttgttctcacaccttttaaaattaaaaacatttaagaaaattatctatttgtaaagaagttaatgagctccatataaatacataactcaataaatcatttctcatatatttatcttaagaaaaatccatttttcatataaaaagaaactttcattgaatatatattagtacaatgtaaatacaagattaattattttattttattatttttaaacaaaacgattttctattttgtaggttttttttaaactttcattaaatatatattaatacaatgtaaatagaagatttatttaattttattatttttaaacaattttttttttatttttttttatataaaaaacttatcctctttggaagatgtgttaccgaccatgcatgaaagtcttatatttttatatttatttaggaataacatgccataaatgagatcatataaaagtgataagactatggacattttcaacttactaattgagcttccttcaatgaaatagttataagaaatgcatattttgatttaatatttattataaaatatcactaattatttacaagataacaataccatataataattattacttatccaaaataaatctatatatatatggatcatttctta

SEQ ID NO: 4381 - DNA, 2102 bp, Cannabis sativa
tgcccaagttaacattttgacatcagcttggatgctgtatgagtaggaaaatgtgccaaacttgtattttttgatgcttagagatatattgagattaattagtcaatttcttaattctggcatatttgttcaccagttctcagagatgttacttttctgcgaaatcaagttgacttgaattttcccgatttgcagctaatttgccgatattctactttgccaaaaaggtgaaatatcaaagtgtgaatttgaattgtcacaaattgtagcccttgtctactaggaaaatagtaagatgctcgagagagaactagaatcaaaaaagcagaacccagtgcactaggctatacgtcaacttgggtgctaagtgctctttatagagcttccctaggctccttttgttacttctatggaatttgagattgcgaacaaggtctcctacactgtttttgacaaaaataagaagaatgcttggagcagaatttgaatatgaggagcaaaaatatgtgaaccaggttgtatgtcaacttgggcgctgggaccctattttggcccttaaataatctcgttttctccccgagaacacttgtatcttcattatttctaaaacaaaagagatgttatggggacacttctcataaaaaatacttaggaactggcccaagctgacaaaatgtcaacttaggcgttgggaccaggcacccagtcaacttaggtgttgggtcccagttttgacctccaaataattctatttgactcatgaaaacacttgcatcttatttttttggtgaaaatatagattctgcccaaaagacttctcagaaaaaatatttgaaaacggcccaagttattgtcaacctaggcgctgagtcccaattttgactcctaaatggctccatttatttcttgaaagcactcttatcttagttattgatgaaaacatagattatgcctgaaagaatttgtcaaaaaatttgttggtaatggcccaggttgacaacatgtcaacctcggccctgagacctagcactaggtcaacctgggcgctgagtcccaattttggcctctaggttgatccatttttttttcctaaaagcatttgtttcctcattttggatgatagagaaaaaaaatatcgagatacatctttagtgttgtggttggaagtgccccaggttgacaacatgtcaacctgggtggtgggtgcaacactaggtgacctgggcaccgggtgcccaggtgctccaaatgggaattatgctgattctaattttagtgcctccaacatgttcgtgataggtcttattcatgtagattatagttcaactattttcactaagatggacccaaaaattaaaaccctagccaagatgtcaacttgggcgctgggcacccgggttgacattcaggaggtcgtttcgactcttttcattcctcaagcttcaaaattggattctttatgactttttgctttagaatactgaaggatggtgagttggaaacaacttggcgagattcaaagttctcgaagtcaacttgggcacaagggtagggtccccttccaagtcgactgctatgacttaggctactcacatttgtaaatatcttccttcttgtcacatgtcaaatattaatgtccacatcactagggttagttttcggataaatatttacactacaccatagatacattaacttatctatattgtttagtagttatctaaatattatattcttaaaacttttcattaattaaatattagaaaagaaataataaaagattaataaattgattatttaaagaaagagaaaagtaaaaggtataaaaataatataaaccttttacctcttctataagctttcacaccaaaggagatataatagcttaatggtataaaaaaatggctcaacatgatgagccaactgccactaactgactgtagatatatttagctttttctgagtcccccctgaaatagaaagtgaagacctaaaattaatttacattagatgctctaaaggtcgatgtactttatcttttaaaatatatcacaaaagcttctctttttctattgtagctctaacttttacataatactata

SEQ ID NO: 4382 - DNA, 1078 bp, Cannabis sativa
atgattgaaaatattacaacttattattattattatgagggaattttagttttagagacgaggagatgaggatcatgatcaagaggaggaccatatattattataaggtgcattattatttttattattaataatttgtttagtttatttctgtgtttgaagttaatttattatcttatgatgatcatatattgagtaatattatgtgtattatatatatgacatgtatatctttctaagaataatataaccatatatatatataataatctggtaatgtctctgatctgatgatacttcttctgctctttcatcttaattcaatattattcttgtaactgtattattagttaatttatttgacctaataatatatatatatgtatatttatattatattttactctctatgggtataaccaatattatatgatctctcctctcaattttttattgattgtttttgttttctataaaatataagtactaattacggttttcttcttttactaaacacaatcttttttttttccatagatttaaatacatttagctagatttgtgatctactatatagtaatattgagttttttttttctcaaatagcgttaaatttaattattacttattctacttttctgcagatttcaatatgtagtagtactgtattgacagatttataggaaattcaattatattatgttggtcttaatttggtaaaaccaagattatgttttcctccaaatataaataccttatctatccagtagtgtggcaagtgttttactatttagaaaacattatattatgacaaaaataatgtatggatttgaagtatatatttctttaatattattactgaagaacgttttacatatagtgtttttttaaaagactgtagttgctgaacaacttttgatgctaatggttttttaatgagcatttatatacagagagcggatattggcccgtcacaaaatggtcccgtggtcacactggttactataacaatataatattgagaagtgttaaagtgcactatctggtctttaggagatataatatttttagggacacg

SEQ ID NO: 4383 - DNA, 1224 bp, Cannabis sativa
atttataaaaacaattaaatgttacttttctcctccttcatctcctttattatctctgtttacattttttttcacaacttatttctttgaacaatatttgttgtttgatttatgttgtagaaactgttaaaatcaaacaataccctactatcaaactaatgctatttatataaatgaagaaatcattgctatttatataaatgaagaaatcatttcttctagcttttttatatggtaaatataatatcaactactaagtacccaaatatatgaattattgattaaaattgataatataaaattaaaagagaaatgtaattttatcaacaatttaatttccagccaaccaccatttccaatgatgattatgtgtgtgtactgctctttccttctttctaatttctccccctttttttacaggcttattaacaaaaaaaaaaaaagagtaaagattagaactgaaattgacaaagtttcatgacaccttgttagcaatcttagtttaagatttgcacatgaagaactattcttttttagatcctctgcctttggcactggaaactctaataataaagagttttctcaatcatcaaaacaagaagaaagttaccctgagaatctgtcatcaagtcaagctagtcagttggctgagagtagttttccaagtcccaaagggttattttccaagtctcaaaagcatgtatcagatgttcagaattcgagtaataccccaggtcttagaaagagtcgttctttgttggtgttgagctagcacaatgtgacttctcttccccaagaaatcaaagtagatctcccactactagtgtaaggagtagttttcaccaaggtacttaagaatccaagttaatacacttgctgtagtgtccctaactgcgaatataacaccaatgatgttatcattcagcgatatggtcatccgtaagcccttctttcttccccatgaaagaccccaaaaggtcattgtgttcttcttccttcttctgtcttctggttgagagaatttgagccaagatctgagcaagctcttttcttactttcatggatttatgggcattgaattgtaacccttttcaagtatgtaataacacattttcaaatcttctcagtacaagatttcatcttttccaaatatagataacataacaacattaaaagtgaactgagaaaacaagcagagcaaacattagtgcatgtttggcatca

SEQ ID NO: 4384 - DNA, 1363 bp, Cannabis sativa
aatcaaaaaaagaagaaaagaactgaaaaagcagacttcaatttgtccaaacaaaaaaaagtgtttataactcaaaaagacaaataaatctccttaatactttctattaactttactttaattagttgggctgattgtatagagcactaataatattgtttatccaccttttaattattagtgcagaaattaatcttaagttggagatgacatagaacacacaaactagaaagctaaaagagaacacaaaaaattgatgatttgtagtaacattacgtggccgacttttaattggagagaagatgaataataaagtgagcagtactatatattgattgtggttgggaggatataattaattaattgatgagaacaaggggaacaatccatttaaaacaactttgtatatttgtcaacaattaatacagtaatgtataattgtgtatgtatatgcccagtccactcacacatgtccatttaattaggtgacaactctattttttaaatgcgtcctcagcttattactgttctggaaatttatgataaatgttattgagtttaattatttgaattcccaacccaccagatcattaaagagtgtgaataaactctcccaaaatattagtaagtaagacctctctgtaatcaaattgttagatcacatattggttataacttaaatagaattatagaattatgtgtataaaatgttagaaatatacatattaaagtctaaattaatcaatacacttatataatttaatatgaaaacatttatttatttatttatttattttgaaagaaagaaataattcattaagacaaatttgttgttgtaaaagtactcaaaaatcgtgaacaagcatatatctagacacaaacacttaaattagtaaaagaggttgccaatgtgtgaacaacaccatttaccgatcatgaaatggcgctacaactaccaccaccaacagctaataaagaaaagatatataataaaattgaatgaaaactaaaattcaagtgaagcttattaatccaaccaattactactgtagaatcactattaataatggagatactgaaatcataatgatgcgcgagagttaggcccaaatgaatggcaagcagctccgccacattaataaaaaaatcacctaccacacaccagatgaccatgccaaccaaaccacacttcgcaacatcccgtatcacaccccccaatccaacaaaacccctccctggaaccaccaaagcatcagttgctagagcaaaggaattaggaggtggtggtatccatcgagtaggtacaactgggtttgcaagacccagtcccaattgaaggccccgtcgaccatactccttaaac

SEQ ID NO: 4385 - DNA, 1300 bp, Cannabis sativa
  modified_base (877)..(879): a, c, t, g, unknown or other
aatcttttctcagtcatgatattatggttgatttggtcattggtctactcatacaacttattttaatagatataaatcaactgcacaaatcaagatatggtggagccatgaaaaatgttattttgttatgttaagaacactaacctgcgaaatagaactttgccaaatctaaggattatcaatggagtaaattttacatggttctgatcagactcctccattttgttcctaaaatcttcaaacgaagaatgaatgtctggtaaaacagtttctgctatgtactcccacggtcctctattgaagctttttgttagtctgttgttactttctgtgaagcaaaattacaaataaataatgaaagaaagaaagatttcaaatatcccacatttactaccaaaaatttaaggaattaagtacaagaaatttaaggagatttctaatgttctccttaaattttacatttactatcaaaaaagcaacatctgtttggaaaatcataaagaaaaaagaaaatcagattttgtttttgtcttgatcgtctgaggcttgtttgcattgtgtttgtgaataataaagaacttctttcttgatcaaaagagggaagaaaaaaaaaagaactaacgtttttcatttgaatcagtgttgttgaataaagctagacgctgtacgacattttcattggcggattctacataaagaggttggagatcaaccgaaggtggaaagagattacgatcatccaaaccagcagcaaaccatctgtggatatgctcatatgcataaccagtaattccagcagcagatgagttgtgttttgaatttttgttgttggtgtgaaatggaggcaactctggctttggtgtgggagtgggactcnnngaagaacctttctttgaaactcgtttatggggtggaacataggccatgctaattgctcttcagttatctattcgaatccccaacataagtctcgatcaaagattgtcttttttgtttgttttttttttgtttttttggctttatatactactccatatgtcatatatgttgtacggttgaataaaatccacttcttgaagaagcagcgttgtgaaagacgtttatttatggtcctcaagactggctcacaccccaactaccttacagttttctgacttccttcttttttgttttgaaaggggactactcatattcctttgctcctacgtattttatcattatttaatttcacgtatcaatcaatatatcaatatcaatcataatatatattaataaaaaaatgcataatagctgcttaggt

SEQ ID NO: 4386 - DNA, 784 bp, Cannabis sativa
tgaagaaccttggatggtgttctattaatcaagtaagtggctgtttgaatagcatggggccaataaacaagagcaagctgagattggaaaagcaaggctctggccacattgagaatgtgttgatgctttctctccacaacatttgttgtggagtatcaacacatgaattatagtgaaaaatacctgttttggtatagaaattatttatgttgaattctttggcattatcagtacgtatggctttgattttggccgaaaactgagtaagtaccagagaataaaatgcaggaataatagtttgcacttctccttttgttttcatcatgtaactccatgtatgtcgagatttatcctcaacaatggtgagaaaatacctgaagccttcgaggctaggtaagtgaaagggaccccaaacatccatgtgaaccaaatcaaagcaatttttggaaaaattattatgagaaataaaaggaagttttttttgttttgcttgatgacaaatggaacaatgatgtggagattgtttattaaaggaaaaagtaatctctttatttattcctgtcaagatgcttacagatggatgaccaaggcgattgtgccaaaggtcattctttggaattacactattaacagtacaattattgaatggtaaaggagttgtagcagtagagattggagactacttgagaatatagagttttccaatcttgctagccatcccaaccttcgaagtcactaggggtgcctggataaaacagtgggcattagtgaagaaaatgaagtt

SEQ ID NO: 4387 - DNA, 1126 bp, Cannabis sativa
tctttggatgaaatggaacaccttttccatcccctgtaattaacctcttgaatatggtttactagagaaaaccttagactctatcttctatatccttctatcagctactgtttgatacatctaaaaggttctaatactgagatctatcatgtcacttgttgcaaatctcaatcagttccgttgaagaactaatggtcccatgagaatggtcaagtctccatccttcttccattttcccttctgcaagcaatttgttgtgagacaagacaattctatagattaaagggagcctattagccaaaggtttttcttccatccaagcattctctcaaaatctatttgtatttcacgtaccttgtatgaaagttgcatgaaacaaagtgtcacctatggacataaagttccttaaggttttgaaagatactctagagaccatggatgtataacccatttgaacccagaccatacttactcttgatgactgtgtatcatagcatattttattttattttatttctaacgtgaatcaaaataaccatttcgtaattagggttttgttattgtttacaatagtgcctacagccaatcctttatttaggctcatctactcctaagaaaccaagtgattgcctccctccgtctcactgtggatatgtagtgagtctaattgttatcaaagttttcccaatcttaatccgaagattgattacgtacaactttctgtgagatataaaggtcagctagaggctaattaattctatatcattcttaattttcaatagctggaccttcacaatgttccaccaatttttatttctataaattggacttgtagctatacgttggaatagcgaactacaagtttctgcttgatttgtctgcataacatattagttctgatctcagtagtgtgacttactatatcacatatctctacattatctgcatatgaaccagtgcacttatgatttttcaagcataagttgcttaagcctctgtaatttgtcttttcaggctcaagataacattatgaaccttccgttatcaaatggttggggagaaaagcaccggctttatgtaaagtggaaatatgttgaagcaaaggtatgtaatgattccatttgat

SEQ ID NO: 4388 - DNA, 582 bp, Cannabis sativa
aaaaaaaaagggtagaaaatttgtatttcttttcttataatgaactgtaatgtcgaaaataaaactgatgctattcaacacaataggcattggtttaccgacgcctgtgttagacaccgattttaaatcgacagcaattccacccactattgacgtcaattttccatggtcggtaacattcattgtgactattttccatcgacacgtatattccacccagttttgcattggtgcatagggcatcgattttaagacccgacgactataccttagctcacggttttcaacagtcaggaaatcccttttttagtagtgtttgaaattttttcaagtactttgctggatgaagggctttatcactccacagatcattcacttaaccaaatttggttttatattttctccgcccatttgcaccacgctcatctctcactctcgtacattaaacatagatgaatatgaaaatttcttgaactacgaaggtatatccgaggaggttaattagtacatcaacgagatcatgtacaaagatacttattttgcacgtttacctgtatataattataattaataattaatgag

SEQ ID NO: 4389 - DNA, 1006 bp, Cannabis sativa
gtgcgtaagtttataataactagtgcattgataatacagttactaagctgtttagtgataaacctaaaatgaagtgatatgcaaccactgtttctaaatttatgtgctaacacttcctgattgttctaagcaaaacagagttccaagtcatgtgctgataacgaaaaaaatagaatgataactattgttgttgttattattatttatttggaaatttcccttgttcttctgtgtaatatgacatgagcagagcaaagtttaaagctgttgtttcttacaaaaagaccatacatttgtaaacatattggaaccaatacactcaaatcttaataaacatgtttctcttatgaaaaattattacatgtgcagtttagtgtcaaataatgcatgtactcaaattatttctattgtggagatgcatgtactcaaatatgattgccttgcatatgtacagaaatatcaaaaaaaaaaaaaaaactttcgggcgctgtaaattatttcaaaagaatgtatcttagcattttggttaatatgtccttcttgggttgtttttgtaatcttctgactattaaaacaaaagttgacttgtataagcacctcctataaatgacatgaaggtgtttctttcaagtcttggttattttgttgctttgctctaaaatcttcaaacataatttcttgagctaattttagtttgtatttgtcaactttctatggttatggggtttttgttcttgtttcacttttttccattttgatttttgaacttactatggtatttaaattgatggttacatcagttcaaaaaaacaaaaaattgatggttacattgctggagtagctagactctagaaagttcttagtgtaagtggttaaatgcaatgatgatgaccttctattgacagatatgttgagcctagtatcagaccagatgatagtcgctatggggaaaaccccaacaggctccaaagacacactcaatttcaggtaagttggactctatata

SEQ ID NO: 4390 - DNA, 1440 bp, Cannabis sativa
aaaaaaaaaaaaaaaaaggttttgaattttacatttaggactagttttggtaagcctaagttctattgtattaaataagaatgaatcataaattatatatttaggattattgtgtttagaaataattattatgggaattatattatttaatatataaaaatgatttgaattactttgcattttaatatttaaaaatgatcttagtcggagaattgaggatcgaaatcggggttcggagtttgggatttggggtcgggggtaaggtccgggtttgtgggttgggatcccaagttcgagggcctaggtttgggtctggattttgggttctgtctctacggttgagtctaggttcgggatcgaagttcgtgactagggtttgggtcaaggttcgggattgggatcagggctaggggttagggttgggttgggatgtggggtcgtgggttggggtcctgagtctgggtgcgagttcggggtcaagtctggattttgggttccagctctacggtagtttagattcgagggtcggggtcgaagttcgtggctagagtttgggttaggattcgagattgggatcatggccaggggttagggctgggttgggatatggggcctggtcaagatctaagtctgggtcgagatttaagtctaagtcgagactcgattctagggatggaaattaggcggggaatgctttctccatccccgtcccctttaactttcataatacccatccctgcctccatccccacatatttcccatcaaaggcggcacaaggaatcttcggtaggatatttaaaaatttactaataataaactacaaaacacatattgataatgcttttaaaaaaacataaatataatgtatcataaggaataatattataaaataaataaattggcaaaggggtattatctctatccctgcgcgtttaaaattcggggatagaaaattattcccttccttgcctcattttctgtttacgcgtagcgcgggaccctgtaccattagtataatttctattcttactcgataggaatatttaaaattttttaaaaacagccaactaaaataaatcgttcaaaccaaactaaataaatcaacaaaaaatacaactcgaattatttttttaataaaattatatataatatattagtgaaattatattcatttgaatttaaagtttggccaatacaagaaaaaataattatttattgtcaagttaaaaataaaaaataaaataaaaaattaggcatatatatatcattgatgataaaacatcttatcctcctatctttctctctcttcaattttggcccaaatccaccgccaccgccggcggctccacctttacccggccagtttaaggtggtctctccttttctctttctcattctcattcagcggcgacagacagccatgcccaaggtaacaccaa

SEQ ID NO: 4391 - DNA, 537 bp, Cannabis sativa
catattgaaggacatgttttttgtgtccaagcctgtattgttcgtgcttacttatgctcgtgtcttttaggctcgtatcggattcgtgtcgtgtcaaaaatctaatcgtatttacgacactattcaacctagtgacttcaaatcaacgacctcctattcacctcaacaaacccaaatcctaaacaacgacccaaagctatagcctcataagaaaggcaaagtcttaattataccaactaccctttgaattacttcatcacatcaagaggaaaaggcaaaaatagacaacacaagggacttagacgacgagaacaagcaagttctaattaaagtcagacttagacgactccatgcccaaaatagatttttccaaataaatagagcaaagactttaaggtaaggaaagaaacacaataaagtctttagcgttatcatggaaaatcttgaccgaaactacgccaaaggccaaagatgattgatgagctctggtcgaagtaaagagagcgatcgctaaaagttttttttttaaaatttatt

SEQ ID NO: 4392 - DNA, 594 bp, Cannabis sativa
aataatggcagccaagagaacaaccattaacaacccagaaaccattgccaccaaccctttcatgggtcgtcgccgccgccggccatcgccgttagaggtgggaagggttggagagctgggaagaaaaggctgagaatccaccattataagattctgttccaaatcacggaaaagattttaaacttttttttctttggaacaaatggaataaagagagagtaaattgatctaaaaatatgtatatgtgtgtatatatagagaggattaaggatgagattgtgattaataattttatttttttctcctgaaaaaatataataatcccttaattaatgacaataatagagattattttgttctcagcgatgtgggaatatacaaatatatgtgttgatttggttttcggagaaaaggaccaatttaaatagatatgtgtggttatgttggagctttggattttgtaccaaatcatacccttacccttttgacttaagtaatctaactcaataaattttatttcaaaaaaaaaaatctaattaaataaagttttatttattcaccacttgagtttattatttattataaaaaaattgt

SEQ ID NO: 4393 - DNA, 1007 bp, Cannabis sativa
ttaatttatttcatatgacagattgttaaggtacttgagttcattggtaaaaaagaaggcctgcacattccatctggatttgctgctcgtttagctgaaaaatcgaatcgaagtttaaggagagccatattgtcatttgaaacttgccgtgttcaacagttaagctccatgacatactcatttcaattcatttagcctacaaattctgattagctaattctatgattggaaatttgtattgtggacatgtttattcagatatcctttcacaagtaaccaaacaataccaccaatggattgggaggaatatatttctgaaattgcatctgacataatgaaagagcaaagcccgaaaaggtttctttttatgcttctctcaatgttatttgcttactttggtacttttccatatagtttcgttgaactgaatcaatatgacaaatttttactcatgcagtcagttgtcaagcatccacatatgtataagcaattcatacatgtttaaatatgttatatttgtaccctattttcttttttaattattatttttttttttgcaattttgttactttcatatacaaatgtcctcgaaaaggatggtatgtaacctatttgaatgttgctctagctcttgatattttagatatttattactggtattcttttttttgtcctcctggttgagttgcatgtgtaacgtgttgataggaattctctctcttcctagtctcctctagtgtgtatggataatgtgtaggtttccagtatatatgcacacaaacaggcaagagaaatggtttgtccatcctaaatggcatgtaacaaatgttgtaagtacttcaattcagatggaacttttgttgttccttttagcttagtgagctcaaggtcaatcagaaaagaatgagaacagaattgtcttcttgagggaaaagtatattaaagaaatgcccccaagttcctcgagtagggtctgactaaggcagagctctcaagttcaaatccca

SEQ ID NO: 4394 - DNA, 566 bp, Cannabis sativa
aaatgaagaaagcagaagagagttttcattgaacaaaaatgaattaattacaaactgaaatgcagacaagccttaaataggcaaagacactcaaaaaggataacaacagaaagttgttataattgccaacaaacaaccgaaataacagaggacttactaactgaaataactaactggacaatcatattaatcctactgttgctatacttgttattcttgttaccccccctcaagatggaccatatatgtcatgtatgaccatcttggataagtgggaattaagagtagtagaaggtagagcttttgtgaaagcatcggcaagttggagattgctgctaacaggaatgaggcgtatggtagatgaagcaatcttttcgcgaatgaaatggcagtccaactcaatgtgtttggttcgttcgtgaaaagttggattgttggcaatatgaatggcagattgattgtcacaatagatgaaggctggtgtaggttgcgggatttggaagtctttgagaagatattgtaaccaatttaactcactagttgtggcagccaaagcgcgatattca

SEQ ID NO: 4395 - DNA, 1950 bp, Cannabis sativa
  modified_base (461)..(461): a, c, t, g, unknown or other
tcttttctggatgctccactttatttagaataggggtagtgtcctcttcctcatctgaatcatcagagaagatagcctgcataaaagtgaagactgtctgagaatgggtctataacatacatacagagcaagaacctaagaatgaaacaccagtcatggtacttctgaagagaattagggtgcaaaatctttggacatcgcagaataaactttttcttttgttaacctaacatgcagatgcactcttgtttaccatatatggaaggcttttttcttcaaattaaagtgagatgcagcgtataatgcaaaggatgagtgagatgaaatttgaaagtaatccgtaaaagcttcagctagtcaaggtgaataatcaaagaaacatactatagcaatgcatccaaagtaaatgaggctggaagtaactgaaaagctgtggtaacatgagagagagagagagaganagagagagagagagagaacaagaccaggagaaagctcacaccaattttttttttggtactcttcataatataaatgtgtgtatatacatacacgcatacatgttaccacagctttagaattggtatgcacacactgtgaatgcctttagaattgccatatttcagagacacaaaaggtcacaacaaatgcaataaacaacatgcatcacacaatttctaatattaccttatacaggtcaactggcctctcaacattttcaaccaccacctcatattctatttccttgtcagctacgcctttgcttatttcttgaacatcagattggggtacaccattcgaatgtctgttttctgctgtagtttcttcgatgtttttggatttgacagaatcagcagtgaatataagagtatccatcttgctacgcatacgtggagctggaggtggctgcgaaaaaaaaaaaaaacttctaagttattattataattagaaagaaaattataaaatggagcttttacccgttcttttgttttgttatccttttgctaatcaataaagaaaaaaaaaaaacaagaacaaaacatcactgagtctgagagctaaaaatgcttatcttcccccttctattttttctggaaagggtaggagaaataaaagtttgaattatatgaagatcattccataaacactgtaacaatcggggattgaactccaaataatttcagcttcgtccttttataaatatattaagatcaggagcaaacaagaaagatataacataattacaaatattcctagggttttgcaggaggacccaatccaagaaaagatgaagaacagagaaagagaacgactattacttttattcaagttgctactacagtaagagaggcttatgcatattggtttttattaaagatcaggagacaggattgagaaataaaaaaaaaaacaataaagtaccttcccaatgtggggatcaataagatcaaatcgcttgcataaaataggtgaaggacgccattgatattctacccttttggggtaaatttcctttgttatttcagcatgagtgtcttcagctttctgcttccaacaatttcaagtaaacaactgagatcaaagctgcaaattacaaactaaataactcgactcaaaaaagaataaggaacgaaaacacctgaaacatacctccaacccaccaggagtaaaccgcatccctccagtagccaaataatctgtaatacgttgtgtagagatattagtttctttacccaaagtgcctttctctattgcgtcagctgcagcctcaaagtccaacctctcacgcgctcgtgttgcttcagacatatttatatctccagcaaactgggtagctcttagcccaccttggtacttttccttgagaaatcgctcaaatctttcttgctttgctggatcatctttgaagggtttcacagcttctggaagtttgctctgctctcaatacaa

SEQ ID NO: 4396 - DNA, 2297 bp, Cannabis sativa
agttaaattttctttgcctttatatgcccaattaaaaccctcagaatcacaaacaccatcgtacaatataacaagaaacacaatcaatcctacaattttgtacataaaatagattagttagggaaaagccaaaaaaaaatatcaaaaacactcaaaattggcaaacatatttatatatatatatatatatatcattgacaaaacattgagaaacaatcgataaattacaagcagaaattaattggtatattctacaaaatcatcgataaaatatcgacacaacaccgacgtaccatcgatataaacatcaaacaaatggaaaaaaaaaaactagtcattgttaattaacgataaactatctccaaactatcaaaaaaaatattgacataatgtcaaacaacatgctaagaataaactatgaaaaatcatcgataaactatcgacatactaaaggtaaatgcattttgtaggacaataacatattttcagttgagcatttaatgctaattaatattaggtatttattacttcaccttcccaacaacttttttggtctataaaagtaaactcctatttcctaagttgtatatatttcttcttctttaacccctagagtattcttctctgctaagttatatatgtctagtggttttagttctccactaccattttcctctagtggggatgaatttgattcttacataggagctcaatttccaaactatcctcgtactttcactatgcataacagaccaagccatgacgagtaggttcgtagaataatgcatcgttattgggctaggccagtgagtggtttgctatctgatgaaggcggactgcatgacttatatgctaacgaaggacatgacatcaccctttgtgttattatcgatgttgaatgtcaaactattcaattgagagaaaaatgtaagcaacaatatcatcgaactcaggaaagagacaaaaagggaacgtgaggaacaatatgaatgtgaaagggtggcaaatgagagtaggttagaacgcaatcgaatggatggtgttcccttttctcctccagggtttcgtgaagggtgctatcgttgcaaaatgaccatggttagagaagaatcagtggtgtatggttcgttgtgcatgtattgcatgtatcaccctaactccgaagacttttaaattttatgtttatgcattgcatgaatcaccctaactctcgaaacttttaaattttatggttgttatcgtgatcatcattttctttttatttatgtttaaaagtttttacttgtgtcattaatttttctttttcaatatttaagggagaggcatgtcaataaacaatcaacattctatcgatatcaaattgacaaacacgtctaaacaagcgtgaagttgagaaattaaaaattagaaaaaattatcaacattcaaacaacaaactatcgatattctatcaacaattaatgcaaaaaaaatagttttgaaaaattatcaacatactatcgatatacaattgacaattcgtgccaaaacattattttacaaactatcgataaactatcaacataatatcaataatagtcttccctcatcttggcttgcttatcatcgacaatatatcaacatactatcgataaaccatcatgtaaaaacaaagtgatcgcgagaaaactagatctcggcatttcagataaaaaaaatagcaaaataacactagtacaaataaacaccgcacatatataacgaaaaaaacctacatactatttctaatgtttaagaaaattttggaaaaaagaaaactacctattattgggatgaatgattcttgagattggatggcccaattgtccaccaacgagagataccgagagattgggagcttgagagattatgagagagtgagctgagagagatgagtgtagagaggagagggagagccaaaagagggggagagagagagagatgattttgtgttttttttttaattaataaacaatggtaaaatgggaagaatatatatgtaaagagaagaattattttgtataaattagtggaagtctaatatttgatatgaggtgtattttttagaataaaaaatgaaatgtttcaataaaaaaaaaaagtacatatttgatgagagtttaaaaaatagaatgagttgggtgtgctagctagttgctgagaaatattcgatggcttgtcaaatggttggctcataactattacattgtggtgtttaatttggctaagtatgcatttggacttagacaataaatatttatccatgcttgaggagttct

SEQ ID NO: 4397 - DNA, 3596 bp, Cannabis sativa
ttccaataatttgccatcttcagtccacattgctgttggattctacagagattcatttttgtccccttgctctataaacgtagtgtataatttatgacaaaccattgtctctctgtatattgaatcagttgtgttagactgttagttgcagagtatgaactatgttgttttgaatccactcattgtttttattaggttaaaagcattgtagattggagggatttctactctagaagttacacgtgagttcgattcatatttcttttgagatattctgctttgttaaaagtgcattgatattatttgaatgaagaaactatgtgatattaactgttcttgattcctatttttcagatttgttggtaagctagtgggtcggtactacgatagcaaaggaaatcctacaaaatatttgaaaggagcagaagcaaaggccgcaagaggtgcacagcttttggagaaacagaagattgaagaagcccagcaacctggctgcaattcaagatggagtcaagacgagggtggagaggtatacattataatataagtcactgaactctcaaaattagaattcagattcttatgaacaacagatttatctattcacctaatcatacaaaagatagagatttgatttttcatttgagaaagagacataaaatagactgttcattttggtcttgcaaccattttcattgtgatttcataggtttaaaatctttgtttaggtctggtgtgatgttggctacccaagattagttcagaggcccatagaaatcgccttgacgggtaaaatgagcaagagatgtgcttgctttaacaaagaggaactggatcaacctggattagaagtatacgatggttgtgattaccttggcaagacttgccgagtttgaaaaaaggtcaatgcaatcattcacattcatattacagttcttccttctgttcttgatccaagttttggatatttgaattcatcttttttttttcttttcctcttccatagatatggcactttagcataggtaattaaatgaaattcaagcttcatgcttgattaatggcaaagtatttttgagttaggcactaaaatttcatttctcttttgattattttattagggtttatgtcttaagaaacttgtaaaaatatttttaattataaatattagttgaatattttgatatatgtttgaatgttaaattattaatatttaatattaaataatttatatataaatatcgaaaaattctgtatccatatacgaggttgttacttgtattgtacggagaattaagatcacttagccattaataaaatagtgagtaacatattaaagttattgttatccgtgtttctgacaagggacatgtggattccaaatagaagcttaaagctcattagtggacccaagtaacataaactgggccaagcccaagatccattctgccttttgagagaacatcaatacaactcgttcaggtgaggttttgttaagcctagttagcatttggaaagactatctctgtgtatctggaagaggtccttagcgtatatctggaagctcaatactagttttctgtttttgccaaatcgcacaagatcaagaattattttttgaaaatcttggacagaagatataatctcactaaataaggaaactagataattggaaatcaagtaattaacatgtcattaattatccatgaatatgggacacagtatgaacaactagcttcgtcaacatacacaagacgcctcatgtgatggatttaccagataaacccaaagtcaatatattatctgtaaattctccattaaaggaaaaaaaggcaactagtatgatctctataacactataaatactcattgaatatttcatgcaaaggattggaaaatcatgacatatttacttaagcaaagaatagagtgctcatacttattgtaattccttaagcttttctagcaaaggacttaataatattgactcatgtactaagtctcgttaacaccccaaccacgtaaaaactctctgagtgtcttcatgtatttctttctgaattatattttctttagcttttatattcataattagtattctaaaaaatttggtaaatattttggtgctttcattgagagctgaagaaagtagtgataccctctaagattacattcagtaattatggtactcacctggacagaatctggtattcagtaccaagatgatgttgatttaaaaaccaggcttgatgatgatcgtacggaggcaactagtcgccaaaaagggaaagatcaacgtgatgaaaccaaccttcatgatgaacccatcgatgaagaagaagaagaagagaatctaaggatttagatcccatggatccagaagacgatgatgtaaataagggagatgagcaccatgaaccaagtcctgaaatcattaggatggccaaaaaactagaagaaactgagaaaaaattggtagcacaagaagaatttctcaaatgatgttggagaaattcgctatgccaaaagcgacatttggaggagaaaaccagaatcatgacgaaaatatacctaatgatactattcctcataatattgctgagaaaacaaatcctaaagatcccgactcccataatcctcctaaggataaagggaaagggaaagtaggagaaacctccaaaaaagctgctcccagtgatcgggaaaagagagcgaatcctgccagtcaacctcctaagaaaaataaaggaaccgatgctttaaggcaaggtcaccagattgaatctaaaggtagaactgcgcaaaaggaaaattatcatgcacaagcacgagagtcttccgccaagaaagataaaaatgatcatgagaattgcactagccggagtgatgatgtggatgaagttcatccaatatcaaatgacggaagtggaaatctctcaacaagtgatcttcaggcatgattgaatgtcaagagagagaaggctagaaacgagaaagctagacctcgcggagatgacttgagaaatcacattaatgatcgaatttgtggaagagagtctcaagatgcagccactcagcatttggaatgtaatattgagaaactaaataagatcacagagcgcatctctcaaaagaaaaaaggaactgtgtctaactcaaaagacgaggacacagaactatgtgtaaaaagaatcatagaagcacagctgctggaacacttcagaatgccacaaattgagttgtatgaaggaagaacggaccccagggaccgtttgtccaaatatactagaatgatgcaagtggaaaaagcaagtgatgatgcaagtggaaaaagcaagtgatgatgcaaagtgcctttgtttctctttaattctgtccaagtttgcagaagactggtgggaaaaattatctcttagatttgtccgtaactagaaggatctgcaagtaatgttaaagaaataattcatagcaataaaggattttgatctggaagttagttctttgacaaatatcaagcaacaacttggaaatatccttaagaagtacattcaacgtacgatggatgctgctgcaaagataaaagttactaatgatat

SEQ ID NO: 4398 - DNA, 720 bp, Cannabis sativa
tgtgtttctgacccttttgatgagatagcaattgctagggaaatttgtgttgctcttgaagttaaaaaagaatttcataaattagataaacttcaagatttactaacacatattaaggaatcaattgtggggaagaaatttcttcttgttttagatgatgtgtggagtgaagataatagaaaatgggaaccattagaggagtctcttaggtatggagatgaaggtagtaaaatattagttacaactaggaaaaaacatgttgctactatgatgaaggttagagaagaacatatcatctccataagacacttgtctgaggaagtgtgtcttaatatatttaatcaattagcattttcagataatgagggtcaaggggaattaaaagaaataggtgttaaaattgtacaaaagtgcaagggtttacctcttgttgctaaagcattaggaagtcttatgcgttttaaaaagtatacagaaaaaaattggaacgaagttttgcgtagtgatttatggaaattaggagatcaagttgagaacgaagttttcgttccattcttattaagttattacaatttgccttctcttgaaaaacgttgtttattatattgttcgattttcccgaaagattataaaatcgatagagatgagttgatacaattatggatgtcacaaggttacttaagtagttcagatgaggacgagagaaaaggcataaattgt

SEQ ID NO: 4399 - DNA, 1202 bp, Cannabis sativa
agagatacacccttgatagttagaacagcttttttgaccaatccagcttcaaacttgcaaattccaagaagtgctcgcagggctggcctccggacattgttggcagagttgggattttggagcagtgctaacaagttggcgacaattaactctaactcaagttcagtccctttcttatcaacaaagtatttaatggaatcatcatcagaagagagtttctcaaggacctcacaacatttgacaacaatgaatgtaggtacattgggggtggacataagatttaccacaaagtcaactccaccagtttcagcaatgggctttttattagcacggcaacctgctagctttaccaatgcagataaggacaattcttttgattcaatatttccagatgccatctcaatcaaaggaggtataaccccttcttctccaagatgcttcaaatttgaatcagacaattccatgttaacaatacttctcacacatgatatccttgaacactctggccctgaaagaaattagattaaaatttgggaatttgccgaactactaacataaaattgtaaaatttgaaaaataaccacattaaatttacattgtgcgaccataatgattgcacaaagtaaatttatagtcgcaaaacaactataatagttccacaatataattttttgtcactcgtgcgataaaatgtgataattttgctaataatattttttgaaaattattttgctaataaaaattttcccaaagactaattttacaaagcacctttaatattttgacaaaatgatagcttacaataaggattataggccaaatcattcaagtttcataatcatatgctgcattctatctagtgacacaggtaacaattactaccatcaagtagtgactggtagagtggacaaaatggatttatgccttcgaataccataaaaaggagaaagagtgagtatcgtaaaatatattttgaatgtacttattaagctagatgaaagagttgctttcatttgttttcatagaattggaaaggaaaatgcctgtgaaatctttgaatggaataaaatcttcttacccttaactatgcaatcaataagtggtttataccaactagccttggctgcacgatgtatagtctcttcatcaatgtcaagaagcttcaacatgatactttctgcaatctcagctgtctcttgcac

SEQ ID NO: 4400 - DNA, 1390 bp, Cannabis sativa
tatatatgaatcattcttttgcggaaagagatccactgatgaggcatgttattgcaaaagatgcaccactacacttacagttgtaaataacaaggagaataatcaatccatcattgtaatttgtgaacattatagatttaattaacataatttaatcataaagttaacatggatttattgattatcaatcgagctttttaaattatgataatagtactctagaaattaattaatacggtttatacagcaatcttttaaattctgttcttttttccttaatgagtttttactagcaacaacactagtaggtattggctagtttgatattattatataaatgatatcaagcatatgttttaatcctaatttggacaaaactcagtccaatgttgggattccaaatgcattcaacatagtttaatttatagggccaagaagtgacaattgaagaaataaaaaagttagagaccgaagaatactgtctatattccttgcataattatcaataaaaaatcaaagatgaaagtcaaacaaatgccatgccagtgtaaagtcccaaatagagaagaaaatcattactgcccactgaagtcctttgcacacttactctactcttctgtatgatgacaagaattaaaaaaatagaagagagctttagcaaataaaaccaatgattaatgatgagaaaatttatggtgggaccacagtttattttccatgttacgaattcgtcatttgagctaataattgctcttccagtgattcattttcttgaacaaatgcttctttttcaaacgtttttatgatactctacaaataatcatgtcatattttctgttgtcaaaacaatcaaatatgcagatcaagaaattcagacaaacaatcaaacattgaactaaactaaaactaagaagtaattaagaggatttagctttagaaaacaatcaagaaaattagaaagaacacaccattgcatacaagatcaagctctgcacaatgctcctcaattggaaagtaatcctttattaaatgattccacttgagcatgagctacagaaagtttaacactaaagaacaattactgagctacaagctttgatctaagcttctctctctagtgtctacaacctctcctctagaatgaaaacaatgaatgaattaactctatttacaaagacataacaggtgttaatagttattgggggttaactaactccctgctttgtcatcaatccgagtgacaagtattaggaagtgtgacttgtatatttggcaatctgaaattagtaaccagatacttgtaagtgtaaccacgtttcaacaaatctccaccttggttcaagtagctttacaaacttcagtgatgttcttcttcaagccttagagggct

SEQ ID NO: 4401 - DNA, 1762 bp, Cannabis sativa
ataaaaagggtatagagtgtaattttctcatttaattttgccttaggcctcatatagcttaggaccggccctacatacatgatgttgacatgatattgacgtgacaactgcatggctaagtagccataagcaaaatttattttttgggtccttactataaatgatatttttataaattattaaaattaaaatatatatgtatattttctaaaaggtattttaatttatttgagtccctaaaataagtgggccctaggcgagggtctagcccgcctatacctaagacgaactctgtagccatgttattatttaattcgtcacgtgtgacaaaatttggtaaaaaaaatcaatttacaataatgtgaatagttcaaggaccacttttaatagtttgaaaagttcgggtccataataatacatgatatgtcatagttgaaggacgaaaattctaaaaaatttattagtgaaaggagaattgctaaaagacactactagcacactcttcagtgtcatatcactattggtgtaattaagtattatgtcatatataacttaagaaaataacttttaaagaatatatcactaactaatcgtaaaatgccacttatagaatatgttagatactattagtacctaatagcaatactctcataaaagagaattactaaaagacaccactgttacctagcatcctcctcgatatcatactgctattagtatataattaatagtactaagtcccatataacttaaaaaaaaaaaaaaatttaaaaaatatcgataatcattcatgaaacaccacgtataaaagatattaggccatactaatactcaacaacaataattcatataaaagtcatgttatacaatgcaaaagatttgacatttcaaatttaaattaaaatatatatatatatatgtataattgatataatataaagaaattaaagaaaaagtaaatagatatataggagatggaatttcataaaagacaaacagagaaaagataaaagggaatatatatgcactatttaatttgcacatttctctatacaaaaaacatatatgtgtgtgagacttaaacatataacgtgatcgagatataacatgtttttctttttcaatcaatattttaaaaaaattcactttcttttaggtggtcttctgtcatgttcttaattattgcccaatcctgcccctatatatatatttttgatttataaaatatataaaatagatcgatcaagtaaaagctagctataatagctaaaagtatatataccatataacattaaaactcattaagctatagagatggattaataacacaattataactacgtaattaattatagtataaatatagttatatgtacatagtaacataggtaggttatatatagtacgtaaaatattattaagattttatatgttggggaagtactctactacttttggaccattagtaccgttgactttaattgaatttgagactatgtatgtatgttgtctttattagtaggtagctaggtacgtaataagatttataagtgtaggccaatatatataccatatagtatttagaattatttaaccaccaattttgatatatatattgtttcaataaaattagctaatgaggtttttaatattttttggttagaaaattacatattgtcattttttctttcttttcaacattttaaattatgtaaataatttcttaacctatatataatgaataaaggaaattaaaaaaaaa

SEQ ID NO: 4402 - DNA, 4366 bp, Cannabis sativa
taaaataatagaaaaatgaaaaagaatcatctttggggtcattccaagtttaaacaagcataaaattaatacctttctttaaacatttgaagacaaaacaaaatacattaaaatataaacaaaaggctaactaacctgtaaactatgttgatttaacttctttatggcaacgacagtaggattaccctgaccattaagaggcttaatagtccctttatacacagacccaaaacctccttctccaatctttaacatcctattgaaaccattagttgcttcccttagctcttggaaagtaaaagctctcaattcttgctctttttctttgtaaagttctggtatgctttttggtgatggtaatgagccagaagatttggttaaacgatctaaagctggattattattattattattgcttgacttgttttggtcccttaactcaggagctgattctgcctttcttctgcacttggatttatctttaaagagataaaagcacttcatattttgagctctaataaaaaacccacttttaattctcaatcactacttgtaaaaatgctatcttttctttaacttttataagataaggctgaatttggagacaaacaaaatatacccagaaaacttagaagaccaaacaaaaacccaagatggaaattgaatgaaagaggtataaatggaagagaaaaacagaaacccagatggaaattgaagcgaaagaagaagaagaagaaaatgagatagagagagtgaaactgttgaaggtttcaaataaccgtgtgattgtagaaaaattgtatatatatcaaaaagggagacataaaggagcaaaacccaggtgagaaaaacaacgttttggtgtgaaaagacagtgaaaaaccatgtcacataggaaagagagagagagagagagagaagagtcgtgagttaaacgaaaacattaataatatataagaagaaagaagaacagtgacagatatagatagataaatagattgatagaggagaagactgagattatagtttggaatcaattcaattcaactaaaccaaaccaaaccaaaccaagtgataagaggcaaagaccaagacgactttcattgcatgtaataattatatttatatatatatatatatatttcactcattttttcattaaatttctgttatttcttattgtaactaaattatttatctttttatcaaatttaagaaaagaaaaaaaagttgaggcattgaattttaaacggaggacattcattaattgtaaattatcaaacttggccttcggtcataacacagcgttttaggactttaggagttgaacaaaaaatgaccatgaaataatgagaatttttaaaaagtattattagtgtctagtattttcctcgatattatactgttattggttgaattaaatatcgatttttatataattcaaaaaaataacttttacttaatattgttaactaatggtagaacatcacgtcacttgtaaaaagtgttgagtattacttatgtcaaacaacaatactctcaaataatttaatggctgatcttttaaggattttatctaaaccaataataaatgcactaaaacatatgcatgcatttgtatgtattattctttttaaaaaaaattaaaaaaaaaaatgtatttcttcctagcaatcaacgcgtagaaaactaacccttaaaaatccattttcaaataaataaataaatattatgtatttttatttcaattgtggaaatttttggacctctttatgaattttcagggtattaatttgttctcaattttcttttttttttttttttaaccaaactagtaatgcagttttttttttttttaaatcaaattaattatatgatcaaactcattcacctaaaaacagattagtttggttttaaaaaaatatattagtttagttcaaaacaaagttgtactcataattattctattttttttactaaattattttacctttaaaatctataatacataaataataatgaaaagaaagattcttaaaataatattgagcaaatactaataatatgtccaagattgttcttaaacattcgtattcaataataataaaaaaaaaaagtattatatatatataaaaaaaaattaagtggtttgatttagtttaaaaattgaactactatcgaaaattctaaaattgtgaacgaaatagagaattgtttattgaccaactattgacaacatgtttatttggtttagtctaaattggttgaaatttataagaaccgtagattataaattgtatgaacaatcctgagtagtagtgatgatatacacatattttatagatattttaatcacacaatagagtagctaaaaactaaactatttagttacgaggtaaaaactgataaaaaaaatattgcttcatcaaattagttattataggtaaaagatttagttcttaaatagtacttaattacatgtaagaagcgcaattaagctataaatattataagtgttattattatattaatttatatttacttattaaaataaataaaatatattaaaataaataatttttaaatgatatgttgagaagatataaatatatgttgtgtaatataaatgtgaggtaaaaaaaaaaaaacagtgagttattttagagaatagaatagatataaattggtctaaatcctctaaaaacattaatatattttcagcgaaaaaaatagatataaacatattttacggaaaatatattttttagatatttgaaaaaaaataaaattaacactctttttttgaaatgaaaaaaataatcaacgttctttaaaagttttattttatttttatcgttacagaaattaaacataaaaaaatatgaagtatttaagaagtttaaaactcgtcactaattaatttatattgtatgtttattaaaaaaaaattctaatgtttgctattcaaaaacaataaaaaatcaccacgtagatgttttttttatgatcattattatttatttatttttggaaacaaacacgttgagatgattttttttatgactatttattttttttctttggagcaaaacacgttgatgaaatttaaaacaatacaaaattattgattagaggcgcgtattggaattgttaatccatatttgattttagtttattgggtatcagtaatatttaatattttttaaatgtattattttttaattaattagtgatattttttaaaaattattattatatagatctaaatttttcttatatatttttgtgatcaattgctgttaaatttttttatttattttttacttagtgattgtcttataaattaatagcactttacaattgaataagactaaataaaaaataaaaaaattgaataagactttatttatattcgaaatgagatcttggagttggtggtcggtagctatatatatagtctataacttatatatatatgaactattatcattttggacttttactaacaacaatatatatatatgattctttggaaattaacttttactgaaattaaattgacttacaagacaattggaaaaacttgtcacaaacaatataccttattaccttacacttttttgttatattattattattttggaaattcatcatgcacgtgttagaaattaatatatcttcatatataaaatattactatttaataatttttattagtttaataaaatattttattaggaagattaattttataaatatatataaatattaatattatttattttattagattaatttaaatatatgatactaatattatttattttagaaattaattgaacttatattaattttaaattaatttaattaatatgtatagatattaacatattagttgtaatattattagttttttaatataaagattatgttcaattttaatatttttcattttatatttattttttaaaattttaaaatactttaaatattttaataaataattcttttaatttataaaattttaaaaaaaatatacattaaaaaataaaatttataaaaatataactaaatattagttgcacgtaaaaataatctagtatacatatgaactcaacttaaaatgtacttattatccatttaaacataaaaaaataattattttgttttagaaattaaagataaagaaaagttttctatataggctatagaattaatttgaaagtaaattatactatattatatgttaattcaagtagtttcacgtcatgtgtttgaaattagttcaataatcctatatatatactattatatttccaaagcaaataatcaaaggtgacaagaaatgtttttgtttttgtatgag

SEQ ID NO: 4403 - DNA, 978 bp, Cannabis sativa
tggccgaataatttgcatgaataaaggatacttcgggaaaaatggacagtaaactaaattacactaaatattttagaaaattattattaaaagattgaagacttcttcttttttttggaaagaaaaaaaaaagattgaagactactttttaaagaaaaaagattgaggacttaatgattaaaattgaaatttgatatcgtataatatggagaaacttgcataccaatgctttttctttccttttttttttttgaaaaaggaaaataaaaatcttattaaatagtatgataaaaaaaacataaatttactattttatatttaattatatgatacaaattaaagttgataatcaaaattgcattaataatactaataagttctctaatcttttctttttttaaaaaaaaaaatattaatatgcatgtatgatgtgattaaatctaagggtggtaaagcgagtttcggcactgtacacgaacacgaacacaacacaaattttatcagttagggttttggcaaaattagatgcgagtcgaaaaccagtcgacacgacttgatacaaaataaaattggatcaaacgacacgactcgcttaatttaaatttgacacatttgacacggtttgtttaatatgtaaaaatatatatttactgattcattgttgagttaaaaaaaaaaatttaattcttttaaaaaagaaattgaaaatatttcaaaacttataatatttgttatatatatatataaactatatatgcatatatatatatataaattttttaacggaagtaaattatctacaatgttttttttacatttctagcatcagtaatagcaaaggatacaattttttacgagtcaagttaaaattaagaaaatttggcacaaattaaaaattaataggtcaacacgaccagggttgggcctaggctagctaagggggattaggcccgcgcctagggggcccacccagcttaa

SEQ ID NO: 4404 - DNA, 1167 bp, Cannabis sativa
attctcaacgtcagggactggccgaaggatggaagttggcaaaaagtgtgcatgaccaaggctgctgtttgggtgcagatacatgggcttcctactcccttcttggttgctcaaaactccaaagtgattggtacgaaggtgggagaattcattgaatcggatggagcggataacagagtcattgccagacgggattatttgaaactcagagtcgatattcggactgatacacagctaccagccggcttttacctaagcatcgacagagaccgccgtgagtggattcagttcaaatactgtaagttatctactttctgctttaactgtgggtatcttgatcatactgaaagaaattgttctaaaccgaaggcgtatgcttatccccccattggcaaagctgtccctctatacgggccgtggctgaaggccactgtccctataagggactgttttgatactcggagaccagctctgtatgctaacgacgaagttcagccggcggccctacaaaacaaagggctgaacgctgggcctacggtggggaatattcaggggagaaggatcgatgacgtggcaccctctggtttgggagacgttatgcatagtactgaaggtactagtggtgtggcggccactacaaaagttggtcagaatggtactgtggggacccttcaaatttcgaatgtgacagctggacctgatccctctatcaaagttgctaataaagcccaaagaaaaaccccttgctctggcccaatccaccctatggttgagttgggtgaaaactctaaggatgccaatatcattatgagcctaatgcccaatgtaggcccaactgcctcccaaatgattgatatcccacaacatgaactatgcaagtccagaacccctcatcaccatcctgagcccatcattattcaaaacccaaacagtccggcccaaagttctaaaacccctcccaaatggttccatacggacagagccttggagtccactggaggaaagaagaggaaagctggggggaatgttgctccggttctgttgcagactgaaggaaaggccccttcccatgatacccgccctgttaatgaagagatcacgagcaatctaatcttcgctgtgggaagtcacgagagccctggaaccgggaaagggggatctttgact

SEQ ID NO: 4405 - DNA, 1827 bp, Cannabis sativa
tgtacactgcactcatgtgttattcggtacaaagtttcatttatttattttgctttgtttggtagaatggttggtaacaaattcctagtaaataaataaataaagcctttcttattcatttttcaaaaactttatataattataacaagtataagaaaagtcattttttattaatgctattaattaattgaggattattatttattattggacactaatggtatctaatataatattagtaatatttttttaaaattatatgaaacctgatatatttaattacattaataataatataataccaataaaaatagtaaacactaataatcatctaattaattaaattcaagttttgagtaaaggagaacgttttagtatcttttgcttttccataaaggcagttaaatactttatgaaagacaatgatttaagatattgaaagaatgtccaaatattcatatttattccataaagttattattattagtattctgtaaattaatactatggataattataaccaaaaattaaaaaagagtgggtccttttctgatgaacttcttttctttgtttaaatttaaagaaacaaaaagaatataaataaaggcttattcttcttttcttaggtaggaaaaaagagttaccattcttcaagattcaacatattcatttttatattgatccaaaaagaaaaaaaaacatattcatttttatatcatttaataatttgagtcaattctactaaataatttacgattgtttaaatgaaaatataattacaaaatagtgtcaaaaaaatcaaaaaaattatgtattggtatattttagtagacaaagaaatattactattctaatggtgttctaaaatatagattaaatttagcagatgttaaaaattgtgtcaaattatttattagacaatatattttgttaaatgaaaaaatgaacactatatttttcaaaatggtaaaaatataattttgagctaaattttcaataattttttcaatataacgaagacaatttctaacacgaacatatacagaaaatgtaactaattttttcataatatctatagatcagattaatattaagttttattttgacaaaaaaatcagtttagaattttatttgtactattttagaaaatatatgattcgttttgttatttaacattccaaatggtctaattaataatttttacaatatatagaatttaaaatagcatttattctataattattatttttttttttacatctcatgtattagagcacaattaacaatagtaggacaaatatagtacaaactcatttttatgctaaatttaacataaattttatatcttccatattttttataacatgctatattagattgttacctacccatatacttaaaataaagtaatattttaattaacatatttaacaaaatttaattagtagttataattgaatttaatttaaaaacaaaattaatcttaattaatattttataaaaaatatatatatatcaagttataagttatttattagtttttatttaacttttaaattaattacaacacttcagtaataatttactagttaaaattaatataacttttatatttgtgatgtaactattgaaatttctttttgttaattaatattaaataatttagattttttagaaaatctacacaatctaaatctgaacaacaagtgtgtgaaaattcaaatttgctttgattaatttaatataagatatgtgtaccatattttataggccaaattggtaataaacaattaaatgtagactcatatatttaataaatataaatat

SEQ ID NO: 4406 - DNA, 3284 bp, Cannabis sativa
acacagagcaattggccgaagttgagtcatgttctcgggtttcttgttcttcgggattagaacaatattggcatcggcgcagccctcttcaaactctccagtagcaagaaaattgtgaaccatttgaattacatccttgcctacaattgaccaacttttttgataaaaggctggtgtcataccgtctggccctgggcttttgtcggggtgcatctgaaaaactgctcttttgacctcttcttctgtaactggttgacggaattcttcatgagctatttcaggaatagaggtgttaacacaatcaataatctcctggaaagtgcctcctgccgattggaaaagattgttaaagtaactagtaatttccattggtaatccattctcccaatatacccaattaccatggccatcttgcaaccgatcaatctgattatgcctttttcgagtagtagcagttttgtgaaaatagctactgttttgatccccctctttcaaccataactgttttgaacgttgtttccagaaagcttctctttggtcgagcactttaaacaattgtttttttacatcactgtatctttgaactgagtgagaatctctcttgtttttcaggtttgcaagttcaactttacactttctaattctcagtttaaaattacctgtgatttcttttccccaaggaccaggcacatcggcacacttctttatttttgctgctaaattgttgtctattgaagcatcctagcagtcgcggataagctcaaaacacaacggctctttgaaccaggcattttcaaatttaaaggtacggctaggagtgaattgttgaacaatgtcgggttccaagagaattgggcaatggtcagaagatgataattccaaattagtgagaacagcaagaggaaaaacctgagaaaaagttggagtgatcagtgctctgtcaagccgcacctctacccagttttgagtgcctcggcctttctcccatgtaaatggataacccgtcaattccatgtcatgtaaattgcagtccgtcaatgcttgttggaaaccagttatcaactggtgcggataacgccgacctcctcttttatcttcttgcctcatcacattgtttaagtccccgattacacaccatgggagattggaatctcttgataggaaccgaaggagctcccatgttaaatgtcgtctatttcgaactggttccccatagacacccgttaacctccactcgcctctctctggtgaagaaaccatgatgtcgatatggtttgttgagtagccaagaagtcgaccctctgcttgaaaacgccagaacataaccaatcccccagcacttccttgggcttccacaatgaacattccttcaaagcccaaagcacggcccactctttgcattttgcttttgtcactttttgtttcacaaaggaaaataaaattgggtttcttttgagacacaatctccttaaggaattgaaaagcccgctggttcccaagcccacgacaattccaacttaacacattcataattcctagcgggtctgtgaaccagaacccgccccaaacaagttttttgtactaccatttacttcagcatccatatccacatctattaaatctgtaggcccagtggtatttttcacatttgtctcatgtcccacgttttccataaccaaaaacccactttgattggcaaagcccattctccttctcttattttctataataagaagagcctcctcattattaattggattcgtcatatcagcccccccttcttcagtttgaaattgctcctttcccacactttccatattcggcctctcattcaaaagtggggagtcttcttccatatttcttgtagcttgattggttgcattgattgatttattttgattgaatcccagattttgtgcttgatttatcccatgttgaccgcaccctgatttactgctttgttgggctgtcgaaaatacagcattaatgggattggatacagttgagtggccggaggaagaagcaccgccggacttagtggcaattcctggtttcaaccatctcgcaccagcagcgtaattccttcgtcttgggagtgctttcatctctagaccataaggcttctctagctggtcatagggagtatcaaagagacgatcgcaaaacctctcggagtgtccaagaactccacagatgaagcaaaaggttggaaggtcctcgtacttgaacagagcatgacaactgaatcctccctgtttaatcagtttctttttcctttttagtggctgagtgacattgatttttacacgaatccgcagatagtccctccaaacaccaacaaagttgttaggattcgatttgacatattccccaagataattacccagtccccgaatcacttgttccgacataaaacccgttgtcaaattgtgaagctgtacccagaaatcaatccgattaagaggtactgatctgggattttcgccttgtttgagtcgctcaaataacaaaggaactcggtcgaaagtccatgggcttccttccttaacccgttcaatgtccacttcatgataaaattgaaacaaatacagattgttctctaattctttcacatacattcctctccccggttgccatagttgtgccattttattttgcattgcttgaaagtcaatcgatctgtgagtgagaaaacgtcccaccaagcaccatctatcatctatctcaaaggcctcgtcatgttccccttcaaagagtaatccctcttcctcatcttcttcaatgttcagggctgcatattggtcttccaagttgggaacggtattcattcttacaagacaataaaacacaaaagctagacagtaggatagccaatagaaccagttaaaagaccaccaataccagaataaacctttgatcgaaacaaataaacaattaaacataaaccagagatacactcatacactcataccatagaaaacttcaaaacactcataccatgtcatacgacaagacgcaagaaaatatatttaaaatgtcaattatactcttaatgacaattgtttctatttatttatttaattaaattaataaatgttttatttaaaaaagggaaactaaaacttaagactttgactatataaaggaagagaaatactcataatgatataaccgaaatttatttttttttttaatctaaaatactcataatgatcagtttttatttaatatttaattctaattattttcacataagtatgtaattgcaaaaaaaaaaaaaaaaa

SEQ ID NO: 4407 - DNA, 1604 bp, Cannabis sativa
ttttttgcccttatcttatcaatttaagctttcattgtttttgtttcatacacttatgaagctttaagcttggtctgatatttaatttaaacctgatttgtctcaatataagtctctacaagatgaagactctaaggtaataagtctatcattatatgtattgtaactgttacatgatatgaatttgaaattccagcattttgagtatactgtacaaaatgaacatcttttagggtgcgtttggttggagttatgaaatagaatgaaatggaaatgaatcaattttcatttctttggttgcacagttgcatttcaaagtattgaaattcttcccaattttaccagctacatttggatacagctttctctttgttgtctttatcaaattgatttatatgttgttattagaatttataaatgatgattttgtacttgctaggcttccggtggagttagctggcttgcagtctttaatgcccttgcatagtgctactgctgcagccttgtccacatctttgctttctttgcacaataacaagtggggttgtctatcagaaggtaccttcaaattttagctttcgttttgttcttgtttcgattcaatgctgtagatatagtagacactgtgcattgtcatctgatgaatttatggcatatagctcttctgtgtcttttttaatgtcattttcgttgatacaatcgaattgactgaagaacagaactttgatatagatagcatctgtagtttttagcttcaaagattggggttttctgacaaggatttaagaataatgttttttatgtggatttgaatgagatttggtgttccatccatggtgatagttatcgtagaaattggtcttttgttgcctattcattttactattggaatttgaactagatgtggaattggacaaaataaatgcttcgatagcttggcttttatattagaatgtagtgtgcttgtttttttatgtctctttaccactagcttcataactatacttctctgaatggttgctaagatattgttgttttgtgcaggttttgccaccccactataacaggaccgatgagcttgagttataggtataaaccagagacagttttctgttttgtaatgtttacatttgagattaatgtaactccaggaatgagatagattgttacattgtttgtttcactggttttgtgacagagacctgacttttgaatgttgtcattctttgagtatttgggcaagggatcatcaataccaacaaacactggataagcttgtaattagcttatttcattagtagtacaaataaaattataaattgatcatttttgaacacgtatatttgtcaatgaaaaaccaattaatatctgatcatgtatgcatattcatcttatgatgagactgttgtatatttttcatggttgatatgttcttttggactcaaactcggtcaccattctttctctctaacttttctttcatgccatactaaatataagataacataacctaaacacattacaatattaatattgtttcctagtactcagtgttgcttccttggtcgttggcagtaggggtgatcttctcaacaactgcaatt

SEQ ID NO: 4408 - DNA, 3391 bp, Cannabis sativa
gattttttattatattaattatggactaaaattgattgtggaaatctcattaccaactaatctaaaatgtataaacatgattaattttcaaattgtatgagatacatagaagaattgggttccttcttcggtcttatgttttcagattggtttcaattagatctacctttctttagtaatttttactctaaattgatcccatagattgattaaaaatcatatcccaaccaaaatccctcaaattccattcgaaattgcctattttttggccagaaaaccccattcgacctgccggatctgaattgggtcgtccgacccattttttgagctgctagagattgaagaagggttgctggaacgaagcccacttgtggctgtcagagagtgagggagcgtgtggtagtttccagactctgtttttatgtttttcagagttattagaatttaaattctaattttttggtaatttttaattaatttgtttactctgttaaatattttattaatttaatgataattatagtgttaaaaaattattaaaagtaatttttgatgatttttcaaaatccttaaattatagaaaaaaatttgagtttcttctcatcctgttaaacatagacactctcttactttgatttatcttgactatgtagtctcaccaatatttttactttcacatctttcattagttattgtttaaaaattataaaaatttattgtttgatgcaaaaaataatttgttatggtggacattttattttttattatcaatatgttataagcaattaatatatttattttagaactttagctaaaaattattaatttttaaatattattttatcaccaaatttaatatgttgtagaaaatattatttaatttgattggttatatgtgtagttagttgcctaaaggtagtagttatatatattagttcacattccatgtgagttaatattaaatatgcatattttaattattttcaaaaggtaatactttaaatatacatatttattattattttttggcttgaattaatatatattctttaataaatttatttgcccaaaggtaatagattcttaattgatatttattatttctttattattaatttcaagaaggtagattatatgtgtttattctcaccccaaaggggagtttataatgaccagttgactataatattttctaattattgctcatatagcttgatcaagttgtaattttttgaatttttcggtctccttttggtgaacaacaataatattttcatctaaatgttgaatgcgtccaaatttaaggcatgaagacgagatgtggaaattactttagtcataataaatttagacttatgcatgtgagaagaaaattctactgatcttactgatatcaaaattattgcctaaaaaactcttcatgcacaatggaaaaattcaaattatcttagtcacattgccatgaaaagttcaattcatgaacatttatttagtggtttaccaaacaccacaaatgctaatgagtttttcaaagcagtagaaaaattatatgacactggtgaaaatgctatagctggacatcttatggatgaaatggcaaccattaagtatgatgaatcaaaaggagtgcgagcttttatttttaaaattgtgaatgttcagtccaagttgaaaaataataatattcctcttcctgactcttacattattcatcgttctcttcatacacttcctacctcttttagctttatcaagatagtctacaatacttataataaaacatggagttttagcaacctaattttctcaatgtgtagctgagtaaagcaagttgtaaaaggagaagaatgaatcttctcactgtgtttcttaactcacgcccaacaaaggatagggaaaatatgaaaagaagcaagcacaaccaggggctaagggatctcaggaagccaagtgagagggagtcaaagcttaaagtgggcatttatgttgaagttgaagttatgtaagttggcacatgtatttttgaattacagtttagtgttaagactgttttgaacaatattttttatattcctacttttaagaggaatttagttttgctttcgcttttagttaaacaatgatattcttttcgttttgccaattatattattgatattatgttttaactctaaataattagaaactattttttattttgatggtcttgccgaattatcattgactcccttagcttcctcatttatactaagaaaacatttttattaatttgacacaaaatattgggtaacatttttcttaagcaaggattgatcgattaattagaactaaaattcttcctcctcttaatgcttctagttgggatacttgtattgattacacttgtgaaaaattaactaaaacaaggaagaagactgctaactgtagtcaatctttattagaaattatccacgctgacataagtgaaccttattcaattatgttgtgcagaattaagtattttataacttttatggaatatttttctcgatatggcttcacctacttgatcaaagaaaaatctgatgttcttgataaacctaaaatctttcaaaatgttatagagaaacaattagaaagagtcatcaaagttgttcatttggatcatagaggagaatattatggtcgttatacagaatttgaacaacacatggggccttttgctgaatatttacaagaaaatggcatagttgctcaacacattatgcttgattcacttgagaaaaatagtgttcctaaaaggagaaatcacactctaattgacatgattataagcatgatgagtagatcatatctgccagagttcttatgggatgaagcactcatgactgctacttacatcataaatcatgtttcaagtaaatttgttcctcaaactctttttgagttttagactaagagaacgcctagtttgattcatctttgtgttgggactgttcaactgaagtaaggatgtatgatcctaatttgaaaaaattagacacgggaatagtttgatgctttttcattggttatccaatgcactcaaaaggctatcacttttactgtcctactcatggtacgcaaattattgaatctcaaactcctaaatttttggaatttgatgttgcagaaaacattcctacaacatctcttgaattgggagagtcatctaagggaattttttatttctatgtcttttttcaagagatgataatagtatcttattcctactctagttgataatgctcccattgctgatgaatatattgctctcgaaatcaaagatgacgagggtcctattattgatgaacgacctattattgatgatgggcctattattgaagaaggtcatattattagagaaattcta

SEQ ID NO: 4409 - DNA, 2193 bp, Cannabis sativa
gttaccaaatttaaattggttatattaacaattataagaaaaatagctatgtgatatagtatttgcatactactatcaaattaaaattttactttccttcaaaaaaaaaaaaattacttttttttttttctgtttataatatcaatatattatttgattgcttttttcaaaaaaatatttgggcttgtgcagttaggatacgagtataatttgtaaatgaatcagagacaaaagataaaaataattgtacttaaattgataaaaataaataaagaactatctacatgaaatatgaaaatgtgcctaacaatctaaaaaaaactaaactttcacactgttatttaaggaagaaataccgtaggcacaacccaaattggtgttcttccgcccatcttacgaaggtgatttttatcaatatcgaatcgtgtcaaactcttagttccaatattgtagactcccatatccaaaggattattgatatttaaattagtcccacctttgtcatcagtaaaatatatgcaattactctgacattttgtagaatttgatgaactagtatcgattgatactgatgaattgtcacctaaaaacaaagcttgatcacctaaattatctatttcttcccattttgactgatcaaaactcaacctagaaacaacaaaatactctgttgcacgaccgtttgtatctgtgattttactacacctatgaacttgcaaaagatgatctccgtcacatgattcaaccaaatatttcttatcaatgcgtcgtttaacattattataatttgtttgaatctctctaacccacttgaaacttagttgagacaaatcatcactgatgtcgaaacaaacaattctactttgatgaaaatctgtaccaaataatgcccccttatgaaacaaaacatcatcataataaaacgcaatgcaatttggtaaatgaggtatgatagtccaagcagaatcttgaaaaggtcttatataagccgctcgtaaatatgctccaaatatcataacgataataaaattgtttggctttgatattgaatcgaaggtgaatgttgtgaacttcataaccatttcataacgatttatacttaattcatcgaacaacacaggaaggtatatgtctatagtgttattaaaaggcttatagagtgttaatttgaaatcttttccgagagtagctaaccatccttctgatgatcctacgaaaggcatatcgtacgaaggaagtactaggtttgatgatgttaaggatatattattgttcttggaacatacattgtagacactccataatgtgttggtttcatcactctcatttggaatcaaaagttttggaactaaatgatgttgatttagtttcatcaacttacctcgattcttcattgctattttgtgccatgattgacaaactaaagcaaatgaaaatgaatctttcacttcaatttttttaaacaagaattctataaggtcatgaggaagatatctccaatcttgtaaaagaaaaagaaaaacaaatgattagttcttaattaaaaatcattatttcttaattaaagaaattcatatatatagtaattacctggttttattttcttatctttcaatttcagaaattgatctacgaatgtttccatttgctttgagcttgatcttctaaatgcatatatagtcttaattatttaagtgtaaaaaacatattaattaaacaatctttaattgtttttgattttgattttgaagaaatttaaaccatgatccgtaaaaaaaaaacataaacataaacacatatatatacacgtaattgatgcttctacaaaagatattcctataacaattatataaaacattttaaaacaaatcctaaaacaaataattaattatacttcatttaattttattttcagagtgttaaatttttttaaattgacgtcttatataattaatttttttttttcaaatcctaaaacaaataagatatatatttacatataaaaaaagtttttttaagaaaacatattgattttaaggtgacgattggttggagaggaaatggtagaactctatttatttttgcagaccatatatatatataatacttattataaaatagattcaattataagaaactcataaaatagaaaagcaaaatttgattacttaaacgatttattagaggagaaac

SEQ ID NO: 4410 - DNA, 592 bp, Cannabis sativa
ccgataaattttcaagaatgacacgatccctaggataatacagtcttccccctgctagcagttgacaattctgggaacagtaaaatggtatagagcacgatgtacaaggaactttatcaactggtaggtcattcaagcagtaatgacaatgagattctcgacaattcttcaatattacctgcagcatataggccaaagttcatatatcatttgccatgaatatgagaaaagcaagacaacagatggccaaacaaatttcttccccaaactacaataagatggaaatacatttttatacccaataaggtgtaggtggtacttaaatagtagaaacctatatctacaatgctatgtatttgcttttaaaatgatgattagagctaatcgtgacagcactataaaaaggttgttcatacaattgcaagaggttcctcagtatgaactaaggaggctcgtggaatgtcacttgtagaagccataccccttgctttatctggtgtgttgacacattgtagctttatttggtgtggttcatctgccacgtagtatccatatcattttaatatttcaaagcttttaactataaggaaaa

SEQ ID NO: 4411 - DNA, 2162 bp, Cannabis sativa
tttttttagctcttttcatgtttagttttctgcaggcatacttgagcagttctgtttcctgattgtttcatgtctcttacttatcagattcttccagactatgagttcaccgggtttgatccggacgactagttctacgaaagacgagatgtcacaattggaggaggctagaaggtttcatctgtcgttgtatggcgaggtgatgcaatgcttaatctggaatatgatatgttatcagttgtcttgttttattacttttttatttccttctgtttaagaagtcattttatattttcatcaaaactctttttggttatttacttactagtgtgtattgttacttgacaacagccccaaaatgagaatgcatcatcagataattcgaagtatgtcattttttttttttgtaagatttttcatttgtgtctcattttagttgcagatcactaatataaggaagtttataatctcaggaatgaactcttacgagctctggatttgaggttgatggcattaagaagtgaattagtcactagttttagcgaggctgcatattccatttgctccaccaaagaaatgaatgatttagccaaattttctgaatgctttggaggaacagaattaaggtaagctgtagaccaaatgaaaaaagaagaagacattgatagcttaattaactcagtattcagtatcttaattacttgtgtatgtaaatagattcatatgtgtgtgttgacttatgtatttacaaaaaggcaaatgggcatatgggctattgcaggaattctttgcacaagtttttagagctgaaccaggagggcaatactgatctccaaaatgatgtcaagagctcgctgacgccaaaatcaaggaatcacgatgtaaatgagacacaggaaaatgttcaggtatcaaaagcagtgcattcagatagaccagtaaagtttggagtttcgcctgcaaaagctgctcaggttgagcgacagagttcgtcgggaagtgaggaatcttctgaatcaagtgatgaagacagaagatctgctgaaagaagtcgaactatgataagatcagcgtcacccagaaggtcagcatctccaatgcggagggtacaaataggaagaggaggatcacgcagggcagctgcattgaccattaagagcctcggctttttcccagcaagggataagagtttcccgtacagagatgcatctggaaatagtagcgaagaggaaagatttgagcaaccaaataggaagcctgagaatcatgttcggatgtctgttcaagatgccatccatctttttgaaagcaagcaaagggatcaaactggtgatggtcaaatgaggaagtcattatcaaatatatctataaatgcaagtaaagctgtattgagaagatggagttcaggtatgggggaaacttccgccccatgcgaaccagaacctgaagactttgtgcctaatgatgcggaaaatgaagagaatcagaagtattcaacagacatgaaatcagaatcagaaactgtacctacaggtcaggagaccgtgaaaacccccgaagttcacacgaacttagaacaatttgataagagtttgtctgacccaacatataatgaagcagatactagtatcactgaggaagagagtctcagaaagtcaacagcaacaactgaatggaatagactaaaggaggctgagttgaatcagatgctgatgcaaatgatggaaacaaagcctgggagacaagcaaagactcaatctagccgaaaacaaagccttccttctgggcaaagaggtggattttatgatcattacaaggagaagagggatgaaaagctcagaggagagaattctaggattaaagcagagaaagaagcccaatttaaagcaatgcagaaaattcttgatgagagaaaatctgaaatggcctccaaaaatgtaaaagatgttgataaaaagcctgttgtgcgcaagtctcaaaaatcagttagaagtttgcctcagcctgcaaatcccaaaaaggaaattaaaaaggaaatatcaaaggtaccttctgcaaagaagactttgccaaaaacctcacctgtgcctgctacacgcaagtcatggccatcaacaccgccagcaagagctgtagggacatcaccagctaaaactcctgtt

SEQ ID NO: 4412 - DNA, 1130 bp, Cannabis sativa
tctctgtctagttatgatctctgtgcatcacatgtgacttgttattccaagattcaatgatagtcttcttaaatcaaggaagagaaatgtatatacaaattcacacacaaatatatatacttttgatttaaataatgtgaaatgagataaatttagtcaaaagaatacattaaaagaaggtccaatgagtagaggagtgtgtatatgtatatacatccatgtgatttacttgtgtaagtcttacatagctgctaagctagtctatacttcctatgatgaaaattcaaacttaagaccctaccaaatttttagggtttttttagttttacaagagttttttttttaaaaaaaaaaggtgggactttttgttcagtttcttctgttggtggtagttttgctgtctatctttagtgattttcaaatctttctagtttaaatgaccaatgtatcttggttagagtgtaaaacagaagacataccaaagctagttggtcaaaaaatttgaggtgaaaacacaaaataaaatatgggtctgttttgttgtctcattgactgtttattatgttggattcttttactttttttcacttttttttagtaattaccaaataattattataataataaacattaataataaataggttttgttgttgtatctccactcagcttgttgacaggtggttaccagaataaacagttattatggtagttgaaatttcctagcgaatccatcccctattttaaattatattaaatattaaaattaatttggtgggtgttgaaaagtgttcattttttttcttctttattcactagaattcttttttttctttttcttttgttccaccaattgggacccattatttttgttttcttcaaaaatttatgacccaataaatgagagaacgagagacatagagagaataaagcacatatatatatataaaaattaaacagataataataatttagtatattatcaacaacacttcttgcactagctttttttcttagcccatgatcaaagattctcaacaaaagaatcatcaatgaaaatggttctaagagtgaaaaaaacaggccgaggttgtaatcatcataacattgggttacaataaaaaaaaaaa

SEQ ID NO: 4413 - DNA, 576 bp, Cannabis sativa
tatatatatgtatatttttcttatggagcttattataaataataatattaatatatcatgtatgcatccttatgattaggtataaacagaaaacacaaaactttggccattcaaccgtaacgaaaatgggttaagcgtaacttaatcgattgttatagtagttactgcaaataattaatatacacgaatatatcataatgcaatgcaacatatattatatatgcatataactcaagcagcaccaaaaaagaacaagtggcatagcagggaccctagcatggtccgatatgggaggaggttgatgaattgattggccattatagagcccaaaatgcaacaacgacaaggttgcccgggtaaccggtacgccaacgtggttacaacccttttgtacaaccacccaccaccgccactagttcgacgatagatagcgtgattgatctcgatcggttcccttttggactgttgtttctagctgtgggcattgttcatttttgattattaattcatcatatttcagcatttttctcaaccacttttgttcgttttcttgctttgctttctggggtttattat

SEQ ID NO: 4414 - DNA, 508 bp, Cannabis sativa
tatttatatgaatatataacgtacgtgaaaatcttatctgacctcaacatcatatcttatatttgtacaaatagccaacttcagaaaagaaaagaacatcatcaatagtttcttttcttacatgtgactcaaagtactttttacctttttgtgtttcaaaattccttatagttgtaataaaaatgtaacttcatggtgttaatttttttttacctaaggtaaaaataataataatatgtgtatttgaatacttgatatgtgaaaagccttttcgatattttaatatgtggagtgaagtatcagattttttagtgagagttgagagagatcgaaagcaagaagtacaaggcggtccaatgtttagccttactcgaaaactcaaaagaatcaagctaattcttaaagaaataaataagaatgggcttggggatcgtgggggcgcaacaaacttttactaagatgaaggtttggccggaagctctttagaaagatccaaccaacctaaatc

SEQ ID NO: 4415 - DNA, 1012 bp, Cannabis sativa
taataatagggacaaagtcaatatacaagatcaagagttgactcttattttggaaaataaaaagagacgcatggatggtggagtaaaaggtggaagtgatgatgtggtaactgatgtggagaatgatgctgttatggagaaggagattgatgatagcgttgggccaaaaaacttattaaaggtgggtcttggttcccaagcccaccattcattatgagtcttatatcttagaattaccatgggcttgggaatccatgggcttttcaattcataaaggaccttatggtccaaaagaaacccaactttgtgtttttgtgtgagactttgtctaggaaggatgttgttgaaaggcttcgtgtgagtcttggttttgaaggtgcaatcgcagttgatgttcaagggaagagtgggggtgttgctatgttgtggagatttactgaggaggttcaggtgcttggttatggagttaattatattgatgtgtctgtcaatagtagtgacaatggaagatggagacttaccggcttgtatggggagccaaatagaagctttagacaaagaacttgggacttgatacgaaatttgaaagaagagcaggggttaccttggtgtataattggagatcttaacaatgtcacttctcaacaagataagagagatggtaatgcatatccaaattggcttattaatgggttttgcgggatgttggatgattgtggacttcatgatttggatttggaaggatactcatacacttgggagcgtggccgtggtacggacgagtggattgaagttcgaattgatagagctattgttacccaacaatttcttgacatgttccctactgtgaagttgattgatttagaggtatctacctctgaccattgccctcttcttttagtccctcttaatgttatttctgttgctggtaaaagagttttcaggttcgaaaattcttgactaaaagattctctctgcagaaagattgttgaggatacctgggatcaaaatc

SEQ ID NO: 4416 - DNA, 1167 bp, Cannabis sativa
ctctttactagagaatgagaaatgatatttaaagacatattacaatagaaaaaggataaactaaagaaagatttccaaacatgagttatatcattaagcaatataccaaattcattataacgaatattatgttcgcctagaccaagcgaagacaatcagagaaagttgtaacattctttatgaaaaataccattgcctccgcaacgtgggactcaaaggtaccacccaaaggaaaaccaccagaaaaaaacactaccttattgggatccaaagaaactaccccaaccccatcttagaatcctcattacgagggcgagcatcaataaaaagatcaaccttacccaacgtcaactggtgccagaaataggtctcgaccataaacaaggagagggttgactagtgtttaaagaaccaccactttgagcgtcttgatatctccaaagatagttaagagctcaagagctaaccatattatctgacgaaagcttatgatcatgaacaaagatgttgcgcctatgccaaatgcgtcaacaaagagcaataaacttctcaaattcccgtttacttaaaatatgcatacaacccaataggagatcatacaagctaaaattatcttttaaagaatcaagacatttaacaacctacttagaatgaattgactaaagcgaggagcaaaaccataaagcatgaatgatagtctccttattttgaagacaaatgggacaaaccttagcataaaggccatgatgagtcaaattggcatagggatgcaagaaatttaaactttacaaacaaaattttttatttttggagagatattaaggccccaaagaagcttccaccaacaaaaagaaccataagaagctgattcttggcccaaatccaaactcaaaacaaagctccaaaaactactcttaacagtatacataccattatcaaaaaagtggcaaataagcctatcttgtctattaattaaacaaagagcatggaatagacaaaatagccttggctttcacattgtcaaacttatcccaaataagagaagaatttcacctaccagaatcaagtttgagatcactaaccaattaaagagtacgacccccttaaaagaataggtccaacccacatggtactttggtatccttgcatcttcccgaatcttgatag

SEQ ID NO: 4417 - DNA, 1351 bp, Cannabis sativa
gtgagaatatttggcttagattagatatcaaattatacacaaatcaaataatgtccttgagaatgtaacttataatatataataatagttttttaccacttgaaaaggagagtataccctagccattataattccttagtttctcaagtacacactagctaaaaaacaagtattgaattatgattgaatggtctgttggaagaattttttttgctacatttagtaaacttctgggtaatgaaaatatttcgtctcactattcacattatcaccaagtgaaaaaactagaaagattatgcaaatcttgaaaagcacaagaatacaaaatttgttgcaaaaattacgactgcagaagaaagatgctgattgataaaaagttagaaagcaggggtgtataagtcattttacatagagatgagagggcattttcgtaaataaaaacaatgtcccaaagccgaaaaccagtcagctggtttcggctcaaaatttatcttaaacaggcttcggtcccgctcatgttggccccacagccctgtaactgcatttaatatgaaatcactattatacccctatctcactcctttataaacgaaccttcccctcttctttccaaaccctccccaatcaaacaaacaaaatctaaaaagaaaagagacttccctctctctcgttttcacactaacactttctcgcattttctcgggaaaatcgttggttgtttgtttaaatactcctgatatcagagatggcaaagggaaagttgacgaagatcaagtctgtcctgaagaaattgaactcgttcagcggcaataagcagagccgtacgagcagcgtgaactcagttgctgacgattcctgcacgagtaccatctccagagatctccacccagtttacgtcggaaaatcgcggcgacgctacctcgtcggctcggaggtcatcgaccacccgctcttccgggaactcgtagggaggtcagcggcggcagctgatgattccgacgacgtcgataccgtcaacgtggcctgcgaagtcgtcttgttcgaacacttgctttggatgctcgagaacgctgatccacagcctgagtcattggatgaacttgttgagttttacgcttgctgagaataattattctcattttcaaaatgaagaaaaaaaaaaaaaacaaagaatgatataaaaaaattatatataaattaaatatatgtgtatgcatgagtaattctgtatgattgggtagaaaataacaatgaggactaattgatggtctggacggctctgtaaaagttgtacattatttgttcagagttcaataatggtaaaaatataggatattatgagagagagtag

SEQ ID NO: 4418 - DNA, 2067 bp, Cannabis sativa
  modified_base (735)..(740): a, c, t, g, unknown or other
  modified_base (982)..(991): a, c, t, g, unknown or other
cacaaacccatagtgtccttcgtgagtttgaaaggctgtcttaggtacatcctcaggtcacactcgaatttggtggtatcccgacttcaagtcaagcttcgtaaatacttgtggcccatataactcatcaagaagttcatcaattactggtatggggaacttatcagctatggtttcctcgttgagagcccgataatccacacaaaagcgccaacttccatcttttttatttacctatagcactaggcttgagaatggactcacacttggctggcaaattcccaccttcaacatttaacacaccaatctctcaatttcatcttcttgaatatgtgggtatcggtaagggtgaatactaatcggagtcgttccgagacgaaggcgaatagcatgatcacgaggttgtggaggtggcagtgtgttaggcatttcaagaactctagaaaattgttgaagcaacccagccatagctgttggaacccggtcatcactttcattggcacttgtatgactcaactccaccacaagccttcctgagccacttgtatcgttttaactaggggtgttcatccaatccaattcgcactattttgctcatagtgcatccgatctgcactaagtgcgtttcaatttttggattcaatccaatctgcaaaagtgcagattggatcagttgttatggattagttacttttcaatatttatgattaatatatttttttttcacataactannnnnnaaataaaacaaattataattattttatgtctccaacaacacattacaataaataaaataacaaataacaaatttaaacgaagaaaaaaaaattgtatgtataaaagaaatgtttacttttattttaaattgtatgtagaaaaaaaattatatataagaataatttattaagttttgaaatataattgtattatatatattagattttgaaattgctatttttttacattaaaatattatttnnnnnnnnnnttttttaattttttttataaagatgtatagattggattagattgattacttttacatgtcaattaacatttaatgcacacaagtgcgaattttgaatttttcaatccaatccaatctgcacaagtgaggatatccgcactttacgaattagattggattagatcgactattttatgaacacccttagttttaaccattgttttgagggagacccgagtcttatggagggtcggatctcctcgcaactccactgttctgccccccactttgaatcgcatcaccccttctttccattggtgatacgtttctcctaagctttccaaccactagactcccaaaatcacattagtgcttcccaaggctaggggtagaaagtcttccacaatatctactgattgaagggtccccctacacaaattcctgttcccttcactgcttctccaattcccatttgcactccataagagttagtaggcgaggcgtgattattatgtttggccaccagcgaagaagctatgaaattatgagtagctccattgtcaattagaacagtaacctcttgaccatagacacttcccattaatttcatgttttgttaaatctaccaccgaattcaaagagacctccaccacttgcgcctcctttaaaccttccacctcggcaccctttgattcatccatggctagcatttcttctaattcttcaaaatcatcttggaccaaaattatttgtaatttaagagccttacattggtgaccacaagtccaaggaccatcacacttgtagcacaccccctagccctttttttttggacttctgtttctgtcatacgtcgatatgtttttggtgcatctttggccattgtagtcgaagggaaacgattgtaaatcccttgaggatgactgtttgggtttgaacttagtcccttagaattgggccaatttcatggcctattagggttactattagttgacccaaccatattagtgaccccataactcttaattgggcctccacatttattcggcccaacacaaaaggctcgaaccacttttgggtttgcttcaacaacctca

SEQ ID NO: 4419 - DNA, 2231 bp, Cannabis sativa
tttgtttagttatttgaaagagaatgctttcttttagctgggcactgaagctactgtccttcattctaacctttttttcttcttaaattccttgcaggtttttgaaggcaatagaccggtttaatgatcttgttgtttcagtatatgttacagctggtcatatccttgcaatattgtgattttttttttcattctccttgttatttataaatgctttgtttttattcatattttaaacacttgcatatactcgatacttgcctcaaactgaactctgctactggttaagaaaataattaggtcatttccattcatattattgcctgaaatcatatgaaatgcttcatgtactagtgttttggttttttgttctctttaactagaaacatacatacacgactgatgctacttcatgattcccggaatgatgatggcataaagagctttttccaagaggttcatgaactctatataagggtaatagcttgttacttcacttttgataattactatttttcttgcaaggcttgttattttccagttgatggtctcgttttaagatgttctcaacttgttgactggatcaacttttctttttcttttgttcaactttatatcatagtgttcatatttatctctaataacattttacgctagaatgaaatattttgtttttggtaactaagtcgtgtatttgtttgccaatgtcatgtaacctttccatcctttagcctttgtgtttgtgaattagttaatttctgtcctgtcattttttgatctgctcatgttaaattgatggtgaagtatggaaggatcaatgtagttgactgtcagagtttctattaagcattaaaaaattaaagaaaaaatgatttccccaaattgatagcaaagaatgcaacttctgcaatacaaatagaaaaatctagacactgttattggtctggactctggggaataatagtacaactataaacttcactttttccacttaatattctccaggaaacaagttaataatatgcatattggttaggttactgacttgtttgattttttacattttgcagattcttcttaatcctctatacttgcctggctctcgcattacatcgtcacattttgataccaaagttcgtgctcttgcaagaaaatatctataaagcccatttactctgttttttggcacaagtagttttgatcacataatgcacattattctggttcctttgacagtttgaggaagcattttccttgtagtctacaatatcaaggctatgttttcatagctggtgctatcttttctttaccctaacaggaaatatgtagaaatttcatgtttgaagttcatacttttgtacttccagtaagaaggcgcatatgttgtatttacctattaatcttttgcgatcaagtttctgttaatttagtgaaatgagtatgaattgaagggaatgaagcactttctctttttggccaaaaccaatttatttttccatctttaatcctctttcctgcatgcaaaagatcctagaagagggtcatgctttaatagacattgttctagtcatgacaagtttttgagtcacattcattagccaaatcaccagtagtctcgttttaaagattgtgctcgactttgaaaatgtcctcatagaacactagttggcacagtaatagcattattctcacgtctatcaatttcaaattattttcatgagaattatgcaatgaaaatctatattcatgttcttcatttgtgaaagtgaaagtggaaacatagaaacctcaattttatacacatgactccgaagcttactaataaagagacaaaacagtccttcctctttctagctctatggcaagttaggagttgtttacagtaacaaaagtcagcctttctgttatgtacaaccatagttattgtcacaagttcctctcatgtggttcaagccaaggaaatccaaggaactcaaaaacctctttctcttcgttaaatttcaaactcgcagtggctcttgttgcctgtcaaagaagcacacatagccttaaatagatataaaacaaaaactgccatagtataggaagaagttccaacttccaaagtatttacccgtgtaccaggagatccatgtgttgctggatacaacccagtgtcatcgagccgaaatccttttgagtcagctagcagtctcaacctgcagttattaagtttccacagtatttccctc

SEQ ID NO: 4420 - DNA, 995 bp, Cannabis sativa
ataatgtcactccaccaacttcccctctctactgaaaataaagaaagagacggaaagagattagcgcgcagagagaaaaagaggggagagagagacttacatttttggcagccggcgttaatggagacttttagatttgcggttgtaaaaattatgttttgtattaaaagaaggaaaaaaaaggcataataaaaataaaaaaattaaaccttttgaaattaaattgtgaagaacataagaagaattatgaacaaattatataaaaataaaaacctgcaaaagtctatgagaacgattacggggcaagcagtgaggacaaatactgatgcaataatccaagcagaagatgttcttctcgttctttttggcatcttcgtgaattatacaagtgttgtagaacttttcacagagaagaacttcaagccaacggggtagagcaattgacgagtcaagctatacaatatcaaataaacttaattaaaaatcaattaatcaacaaaccataaaaactaaaagcaaaatcaaaatcaaaaaattacttgacagagagagatgtccaacggagaagggaagagaaagagagattgctaaagggcggctcggggtggcctgtcaacgttaatggagacttttagatttggggctgtaaaaatcgaagagagagatgttctattaggtttttggctgtaaaatttcgaatggggataaagagatctgattgtaaattttaggttttgttatatttaaagtatttagcgtcagtttgaattagacacttaacttgtatatagcgtccgttagtaacccacgcataagtaaatatatttttataaaaaatataaattatctcgtcggttttcaattaacgtcgaattaacaattgacgctaattgttatttgtttgcgacagttagtaaccgacgccaaaattccccctttgttttttgcgtcggtcacggccgttgactgtcgtattgactgacgcaaaaactgct

SEQ ID NO: 4421 - DNA, 681 bp, Cannabis sativa
aaccaagaagaaatactttcacatgtgaataacacagcgcaagcacttgccctctttcatgagatcgaaagctttattgatatccccaaatgccagattatgtgttatatactcgtcaatctgaattttctgaaaggaaaaaaaaaacaactgtcaatgatctcttctgcaaggaatgaatgcatacatacgagcgacatgttctaaaacaagaaaactcttcagtattattcttaaccatcctgcaaggtcagaacacctttgacggacaaaactaacttgaatatgatgaaataggaaaaagaaaggcaaagatgagaatagcatagaacaaattaaaatagtcttcatacttgaggcatcaaccaaaatttacatgatattatgtagcaactttctcaaggcatactaaagaaaaatgcacttattcaaacggtttctactgctaaattaaaagagaaaagatgaatttgattgacattgaatacaagaagcatataaattttcagccacgttattcatgagttatgccagtcttgcaaggtttatctggcgctaaaatcacacatgggactatagttttatttgtgtgcatcccctctcatgtttctatgttctgtttctagaaaagattaatgtttaatagcataccctagcaaaattttcatgcatggctatttg

SEQ ID NO: 4422 - DNA, 1349 bp, Cannabis sativa
caaagatacaaccaatgcatgttgttgttgggagacaggtaggtggaatgctgaaagactagctcagtggttgccttagttttgttgtagttgcccctagcatcaatttcatagtaactgaggtgagaagctttgaaatttatttgttgaagctatcttctagcagtgagatagaccactggtgagacgtagtgggttattgcttgtgctcttggtgctcgtggtgaacttcgtgcacgagtttgatatcttcttgcgatttttacatgtaatgcctgcatttgctcctgcatgatcatgtattgtgtatttgttaattgaataataccgtcgaaagcttgagcgggtgttattggtagaaaatggaccatagtggctgtaggtgttaaagtttctccaacatggcctgaaaaataaaggaaatagattgaggggtattgtggtagtacgccccactcttcccatcacagcatcaactgggttgtccttccaccagtaataggaacatatatagatagtgccaatgttgatcgttttgatgttggtgttcatgtttgtctatttagtagccattttgattctcctcccaaagtcttagataaacgtttctcatagacaacatcaaatgttgtcggaaaaatttaaacaacaccaaaaagagcagtattcaaacaagataaggatactcatcaccagtagttatgcaagtactcacttagaattcctaacactcaaattttaggctacgaaatagacaaaagctagaacattaatataaaaaagacaagagaattatagtggttcagtcagatttcggtctgcttagtccacttttgtaatagttttcagcttagcttattagatttggtatatagaaagtagttgtccgttaggattaatataaacgtttaaagaataaatacaagaacagtttcgtctgttcttatctaaattgcagcaacacgtgtgactaactaagtcgcagtttgtccattcatattccaaacacacgagctttcgggcttggtgttattcttgcataataaacctttgggctttaagcctaggttttatttatgaatgtttgtgattatctttgatagcatactcggacattctatgtgttgacaactaataacatgtgaattcttgataagtcatcgaatacattagtcattcgaaccatacttatgtaaagaaacggtcttcacttgtcgcgggggagatttacttgctcatcgcatataatcgatatgcgcaatgagtattaacttctctcgatcccgcttatcttttgaccatgccagacatagttatgtgaccagggccgtctcaaacattttagaggc

SEQ ID NO: 4423 - DNA, 1631 bp, Cannabis sativa
tataaatatatatagtattgagggtgacgtggaattgggtatgtgtagtagcttgttgaaggggtttgataataatttagatatatgaatgaacaaacaaagtagctagctaggtacgtatatagccaaagacaaaactgaaaggcagcgtctttaatgtaagtagtggcaatcggttttggcttctacctcatgcagcagcacaagtgtgttgttacttacaagaaatatacatatcatatatatatataatatatatcatcaatcccattaatctttttttctcctttttttcatgtaacattttcttttctcttattactttccgttcaccatttattatgtctatatatatgtacaccctctcctcatttctatatcttcatatcatcatataattcacttctctctttctctatacggcctcttagttctgttcttatattttcttttctaatctctctctatatataataaatagagagagagagaaagaaagagtactatttatacttatatataattataattaattaaaataaagatgggaataatgaagtcaagagtaggagattgcatgccattcttggtaatggttatagtgcaattttgctatgcagggatgaatattacgtccaaagttgccttggactctggaatgaaccctcttgttcttgtctcttatcgccaaatatttgccactttagccattgcccccttcagttttctcgaatggtacgtatatctatatacatctatgtcatataaatatatatatatatatttatagagagagagagagagacttatcctatctatacatatatagtttgatcaaattttcttcatctgagtacaatagtgtgtgtgcaagtatgttttcatttggtgattttaattattattgctagtctatataataataatgcaaatcttgaatatatcttttttcctcaaaagaaaaaaaaaattcttgatcaataacaaaaataattatatagctgctatatgtaaagactgatatgggtttgtaattataatttgatgctcgtatatatgtatatatataactgtgtatgttcaaaagagcgtatatacactgtgtatacatattaatttttgttgttgttgttgtgataactaattaatttttataatatatatatccttaaaatgggaacttatatataaatagggttaaatatttatatttatatggatatatatataataaaaaaaaattaataattaatccatatattgtagaataagcaagttttggctgattaacaaattggttggtgaaatccttaaataaagcaagaaaagaagcagaagagtagtgtattactaatggtgttttcacctttaaacctccctaaaaactgagaaggacaagaaatattgtactttctcataatccttaaataagacatatattatttttgtggagaactaccaaaattatatattaataaaataattaaaaattcaattaattaatttccctcgttttgtacctgtacactccaatgttgaaaacagttaagaattctagaacgtaattaaccaaaagtacacactgaaataagatccaaacactatatagagagagaagcgtgataaaattt

SEQ ID NO: 4424 - DNA, 737 bp, Cannabis sativa
caaaaggagcatgtggtatcttgaatggggatagacatactaagtctttcttttgtagggatgcagttggcaaggagtctccaccagaacatcttaaggcggttgtggatctttgctccccatatggatttccatttcccatcgccttcgttactgtggttgccattctttaacaatctataagccgatttaatagtaaactccccattagtacttggcagccacagccaagagtcacgaacaggcctcccaggaagtgaaatattgataatgcgttttgcatcttcatgtcgaaaccatctccttaccaactcggtattccattgttggtccgtaataaaattgcttaccaagctgatcattcccgcatcaactacacaaggagtaggttgtcggatatcccctggaacccacggatcaaaccagatcgaggtggagttgccatccccaattttccgacaaatgccttttccaagattcgtccgcgtacggagaatcgctttccacaggattgagtccgactgtttggcctccaagtcaaggaaactctgatttttgatgtatttatcattcattaccttacgccataagcactcctcaccattaagaatcttccaggcccacttcatgagaaatgcttcattcatcgtctcagtggcccgaaatcccaaacctcctacactgttcggtttacagaggcgatcccaagaaactaggtggagcttcctctttaactc

SEQ ID NO: 4425 - DNA, 2247 bp, Cannabis sativa
aaggccccaaccaaaccattgtaagtcgtggcatcttggaggggatccccttcatagagtcacaaaggtgtgagggagattagggtggtgactggtttggagtacagagggtaagttttagtgagtacatcccgaatatatttggcctgagaatgatgaagcccaaagcaggggcaatgaacttgaatacctcgaaagaagtgcaatgggcccaagtctttgaccgcaaactgggtgttaagatagatcactaatatatcaatggatgaagaagaggaccccctgaagatgatatcgtccacatcgataaggagaatgatgatggcaataggagaccatagatgaagagagaagtatcagctttaagagcaacaaaccccaaagaaataagagcaatactcaactttagaaactaagcccgaggtcattgttttaagccataaagtgatttagataactaacaggcattgtgaggatgatgtggatcaacaaagccctcgagttgagacatataaatggtttctgtgaggtcaccatgaaggaaggaattttggatatctagttgctttataacccaattataagagataaccaaagagagaaacaaatggagttcaatttgatcacggggttgaatgtctcatggtaatctagactagggattttgttaaaacccttggcaacaaggtgagctttgtaacgttcaaccaaaccatgtgcattgagtttaacattgtagactcatttacaaccaatgattttgcagccaggatgaggaagaacaagaaccaatgtgtgttgtttggacaagcagtaatctctgtacccgttgcagaattccacatggggtcaatactagcttctttgaaagtagaaggttcaaccggagttcttgcagcaacactataaaacaaatggggcttgtgaatgcccgatttacctctagtaaccatgggatgaaaattaaaatgattaatggtagggtcatgggggttttgcatatctgccatcaatgtgatggggagaggagaagaaaaagaagaagaaggattagaagaagaaggggatatcataagaagtgtaaaaaggagaggtggagatggtgatttgtagaaggtggagtgactaggggagtgagaaggagccaattcttgtgattaaggtggcggagggtgaggaggatcattctgtatatgaataggagaaggggatagagaaaggcaacgatgggataactatgtgtggtttggttgatggcgcagaaggttgagaaggagtatagaatgggaaatgaaattcattgaaaacagcctgacgattaaaaaaaatgcaactagaggaaggatagagatagagataagctttgtgttttctattgtagctgagaaaggtgcaaggagaagagcaaaactcaagcttgtaaatattatagggatggaggaaaggaaaacattcgcagccaaaaactcaaagtagagtatagatgggaggtttattataaagaagttgataagggctggtatagcggagaatgtgagtacgaagacagttaatcaagtaaatggcagtgaagaaagcatacgaccaatcgtgtagaggcatttgagctttggctaaaagggtcaatccaattttgaccacaacttatttttgtgttcaacttgaccattttgttctggagtgtgagggcaagagatgtcatggagaatgccaagttgagtgaagaatgtggaaagggtgcgatattcaccaccacaatcagtgcgtatggtttggatggtgctttgaaaatgtgcggagactaaatttttcaaagtatgaaaggtttggaatgcttcatgtttagttgtgagtgaatagaactatttaccgagatttttgaaagccgattatttagagcttaagaaggaagaaaaataataaaaagtaggcacatagtttttaggtggttcacacatttattatccttagtccattttattagcattgtaggcaagcattgcatattacaagtgtatatagtttaggcgtccactctttattcctctcgttcctcttaaaagaagaagaagttaacaggaatttttatcagaggttctgtatgttgaagaaggtcttcccttgttcatgaaatatatgggtatttataggaggcttattgatcagcattccttcagggccgacccaattgccaaagatctgacagttgattcggtaggtggtagctccatcgtgcggtgcacagag

SEQ ID NO: 4426 - DNA, 1134 bp, Cannabis sativa
caacgacattatcgctggggattggctgacaagtagcagtgtgtcagccaatctccaacaacaatgtcgttggtcgctatcttggggggaaatctggcgccattttgcaacgggtataattcaaaactaatcccaacgacaatgccattgggattagttttgtcgttgatgcttgtatttctgaaaataaataaataaataaataaaagtgccaacaacattgtaatgtcgttaataatggcctttttagtgaggactttaagacgttagtaataggggcgttggtaatgcctcttattcttgtagtgtaattagttgtggttgtaactgtatttatttctttttttcccttatttgttttttactgctaatgttagttaattagttgggattactagctatatatgtatattaatatttttagatatgttagttagagatgtgaattgtaataagagataaagagatttatgttgagaaagagagttctctgaggtgtgttcagagaagaagatcgagaagccattgatgaggcatgctcttagtcagtaaacactagatttggtttcatagtagatgaactgaatccagtgatcaaagggtgttcatatattaaaggattaggttcttcaacacattattagataaaagtttgaacctcttaaaattggttgtgttcatctttatgcttttatgttcttgtactatttgattccttgttctaattaaatatgtgcagtgttgtgttgtgtgtgtgagtggagattggttcgagattagagttggttttctagaaaccagcatctagaaataagggattctaacccctttcttagtggtgcaataatgactctatctataggcatcaatgcaccttggatctgcttgatctgggcccaattgaagttgtttttcttacatttgacccacttaaaaactggttttttaactcgaacttttttgctatgtcataaaaaaaaatctcacaaaatttttcgggtatgtacgttttggtacatgtaatacgtttagaaatataaatactctattatacaataataaatcaaaaggcataactttacagtaacaatatttaattttaaaagttttaaaaaattacattttaattattca

SEQ ID NO: 4427 - DNA, 888 bp, Cannabis sativa
gccgccagtctcagcctccacggctcctcgacttagccgatctcgagttgggtaaggagtacgaactcatcatcacaacttacgccgggttatgccgctaccgagtcggtgacattctacaagtcaccgggttccataactcggccccacagtttcggttcgtcaggaggaagaacgttcttctgagtatcgactcggataagacagacgagtcagagctccagaaagccatcgagaacgcctcagttcttctccgcgagttcaacacgaccgtggttgagtacacgagttttgctgatacgaaaacgattcctgggcattacgtgatttactgggagcttttggtgaaggactcggctaactcgccgagtgaggacgtgttgaatcgttgctgtttggccatggaggaatcgctcaacacggtttatagacaaggaagagtggctgataactcgattggaccattggagataagggttgttaaaaatggtacgtttgaggagcttatggattatgcgatttctagaggcgcgtcgattaatcagtataaggtaccaaggtgcgtaaatttcacacccataatggagcttctcgattccagggttgtttcggtgcactttagcccagctgcaccgtattggaacccagaacgacgtcgttaagctctaaactggtttggtcatgatgagatgatgaggtggcatggacacggaacagtattggccgggtcgagcttagctaggctaaattaaataatcgcagaaatacatgaagtttatctatgtgactatatattatatatatgtatgtcgttatatatcatcagcatgtagctttattattgttaatttagagattggagttacatgtagtttttttttttttttt

SEQ ID NO: 4428 - DNA, 906 bp, Cannabis sativa
ttatatttatctgatgcctcaaatttttaaaaacaaataaacataaaccaatttttctaaaaaataataacaggattaagtatataaaatcaaaacataaaaaccctatataataataactaatatgttttaggtgtatattattttataactaataaatttgtaattatttattagtatagatatgtaaattggcaagtttaattaggaaatctcttgtagctgctacacgttaaatccatatattgtggagatgtatctcttgtagccgttatcccctcacagtggccacatttgatcaaaaatcaaccgatccagttgaattccatttcttattgtcagaaattatatattgttcaatattttttttctcttaatttggttataaaatgaatataccctgttgatgaggcttctttgatcatatatttgtttcacagtatacatactaggcaggtcttgattaaaacacatatcttatgttaagtggaggagtcaactggtcaagcagccattaggacttagaaatagaatgggagcactcagatcaaacgactaactttataaattggacatatatagctaaagccatctcaaaatgaaaatagcaaaatgggtcaacggtcagatatattggaatcactatcaacgtcactagtgtcccagtgtcacagcaatttccccaacaagttcgcactcaattccagtcctttaattaattagttttcccattacccatgtacaacaaccaaaagtataacttattctccatgtatctaaacaactcccattttgatatttttttaacaaccctgatcgtcctataaattacagccccctgtcacttacactttcactctcatctcatcccaagatcatatacttttggatctctctctctctctc

SEQ ID NO: 4429 - DNA, 1036 bp, Cannabis sativa
ccatcaaaataggcgattcttgcaccttccactaaagattgcacacttgattgggaaagctcgtcgggtttcatggagggatatcccggggtatgaatacaagtacgagttttcctacagtatcactttagattaatgaaatgagcaaaaggagaagaaataaatgattgcaaaacaggtttatcatctccaaacttattgcaaacaattcaaatataagtgagtgataaagaggagaaagtagggcctcactcacgtttgatcatcaacaataatataggtaaatggtgaattaccatcctttgcaacctggaaaagtaagccttaatgagtcaaaaagtgcaggcgaaatgcttctaactgtcattttcctctttccattctcgaaagaaatgaataatttattgaaaatttgaaaatattggcgtaaacatcctaaagaaaatatgaaaaatcatctagcaaaaataagttgtttatcccacgaaagagcatgcacaactaatccatacaaagtcacattagcagtccaacgaacatggattagagacactcctaaaatctcggtgacaaacttgctaaatcctcaaacaaaacaatgatccaagataaaaacgagttgcttagcgaaagcagacacagctgctaaactacagtagtttatatctacttcaacgaaaatatgtgagtctatctatacatgcaatttgtaaatgattcaagtaaaagacattaaaaactcatcataacttacaacaaaaaaagaagtatctacaccatccgattctagctcctccagtatagccttgccttgagaatcattagcaacctattatatcaccaaaatcaataaccaaaaatcctctaaagagaacacaagaaaaattgaaagattgttcatttttttttacataaataaagctgagaggaatatgtgagacaacaaatttaaaaaccttggaaactagcctcggatttaagcccaaccgagctgcacaagtcaaagcgttcgcggcgtttccaccaccttgaacct

SEQ ID NO: 4430 - DNA, 1160 bp, Cannabis sativa
cctccgccgccatcaccgtgatgcgagtgggatccacttgcttgtgagtccgatactccggtacccgaaaggtgcctgtacggattgagcccaccggtcagcatgcccaagtgcccgtccccgcctccgcttaaattattaccaccgctaccaccacctcctccaccatcgtttgaagcacctaattgctgactcggcagtagggcaaaaggaggaggaaaattcatgaaatgcaagccactcgacatagttcccctatacaaaccactgttttggaccgaaggattaaaagcccaaatagggtcatgatgaccgctcatcacttgactattcgaattggccaccatccaaaaattcgccggaatctgaccaccgtggtggtggctagccggaaccgacccggtaccgctagattgcataaggtaactccccatttgattcaactcctgctccgccgtggcttgcctccttttattcctcccacccataccgtcttccccagaagccgactccgaaaagtccaacgtcgtcgttgcgtctctcagttcttgtttcgcctgcaacattgagtgatgaaagttaaccgctgatgacgctgctggtgactgaaagttcaacagcgtcgccgtcgaattattgttactgttgttgctattattactattattattttctgaagacggggaaagcccgattcccgggaagaaactactactagtacgcctggccgatgatgggaccgaaaaattagggttgtagtaggaagaccggatgtgagatggtaaagacatactggagcctgagctccggagagagatgttaagagaggtgaagttggcggggattgtaccggtcccggtagcagctataactgcaggttcggcttgctggagtaaccactcgattgtttcaccatcggacttgtgacctagctctctggtgagctggaagacccgggcggcacagagggctggcattcggatccggcggccgcggccgtccacctttgtgtgcctgtctttagtagaagttcgctttggcgcgggcttctttaaagatgtctcggccgcaccggcgactactacagccgtagcacttgtacttttattagcaccactagtgctacaagatgttgtcgtactaaggtctgcggttgtgcc

SEQ ID NO: 4431 - DNA, 1664 bp, Cannabis sativa
atatatatatatataagaaaagcacgatgatgatgctttaactttgaaacttccaacgacttgaagtcgtagtctttaaagaattcataaacaataatttgattaacttagtcatcttgatgatcctacacatatatatatttgtaataatttatcgagaattgctagaaagcactattggtgcctatagcacccttctcggttcgagtttcatataatttaagaaaatggtttttaaagaatatcactaactaatcgtgaagcgcaacgccgccgcaacctatgaaaggtgctagacactgcaaaaatagcaatgctctaaataatatttattaaaaagtaagtattaatatataagtaatatatatgtttatataactgtgtaatagtcctctggtgataaattaatatgtattaatttatcagaagaagagattgacgaacttaatacacgtaattattgttgaaaaacggtaaagatatgatgaaattagcacagatcttgttgatcccacttcaaaaatttagttaattaatgctttgtttaatggttgttgggttgtgaatagttaatttggaacgagtgaagtattgaagttgttgtcgacgtattagtatatattttatttatttaagtaatatatgtctactatctatagagagagactacatgtatgtacatgcatatattatagaattaatatacaattaatacatatattatacgtataaaaaagtattatatatatatattcacgtgtattagaagtatagaagaaatttttaatatactggtcgccttcgtgtacattatttatgtatttattagttataatcacctaattaagaataaaatttaattttaatatactattatctaagtatcactatcgtacgtggtcattagtaatatatatattataagaaatgaacataatccactggtttaagggtggccacttgctaattaatatatatagtactgttttatgtctattaattaatattatatatttcaggaaattcatctacctttctttgatttctccttcctaacatttctaacttgcattatattatgcctactatattattgaaaactccctacatttgggggaacaaaaagctaattataacaccatatcattctcaatatttacttaatattatcaatatttgaacattatatatatttatatataaagagattgttaagtacgtaggtcatcattttttcttactcataaggatattatttcttacattaaataaaaaaataacatttaattacttttgtatgacgatcgatgccttatagttatatatgtaacagatatccggggtattttttttttttcaaaataatttacggtgttaaaattaaaattaatcaaactattttcttcttcatgaattataaaataaattaagcacaaatgcaactaaatattttgatattaggttccacacattttgagttaataaataatatatataaaaaatcactaattaattatataatactaagtattgaacactttaaagtactaaataacaatgtttgtatttttcatgcgtgagcaagatatttcactcatagttatactaagccttaatcccaataaagatttagaaaaatgataaatcttacaaatcacacacac

SEQ ID NO: 4432 - DNA, 593 bp, Cannabis sativa
ttttgagcatttaattaatattttagattcagtttgtgtttctgtttcttggattctaggaatgcgcacctcacgcattcgccaagtgagcactttgtaataggtgtaataatttctttaatttttgaaagataatacccgaactttactaaaagatgttagtgatattttataatagctattaaattaattatataaaatctaatatttatttatattaatagtaatacaacacccttaatacattttaacttttttttttcagtgttctataggtttgttgaaaattatagatgtgctaatcaatattttgaatgtgacttgttactatataagttaaccatatattctgatatgtaaatatactataccactgctacttttttaatatttttttagtgcccacacgtttattaaaaattatagatattttttatcgatgtggatgtgaatggttacttggagttggagatgatgtgttttgtcttaatttcaattaggatgtttggtttcgtgtatgtagggcttttggcgatgagaaattgtaattttgatggtttctttcgtttgatattttatgttaggctaattag

SEQ ID NO: 4433 - DNA, 1010 bp, Cannabis sativa
taattttactaccaatatcccattatacatttattgatatcccattgattttgttttaggtaatgatatatgatacagagattttgtttttacatatgttagagtgtgaactttggtctgtctttagcttttgtggttacattctatattagaatttacagtttaaaaagattatcaattacaatcttataatacaccaggtcaagtgtaattatggaaaaaagaagaaaaagaaaaaagaaaagaaaagtctccttcccacattgtcacattcaagtgggatttgtgaatgaaggataggttggcattgacattgacattggttttcaattgtcttttattattactattcaaacattgatttttatcatatatatatattaattgtacatatgtagagagagatgtggtttagaacattctgatgtatgaaggaagatatttgtattttgttataaggataaaaaatgatcacatgctcatgtgggcctacatattgttgtttgttctcttcttttagaattaaaactcttcttgtttgatttttttagtctttgtttgagtagaattagggtagcaaaatctcgagatatttgttgttggtgttggtgttggtgttggtgttggtgtaagagaaatacatatacattgtattgtattgtgtgtatatattattaaattcttcttagtattgttagtattgttgtgacatgattcttggttatatgattagagtgtgaatatgtatgtgtataatatggagagataagacttttttttataggaccgagatgtaaaataactttaaatttaaaaactaagtgaataaatattttttcttcttttcaaaatttagtaaaataactaaatataataaataagctaataaaaattataaaaatacatataatacatattaattttgtttttttaaaaaaatatattataattaaattaagttatataaaaattttagtattacatactaatatattgtaaaaaaaaacgaa

SEQ ID NO: 4434 - DNA, 1189 bp, Cannabis sativa
gaatcttgtcagcctcttaggatttgctcagactactcacaatggagatggaaattggtatcctaattttggtgcaactaatcattatactccatacatgcacacaatctaatgcacagttcgtattacaatgaataggattggctatatgttggtaatggatcaggtttgacaattcaacatactagatatattcttcttaattctaacagttcagataaacttttgattcttaatatacgatccatattctacaaaatctattttgacgcgtcttttttattgaaaaatgtttccattgatcccaacaccttaataagattcaaaacgactcaagaacacaaccccaatgcgtcgaattgggttgtcttctccaatcccagtgtaccgtctttaatggtgtcgaaaatggcacagttcgttacgcgcaccattttgttttgtttccttacattcccgagagtcccttaagatctaaaactacctttggtaaacccataaacgacttaaacacattcaaatttaagattgctcaagaatatctatgaacgtgcatgaaaatggtgaattttgttctcggtattcccaaactatttcaatgcactcaaatcctttcttagagcctaggaaacccaataaaaactctcaaaataacccataacattcccaaccctcacacactcggatctctcttgactttttttcaagaagcattattttttctttttttcttaaagtgccgcgacctttagcaaaaggtcgcggttcttaattttttctcaaactcgagcttttttgaatgattggagagttgtgattaagagatagcttcaactctttacgctgaaaattggaaaaactaatttttcgagatttacgagccgcaccaagccatgaaatctattcctaagattctttttccatgatttgattattttcatcgaaaagaaattcaaaaaagatcaattttcacctaaacgtgtaatttcttcttctatatcacctaaaattcacaaaaaaaaaaataaaaacaagttcaaacctaaacaataatacataaaaattactaaaaatacttttaaaattagactcttaaacaaataaaaatatacttataattttaattattattttctttgtttttagtctacatttaagttaataattagtaattatcaatttattttaa

SEQ ID NO: 4435 - DNA, 2061 bp, Cannabis sativa
atttgggaagagattttgaagttgttgtgaatcccaagctccgttacggtaataagattggagactgtaatatctagggtaggtgaaggcagaagatagtgtagcttcccataactcggaacccaggcatccttaaaaatgtttatggaggcaccattccccacaatatgacgtaacccagatctaaggagagattttccccaagagatgctattccaaacaagagaagggcggtgtcctttcccagagtcaagaaaagaagagtgtgggtgatatcggcttttgagaagttgagcaactagagaggaaggagcctaaagaatacgccaagcctgtttggctaacaaagcttgattgaaagctttcattgatcggaaaccaaggccaccatgaaatttagatttacaaagggaggaacaactcttccaatgaattttcctactgtgtgagattcctccccaccagaattgggccatcatggtttccagtttatggtggaaatggtggggtagtttaaagcaagaaatcgcataggacggtatcgtttgaaccactgatttgagaagaatctctttacccccttttgagaagaaagtggagtgccatctgtttaggtggttccacacatgattgagggaggcccaaatatttctcaatagagtcgcgaatagacacattgagcaaggaagtaattcagttcttgactagatcactagtgttaggtgagaaatagagtgatgatttgtcgtagttcacaagccgacccgaagctaggctgtcagcatgaaggagatccttgatttgaactgctgcactgggagaagcagcactaaaaagaatactgtcatcagcgaagaaaagatgtgagattattggtgcattccgggcaatcttaagaccaagagcttgattcctgggaagacgctgattgacttgttgagttatgagcgatgaatgtccttcagagcataataggaagagataaggggaaagagtgattgccttgtcgaattccacgggaaggtataacagatccatagagttgttgattgattgaaaaggagaaagaagcagtggaaagacaggagatgaaaagattggtaaaatttgaagggaactagaacttttccataaccctcctaaggaaagaccatttaactcggtcaaagcctttggccatgtcaagctttaaagccatccagccaactttaccttgtttccgatgagtgaaagagtgagtgacttcttgccctataatgatattatcgaagattaaatggttggtgagaaaagcactttgggctggcgagataattcgacaaagaattggccggtaatcagtgatggcttcatggtgactctttttgagaataagaacaataatggtattattgatgggcgacaaatccacattattattcaagaagctaagagcagcttgaaccacatcagcgccaatcaaatgctaattttttttggaaaaaggtgccattgaagccatcaaggccagggaacttatcactagctaattgggaaacggcttgctagacttcatcggccgtgaaaggggcttccaagcatgagcattccaaatcagtaagtctattagaaattccagaaaggacatagtccatttgctcaggtgttgggtgtgagagctcttaacctaagctattcactctcgatttcttattacaaaataaaactctcttttccctattgctagagtattaaggaatagctcacactaagctatttgatacctacatctccgagaaaaattaaaaagaaattatagaagaaaaatggtttgaattccttacaatatagctagcaacagaaaggacaaagagttaaggaattcagagagaggattcattaattccgcagcatgactgtaagtatctgtactttaatctctgttatgataaattaattagaaacgtaattctacgctgttttatatgttaagttgtttaatttgtaaaataaatttaaaaataacacgatccttgtatgtaatttccaatagttattaccaacacattggaactgaacctt

SEQ ID NO: 4436 - DNA, 1179 bp, Cannabis sativa
cccaatgaatcagacaggcatcccaaccacactaaacctcaacctcagttgataattagatgaccaacctgcatccgaaacaagataaagagcagccatagcaacatcccaagtctccccaaatttagtgacaggaaggtagtcacttgttttggtttccatctcttgttttggtatgagttcgttcattttaggagtgtcagcaattggacctggtgcaatcccattaaccttcatatcataatcagtcccccactccaaggccaaatttcttgttatggcatcaagagcagcctatgcattaggagaaattcagtatgtaaatcatatgtacatatatatgagattgaaaatatatcagaccaaccaaccaaccttggctgcagaaacatgaatttgaaaccaagcagctgtatagtgtaaagcagcactaatgttaaatattattccaccaccacattggctccttcctaatcctcctttctttagatactttagtgcttcatggcacattatgaatgtaccaactgaatcaatgtccataactgcaaaccataatcaaaagggatattcttatgtaatcattctctttattcaaatccaaaatacaaatttgtaaaggagtcatatggtatttcatgggacacatttggagtaaattatgacaaattaatatttcttattagaaaaagtcaaatcaaactgcatatgtaatttttcaaaccacaaccgtactgtaagatcttaaaaacataaaaactacaccacaaaaaatacggtgcagtttgagtagtttacactatcatcattataataaaaattcaaaaatcaatctaataaagttttaacaatacaaaaacaaaaaaaaattattaaagttttaacacatattcttatatgaaaaaaaatatataaaaattagtgtctttataatatattctgcaattattcaattcaaaactgctaactggacttggtcgcgtgatttgacaaaattgtaaactacaatcgcaatgtaaaagatttcaaatcacattatttatacggtgtgatgcagtacgaacattttatgtggacagtttgatcaacacatccacaacattaaattttatgttggagattaattgtggcctttatcatcaaccaacctgttcgaaatccgttaggggacaaatcttc

SEQ ID NO: 4437 - DNA, 2435 bp, Cannabis sativa
gagtagacaattgactcgattcaaactaaagaattgcttaggcatatctcggaaaagatgataaataagttaattattcgtgttcaatccaacttgagggggtgtgttgaatattagcttttataaaatgacatagcatctaaaagatttggaggcatttttgaatttgattagtcaatcttatgttctaggaaataaaatcacagacttttattattctgcttttttgtttctgcttttatttctaggatttccctgatttgtcccttccacgcaatttgttgagttattttgatgaccaaaatatgtttatatattctaggtctctttttccatgtatattttttggaaaagagaaggaggtcacttgacaggcctcccccaccgatattattagagcctcacttgtggcggaggaataccttggtaaacggaaaatataaaacatagaaagtgtattcaatttgagtgacccagcaaaacaagaaccccagaattttacgtcaacacactccattccctccttaagtctagaaaagaaaaatcctcaagtgtttggttttaaagatccaagtgactgtccaaaatttgattctctcccaaactcactccgctgatccatgtatttttatttgttcaaataattactttcttttcagcagtgcatttattatttcttaaagattttggtggtttgctgaaaattcatatagcaacatatttttcatttaaaagccattttatgctgtacttgtaactcatgtaaattgtgaaattcatttgaattcttttgtactattgttctccactcactatgaatctattgtctacaggttgaacttgctcggagattcgaggacctggagctttttagcaatgatacacatccacagtcatccttaataaaggcaagaaaaatattgcttgaacaccccatctcttcttgatatttactttatggtgttataaatttacaattttatgcatcttagaaagaggttctaaagtcaaggaacaaagatcttgttgaactttttggatttgctgttggtgttcatcatgctgggatgttacgtgccgatagaggtctgactgagcgtcttttttctgatgggcccttgaaggtagtgcttattagtcatttagccctcagttccaccataatactttgaagtttgctcatccgttttatgcatctgttacaggtgcttgtctgtacagcaactttggcatggggtgtaaatctgcctgctcacactgttgtgattaaggttggtgttaattgttgcaatctcctcttatctatttctactataataacaataattggtaaaacacaacaagggtaattggtagcataaatacccaatgtttgcattttgttgtagttatagacttttttttttctttttcttttttcatcggcatcaatatccaatgtttgtaaaacaatgattttgttacaagctgctttgtgtttgctccttattggtcctacaaatcaatttagaattgacttcgatgagtcagcattaaatgaagcaacagtaacaaaattattgttttacaaacattggataataatggtgtaaaaaaagagagtatataactttaacaaaatgtgaacattgagtatttatactgttaattttcaaaaaattaaaaaaataaataacaaaataagatagtaaacaatttgaatttattagaataatacacacattttgtatagtatagcactataactgttctcgtctgataatatgaataattattatgatataactcttgtttctcatataagttgattaattgtagtgacatagttcttcttgtttcttattttatacgatgtgataagctgattatgttataacctctttcgtcttgtatttcaggggacccaattatatgatccaaaggctggtggttggcgagatctaggaatgctagatgttatgcaggtgaggcctaaaattccctgctgttatagaacttattaagagcagacaacgctaacatccctcattaagcatataatgttgttctatttcagatatttggaagggccgggagacctcaattcgacaaaagtggtgaaggcatcataatcacgtttcatgacaaactagcttattatcttcgcttattaacatgtcagctcccaatagaaagtcaggtacttgtgcagtttgtgtagatgaatcttaaatgggttgctgtgagttttcttagctgttcacataagatatcatgcttagccaatccagaagccgcaatattaacattgggactggcatgagagagtgatgaccccggaaagctagacaataagacttttatatcaggaaagataacccccagctcattctggtgctcagaggatgactccaacaccaaaactagagacagtgaatctgagaagatctctgtaa

SEQ ID NO: 4438 - DNA, 888 bp, Cannabis sativa
ttttcaaatataattatcattataaaccttatctttagcttacctcggaaaaaatatttttttagcaaaattaataattcaataaccaaaattgtattgctgcaaaaaaaataaaaaaaataaaaaaaataaaaaaaaattgtatcatttgaaagtttagattttagagatatactattattaatcgctatatggtattatgcttcccactgtatatttgaatgttttattttatgtattttcatcaaagtttattgaattttattgttaaaatatatttaatatatatacccttggtttgatatattttagctactaataatctaaattatctaatggttatatacaaaggtgaaagaaaatctaataattataaagggtgatcatgaaaagtatacataatcaaatgacaaaatctgttccactttaaaataaaaattatcttcaagacattttctaaataataaatggagtgtttaattattatatttataaacagagaccatcatattttgttaatgcttttcatttgttatatatattttctgaaataataaatggagtactaatggttaagtcactagtatcattaattttcatgaagagacataactgaatcttgaagatttgttgcttgcaaattattcaacttcctcaaatattttcgaacttatatattttccttttttaaaaaaaaaatcaattaatgttgggtattggtcttgtataatcaactattagcaattatattctttaagtacattccttagctaaaaataaagtaggtagtgaagcttaaaaaaatgaagtataccaatccaactcagaaacttatgggggccaatgaaaaattatttatttatgttttttacatatatttgaaaaaaa

SEQ ID NO: 4439 - DNA, 632 bp, Cannabis sativa
gataaaagggaacgaacccaaatccagaccctacgccttaaacccgttaaaccccgttctttaataaaataaaaagatataaaccaatgcgacctaaaaggtacttagttccatcaaactaatcacattcatgaaattcgtaatagatgatgacaattaacttgaaaaagaaagaaagacagaataaataatttcaaaacctttcgggagaagataaggagccttgactagctgaaggagcattgctatcacgaactgaagaagacgaagccggcgacgaataagaattagtggcagaagacgaagacggcgacggcgatggagactgagtaagaccaaccttctctctaatgtccttgagcaatgttacccatttcatcgttctccctctcgatccctcgaacagactactcttctctcatccgactccaccaattgcccccaaaaaccagatccgagccttctagaactaatctagaaggatcgcatcacgttttcaccacctcaacaaatctttgtctccacaatttcaccttccacctcccaaaatagaaaagagaaaatccaaaaccaattcccgaaagaaaacaaataaatttcccaataagttcagaggaaatgcagctagaaat

SEQ ID NO: 4440 - DNA, 513 bp, Cannabis sativa
gattactaaaatgaaccaagatggcagagatgatgatgtgatggcggagactcaagatctagtagtaatctattcctatgaacaacctctgagttttggggaaagaccaaaaaaattcataggatcaaatttctagaggtggcagcagaagaaattcatctaatcttattacaatgaatcttgcaaaattagtcaataatgaagaataagagctcaaagaatataagaaagatactaaaatcatcaatgttgttaaagtttagaagaaagttaattttttttttctcgtaaattatattatgaatagtttaaaaagtaatttatatgaagtgtatcttaaaaaaaatatagctatgcaattgtggaagtctttgaatcgaaactataaaatctagctcaaataaatgtggttggtccatttcttgattttaaaatggtagattctaaaactgtgatcagtcaagtttagaaaatccagttaattttgcatgagatacattttgagggaataat

SEQ ID NO: 4441 - DNA, 805 bp, Cannabis sativa
attacaaagccaacttatttggaatggaaagaagaaacgttataaatgtcttaaagtactgttttcttccacaacgaaagcttataattgggaattaatgacaacagaaatacatatttttctctccccaaacacaatctgtatgatttcagtaatcaaattcaatttaaatcccaccccaaaaaataaattaaaaaaaaaaaaagatcaattttgaaactaaattcatttttcttgagaatcaatctccctgcgctgtctatacctcaaacctatgtgaattctatatacataaattaacaactggctccttggttccacttggtggtaggggcacagcttcaatggttgggtgcagcattgttgtccaacgaacgcaccacatttgaacaaaatccaaaacagaacttcatttgacttattttctcacttttatttctgtcgtccggatcctcggggacgattgggatccaccaccaagtgcagcagcagcagactcaacatgtgtgagaagatactcgtatatcttcttcctcagcctgtcaatggtttctacagaaacatgggggttttcttttcatccttattaagactgatgtcatctaaccagtcattcacactcttcagttgagtcaacatccctgcaatttggccattatccgacaaagctgatgaatccacatcagcatccaagaacctctccacaaaccccaaaaaccaatcctgggactgcaatcgcagcttgtcggccatgtcaacagcctcgttaaagccatttccttttacccattcaggtggttggctt

SEQ ID NO: 4442 - DNA, 2423 bp, Cannabis sativa
taacatgttaatcatgttgagcttcattagcactatccaaagagttgaggcacgcaatcttttggagactacaactactactacttctgatgatgaagatgaagtgccacaatcattagtacccgaatttcccggcatacctaatctcgccgaccagctcccgaagtttgagtggccgccgttgccattcaacttgccgggatttcttggcagtactaatcaggacaagcaagagggtcatcatgatcaagtgccaattgttagcaaagacaagccttcactcactgaatcacactcagcttctaatccttgatttgatcatacatttatgctatatatcattaagaaaatactagtttgctatgttgaaggagtactactactaatgcctcctttcttattataatttatctttatttaataaaatatttatgtgtgtttttggttgatgtcatttcatgcatgaaggtggtttattttatatgttgcaattattataagattattttaaattcttttccatttacatggtttggaatttttttttaagaaaggtttagagttttgattaacttaatatttattagagttaattgcggtataatccttaataatcttatttcactagcaattaactctcaaaacttaaattttgacggcaaaactcacaaaactcgtaatctgttaacaattagacattttaatccatttttatctattaactgtgagattgacagtccacgtgtgtcaagatagtgcctacatgaatacagtgtacacatggtacaatattattggtctacgtaaataaatatataaaataaaattaaaaattaaaaaaataataaaaaattttaaattaaagaaatatatttttcaaatcatcaacatgcatcacctaattacaagaacaccaagaactaatacaaatattatcaacaagcttttaatttaaaaattaaatcatgaacaagatcaagctagctaccttaaattctctaagttcccaagcaagcaaaatcacaccaacttcaagcttttcttccaaatcaactgaaataaaaaatagagagggtgagagagagagaggggtcggttaagggggttcaaactcagaaaatggttttctaatttctaaacaaaaaaattgattttgttgaatactgacttatgtggtcaaatgaccaaaatagccctaaggccatatataccatacacatataaataagggcaatattgtcattcagcacgcacacacacaataattcaaattttctcatttatcatataaatgtcataaataaattctgaaaatgtattttgggccccaaatttggttcggcttaaaatacattgttgttactataccgtgccgacttgtcagaaaatacctgcagatagacagaataaacatattatataataatataatccataaacacagtatatcataaaattatgattttacccttctcgtgtcaaaattacaaaaatacccctgacacactaacgagatcttaaaatgcaatatatcataatagttttcacatattaaattatataataatataattctttattaatacataattaatctagtttattagggttgctaatccagttattaaaccttaatgtattacatttcctataaagaagagctctactagttaattttttgaagttcaaaaaagtactcattaagtcagagtatctctccctagaaattagagcatccagacttagtcattatctgtaattcatctcatgagaaataaaatttgaagtaaacgtaactctattactgtcgattacagagagtgaattactataaatcattgtatctctctgatataaccaacaagtgtgactagatatttatgtccagatttatgcgagaacaattataatcaaaatttagtaagaataattacaaaattattcttattttactagacaacaaacaaaacaataaaatttataaaattttggttaacaatctttgtaccattttctttatatttggctctttttattttgaaagatcaattcttgccccaagtcaaaataacctttactaattagcaacaaactttgtaaaactccttacttaacaaaataagggtatgaagttatatataagtattatacatctttggagagagctccattttcatgtgggactccaacgaatccttcattttcttctacacattttagtgagctttagcaatacattttccctaattcaaaatgttacagtaatacatgtggaaaaatctctaaataaaatggtatttgataataaaaaaaggatgcttgaatgcctgaatgttttctaatttcaatttgataataaaaaaaaggatgtctgaatgcccaaatattttctaatttcaatttgataattaagggttgcttag

SEQ ID NO: 4443 - DNA, 1097 bp, Cannabis sativa
  modified_base (820)..(840): a, c, t, g, unknown or other
atagtatttgaagtcataatattttacaattttgcataaaattctagaaacatactccatggagatgttaaacaagagcgcggacataaatcgccttgccttaaacctcttttagtttgaaggtatccatgaggcgtaacgtttatcataaaattaaatctaggcgtagtaatgcacataatcatcattctaattgttagattataagtcttcacataaaacctatagagactcatccattaggtcaagactcaagacctaagactttctaactcagattacaaatttaaactctaacaaaccacctgaacctttatactttctatttcaagtaaaaggctcatctctatatatacctgtaactataataaaaaaaaattcagtagctcaatacctagaaatgttagagacattactactaaaaagattttttgtttcgatttttaagtgacatttgaaaatttgcgtctggttgtttaatcgatgatgtagccgaagacgtaaataatgttacttttacttaactttgtaatcgaagccaaaagttttttgattcatttgataatcggcgccaaaagtaatgtacattttgcgacgatcattaattgaagcatacaaatttttcgtcatttaataactgacacaaactacatattaaaaaaaatataaagatggttaaagaatatttaagacggttcgaagcactaccccaaacttgtcatccccaaaaccagccatacgccaccatcccaaacctaaaacaaaaagaaatacctgatgtggtaaattgagagagttgagatatatatatacatatatnnnnnnnnnnnnnnnnnnnnngagagagagagaaagagagagcaaaaatacctaacttgtgcgacaacttcatcatggtctggtgcatgcttcgacagcaccaccaccctaacctacaaaaaaaaaaagaaataaaactgacattttcgagataaaatgaggaacgagagagaaaggagaatgagaaagagatccgtggagatgaagatggtgacggggtgctttagatgggcacgaataatgaaggggtggctctgtgccctactggcgacgagttg

SEQ ID NO: 4444 - DNA, 688 bp, Cannabis sativa
tataggaattgtgcaatagggatatcatggcggtctctcgaatattggccagtagccattttcttcttggtattttaataaaaatcagatctttcttactggtttgttcttatattttctgtatataagcttactggttcttatatataaatctcaatgtcacaatagtgaagttctaaccaaaataaatccatctcctcaggctccaaaagagacgagtcgatacatgggaaaatgcattagagccctttgcaatgctgatgttggaggaggctttgttttcgccaaagatgtttctcttcctcaaacctacatttactcgcctaatgatactctaagagaccttggaggcaaaccagcttcagaaaggtcaacactagcattctttgcagggcgaatgcacggttaccttaggcctattctgctagagcattgggagaacaaagaccccgacatgaaaatctttggtaagttgcctaaaaccgaaaatgcctataccaattacatgaagagcagcaagtactgtatttcagcaaaaggttaccaagtcaacagtccgagggtcatcgaggcgatcttttatgaatgtgttccggtgatcatatctgacaattatgtgcccccattttttgatgttttgaattgggaatcgtttgctgtgtttgtgttagagaaagacattcccaac

SEQ ID NO: 4445 - DNA, 1068 bp, Cannabis sativa
aaagttttttgtgttatgcctagctaaaagaataaagctaaaaaattatgatttatttggtttgatttgtaatggagtttagaataagtttggtatatgggtatactttatgctatatactggggtttagatttgtacattgtaattaattgaaatttgttgcaatgaaataattatttcccaataataataataataataataataataagtattcgtaattattaaaggcgcatttcccccaaacatagatgtttcagaattaagtatagtataaaaatttaatgttgtaatcccaagagcttagcataaaaactactatagagatgcatttgtagctaacggtaattaaaactattcattacaataccatcaatagtgcagtttccacgttcaattttttatggtttttacaataccatcaacagtgcagtttaaatccaaattcgattatttttttttggcttaactatacattcagtttttgaaattgacaaaaattcattttcagttatatatatttaaaaaaaaacagatctaaatttatttaaaactaattaaataaaagaaaaaagaaaacagcactcttaattataattaatgatttgctgtgattcactcttattgctgagtcaagttaattaattgtaagtttgacataacttgataagatcatattaactcaaaaataattttaattaaataatattattattataaaataaatatctaaaaatcaaacacaaataagtataaatatcaacaaaaaaaaaacatcccctacaagaaatgtcactttttccagcatatttttgtgctggcaaaagttggtattgcgctggtaaaatagaatttacttatgatgtgttggcaaaagggattggcaaatcaatattggtattagaacttttgtcggcataaaatgaaaagcgctggcaaaaaagacttttcccaactcataaatgtgctggtaaaagttagattttagccactgtaaatgtatgccggcaaaactataatcacttaggataagttttagaaagctttttttacttttaattttagatc

SEQ ID NO: 4446 - DNA, 569 bp, Cannabis sativa
ttattacttctaatacttaaacaaaggtgtattatatatgtgcatatatatgtgtattgtatttataacttaaaaagtataagaagacggtatttattttttaccataattattgtataccttttgggtttaatttttatggtagatggtatatttttaatcatttatatcacttattcaaaggaattaaggaaataaaaataaaatgaattaggttgatttgcagttatactaattatttaaatgtttttaaaattttttttcattaaaataataagaagaagaattaacaaggcgtaaattaaaatgtaaaaaattagtttttaaaattataatataattaataaattaatataagttatataccacattgattttataccgcacgaagggcggctacgttatctagtatagatatgtatatttaaatttactaatttttttggtaagtatttaatttactcggttatatatattttatgtacatatgtatctatatatatatattgaaaaattagctcactaagatatgattattatctttttaaaaaaaatatgattaatatagt

SEQ ID NO: 4447 - DNA, 1198 bp, Cannabis sativa
aaacatatcagagatttaggaaaaactcaaacaccatcttattcaggttaagaatatggacctaacttgtcctaaaatcaatgatgtcttccttagtgcctaaagatgaagttctttttaaaaaagaaaagaattactttccatgtggttactcgttattattcatattacatgcaattaattactaaaaacaaacaaaaatcagatgttatttaacaagtcaaatctatattcaaacaatcttgcatactccacaaaagctacaaactaagaactctgttctcattacaacatcatcacctaagaaattaaagggtatttaactccattggagctagctcagttggtgtggtgagaaaggaaagaggtgagtgttaaggtttctggttccaacatgaaacatcttagttatttgtatgaagtgggtgtgattagctaacatttttcgaaaccagaacacctaaaaaagtcacaaaatcttaataatagtcaggctataaaagattattgatgcatcaaagactctgaatcccatagaacctgttccattaaccccttttgggtcaaagtacatatcaccacttttgttgaaagaagttacacaagataggatatggatatggaaatacataagcaatccatataattagaaataaatctaagatattcaaattccattccatcaattaattatttaatgaaaaactaaaacctagctaatttcaattaacgccggcaactgaaccaagacgataactttaacatctcttaggtttaatcaagcaataaaaactcacaatttcctaaacctacctgtgaaataagccaggattgttccatacgcttgatgaaaccggaggaattttcgtaggagccgacaattgaggcacggacaacacaaaccctagaactgaatggcctcgtatttgatgtggcatgagttacgaataaacacccaacaccgccattaagcgatctcgttgatgatttgaaaccgtagcttggaatcggtttgggtgtgaggaagggcagaggcttacacagcatacaactcgtcattttcttcttcttcttcttcctcagattgtaataagcttcagtatttggtgatgttgttataattgtatttgtatatagtattttagtttgagaggcaaaactaaagacaagttctctagttttccaacaaataaaacaa

SEQ ID NO: 4448 - DNA, 2469 bp, Cannabis sativa
gtgtgtaaaacctatttactacttataatatattaaccaaactctattaacaatttaaaatgaatgtaaaacttactcatcaactactaattaaagacaatatatatataaatacatctgttatcttttttgggaaaatacatttctgttatcataattgaatatataccatatacaattttcacaatggaagttacatttttcttaatgttttgcttatttttcaatattttacatttctcttcaccagtcatatcgagaagattacaaaaatcatatactagcttcaacctaattcattcccactcaatccacacctctttacaaactcaagtttatgccggtgatcgtgatatcataaccgagattttcccaaatgatgaatacttggtttttattaaccttaccattggtgtacctccaatcccacaattagtaatttttgatactggaagtagtttgttatggatttcttgcacaccatgcaataattgtccagcacctcaattgttccaacaaaatctttcagccagttacacaagacttttgtgtggcgattatttgtgtcctttcttttgtttagacccaaatgatgacccaaatccatgtggttttgtcacatactatgcaagtggactcaatgcaagtggaatatatggtacggagacttttgttatgccaacaagtgacggtggagtacagataatacctaacaaaattttcggttgtgcacataaagtatactattctggggaaagtaaatttagtggtatgcttgggtttaattatgcacgaaattcctttctatatagcttaggatcctcattttcttattgtataggagacttgacaaatacacaaaatagttatagtcaattacgcattgctaatggtgaccatggacacctcttaggattaatgaaggtggcaattatagagttcgtataaaccgtatagcttttggaccgtacatttttacaaataaaaatggtgcaacgggactcgacgcaatcattgatacaggatcatcatccactacattgcctgagaattttgtgactagtcttcaaacatatgtgaaagaaatgttgtatgaattaggtgtaaaagaacatgaaggtgctactggcaaattgctatgcttcagaggtgatttaagggaggatcttaaagaatttccaaaagttatgattcgttttgaaggggaggcaagtatggaattggatcgtcgtattttgttcaaacaacatactaagagagcattttgctttatgataggcgtaacaatagttgattcgggaaaaataatggtcattggagcggtgactcaacaaaattaccacatggcttatgatcttgactacaaaagattgtatatggaaaaagttgattgtcaaaaatataaagattagtagtacttttattaaatttgacttttattattattaattgtacattcctatcagtttgagtttttaaaatggtttttccggtaatttctatatgtgttgctatataatttttggttgcaatttaggttgctcggctaattgtaacaggaatttctatataaaattccgtaaaaatgcaaaaaaaaaaaaaacaaaaaaattaaaaaaaaaaagtctctattatatatattaaaaatctagaaatcaattattattctcaacaatagtaaactgaaataacataaatcaagataaattgttaatgtacaaataaaaatggttcatttatttacatattacaaaaagaatagatgaaatttgttttttttttttaaaagaataaaattcccttaacaataggtctatttttgatatgaggaaaataaaattttctcttctatcttaaaatagtttctaagcgctaaatagtttgggaaataatttcataaatttacatgaatagaagttaaattaacaactctttcctcctttccagcgataatattaatgaacaaagagcctttcattaacattttgtcagtgattaaagagcccttattttgtggatcttcaaacatttctagtccataattgaatatattatcctgtttagttaacaaaagcatttttcttttccctgcataaaaaataataaaaaaattattattatatttataaaaaaaatgatattaatgtaataattttttttttttaaaaaaaataccccaatggtgattaaagaatttctctgtgccatggacaatgacatggccatcattgtaaatattccagtgattaactttcactctattgattataacagttccatcatcatgtacttcatccacaataagattttgcttaacactagccggaactagagttgatcctttggataaggtttccttatcaacctttgacataacaatttgataatcaaaattgttccactctttgaatccgatcgctttgtcgggcggaacaaagagagtgatagcattgttaccataaatggtga

SEQ ID NO: 4449 - DNA, 2079 bp, Cannabis sativa
attagattagattagatcagattccgattctccatttctttgtattcccgctctctactctttcaaaatctaatcactatataaacactttcattacagtacatacagattattacatgagagaacaagaagaagaagacaatgccaatcgactcagatctctcgcttctccaaatcgcagccgaagacgattcccttctccaacaacacacctcccttcactctcataccaccgcctctccctttttcacctgttctcctctccaactccccatttccactggttagggttttttgtttttgttttaattatgcagacattgaagttttagtttctcattcataatctatttggtttgatttgatttgattgttgttgtagaagaagatacggctcgttcttcattctctagggataaagagaacaaagaagaaggattgaaacttagtcttgaaccgcaacaaatgaaaaggaagaagaagggaggtgctttcaatttacgcaagagcttagcttgggaccgtgctttttttactgaacaaggtaatgactttgtcctttattgtttagatttgttcatttttgttatttggatgggaaaagttgattgtttgtttatttatgttgtaaggtgttcttgatcctgtggagttatctattattagtggaaatgttagcaaatttagtggggaaactttgtcaacaatcagggaagaagacactagctgtgctggtgctgcttcatcgaatcttagggcaattgaagaaaatttattcacggaattgcctcccactacttcaggaaaatataggaaaaatggtggcagtagctttttaccgaagaataattcacctgttaggaaaaatggtcctcctttggcggttagtttcaaaatggtccagtttgacacatttcaattggggaaaaggtggtgattttaactttcttctgtcatgatcattaggctaaacggaaggtgctttcagcccatgatgtcaatacaagtgcctcaaagcgaagtgattgtccacgacctgtggcttcatcttcatatccttaacaatatgtttcatagtttagagtgttgcttgtcttagtgttaaactgaatttgtattaacacttgaccttgacttatttatactctgaagaggcctgcaaatttgattacaactaaaacatcagcaaaggattcaaaagtttctagattaccagctccaaagacaaatccttgtgcgtccattaagacatcaaagagttctacacttggtgcaagcaattcgaaacggaatcaaacaacttttccaggtactcatattatgaccattttaaaatttttgataaaaatgtgggtttttgaattttattctccaatgcatttactccctcattatttttgagggataatctactctctcatttgaatgtggttttttatgttcaaatttggtatttcatacagcagtaaatattcagaaaccttctgcacttaagggctcctcaagcaatacaaagagcaagagtgcattaaacaattcaaaagttggtcctgcaggaaaatcaataactactaagacctctcttggacaagctaaaagaaatgtggtgaggatttttcattttattttgatttattatattttcaataagcaatatgttaaggctagagcttagatcctacttagcagttacctcagcagttgaaggacatcagttcttttaggggttcattataaattgactagagtaaggttcttttattgccatcaattttcttgggcaggctagctcagtaaaaggctctaccagtttacaatatcctttgaaaactgaagcgaacaatgacttagatgtgaccgtccgcacttcacttcttcctgctgatcttggatcaaatagtcgtactggaggatccagaactgcaatttctctcccaaaaaatccttactgtactggttataacacgcaacctactcaactcccaacagtaccaaaaccatcaggtttgcggatgccatctccatctattggattctttggtcaggttagtcatttgaatttaattctataaaattcaa

SEQ ID NO: 4450 - DNA, 1286 bp, Cannabis sativa
ggaatcaaacaggtcgtcaaattacaataatcaacaatacacaaataattcaagagaaaatgaaagagtgggggagtgttacgaggagatgacagacaaattgaggcaaagaaaggttttcgtacaatttgtgtgttttttttaaacaacaaactgttataaaactcaaacagatatgacaaataatattgtaggagctctttcttctattttctattcagtgtacatcctgtacgtgtacctctatttttagttgaatacgtaagatgcatccaacatgtatactactactagttgacatgcactaaacagatgcagaagattgttaccaacaaacattcaaacactccactttataaaagagtaaactatagctaaatagctatattagcatagataaatgagatattataccagttagcaaaacttagtaatgttgaacaactgggataaattttttaaagcaattaaattccgaataacttttttctttttcttttgtccttcccttgatgaatgagagaagtgagagtgctactaaaagttctttatactactcaaattaattaaccataacctatatagttaaacttaaagaactagaacactgttaaggctgaagaaaaaccagtgaaaagagcatgggatttggaatatcacttctctctgctttttccactatcacaacttaaaattgtacaagaaacttttaaccaatatctaaccaagatagctattaagccaagagaaatgttatgatacctaagacataatcatggaagtaaacttaaagaaaactatatgagcctaagcaatgttacaaaacaactgagataaaataaaaaaaaaaaatcgagtctacagggaattttgaagttaccctcggtagatcgtctgctgcgaaaaactttaagaaactcggctcaaagcttctcgacattaatggcttcctccatgtcgctcagccttatgctctcagtagtaatcaaaagtacttcatcgtttctataaatgatttcattttcagactcagtactgcatttcaaaaattttgaatcaaaacatatgtagaaacggaaaagaaacttccatataagatacctgatagcgcggaagtgtatagaaccggcgaagtggttgaccagagcacccaccgggagtggaagaagacagggaattttagggtttaaatttgtgtgaatttgagaaaaagatataataatgtagctatggtggaagaggaactgtgatgggcttaggtgaagagacgccgcctggaaccgccg

SEQ ID NO: 4451 - DNA, 848 bp, Cannabis sativa
ttacaaaaataacgtttatatctactaattgttaaataatatcgtttgtttatacttttgctattttaatgacaagggaactggccattgaaataggccaaccaaaatatattctgcacctatttttttttttcgtttttccttctttgattaacttgccattttttttttcgtttctcattcaacatatttcactctctcttctctcaaacttcaaaaattatttcctatcacattactatttggttgagtttaaaaaaaataccattataatttattttttcatgtgatcatttcaaaatatataaagtatatattttttggttgtttcaaaataaataactattaagttgcttatggtaccaattatatactcattagttactaatttatatacattttatttacgttaacaagtttatttttaaaattcaattgattggatcacattataggacaactaaaaaatgtatcatataatattaaataacaataatataacttctaaaataacaatgattactttagatatttacaagttccaatagtaagttatgtgagtcattttactttattttaatgtactaatttcttaaataagtttaaaggtaacaaaaatattattaaaaaataacgaaaatatttcttaaataacaaaataacataatataatctaaaaaataaatacataattttaaagtaactaatccaaaaaggtgaccaaaatttttatgaaattatttttatcttaaagttgatcttttcatgaaaaagtaacttattggtatctattatctatatttatttttttaaaactttatagctagtattgggatgcctcattttta

SEQ ID NO: 4452 - DNA, 2253 bp, Cannabis sativa
gaaattatacaataaactttgttatattataaagtcatgctcatatgagccatgaccatattataaaattatttatacacttccattccatttataaatataaaaaaaattaacgtaactacttaactacacaaaaacaaacaattaccacaacccccaattgttcttcttctagataccctttgaatttttctctccacaaatctcaattttttttttttaaaattcttctttttcttcttctctcatcaatgaagaacattcaagatcatcagtttcccaatggaatcatcaaatattacaagtttaataccaaaaaactcgtcctcttatcatttatcttcctaattatccttaccatcgtccctgtataccacccttccataaattactcctcttttttcttcagtactagtaataataataacgttgataataataattattcgtcctcgtcgtcgccgtcgtcgtctccgtcggagaaaaatgttgatattagaatacagtcgtcgtcgacgcacaagtgtgacatattttccggggaatgggttccgaacccggaggctccttactacacgaacgacacgtgttgggccatacacgagcaccaaaactgcatgaaatacgggcgacccgactccgaattcatgaagtggaagtggaaacccgacgggtgtgacttgcccgttttcaacccggctcagttcttggaattagttagagataaatccttggcttttgtgggtgactctgtggccagaaaccaaatgcaatctctcatttgcctactttcaagggtaataaaaactatatatatctctttaatatatttactttactattattaattaatatataagaagaaaaaaaaatgctcttatttttgaagtagttataatcatgaatcatgatggaagatttcatcttaagtaattatcatgaggtccttatcatgatccttgttttgatttggttatttttctaggtatacaacatttatagatataaatatggtagtaaatatgattgtaaatatataactatcattttctactatttctttctactatcaactaatatctttttttattattactattttttttcacttgcccatgatttttttttaaaataaaataaaaaattgtgataataagattagttgaccaacgccttgaattttaaaaaagattaggtagaagaagaggcaattatattgatatatagatattgatgtacatcttagctagttttgatcggtagcatatggcattggaatctcttcccaatgggttcaaatgagtatgtcttgttttgcacatgattaaaggttaaggccaaaccaagacaacttgtcaggcacaacctatataaattaatatatttaaatatattttgttccatatatattttatatcacgatgcatgagcaacgtatcagtttatgccacgtggaatattttagccttaattttcagtatcttgttatatatgaatattatttcacatgataatggtaccactactacacaaaatgttattgtgataatatctccttagccataaaagtaaggaaatttcttaagctttttattgaagggaatagggagatgtgatgtccattttctctttttcttctgttgtgtggcccaacttattctatatatacgtgtctttattagtatatattgcttgattagaccatatgatatcgataacttttaatatctatttattctttctaccaaattatttattatatgcagtttttttaaataaataaataagaaaaaaattaaagaagaagaagaaaagaatggggtgcaattgttgtttgttagtccacagatttggcttttaaagtttgataaattatataagtattctctagatggttagattaaacatagttttcaaatatgagaagaaaatcatatatttaagagtcttcttgatcaagtataaataaacaaccttttttccccttcaaagcttatttattcaattttatgttttgagtacgaaaataactgtaacttaagttttgtccctaataaaaaattacttttaccgtcttggaaagatcgatgttgtctaatgtactgaaaagtatatatggataacataggtctctctatttccagctggaaaggaatcaaaatctaaagccatacacgcaaagatatatcataattaaattacttttgtcccatttgtctttggacattcgaacaaatttacataagcctcatt

SEQ ID NO: 4453 - DNA, 1045 bp, Cannabis sativa
aattatcaaaaatattcctccaagccaaaacaaatatataatgaagaggtatattatatatgattttgatcaattataaataatgaagaaagagattacttaatagtgatttgcatatgcctttgagtatggcattttggtacattgtaggaaattaattattacttaatttttgtaatatgtattattttttttccaataacatgttaacacaaaatcgcttattatattgcgtgtagctcttgttactctctgatcgtgtaatttgagagtaaaatatatcttctaaattgcgttctatactgtaataaaaaactttttttatctaaaatattgtttattctatatatatatatatatattgtatcacactatttttattttggtaataaagtactatttctattcaaatatatatattaatgtgaagtatttggaattattagacattttttttttttgaaaagggaattattagacatttaaagtgtactttcttattctatgaaaatagcgtaaaggcttattattagtaatttatttatttttttaataaaatttagcaactttattaactagcaatcgttaatagcaatagaacatactttgttggaacaatcctcccactgaagcacacgacctggagagaaacaagaatccctgttcaaaacatgagccagcttgtttgcagatcgtttgacaaaacacagctcaacattatttaaagataagagaaaaatacgaacatcataaactaaaaaaccttataaatatgtaattatgtaattataaatggatttgaaattgaaaaatagaattttaattcaatagaagattaattaacaccttctcaaagagtaaatttatgctggaagagaactcgttacttattttatatgaataaaacatataaataaaaagttacaagatcatttataaataataaagtgctagtagaatcactcatttttattaattcatattattctcaacctttaattggtttttagtgttgagtagtaattaatatcatttgacttgatga

SEQ ID NO: 4454 - DNA, 718 bp, Cannabis sativa
tatataagtatttaaaaggtggaaagaaaatatgtgattggtagtgatttaatatcttagcatatccaaatgggttgatgatgacaagaagtagtagtaatatatactttaaatcaaagggacttttttgagatatattatccatcatatatatattatatgcaaaacttttgggtctctctttttatctaatttgctagtaatgaggtcacatgtgatgttgttttttcttacaataaggtagatgttaataataaaaagaaaccctctcatttgcaacttgcataattctcatctctaatcccatttatatatttatatttgtatatatttaaagttaactttattattattgtgggaggaaaataaacaacatcaaaaattgcaaataataaatgtactcacaacatcaaatttgtgggttcaagtataaggtgtgggagagaaagactttctctacacatatttttgatgtcacactataatgctcatttctctctattttcatgcttctttttatttatatcttacgcgacatatagtacgtgactagattatatctcagtcactgatcttctcacatgtccatatcatacaaggataacccttatttttattgggctttatcccttcggcaagccatccttactctcttaagtatgggtccatgcgtctctcatatatgagattgtactcattagatcgatagaaaaaaaaa

SEQ ID NO: 4455 - DNA, 1713 bp, Cannabis sativa
atatattttaaaaatattttaattaaagtaattttatttttttgttacaactcattaaatatttttatatatatatatattattggacaattattctatatacaattttttaactattttcttcaaaattacagtttaggcttctccggtagtttctatgtgggttgttgtacggattttggttgggaattaggttgctctattagttgctataggagtttctatgtagtattctgtaaaaataaaaaaaaataaaaaaaaaactattttgaaatgtaaaaataaaaaaactcttatattatttactaaaattatttagaaaaatgctattatcacaaaaactcaaatagttttatctagattacttttccaatttcattattgttcatcacactataattataatttgatctagttaattaatttatttttttatttaaatttgtgtttcaagttaatcataatttttgacatttaaataattataaattaatttgatcactaaaatttaatttattctttcatctaattttctctacgtagtacaaaattacgattttgactttatcaatatcttttgcatttaatgtaatttaagatcacactttgagtttgagctttatttatctgtccactgataaatcaaaggactaataagtttgaattatataatcacaaatattttctacagtaataacatcactaaactacgtgttctaaatttactagaatttaaatattaaacatataatcaagtcaaacaaaaatgtatgaaccaaacaattgactacatcataaatgattttctattttgtttattgaattactaaataaaattatagaaaaaagattttattaagggcataacaccaaacaaactcaaacttacactaatataaaaataaatattgaatttttattaatctcatgttcttgatatgtctctcaaaagttcattcgagaagtgtctttatgaaaggatctactaggtgtttttcagtggaaaccttctcaacgaacacctctccccttgccacaaaattcctaatgatgtggtactttctatgtgcttctggcttctggattctttattgttggttatcgctctagtgttatcaaacaataatactagtagtttatccatagaaataatcccaagatttgtatatcaatctttcttagccaaattaattatttagcagcctcaatggcaactatgcattcaacttccatgagtagaatatgagattacagacaacttaatacttgttcaaatcacagctccactcctaagagtaaacaccatcccagacattgattttttgtcattgacacaagcctgaaagcttaattgagtgtagcctaacgggttgagatttccacccctatagactaacatataattccttgtcgtcttcaaatatttcaggatgctcttggctgcaatccaatatttttgtcctgggtttgactgataccagctcactactctcggtgcttagtacactacaagaaaaatgggccttttacctacaaattataattgtaggaaaatattacgtaattgtaggtaaatgatattacctacaaataaacaaatattttagatttttaggtaaacgattgtggtgaaatatctacacctacaattatgtatatttgtaggtaaaacatattgtggacccactcctcttgttagatgttaatgactaa

SEQ ID NO: 4456 - DNA, 1916 bp, Cannabis sativa
agtgcccaaccaaccaatgaaatgaccataataaatagttgtaaatacttgaatattttgaaaagtttgtaataatacgagttatatcgtgttgtgataatattttaaaggataagttttgcacagcccataagcatacatttttgtgtcgtgctttactcaagttgacttgtttttcataaatggatcaactcgttttttatatgggttgaactcggacttcacatttttttcgttattttttttataattaatgagttaattacttaattacatgtattttttatagttttaattattttatgtaatttttcaacaatactttacacgtaattaaataaaaaattaattagaataattaaaatttaaatatttattaataaatacatatgtattattattgttattatcaattataagaaacgtgttgtgctgtgttgtgcttttggactagtttattcgtatttatatgtcgtatttttgagtttgttatgtcgtatcgtgtttaaatttatttttttccgtattatgtcatgttaattaataatattgtgtcgtgtcgtatctaaatttatattttaatattaggttttgctcgtgtttctcgagcttgtactaattttaagtcgtgtcaatgaagtcgacccatatttataactgtacatatattgtacgtgcgtattagtataattaactagatgaaaatgtctacacttaataatgttagataccatactagtgatattgttatttattgtgttcactttagtggtgaggagtttaaacattactcctcaaattcaaatgggtgagaaaagacattaaattagagagcattgttattggatgaccagtagtgcctagcactcttaaaatgtgttgctttgcgattggttagcgatactctctaaagctattatattaaatttaatgagacccgatactaaattagaccaatagtaatattgacacataagaaagtacttgacactactggtaccttttaacatttctctaaattaaattgtgtttattagtattcttttgattttatttcttttactaatatttaatttttattttattttaacttgggatccctagaaatattagatagtggatgtatggggatttagaaattgctgcccactttatgcagaacagatgggtggatatgatgggttgggtaggaataggattataataagatacacagaaattctaaaaagacatctcgtgtctaacatcaaagtattatattgcattattgctattaatataagagcataacaacttgtagacttcttgtattataaatcatatttaattacacaaataataataaaaaaatattaagcaccataaatatcttttaattacatttattttcaaagaaaaattacataatttagagaaatgatatatgtatacttaaattatacacacttattaaacacaatgacattaagtgtgataatgcaaaaacatagtcacataaatctcacaaaaaaaataacaaaaaaaaaagactaaaccaaactacgaccaaaagctaacatcacaaaacagacaaacatgttaatcaccattattacaattcaaaagaaacaacaccaaaacgtgcacaaggaaaaactataaataatcaatacaaaacacaccagcaaacgagaaccacctagtacaagggacaaaagaacatgaaggtgcaccatcctcgggaaaaaactcgaaacctcttctttttgatcacaatctccaaacaatgcccaagataaacaaacgtcaacatggacccaagttgtacgccaaagtcaaattgagaatgaatgacaattccaaaagcataccaccactaaacaccaaacatcaactaatcaatgcatcaatagtcgcagccacagagccaccatcaa

SEQ ID NO: 4457 - DNA, 918 bp, Cannabis sativa
tgaagaaagtcagaccatcatttttttttgagatcgctcccaatcacatatcaagaagtcaaggctgccatgaagtatggtagagacgtgattgcattggaggatgttctttccacactcaagtcaaaagatttcaaatcacaatcggagaatccaagaatgaagaagtttatttggaaagaggaagaacacccaagaaaggaagttcaaagagtaaacactatcactctcaattaagatcgaagtctagagagaaggaaactcgaaagtgttacttttgtggaaggtctgggcacttgcaaagattttgcaagaagtaaaaagagcagtaagacttcaacaaatctcacaatggagataggaaggacaacatgcattatcaccacaggaaggattcaactatagttgcggaagatagtaatggcttcgcaacggatggagaattttttgccatgttaaaatcttcaatgaatagggagtggattcttaactcatgatgcacttatcacatgtgtccaaatcgagaattaatttttgattatagatcagttgatggaggttaatatctaatgggaaatgatcaattatgtagggtcattagaactggaaaggttatcatcaaacattatgatggcggaatcaaagtattgacgaacataagacacattctgaacttacgacgaaacttcatatccctgggtgcgcttgaagatgaaggttatggatacaagtccatgaacgaaagcatgaggatcaccaaacgttcgctgataatgatgaaaggtgaaaagattaatggtttatatgttctctaaagagaaactattccagccggagaagctagtttggtgaaaggtctcgaatcagatatgcagttgtggcttcacagacataggcatattagtgaacaaggcctta

SEQ ID NO: 4458 - DNA, 2068 bp, Cannabis sativa
cctagcttgtcgagcccatgtgttttcaaatcgtaaaagattgctaggagttgagtgggaacctcagtattaatggaaagcttgacttgtgtgccaacaagttgtcgagatgggggagagaggtcacatgcgacttcaagggtcacataaagtagtgtaaaagacagttgaaagcactcaagactaaacatgatgttgagtctattcatcggtatgcagagatgagaaataggttattcaaaattttggagcaaagggaaagcttttagaaatagagagccaaacaattctggttgaacgctggagataaaaacagtaaggtttttcataagtcagctagtagtcgtaagcgtcacaactcaatctctaagttaaaagatgattacggtaattgggtcgattgggaaaatggtctctctcctttgatgttcgactacttctctttgtttactgcctctaacacttactaccaagaagttattgatgatgtctcttttgttgtgcctgagtatgctaacgttgagctatctcaccctgtaactgaagatgaagtcagaaaagcagttttccagatgcacccagatataagcccaggtccggatggtatgaccccagcatattaccaaaaatattggcatattgttaaagtagatgttgtggagctagttcaacatttctttgaaacatgttcctttgaagatggttgtggggatgccaatgtagtcttaattccaaaaaaggcaatgtatgaaagacttgagactaattgctctatgtaacgttttgtacaaggtgataaccaaggtcatgactaatcatatgaaacagtttatggacactaccattacggagtcgcaaagtgcttttataccaggacggcttatctctaacaatgtgatggtgtcttttgtggtcttccattatttgaaaaggaagagaagaggcaagacagggtttatggctttaaaactggacatgagtaaggcttacgataggatcaaatgaccttttttggaagccatgcttcgtaagatgggcttttttagagcattagattcgattgatcatggcttgtgtctccactacaaagtataaaatcatccatgataatcatgaggttggcccaatctaccctactcatggcacaagacaaagtgattcgttgtctctgtacttgttcatcctgtttgcggaaggtctaacatccttgcttcgaaaatatgaaagaaatgggtagattgatggttgcaaagtggctaatggtgctcctaggatctcctacacactctttgtagacgatagctacatctactgcaaagccacagtctaagaagctcactgaattcaagagttacttggcaaatttgagagagcttcgggccaacaagtaaacttcaccaagtcctcagtgttctttagcaatacagattctttgttgcaagctcatttatgtaatctcctcagcatgaatgttgcggatgagagggttttttatttggatttacctagtaccatgagtagaaataagacctcagtgttaggttttctaagggaaaagttcgaaaaagacttcaaaactgagatgggaagtttctatcaaaaggggaaaaagaagtgcttattaactcggtggtacaagttctttctagttatgctataaatgtctttttgcttccacttgatattagcaatgacatggaaagagcaatgtcgaaattttggtggcaaaatcaaatggggatcacaaaagaatccattggttggcttgggacaaactctgtattcataaaaggggtggaggaataggattttgtaatttgcgtgacttcaatctttcgttgttgggtaagcaaggttggcggctgcttactagaccccatgctttagcttctagagtgtttaaagccaaatattttcctcaaaggcaattttctaaatgcacaacttggctccaacccaagtttcgtttggcgtagcatccttgagtctcaaaacttagtgcgaaaagaaacccattggtgtgtgggtaatggtggtaacattatggtccttggtgaatcgtggctcc

SEQ ID NO: 4459 - DNA, 655 bp, Cannabis sativa
ttaattttatgttaagtaattaactatattggtaatacaaattgcagtcaatttatttaactcaagatccagactacctaagttgcaagaaaaaagaatgcaagaaatacgaaaagcaaggcatatgcgagattgcgacatgtagtgcttcagtgtcgtttcatgttataaacataagaactgacattgaattcatactcttcgggggtggcttcgacacgccctgtattcaagccaggactgctcctttaacctttctcaaccctaacatgccgttgtacggacatatctcaagtgtcgattcatcagcaacatcagttagtaactttcattacataaagtttcatgaaaccttcaaaccatgttagatttagatttatatggttggttgcattgcagatgagagtgacatgggttagtggggatagtttgcctcagaaggtagaatatggagatggaaaaacacaagtatcagaagttacaacatttacacagaaagatatgtgtggtgagttttatatttattttatttaagtacctatgatattttaaagggtaagcagcaaaacgtgtcattgtgtcttattattattatatattatttgccatgcttttatatttcgtgtcaggctttgttgttgtgttttaacataaa

SEQ ID NO: 4460 - DNA, 646 bp, Cannabis sativa
tccaactgaataggacaaggtgacaagtccgcttcagtgagcctaattgcttggaaagcaaatttaaataggatattcacggagcttctattatccaccaggactctagaaaccctcttgtttgctatttgggcttcaatgaccaatgggtcattatgggaaaaatgtacgtgtcgggcgtcctcttctgtaaaagtgatgggcagaatcattgtccgaggacattggcgtggtgactgtactaaagcacatgtttctcctctccatctagctcgcataagtaccttttttgagagttctgggagcttcccgtaaggtgcggtccaccagattttgttgctacatgttcgtcaactagtggtggagctagccctaggggatacgagtttccttgtcttggagccacgatagttactgtagccagagcgagaggagctgggagtgccggaagttgcattctcgggaccctcaacctacccctgcagaggatttatggtaccctactgtccaagaacaatcacacgtccgtgaacgaccccatgtccaagataaattatgggaatgcagacccattgccgagatggcctgctctaactagcatcttgatttcatctttcaggtgcttgtattttttggtggagggtcc

SEQ ID NO: 4461 - DNA, 1301 bp, Cannabis sativa
cgcggagatcctctattattcgaaaagctgaagcaatgtcagctatattgaaaacttgtaatgatcctagagaattagttaagtatagaggttcatctgaaaatgttgttggaaaggcgaaccggttgatagagaacattaagaagaaagtataagaacaaaaactggacaagtttgagaatcatgaggtttacacttgtttgatgtgtctgttaaagtttatctagtcattgttatctcatgttttaatcaatttttactttgaaagaaccaacatttgatgcttcataatggtaacttgttagatgctgtttaacttctaagtgttggacaaagacacacaaattaaggttggtgtttcatcatctcggatggtgacataaacgttcaatttcgatagaatttgtcgtcgaaaatcaagaaatatcaatgcaatagaggctaaagattagtcaaagcaccatacttagtagtttgatctaagctcttattaccattcccttaaagtagacattttcatcatctgcattaagtacaagagctaataagcctagttgtgtcaaaatactctacttattatttgacaaaatcaactgtcattgcagctgttctaaattagatttaaacaagaacaacctcgacatatcgcatactcgtgtcgttgtctaaggctatgtttggtaggaaggaatgagagttgttttaccaaacacagtgtaaaagttatcaaaactttgaaatctaagttttatttttgtcaattcagacttttctgttgagaatcatggggttccatcacttgcccgcaagggatatgactctgataccatgttgagaatcatagggttccatctcaaaaccaattggtaatgagtggagtagcccatgttcttatatatggttcaattctctaccatttattctatgtgggacagtgtctctttctttcactgtgtgattttatatatgaaatttgatcataataaaagaaagagaagcaaatttaattatacaaaactatttcattactattaatataacaaaatatatgtaatattattgggtagattattattgattaacttaaagcagtaatgctttttttcaacactttgccaacatttgtatattgatcatcaccttctttgtaaataagctcagttaccttagtaaaattaagaacacaaactaagatagaaaaaggcacaacagttagcctaataaaatcttcattgatttctttcccgtaattgacaactcttttattgaattcttcaactgcctttttttttttttttttt

SEQ ID NO: 4462 - DNA, 1560 bp, Cannabis sativa
attttattatttttagaagggtttgtgataaatctgtgtgatgtgcgtgctttgcacacatagccagccacttgcactttggcatatatcatggcattttgggaaattaatcttagtgttttataatgcctctcaatgtaacttggaactttacatttgaatatgattgtgtttattttgttgtggctacaatttatagcaaaagaatactatgtcttgaaaaaagtcacctacaagttaatcttacggttttatattgcctctgaatgtaacctggtactttacatttgaatatctcgggccagtggcagagtcattcaccgttttagcaggtgacaaaaaatcatgtcttaaaaaaagtcacctattagttcattgttaggcttttgtattgcttcaaaaagtaatttggtagttttcatttgaatatggttaagtgtgttgcattatatatagtctaaataatgttaatgagcctattaggttgtgtgtgttaatattttttataatttaaaagtagtatttattacgtatggggaaatgtgtaaataaatggtatataattgaatggagtatagtggagatctaagtcattgaactaatcatatgttattcaaatgttgtttaataagattctaatgtcagctactttttatttttctttttcaggtcattaatcatttagagaatgtcttcatctaattttgaatctcctatgaagaaaacatctaaaaatacacaatccttatcttctactcatggtgttaaaaggctacgtgttaaaaagaagtgcattggtgaaacttcaaaatggaacaaggttttatgttaaaatttaatgctattcatcttagattagactaatttgatacctctatttatttagatttaaatttacgtgatttttttcctattattgtagcttacttttaatgatgtaccaggttacttttgttaatttctgcaggttcctcaatatatgattttccaaacaaagcgatttggaacaaaagtttagcctttcaataatctctctgtaatttctgacctggacactacttttactaataaacaaaatgagctatttaaggcaacaccttttggacatttttttacaattttcaaaggatattaaatttcaagctgagttagtacatcacatcatgttgaaagaggtctattcgatgtctgaagatgttgatttttggtttaggataaatgggactatggtacggttctcgatagaggaattttccttgattactggattgaaatgtcatggtaacgatgatgaatctatctttgttgagaagaatgagagtttgaagaaagtattttttaaggaaagtaagggtttgataacaaaaaagaagttaggaatgttttcattcataagagagcaaaaggggatgtgaatatggtcaaacttggtttggtccattttcttgctaatttttagtttggtactgttcctgaaaccaaagtgagcaatttcttttggaatattatttggagtatatatataatacaacacatttaaccatattcaaatgaaaacta

SEQ ID NO: 4463 - DNA, 2702 bp, Cannabis sativa
atcaagtgtctggagagtaccagacaaaaggggagaagatggctagctacgttactaaaactcgggaactattgtaacattttaagcattactctgtaaagcaaatccccaaggataagaattcttttgctgatatcttggcaaagttagcaatagatttggggatagaaaaatatgggcttgcccccgtggcacatttgatagctccaagtatggaaggagtgggggctcttccattgacaattcaacttcctagatggcaccaatacaacggtacttggaaataggtgcactcctgaaggatagtgttgcttccaagaaagtttagtcccaagctcatagatatgtaatcatggatgggaggttatacaaaagagggttatcaatgccatatctttgatgcatagccgaaacagaaataagcactgttatgcatgaaatccatgaagggttttgtgggcatcacacatccggacaaagtatttctaaaaagatcattcgtcagggttacttttgacctaccatgaagaaggattgggctcaatatgtccataggtgtgaatagtgccaacgttacttaaaagttcccagagctctgccaacagagataaccctcatgagtagtccttggcctttcgcagcttggggaatcaatttagtgggatcacttacaaccagcaagggatgagtcaaatttgtcattgtcatcgttgactactttactaagtgggtggaagccaaacccgtgaatatagtaacttccaagaaggccttggactttgttatcaaaaatataggttgctgatatggacttccacacaaaatagtgtctgacaatggaaagtagtttgatagtgaccagttcactgatttttgtgccaacaaaagaataatcaaaagcttttctattgtggccagacctcaagcaaaggataggtggaagtcgttaataaaatcctaaagactactttgaaaaagatgcttcaagcctataaagcgtactggcctgaagaattccccagggttctttgggcctacagaataactaagagaacttctagaacttctacaggccacactccatattccatgacttatgggtgtgaggtcgtaatcccagtggaatccactatatctacgcataggagggatacctatgactcgacttagaaccatgctttactccaagaatctttagatttaattgaggagctctaggaacagtcacaggtgcaactccaaatgtatcaaaacaaattgccaggaatttcaactcaaaggttaagagaaaaaaaatttagattggtaacgatgttttgagaaaagttttccctgcttctcaagaacccagagttgtaatcttatgtccaaactaggaaggaccgtacaaagtaacggataaaattggtgatggaacttatcatatgaagagactagatggaacaagaattccaagtgcttggaacgctaaccacctgtgctgatactatcagtagaataaggatggtcaagttcctttttacatttttgctttgcctttttattaatttccatgtacgccttagggaaagaattatttgaatgaaaagaaaaattttcatctcataattggccttttaaagttttaccatgtaacaagttattagaagtctcaactactaatcacttgtggggtagcacatatatgttattgtacaaatattcatattccctttcctccacaagaaaatgtctaagttaaatgctcaaatataagagtagttaaatactcaaatataagagtaggaagtattgttgaaactggaacctcaaggaaccgaaagtaagtcactgccttattgtatttgatgattatttaacacttaacccaaatgtgagaaaagtaagtttgaaaaaactagagcctcagggaaccagaagtaaatcattgtcttggtacatttggaactaattgttgcacattaaaatagttaatctatgttaacttaaaataaaggctaaggcctaatggttaattcaggttaacaataccacaatattcaggttatttaattgattgattcaggtcaattaaaaaagttaaggatgccaaaaaagggtaagttctcaagaaaattaattagttcaggttgattaattattcaaagtttcaaatatacccttttaaaaaagcattttttttctcaaagagcatttaagtcacggtactaagaaagcttcacggcaagggtataaattgattccgcacattcaaaaacggaaacccttgttcctcaaataaaataaaaataaaattgaatagttcagagcatttaaggttgagcatagtcgtccagtgctggagcatttttagtttggccctctaggagtgcagaccgggttgggacaagaacctcagaggtcaaaggagcgaaattgtctgtgttctcacatacagggatggtggttccaagatcaaccatccccgatccctgaggctcgttccatgacttgtctgccttttccaacgccaacagttgaggcaaaacttcctccctatctttaacgtccaggagatctatcattgccttattatgttgcaagagggtatatactgagtgaacaaaagcttgctccaaagttttgccgtgtcgagccacctgctcttgaagaggagcctctaggttgatgaccttcaattgggcttcttcacaagccttcgt

SEQ ID NO: 4464 - DNA, 636 bp, Cannabis sativa
aaatggtatttaccataaataaaattcactgaatgaaaaaagaatattcaattttatattgatcaagaaatttcgaggaagcacacctcaaaacttatttttcccattttgaaataattaacataattataataattagagacaacggatacattttaatgcacatatatcagtaatgccaacacattatacagtcacaaaatattaatgcacatataacagtaatgacaactcattacacagtcacaaaatatggtaattttaattagttaatacctattttgttctcttaaatgtatttactaatgtatatttgtagattaactatgtgataatattatattttattaaatgaatttatgctatgactttgacttaagtattattatactttcttaatttcatcttattaaaaatagtcccggaattatattcagtgttgtaaattaattattttattaaattttgttacacgtgttaaacataataataacaaaaatgtttaaataattaccacatatgctacatgtataattaatttaaaaaaatttaatttaattttacgtaatttttttaacctgatttttttttttaaaaaaaagtattcattagttgacttttagttattgataattt

SEQ ID NO: 4465 - DNA, 846 bp, Cannabis sativa
aagattaatataaagatagtctttctaagttgggcgaaatatccaattactaaactcagagatttttaaagaaagagacaatttagctagaaaataagcagtagcctagctcatagtataccaaaatcaaataaaaactctatatatatatatatatgatgtgtacacttttaatttgtatactcaaattttatgttgtataattaatttcaactatagtttttaatgtgtaattgtaattaattaggattatttataaatttttctaaaattataaataatttatagtgttgaaaataaagttaatcattacttataaagaaaataatcacacatataataaaaaattaaaattttattttggtattgtaaattaattaaaaaaatttaaaaatttataagtgatgttaaataattcttagatatgtgattataaaaaaattaagtaaaaaaaaattagataccatgacaaataaagaatatactaaaatttatgtgatggaattggaaaggtactaaagattttttaaaaaaaatatatatgtacatcaatataatagtttgtaaacacttgagttcataaacacatcacttttatttgttacgaaaaacatataaaatatttcaaaaatattaaaatataatattttatattattattaatgtaattaaatatcacattttatataattaaaaataataatttttattaaatatcgctaattaatcgtaaaattctttaaattgtgttaaacaccactaataattaatatcaatgctcgaaagtcgaaacattataatgcgttgttaaagaaaaacattataatgtctatggggccgtgcctc

SEQ ID NO: 4466 - DNA, 1195 bp, Cannabis sativa
gagattgggagaatgaccaacatgcagtaagcaagttttatacaatcgtagaacaaatgttttcgtttagaaagtagggataattagttcgtttttataactcttatgtaaattccctttctttttgacctctaatataacacgaattacaccaggcaagaaattctaacttcaatcgattttatttcctcaatagttatacataacagattttcagatgaaaaccaaccttttcattttcgatgagttgtatcatcgactccaactgagagttgtttgacacccaataactgaagtctctttctggctatggtgttcaaggacaagtatcgatcaatataagaaatcgatagatacagagtctctgaacaaagtttgtactcctctgcatacagagtctctgaacaaagtttgtactcctctgcaactttcaccaaccaatccaccaatactcctctcatgtaggcactaacatctttctgaactttctcaaggtaattaggcaatggccttctctttggctcagcctaaagatcagatcagatcagaaatctactaacaaaacaaaagtcaaagcaaaccccccccaaaaaaaacccaaattacctccgtttagggtttttaacagcagcacaattccgaagctcacccaatacaactcgtctattgctaataaaagaggagtcttcatcgtcagagaatgaattggcttccgtcgcagacctcttcttagataaacgagtgatgcaaacgcactgagacatggcagtaattaatctgatctaaaatggatctctctctctctctctctctctctctctgctgttgggtttgaagaaagagaaggaaagagatagatggagatggaattgggaaatggtggatttgtagaggtatgaaaatggagggagggagggagttttttgaaagtgaaactcaaagaaagcgccatttttttttgttttgtgtttggtttttcggttcgaaaagtgggcgatcatccatatgtcatcgttctttatgccttcaatcgtcaactccaacataggagatagaatcgaatgacctccaatagaatcgtcaacttcaactcaacccttatttgtatattctaatgagtggttagtatttaaatctcaaattcagagttgagatagaataatactactatatctttagagagagagagagagag

SEQ ID NO: 4467 - DNA, 1180 bp, Cannabis sativa
gaccaaacccctttcatccacatcttctccaagtgcaccaaaagttccatataatctcacttagtttatcatatggggcgaaatgaatctccggacaaaacaagatatcatagttgcacagacaaaatcttattgatctgacttggtattttacgaaccaaacaaactcatgtcaaagcacaactgattatacgcgagcacgattggcaagtaatctcacaaaattgaattctaaatctattatatattgcatgagaatgagatcatctcatctgagcttggttaggagggccagaggattctgattcctgggtgctcgtattattcgtgtctacattatggacttttgcattttgctctgcctcggttttttcgagcaaagcctgttgctgcatggctgtcatcatctgcctcattgtcttttcttctccttcaagttgcgctttcattaatatctcagcttctttatcaagtggcttgaagtaatcttcaatggcagcctcctgcaagtttaggtgatcaaggtcatcaaatatttcccattaccagaaacatggtctgactgggatcagtctcgatcaaggggtatttcacaagagataactattaactggtctcagagagttatacaccaaggcgtaggatgttaatttgggggttgtatgctacacacctttttaaaatgaggttactctctatggtgtcggatacatgtacaataaactagttttgctcttatttttggtattttgttaggtggattaatagtatattgttttcctacaatataaacagcattcaaagcagttttcaacagaaggagaaaatggaaaacagcatccatgtgtcaaacaaacaacttactgtttcttctagcttcttatttaaattttgcatctcttcaaccatgcggcgaacctctgataaaataacctgctctggtatctttcttatggctgccttctttgcttctgcctgggaaaagaatgaaaggaaaggtgaggtgaggtaccaagcacaccataaaaaaataaaaatacacagaataaattaaggcaaggccgagaaaagaagctttaagcaagctttgaaaattatatttttctccagaaaatccaaccaacatgtaactagaaaaacagacattactcatttttgagatatcaaagtatgttcataa

SEQ ID NO: 4468 - DNA, 600 bp, Cannabis sativa
taaataactctcacttcagtgtacccatttagactacgtattaaataattattatttatcttattttcaattaataaaaatatacaaattggaatagaaaaattgattcaattttctttaattaaataaatatttaacagctaaaaggatatgattgcaataaaattgtaagataaagtacttttattattatttttttaattagagttatatgtataacaattacaaatgttaaaattttttactgcaaatattcatttttaaaataatattctaattagtacaaaaagcacaccaacaataattaatgtacataagctaaagttacaaataccaactaattcattaggtaaatgttcaattattgaaaaatgacatgtaaacgtgaaattaattatttgttcaaaattattatttaagtaatgagccataaattatctaacgaataattgctcattggaaccacatcaaattaacgatattgaacatgcacactttcatgaccaccacttgagatttaaacatagttcattattaagttctaaaataatcatcaactaatatatatttggttgtaaggaatcaaactaccattacaat

SEQ ID NO: 4469 - DNA, 805 bp, Cannabis sativa
  modified_base (113)..(129): a, c, t, g, unknown or other
cttttaaaaattatgtggtccttctttcatgaattgctttgacaaaataatgtgtggtcctctacctctaatcagtttggtggatccattggtcataataataataataatannnnnnnnnnnnnnnnnaataataataataataagatcattgcatggcattagttttcactttatatatgtctattaatcttattctttttttttttgctttttgttttttttgacagaactattaatcttattcttaatcacaaatatatcgtaggcttcttgtacaaagccgccaattacaaaatttactaccaatgataatttttttttttaattcattacttgttattaactcaattataatatatatagtacaaaacatgttaatgattcttaataatttatcatataattttcaattcaacacaatctactcatggcaagggagtatggaacctatttagtctttaccatgagaggagacaggttaacaacactatactttgggttgcactacaagaaatgtaatttttgttagcgcataatttttttttatcaagaaaaaaaaaatttattaatcaacagaattaaatacaacaactagcaaaagtaaccaagtcacacacagctcaagaacacataccagccaagacaaacaaaactacctatcttgtaatctcaataatctctcacttacactaaaagtaagtgatatatggtcttataaatgttatatatctttcacataatgtagttatagattccggagatcaccacatcattattagataaatatatagaatttgattct

SEQ ID NO: 4470 - DNA, 900 bp, Cannabis sativa
atagtgtgatattaactaaatattatatattttaagaaattttaattcagtcatataatactttttaattttattattcttcttgtcttgatactatatattttttttaataaaaaaaattaacttcattaactaacaaaatcaatcaccaaacatggtaacaactcactaggaatagactccaaacagaatataaattagagattctagcaaagtaataagccactatattagcagatcgctaaataaaaattatagcaacatcacataattcagcaagtaaatttttacaactttaaatattacttgatcaaacaaagatatcatgctaatagagctacgtaatgcttgcacaaccccaagacagtcactctccacagttatatgttgccatattagttgctcttgaatccaagttgtagcttccttaacacttatagcttcggccaaaacaggttcaatcgtgcctatatggttcgaccttcaatgagcatacccttctcatgcaaccatacccataccaaatgaacgacccccatcgaacaaagtcgcgtttacattaaccttaatactgttagcgagtggtggagaccaatgctctataccattatttttctgaatatcagatcataatgagcctatgatagaattttgagcattattccattgatcaaggtaatttttagcaaacacaataatgtcatctgctcgaactatctttcattttcaaaacatcatttttggcgctccaaatggcccaacacacaggtgtaacaaggtactttttttttgcattaatctacttgaagactaaagtacacgagtccacaaaggaggaaacatgtgcacaaacagttccaatccccactctatttcagcaagttgtgatcgcctggcagg

SEQ ID NO: 4471 - DNA, 529 bp, Cannabis sativa
gctttagaaagaggggcgctaacgttttttggctccttcccggcccggaagttcgcttctggcgactagcttctaccgctagcgcttggacttggaagcaagctacagctaccttgaatcaatcaatgaatgaaaaggaaccgcttaccgaggaatagaaagggaggacaggttggttcgaggacccgatggtcaaaggaaaggggaggtcctgattccgggacggagccgtatgacgcgagagtgtcacgtacggttcctttgagaagggtgtgataccaccacctatcaggcccgacgagcggtccacggagctgcatccctactcacctggtccatgcacatcgctctctccaggaggttggccgcctatcctagatcgtcccattttcaagaagatcccgggctcgatctggtttagtatcaaggtgattctctttctgttcctatatatatgggtccgtgcagcatttccacgatatcgttatgatcaattaatgggacttggccggaaagtgttcttgcctct

SEQ ID NO: 4472 - DNA, 804 bp, Cannabis sativa
ctaagctaaaacacattgtgtatagagcttcaacatcaaccttaccaatacacaagaaccttgcccataagaaaataagccaatccaccttgtgtgcccgctgtggtcaagatgcaaaatcagtttctcacgccgtgttcttttgcaagagagttagaagtgtatggaaatgtataattttctacccttatatatctctttcaaacactgtttcttttcatgacattatttttaatatttttactattatgaggaaagaagaggtagagatttttctttgaattgattagtttgtttggtataacagaacaaggagattaaaattcaaacaacggatcaagctcatgctatccttaacctcgcgaaaagctacttggccaagtataaagcaatagttgctacacataatgcgccacatcctgttgccaagtctgttgccacgaccatttggacacttcctccacaaggcctcctcaagctcaatacagatacaacatcctcgaagaaccaccttacaactagcaattgtggaatcatccacaatagtgaaggaggagtggtcgctgcagtagcttttcctcatacaggaggtggagatgctgcaattctcgaagcaaaattcctcctcaattctcttcgctggtgcatagaagagagcttttgtattcactaggttgaaaccgattgcaaagctatcatagatgctctagctgccaccaaagaggacctctctctattcgaagatctaagtccgctttatcttacttttccaatgcttcaatcactcatgttaagcgctctgct

SEQ ID NO: 4473 - DNA, 825 bp, Cannabis sativa
ttcacttacacataacacatacctttggacatttacctcatgattattgaaacctttggacattcacctcatgattattgaaagagggttattaaatatactaacgagtaacgatgagtatagttatatttatgaatgagaagaactatcaatttacttatagtagtaaaataaaatgggggcatagggtggggcgttgcgcagtagattattatggcctctcaagtgtgtatgtatgggatgggtaccctcctttggtagccacccacccagtaagtagctgaggaaagaaaaagagggcttttgttattaggggcttcgcctcacaaacccaaaattaaccaacgacatacatctgcttccttcttcagctctaaaactctagggctataatataccaaaacaaccctcttcaccatttcctgctgcttattcattatcagtcaacaaacccctcggctcggcctccaacccactgtttttaacaactgaccacacccccaatggattcacaacctaacgaacaaaacgttaatggagaagctcatgactccgaaaggttagaccgcagagatgaggacgaagaagaagactacaagtctcaacctcataccggtgacggagctagtcctgggtaatctcttttctctacttttttagtttttattttcttctttcttaggaatttaattgaaaggatttatttagcgaatctatgtgtggaagactccgttttttttatttttttttttgttggtaatttgtaggaaaatctttatagggggtttagcgagagagacgagttctggtaagttgttagttcgt

SEQ ID NO: 4474 - DNA, 1049 bp, Cannabis sativa
atgttatttatatagcttcttccattccaaaacttcaaatgtagctcactctcaagaacttctcctaagtttcacacttaagtcttctaaggagaagagttgatcatagatagtttcttttgcctgcctataaaacaagtgcctaggcctatcttgaaaatcatagttttgagacataacttaccactgagtttgtttttaggaaaatgggaaggttggtgaggaattccccaatttcaactttaatgcatcacatcatggtgactatgtggctatagcttctgaacctttatgccttgtggggttggacattgtgtctcttgtcattccctggagagagacagttgaagattttattcgaagcttctcctcctatttttcgagtttggaatgggataatatagtttctgctggcactagtaatgatgttttggctgagtttttcaggtaaattttttaacttcacctattgataaatcattttatgaacaaaaaggttgcatattaactcaaagacttttaaactagctgataacacctttttcttctttacaatctttagaaggtgtctggtatggacttttattagtcacattcctttgttgatatgtagcattattctatttgtctaaacttaactggtggcctcttaattatggaagatttacagacaaagagattagtcaagttcaactaatgaatgatggtggttatagatattggagtctgaaagaagcgtatgtcaaagcattaggaagtggagtatcatacgacttggaaaatgtggagtttcatcactgtaactggaaaaatatttctgtcaaaatttatgggagtgctatgccagagtggagattttggctttctgagctgggaaaaggtcatctggtaaataaactctacaactactcttgctttcttttttatgtatactcctctgtttaccaggtcacaagtgacaaccactccaagtttagattttagaatattgttatggtctttgattgaaagattttataggggtagggagcttaatatacagttcaaat

SEQ ID NO: 4475 - DNA, 2327 bp, Cannabis sativa
  modified_base (665)..(665): a, c, t, g, unknown or other
tagacagagaaaaaagactcaaaataacaagaaaagaaagaaactccattattaattttctagttcatgatgatgccaagaatatgatcaaacttaggaatgatataagtcaagagagacagtaatggagttaatgctattggggtaggtaagtgttgtgatcagtgtgtggaaaaaaaatacaattgagagtgaactctcttaatcgtaaccccacatttgactgactcaatgataaatatgctggcaccattgatgcaaacaacatcataatgctgttatatacaatgataattaaatggtaagaaaaaatggtatcaattacagcaaaagttgttctaaatagaaaaaaattcttatgacataaaagataaacaagatataattagtaccccattcatttttctggttcatgatggtactggccaaaatttgaagatagccagatttgatgttaattgacatgtaataaatgatcgaattcaatccacacatatttatataaatttttaaaatattatatatacatttaatatttttttatgcattttttttttaaatttgttatttattatttaatttatttttattttttgttggacgcataaaacatttatttgttgttagttatatgaaaaaataatattttttaataaatattaaanaatttaatattgaaaagtaactaattcaaaattacctaatatcatacagatcaccaaaccagaggaagaatctcgggtctcctacatcaatagaaaaagccatacaagtacaactactcaagcatttagccctgcattcctctaaattcatactcttattcactcaagaatattgagcaatgccaggaaattttgagtgaaaaaaattcaaggaacacatcattctctttgtcattacagctcagaggactttttttctcacacacccttctgaccagttttcattatgctttggcttaaagtcttttaaacattggcatattgtaccaacacattctaaattagctccacatattccatagtagtcacaatgatcatttcgtgtgctcaattttttggtgcaacacaattcttgggatcattgatttatttttcacactgtatatgtagtaaacttcttcagcatataagtgtctgtacacaaatttgacaagctcaatcccataagtaaaatctccatgacaggagtcatcactactattccatgctgataagcgccatttgagacctctcctcaagtcccatctcatctctcaaaaccaagttaacattatccaacagctgaactagtggttcccgagcttgtttcgacgagtttgtagaccaaacaagcactctcttattgttatcattctgtcctgaaaacaacacaagatttcctgtgtcgtctatagtcaaagatccagatgaatcggtgataggttcacagcagtttgaactgagattttcttatacaaaattcccaaataacgattctttgatgaactacctgttggagtaaagaatcccagttcgaaaactccttctctagataccaaagttgaattgttatctctcataaattccaaaggttgaatggtatcaaacacagaaaaagttgttccattaattttctagctcattatggtgccaacaatatgttccatttaatcaaacttagctatggagttaattatacaaatactgttcgtaagggaaatttgttacaaggaaaagcaatggggcaagcaaatgtgaatgttgaacaaatctgcagaagctaaatttgcagaccattgatacaaacaacatcataatactattatataactacacaaagataaaccaagcgtatgaaaaaatggagtttacaaacactattcatatgggagatatagctgtatcacataacattcagaccactatttctacaaacttgtacaaaaatttctaagttccccaatttatttgaaaataatttggccaatttcataagtataaatatgttcaaactaattaaaaacttagctcaaagatacaatactccatttccacttaccattattagcaaccgcagtaataggaaactcatctaaacataagaaaagatactaaatttatgaaccaaaagctaagtgaaaataaaaccattcctaatttttaaacatgcaacttctaatagttggtcattagttcaatatatatataaagtaaatggattaagaaattagatacaaaaaccattcacaaagcaatagatatgaaatctacaagggtgggtgaatgccactagctactgatgaatcctgagctctgaaaaataaaaataaaaatgatgaaaat

SEQ ID NO: 4476 - DNA, 895 bp, Cannabis sativa
ttctttattgggctttgaaggggcctttactgtagattcggtggggttggcgggaggtattgctttattgtggaaacaaaatgatgattgtgctattttgggtttctcccaacatcacattgatttagcaataaactcaacacagtttggtaattggagactcacggggctgtacggagagccaaatcggaataggcggcatgaaacttggactttagttcgaactttgtcaaggcaatcggggttaccatggtgtgttattggcgatgcaaacaatgttgctagacaagaggacaagaggggtggccggctttatcctcaaagtttgatcactggtttcaatcagatgctacaacaatgcgacttgtcggacttagagttgcaagggcacccgttcacctgggagaaagggcgagggactaacaattgggtcgaagttcgcttggacaaagcacttgttacatcttcttggcaccaggtttttcctaatgctactcttactaatttagaggttactacttccgatcattcccccatattccttgaaccatttgtctgtaacaagtttatttctccacgccgttttcgatttgaaaacacatggttgaaagagcctctttgtatggaaattgtgagagattgctgggagagtcacgaggttaattgttttgctggaaaattaaccctttgtgccgagaagcttagtagttggggaaaagaaataacagggaccttaaaccatcgtataaagagttacaaagctcagttaaagtctctgcatgataaaagggatagtgcctctgttcaacaatataaggaagtaaaagaccaactctttagagctatcgaccagagagagtgttattggaagcagagatctaaacagttctggctt

SEQ ID NO: 4477 - DNA, 1899 bp, Cannabis sativa
  modified_base (460)..(474): a, c, t, g, unknown or other
aatatttgaggaccgttaatggagctaaggtgacattgtttgtggacatggagcaactggtggtgggcaatgaaggacaacctacacaagaagctatgcgaagccagacggagaagcttgtagagaagttggtagagtaggcgaaggaagccatattttttaaagaggattcatgtaacgtccctgcttgaagcctccattggactttcctccatatactaatgtctcttatacatgagtacgttactctaactgcttcctagaataacgattagccctagccctgtaaactaacacgaacacgagtacgagtatttctagcatgctttgtcctcactcgcacacttcttgagaaaacttcctaagaggtcaccatgccaagattactccaggtcaagcacacttaactttggagttctcaagtgatgggtcaccagaaaacaagatgcaccttattgannnnnnnnnnnnnnntcaatccatttaagcccttttcaactatgtagtcccatacttacacagtctcagaatcatcacacttgaacttccccagacaatgtgggattacacaactcacctagtatatttctctttactaatcacagatattgactttaaaaactcaccacctccaccatctccaccactagaggcacatgaggttccccctacaatatcttatcctagcacctcaaaggttgagcaagcaagatactttgctatcttctcgaggttgaagaatgttgaaagggaatagagtgctcttttgtaaggccaagttgagattatgggttagttcaagaccctaatgacactcatggaagagcttaaacgaccaacttcagagccacaatcacagcctcagactcctgaagatgaaaccattcttctgaatgattacataccagatgatccagatgatgtattctatacacttaagaatatgaagattactaatattgaagatactcaggattatgagttcgaagtgttgaacataactccatcaaggtaacttaattagaaattcatgtttattgagtaacttgattaaattatacataaattatgttatattttatttaatcagtgtttatttactaatacaacgacaattgcagaatgtatacaataaagcatattaagcataaaattctttaactaccttttgacaatgtaattgatcacaacatgaagcggtttagaaaaagatggtgtgcagaattattctactaaaacttagcatgaactttggattttttattttttatttggaacaatgtacctataatatattgtaaattgttactagaaaagttatatttcttttctctggtagtagaagcatcaggcatatgtcatacccatatcgttctatatcgggctagaaaaaacaagaaaattgaattaaatatcagaccccttcgtctgctttatcatacaccattgtcccatttatcataccccatcatcccataaactctaaaaatggaagctcaaaaattaataattttaatggactatcatagcccatcgtacttaataaaaaagattgaaaacagttaccattgtaccaccatcgaggatcattgtactctattgtttcgatcaaattgaaattacaacaagtttaccaaatggtactatcgtaccgctatcggaataccatcaggcccaattaattttaacattagaatactaatttcacaacataggaaatcacaaaaaaaaaaaaaaatactattacaacacatatccaacacataacaataacattactagcttacaataacatagtgaaactataatgcaatttcttaaactcagtacttgcaagattttctgttgtgccctttatcactacacttgctacaattccgttgtatcacaatctttttt

SEQ ID NO: 4478 - DNA, 674 bp, Cannabis sativa
tttcatttcgctagaagagttcgccgccttctgtcgtcagagctcagaggacggtggagcttcggagcttaaagatgcattcgatctctacgatcaagatcacaacggacttatctcagcctctgaacttcaccaagttctcagtcgcctagggatgaattgtaccgttgatgattgtaatcggatgatcggatccgttgattctgatggtgatggtaatgttaatttcgatgagtttaagaagatgatgactaataattccatggctaaaggatcggcgattcagtagatctccgtagatcttgatttgcaggtaagcacattgatcttaattagtggttctcgcttaagattccttttaattaagtctctgtttgtcgttaatctataaattgtatcaactaaatccaaaatttgactctgttcgtattttgtctgaatagattttctcgagaaaatcattttcttttctgtgttttttttttcccttgttaaatctcttccagactcgtaaatataataattacattagaaattaataaatttcataagtttgaatctcttcagtaattttatttttttctttctaaatttttaatataattgctataagaaaatttgaattatattatttatagctttaaaaaaattcgcttaaataagtttaattctca

SEQ ID NO: 4479 - DNA, 879 bp, Cannabis sativa
aggacttttgattttcataccagaaaaagaacagttgcacagtgcttcagaacttcaagattcatccgaacatcatcaaggcttctgttaattaattaagaaagtagattgtacttgttaaataaaattaattatcaatataatgagtcagtttgatactccgattttatttataaaattataatacatgatcaatataattacttcatagtcttaattgtatatgtatatatacctgtgcttttgctgcccaagcccgaaataatcagccaatgttgccatctaaacatgatatataataaacaaaactcaaatattacattataataaataatcactatacatctaggaaataaaagcttgtaataatatgaacaaatatatacaagggttttggttaattaattttgatttagatataaataccttcatattaccggctcttctgccaaacttgtgagtcaaaactggcaaagaatcaatcataccaacaggtttaggcgaaggcctaccaatatcagcaaaggcctccttaatccgaacacaatcaaatcttcgtatgttatgccctgcccatattctgccatccaaaacctcaaatatcttatcagcaacttcctcaaacgacggcgctttggataccttctcacgagtaatcccatcacaccgagaagacttcaacgacacgacagacaaatctccaggcctgatcacagtactgaagctctccaactccactagctttcgagggcaaaccacaattgccccgaattctagtacccagaaccgttgcccggctcttctgggtactgtcgtttctaagtcaaagaacacaatattctctgtcgttttactataaggaggaagctccattttgtt

SEQ ID NO: 4480 - DNA, 1203 bp, Cannabis sativa
acagcatagtcctactgaccatttattgatatttattataaactactaatagacttaatttttatgtaatttgtagtttcttctaaagagtttttaagaatttatttttaaaattaaaataatttatataatttctaatttatccacaaaagatttttttctaatgatatcaaaatattttataaaacactttttattaaaaaaaatcttcatataatattatccaaattataaaaataaattaaaacttatacttatcttctacttttagttataagtaaaagtaaaattttaaacaacaggaccataataatacatgaatgaatgactgatatttgttcagaaatttatttaattatagaaattttgaaattcttttgtccaagtccatgtcaaagaaactttgtccacgtgtgttagtttctaacgcatctttaattttagagtacagtttactcaaatattttctaaggtgtacagtttagtcaaaaaaattccataggctatgtttgttagaaaggagggaaagtaagacaattagagacttcaaaggaggcagttagtatggagtgagagaagagaggaaaagatgagttggtcaatacaaattttgaatagcttataaggctcatataaattttgtatattaggaacaatataacacggtattaagcagtatgggtgcccttcacatattaatatgatttttagtaacactattttaatcaatgttctattttaaaaattaaaaaaaaaataaaaatattttttaaaaatatattttataaaatatattcaatcgctttcaatattttttaaataatttttttttcttaattaatattttaaactctgaccagattcggactcaaatcctcccacggtcctggcgctgaacccgacctctgactcgaactcaaatctgaccccagatctagacccaacttaaataaaattaaaaaataaaaatgaaaatgaactttatagaacatacttttattttttatttttaacatttaaaaataaaagtaattacagaacacttttttatttttcaaaaataaaatttttaaaaacaaaaatttattttatattttatgattaaaaaattagaaagtaaaaatgttactaaatagcaactaaattaaacgtgcccacatgacattgtaaaatcttaagattttatttcattacttcacagaa

SEQ ID NO: 4481 - DNA, 780 bp, Cannabis sativa
cactgaggcacaaccattatcgatcaagaagcccaaagcttcgccattccccacctaaggcacctccgaaagaacccaccacctgtcgaactccccactcagtataagaaatgcgactttgctggcgcatttggccaaatgcgccggtgaaagttgccagcataaaggggctaataaagagccaaaacctttaccagtgcactattgtgctggcaaagttgttcataccagcacatgcatttagtgaattgcgttggtaaaagtctagaaagaaattgccttatggcgcgaactgtttctattagttcatagacctttgtcagtgcaattatgcgccaacaaaagtctaaaaaaatgggaagaatttttctcatgtgatataataatgttataatgtcgaaatttcggtagaaataatgtagtaaaaaaaaagttaaattaaaattttataataagtgaaataaaattataaattaattatatatgatattaatttatttataaattattaattataataataaagtgatattataaattttaaaaaataagtaatttttagattgaataataagtgaaataaaattataaattaattatatatgtaatatataatttaaaatttaataaagtgatattataaattttaaaaaataagtaatttttaatttaaataataaataaaataaaattataaatgattagtatgtcatttaaaatagcataagctattataaattagtataaaatattataaattagcataaaataagtataaaa

SEQ ID NO: 4482 - DNA, 956 bp, Cannabis sativa
acagaacttcttcaaagggttaaagtggaaaacacaaaacccaatgttactccaatcacagcaagaaaggcattgtccataacagatggcatacctatgagtgaaccaacaacctactgaagtgtaataggagccttgcaatatctcagtcataccaaacttgacatttcgtttgctctcaataaatttagctagctagtttctcaaacaacctactgatgtgcactggggagcagccaaaaggatacttaggtatctcaaagggacaatgcatcatgggctgcacatacctcctagcactaatctaaacttaattggctttattgatgctgactgggcctgctgcccagatgataggaagtctgttgcatgctattgtgtgtttttaggagatgctttgatctcttggtcatcaaagaaataaactgtcgtggctaggagcagcatggattctaaatacagagctcttgctcagttggctgcagagatttcatggctcccagagttgtcgaatgaactcaagttcaaatgcacttcaacaacagttatttggtgtgacaatatgagtgcaagtgcactggcagctaaccctgtttatcacgctcgaacgaaacacattgagattgatgtccactttgtgagaaataaggtctcacagtgggctatctgtttatcacgctcgaacgaaacaaggtgtgacaatatggtgtgacaatcaggaagtatgatttagtacatgtcccctctcatgatcagatagctaacagcttaacaaaagggcttactccaactcggtttcaatttcttgtcaacaaactcaatgtgattcaatcaccttattgtttgagaggtggtgttaaagaaattgaatccaataatatttaatcatgagcttacaaaagaagagtggcagtactgaatgagggaatcccaagatttaacaatcattgtgtaat

SEQ ID NO: 4483 - DNA, 1454 bp, Cannabis sativa
tagtatatataaatgatatcacatgcaatatatataacacactatactataagaagttcgtatatatcgatcatcacatgcaatattatcataaaaattaacttacatatatcgataaggtctaattattaattaaggcctctcacacatagttttcagaggtagtttggcgttgagattaatcaattaagagactaagaaaatagtctttcttttattaaattattctgtagctgtgggactatctatatataatagtctggttaaatatgtacaaattataggtttaaatatgtaatttccatataatgaggcaatatttaaaatatttcttctcttttaagctaatgatatagtgttcatcgtagctatggttagttatagaagatatttggagaattttcgatatttgaatattttacaatgttcaaattagggttttattaagccgtttgtatgcttgctaatttatttattttatacttgtgaaaaatgatttcttgaaatattattcattttgacacggtaaattatacaaattctaaagtatttgttatgactacaaaggacgctgatttaatttatttcttttagaaaaaaaatattttaagtgccttagttatgaggatatcgttccttatgacactacaataaatgaaacttttaccagcatattttttgtatttttgggaagttaaaacagcagggtcataggagaagcaatgaccatgaatttttggtgcttcttagagagaaacagtatgggtgaaattggttgggagtggcagccatcgtcaatggcatttcgacagagtcacacagagagatatagagaaaggttggagagaaaggttggagagagatctgagagaaatttaaggattttagaggttggagaactgagatcctttctaatgcaattagtgccattccaaatatatccttactattaggcacgacataagtttgttcttgatatagtcattcctaataatgttggtataaaagtgatttttgccgcacactgcattaatgcgcaaaagtcatttttaccaacgcacttttgcgatggtaaaatgtattaagggaatattggtgcttattgggcttactatgccagcacaaatatgagttgccctggtaaaaatatgttttgccagcataaatatgcgttggtaaaactatgacccttttaccagcgcagcgcagttcgcgcaatgcgttggaaaaagtaacttttgccagtacagttacaacttttgctggtaaaagttatattttttgtagtgtttactaataagttagtgaatacaaaataataattatattcaattttggcacctcttgcaatatacaaatcaacattaattattcatcgtctacaaaaataatggaaagatcgacgacgacctcggcaagctcctcctcctcgaggctcggttcctcctcctcca

SEQ ID NO: 4484 - DNA, 997 bp, Cannabis sativa
attttgtagtagtgtttccgcaaaaatgcatattcgtgatgaggaatcaaattttaaaaaaaaatagcgaaaaaaatacattcaacatatttatatattgttctaccttagctgatataatttatagtactacaatctctttatcttcttcccctagtgtaagtgttaatcctgtaagcagaaatattgatgtaaaatgtctattattttttttttgatgaatgaatcatgacattgattactccgaaaataatttacatcctattagcatcttccatagaagacctgattttctatctgtacaatgatctcaattagaaacaaaaaattcagctcttttttttttttatatacaacacttgatgctgagaacaattgctagcagcaccctattcagccaacaccagctgccaacaccagcagccaacaccagtagccaactccagtagctaaccctagcaatttgcgatgttgaagacaaaggtgagtagcagccaacaccagcattttcgatgctgaagacaaaggctagtagcagccaacaccaacagggaaattataaaatctgctacaaatcactaaacaaatctgctacagacagttgaaccactcggtttcctcttgctgaattttatttggccaattacagatcactctgttcttcacagcttctttagtgacatgaatcacctgttttgatgcattcttccctgaattccacaatagatcgttgcgatttttccaaatgtgatacactagagcagtcacagcagcagtgtagattgcttttcgaaacctgttcatcttagctctttccagcctccttaacagcttgttcaaggctgttgtttcagctctccaaccaagctttaatttgaaagagacaaggagtggagaaggtacactgaaaaataaatgctgtgaagtttcaggctgtgtgctacaaaacagacagtgatcttcaccaatgatgttgaatttatgcaatctttctcta

SEQ ID NO: 4485 - DNA, 559 bp, Cannabis sativa
aaattcagttgaaataaccacgtctagcatagactggtcaaaaagtgtagccactgatttatttttttcttcttgtcgtctataccaaggtggagaattgcaagtttttggtctagtcaggtccctaaacctcagatgtaattatttttaaacaaatctgtggctattagccaaactgtcaattttaattagaataggccctaggtttatgtaattaacatcgatattttatttctttctcagagaacatcgaagtctgtaattgagcattgtaactttgagatacaaagatcgatcaatatatattggttcattattcagttatttatgcttagcttcttgatccaatttttgtcttgtacattagagattgattattcatcagctgattattgattttgtttacagtgtgtttgatgatcgtgatcaactcatattttcacagcaagtacatatgttgttagtttcagaaaaaaaaaaaaaacagatatgacattaattaattaaaatatcaaaagtagcgtaagagtagttaaaaaaatgcagagagatgcagggg

SEQ ID NO: 4486 - DNA, 1679 bp, Cannabis sativa
tagggccaataatttccatatgttaacatgttaaacatatgcaattgtatgcatatatcaatcctattattttaactttacaaaaagttggtctatgcaaactttacaaagctgcaatttaactaactttttgactctaacgaaagttaagctttattatgaacaaagaaacaaaaggtaacctgttaaagttataataaaaacatgcatttaaagacaggtatgtgtggtccacaaacatatttaggagataatatgggccgaagtagccatatttctatcaaaaccagctaaaatttggcccagttgtaagtgaagaataataaaacatttactctttacacgtggggttggacagtggtattaatgtcattatcttttatgtgtcgagagctttagaaaggtcagtacctgtccagtttggcccaatgaatgataatgatcatttttgttgttgtaatttattaattttggaataaaagcctaaatttagtaacactgttttctattaattgttttgataaaatgatatcagaaggaaatgtgtacatgttatgtaattttaaaagagaaatttgttgagttctagagtaatgtctcgttaaagttcgtaaagcgttctactaatcgagctgcacatgttgtttcacgtcagtctcgttggtctgctgagcctatgttcacgaaggagaatattcctttggaactcaaaattgtacttttgagcaattactcttgagtttatgaagttaatttttcatttaaaaaaaatagaaaaatttgatattccattctcaaatagtatacatggccttttagtataccactttaaaaaaaataggcaaaatatacttccaatactattaaacctcaagaatacctttcccatttaaaaaacactctctctaactctcacactctctctatctaactaccaccttccctcccaaacgttttacccccatctccagtgctccactatcccgaaaaaccaactctccatctcacaccacccagctcgcactgaagacaaaccccattgcctgtcacattgatgccaacttccagtactgtgaaacccacaaaacccacgaaaactacccaaaagccctaaaatcgagggccaactgtcaagtccaccacaattaaactgtcgtcgacgtggataacaatacccaagccacccactgtcgattctcatccacccattgacgtgaataacaatactcaattgtgtgaatattgaggggctctctgtgatgtttaacgacatgtttgcgacatgttacaatttcttgaagtttctgtctatttggacaatttttgttggttttttgcatttatcaatttattgcgatatcgtttttgacgtcttacaatatcaataacaacaaaatagttattgttagacgtcaccaacaaggtcgctagacatcaataaaatgtagaaaattaacaaaaataatccaaacaaataaaccaaacagacataaatctcaagaaatcataacatgtcattagccatcataatgagctcaaaagtgcattcttttgttgctaatatcgccaactatgccgctaatattattgtttgcgacattttacgatgacaacttccggtgatatgaaacccaagaaatccacggcaaccacatcgaagccccaaaattgagggccaa

SEQ ID NO: 4487 - DNA, 978 bp, Cannabis sativa
gggaggagggagctataaattgtggctcctcatgagagtttcaactccttccacgaatgttcgccaagatcctctaaggtgggtcacccccacctacaacaagtgcttcacatgagccccaacagaactgtaggtgcatgaatgctcttgagatgtatgtaaatgatgactaggttggtagacattgtccttccatttaagactctcaaaataatcaccttcattggataatttagtgtatgtcactttatcaggttcaatatgattcaaatttttatgagaaggccacttatgctcaatcatcttctagcaaaatcagaaactttccttggttaaaatctttaagaacaatggcaattattcctattcatctttgttcacaattttgtaattctgaaacaaataagagaaaaagggtaagcttgttatcttctgattcattgtctaaattatactcaaaatttgactattttatagtcaatttattcaatcccattatcttttaaaaaatgctagtattatctaaaatgtcattcacatcacacttaattaaatttaataatttttataaaatatcactaaatattcctataacatcagcgtgccttaaacaattagataacatcaatatttgaatattaacgagagtttttatagtttttttttaacattgaatagaaggattcgaatttgagaccttagaaaagtaaaaatttactaaattatgcctatggcgagatgatagttttcataattaattatctataaaaatccatatccaattcattcatctaaactagataaataaatccgtttcaaaaaaaaaactatttaaataaatagttttatgaaaaaaaaatccaaatcgtattcattcattaaaagaaataaaaataatatattattttataggacaaaaaagaaatgtgaaatagagaagagaagagaagagaggaggaagaaggagaagcacacaag

SEQ ID NO: 4488 - DNA, 966 bp, Cannabis sativa
ataataacctcatgagtagacaagaaggcctccctaagaacatctacattgcctgcacattcaaagctgtagtccactcctcctttactcatctctctaattctctgaaattttatttatttatatatttcaattcattacaataattaaaattatacatgaataaatataagagatattggactaaaataataatattaatacttacttgatgcacaggcttttctagctcagttgggtttatgaagtctgtaactcccattgctttacctaataattaaaatacaaacacaaatatatatatatagttaatttattgtgtgaggttgtatatttttatttatatatatgtatatatattttgtgtgtgaatttaatacctgtgctgaatttagtggggttgatatcaacaccaattattttggatgcacctcttgctcttgcaccttcagcaaccttcataaccaatttcctttattatataccatattatatatatatattttatgtatatatgtatcaagatgggccagagagtgtttgggccttaaaagaatattaattattggatccttaatctaaaaatgtgttatttttgaaaattactaattctttttgtgtatttttacaaaatattgttttctcccttggttggatagaaataggcgcaggcatgatctgcctcaaaacaagagtgtttctttatgtgaaaattacatattttatgaatttttatataatttaggcaaaaatatagttatttttttttttaaaaaaagaaaaacttattttatcaaaaaaattcaaaaaaaaagttgaaaaaaaggaataaacaatatcagataattggttactataaattgttttcccatagaataatttttcttaaaaaaaaactcatatttttgtaattttttcagaaaaagacaataaaaatgaaaattgtccatttttgattatatttaa

SEQ ID NO: 4489 - DNA, 1646 bp, Cannabis sativa
ctggatcaactttatcaatgaagatcaggtgaatcttgtttctgtttttctgagcagagcattttttttttttgagtgactaaacgtttggaatgtaacattaaatgttttgcatctttaggggcactgtggttcttgttgggcttttggtgctgtggaagcattgtcagatcggttttgcatccattttaacatggtaagttgaatctaatggtactgacatcacgactgatgatattttattacaagctctgaaagatagtgctgtaaattttgtttcagaacatatccctttctgtgaacgatctcttgtcttgctgtggctttatgtgtggaagtggttgtgatgggggctaccccatttctgcttggagataccttaaccatcatggtgttgtgactgaagaggtatgaacttttgttttatttttgtcttccatggagaaggatgggatctagctttccctttcttatgtacttgcaccttatgaaattctgtattatgttagaaaaattttgctttttatttttgcccaatgttctatcaagcaatagctaatgatttttattattgttgatgagtctaaatttcatatcttgtagtgtgacccgtatttcgataatactggttgttctcatcctggttgcgagcctggattccctactccaaaatgtgctagaaagtgtgttgataagaaccagttctggaagaattcaaagcattatagtaataatgcatacagaatcaagtccgatccccacagtattatggctgaagtttataaaaatggcccagttgaagtttcattcaccgtttatgaggtatcatctggttccgtactttttagttagtaattcaaatgtagaaaggaaatggcttaatttccgaatgtacacgctctgcttcttaaacttctctaaaccattctcaggatttcgctcactacaaatctggagtttacaaacacataacaggagaacaaatgggaggtcatgctgttaagctgattggatggggaactagtgataacggggacgactactgggtattttatacgctctagctctaactttcgagttttaatgctgtgaagttatatgctgattctgtttactcttttgtttcagcttcttgcaaatcagtggaacagaagctggggtgatgtaagtctctcataaaacttcctccatttttagtaaatgtatctatctaagtatgtgccaattttgatgttttctttctgaatggcaggatggttacttcatgatcaggagaggaacaaacgagtgcgatatcgaagatgatgtggttgctggcatgccttcaaagagaaatattatcgaagaggttgcaagtgctgatgccttttcggatgcttcgtattgattttaaaacttttcaattacgctcaatgttccagcagaaaataaaaggacaccaacatttctactggtatcatcatattactctgtcagttaagaattcaactattttatttatggataagttggaatctgtcttctgtatcatacaatgaacacacatgaccatgttaatgatatagaccaaagaatatactaaaggagttcaactataatatttttaactaatggagtccatatatctgccatggtcaccattttct

SEQ ID NO: 4490 - DNA, 540 bp, Cannabis sativa
agacacttttaatatataaagatatatatatatatatattataagttgattataacttataatatactaatgctgtataagttcttatagaaaatttatataatcttacacatatctatatgtctttaattttttttatatatagtatacttcttctatgtaagttcacgtgagtctatatatttgacatacaaatggactacagcaaaattcataaatataataaaataattactttaaaaaagttaaaagaagagaatattaaatattattttctaataaattttacttaaaaaaaagaatttattaccaaaaatttgttaaataatttttttaaatatattctaattaaataaagtataataaatttttaattaaaatttggataccataatttttaaatttcatagaatttcaaaaaaagtgatctggttcgacacaacatctataaattatttaaaaaagaaaaataaaaagtctaaatatcatctctcaaacaaaaatatactccttagacataaaataaatttaagttggtga

SEQ ID NO: 4491 - DNA, 2034 bp, Cannabis sativa
gtatatttaaaagaaaaaaaatgaatggaagacttcatatgatttttgggcagtgtgagtgatgaataattaacaatatttattctatatgaccaaagaatattctgattatatatgtgatgtggaaaataaacattattattttatataaaaaaaaaaaaacaaacaaaaaagagtcaatggtactaaagtgggattttatatgaaattttgaaacactttcattttgcatgtgaaaagatctatcttatcagctttcattcccaccaaaatgagaataaaaaaaaaaaaaaaacaaaacaaaacaaaaacacgtttttgggtttcttttgattaatattttagtattaattaagtacacaaattaggggaattatgtataatatatatgtactatatattctaatgtataattgtattgggatttaacatgcctaggagccgaaagtggtgttagttgtattatataataacatataaaagattcgatcaaatatatattaattaattaaatacccaacttgatcaaatagaggattaaccaaacacatatctatataatactaatagtaataataaaaaaaaaaaataactaattaagatgtactagtacgtacaaaacatatctatacaatatagtaggtaagcacacattatattgtactttagtgtactataatgaatttgaagtatagtagtagatttttagtactttaggtatgtttaattattactattacatttctatttttttttttttttgataagttctatttgtttggtttgttttacaatgtgattatcattacaccaattataagaatgatgaagctagttcaaaaattaagggggccaatatatataagaaaataaataaataaatatttatttattttttaaagaatttatttttatttttaattacttttacatggaatttttctttaaaaaaaaattaaaattgggaggccttaggcattataattttataaatatgttattattactatactatttatatgaaaacaaaatgacatttatacccttttgtaaccaaataaataaatatattaaagtacttgtaatatgtttgtcaatatactattcatgtctcaaattacaattcttaatacatacaattgtaatttttattcaattatacctaactaaactttactcttaaatttgaataaaaaagtttagacttgatgataatgagaataaaaaatttaaattaaatttgaatgacaaggactttgtgtttctaatttctcactttttaaattaaaatagtgataatgtttatctcatcaaacgcatgagttttatattcctttcaagtctactcattccaacgaaaaaattgcattgtatacccactttactttatttgttttaattcttaccttcattaccatattctttaagatatacccactttttatagatagtgtctccattatacccattaagttagtgtaaatcatgtactatacttaagaggagggcaagagtatattagacaactcactcacaaaagtgggtaagttttaataaaatataatatgagactatttttgattaatgaatacaaaaaagaggtattcctcaacttatcccaggcccaccaggccgaccttgcttccaattctactctctcgactcaaactcacataacaaacactccattatgtgacgtttagctgaaaagaatgaaaacatagcctgaataagaataacattccaatattttaaaataaactaaacaaatgaagaaaaaaaattgcttcatttccatttcattctctccaatcaaacatcgtctagattggagggccactttcattaataagctttggtttatttagtttgggcctacctatgatgaattttattttttattttaaataatttacactaattacctaaaatcctaattttttacattaccacgaactttctttacttttgcatctttacagatttatgactttttagaggaaaatgctattgttttcatgttgtcgcaacgtt

SEQ ID NO: 4492 - DNA, 950 bp, Cannabis sativa
atttttatcacacaaatgacaccacttacagcaagttagcctcagaagggccaagataatcgaaagattgtaataggtttcacccaaacaaaaaaagatatattagtaaaagcaattattaccacttgcacaatgtggttggactttttgagactatctaattagataaccatttgtcacttctccatattaccacatatatacaatttacaattattatgtatagagtctacttctatctaacaatattggtgaagagtaattagtgaaaatacccttgaaaaaaacaagtaatgagtgaaaatattgtttatttttagtgttacattctaaaataatatttttatttattttataattttttgtcaaataatattttagatagttgtgagttgagtattttttttattgtgtgttacacatagtattgagtatgagtgcatcttagtgaataatatatatgtttaaattaattttcaaaaaaaaatcttatttggacatattatgatgataaagtcaatgtaaggttttaatttaaggcaacatgtattttttttttggttattataattcaagtatagaagatgatatgtttaattctaattttataatagtagttctccagtaaaaatattacctgtcagaatcagaagagtcactttatgtgactacataataatcattatatacacacacctaatatttataacaaatgagggaccaaaaattaaaaataatcagagataaaattttgaagacgatgacctcgaattactgagagaaattgggaacgccaaaataaaaaattattatcatcaaacttagcaaaaactttgtgagcaaaacaacatgattgaagacttgagctgtttgagcagctattgaagttgaatcaagaagtaacaaagaatagaataagaagaagaagagagaaatgattgaaatcccaa

SEQ ID NO: 4493 - DNA, 1036 bp, Cannabis sativa
catcatcataaccagtcttcttctgggttttctgggcaaataatcaatcttggtaactcattacaacagcagcataatatgtcaatgtctatgtttggtgatcacaatcataatcatcatcatcatcatcatcaacaacaacaacaacaacataatggtgatcagaataatcagagtcatcatcagagtacagtagtactgcaaccaccacaacatttctcatttgttcctgaacaacatctcattccggtggttgctgcttctgctgccacgtcatcccaacccaacggcggaggcaatggtggtgggggtggggttgttgattacaacctcaacttctctatctcttcatccggaggccttgctggtttcaatagggggacccttcagtccaattcaccgtctcttttgcctcattttcagaggttttctcccatagacggaacaaacaatctacccttctttataggagcagcacctcccgctccggctcaggctcaggctcaggctcaggctgctgctccttccatggagaatcaacaccaacaccaacatcaacatcaccacaaccacaaccaccatcatcaattcccaactgggtttgttgatggccgattgcaactctgttacggcgatggaaaccgccataattctgaccaccaccacaaccacaacagccaccaccagcatcagcagcagcagcacaaaggaaaaggaaagaactgaactttattaatgggcatatgaagattcctcttggcaacatgttcttctttctggtaaatacaaattaatctctctttttaatcttttattattattattattattacaaatttgtttcattgatcatcaataatgcttcttttctttgtttgttgtttgtttgtttgtttgtgttttcttatttctcctcattattcatgacataacataggtttccgtctccttaaacacataaaaatatattataaatatctttcttttatagccatgaatgaatgataacaagttttgctttcttggtaatcttaaa

SEQ ID NO: 4494 - DNA, 996 bp, Cannabis sativa
atttgttggaaaaaatacaaaaaatatttgttatggagatagtgtagtagtttaatttaggatttaaaatcgtgatatttttttaatcatggtcatatttcttttatttttatttttaattatcatgataggtgatagtttataaatgtgatatatcttttttaaacgtgagtcttattaattctcttttaaaaattaacaaatatttaatattatttaaaatattgtgaataaaagagaaaaatattagtatagaatagagctaatttaaatttgtgcaatatgttagaaattttatatgtatagatgacacatataaatatataaataaaatatagaattaaataaatatacacgaaattaaataaatatatatggatttatatttatatagttgagactttctataaatcaataattgaaatatttagtaattaaaattattttaatacaatatttatacatatatgatcatgtttgcttcttgttttttacgctacacaaaacaaaattacaatgcataataaatttattaacaaaagaaaaaagaaaaaaaaaatggagcatgttactaacaaaaaaaatagatgactataggtagagttgatgtgatgagtgagtgagtgaatagattgtgcgacaaagtgtttttaatatcagcaaagcatgtatgttcctataatgagggtattaccaatagagaatgctttacggataatagtcataaaattaataaaatttataatactattgtgtgatagtaacaaagaaaaaaatttatattctaatattaaaataagaaaattaagaagagaatctaaaaccacccactacacccaaatttaaaactaacaaagcaccacaatgcccagatctaaaaatctcaaccatcaccactaaccccatatactgacttactgagtaatatacttaaatacaatctcccattgtttctcaaacagagtaatatactgaagaaattgataggaatgactt

SEQ ID NO: 4495 - DNA, 928 bp, Cannabis sativa
aaaaaaaaaaaaaaaattcattagcctaatcccaaatcccaaatctcaaattaaacagaaactaatatacaagtccatttttcatacggtaataaatctaacaaaaactcaagacaaatcaaaaccaaaaactaagaaaaatcacatgcttagacataaaaatcataaacccataaacacaaacccaacaatatgaaggacatatatgcatttgagttgataggttcatctattccagtgtttgagtcaatctatttgtctaccctgttgagtagatagatgatgaaggagaatgaaaaaaaaacttaaaaacaatgggaaaagaaaaaaagaacaaaaaagaaaggtagatggaggtttagtgcttgacatcataattgaaaaattattttttgtttttaaaatagaaaattgttttcacagttttcaaaaaacaaaactacaaaaaataaaatttttgaaaaacaataagatgttattttctgatttaaaaaatagtaacacttttttgaaaacaaaaaacagaatttttttttgtttttgttttattattattattttttaaataagttttaatgttttttagtttaaggatttaattaatgattatgaattttagcttaattacaatatgaattttaatatatattgtttatttttaatttattttaaaatatttttttatttatttctcaaatttttaaatgaatttttaattaagaaatacaaattaatgatgtagactaacacgtgaatgataataaaatacttaactaatactgttgaatatttatttacagcaagttaaatttgagtatgtcacaatttttttttttttttgttagatatttatttacaaccgcgaattaaacttaagtatgtttctcacaaattacatttttctttaagttccagacttctaatatta

SEQ ID NO: 4496 - DNA, 657 bp, Cannabis sativa
tttagttttgaatagtaatatgaaatttgggacagcatatttgtacccgaaaacccgttcacttgagaaacccggccgatccaaacccaaaaaacatagaaaatttgggttttagaaattcttgggtgggttcaggtgcaacccggctacacattggaccgagtttgggtgtagaaaaatatgggcgggttacccgaaatccgtaaaacccgccttattctgcactgtcttaaagaaacaagactttggcctttgggtctaaattctatgagctgtgaagaaaaagacacacaatcattgaaatcaaccattctctttacttatattgacttttgttgttttcactacaataaaagtttctcttattagctttctttaagaaacatttcacaaccataaaaacaaaaaaacaccttcattctattaacaactcaaaaaaaaaaaaaaaaacaaattacacactattctgatatgcccaatagattttaactaaagattaaaacaccaccaaacaaatctcttcaactgtatactatactatcatttacatagttataataataatcaaactaattaacactgctgcagttgatgttgttgttgttttcacttgtattcaatctcctccttttctgcttccttccctgtaaaatcaat

SEQ ID NO: 4497 - DNA, 1409 bp, Cannabis sativa
tccatttatttatttttacgagtatgttggtatgaagatctgacattaaagttaatttcttaattctctaattgaataggtatgccatcaattcctgcttggttttccacataattgggaggagtatgctcaatgtctgggtaaagaatataccaatcaaggcgcgtcattaaggacttgtgcatcagatgagtcggacataaatttaggaacatgcacgaacagtctgtctccgcttcctttgactgatctacccctgcctacagtaagagatcttttactgtcaacatttggacattcagattatgatttggtcattaataatatttacaaggatacactgacaacttccaagaatgttccttgtgaattttttggaggacgaatagatttgaacatggaaaataaggaagattgtatcagtgacggggaaaacttagcaagtgctgcaaaaaagaaaagtaggactggaaaaaatagtatctttgtcccaagacaatatattacaagaagcatgtctcgaaagcaaactagatcaagtaccaaatactgtgaatgatttgaaaaagtgaaatacaaacaaatggaatggttcttcaatttacaagatcattgatgatgctatgactgttattatcaatgaaagaaacaatgatttcattccaaatttgtgcatatattagtatttaaaaatcaactccttggatttttctctcatttacaatcaatgagaaatgctaaaaggcatctaggcacaccatgttgcctaatagcaatgtaatattgtagtttttttttttttgtttatgttttgtctacatatattagatatgtttgatcaagtaggtgagtgctttttagggtctatttgttacatgtattatatcctattatataagcatacaaacataaaatttaataataaaaagtattgacattattattttcttttctttttttatcaagaaagaagttttcattaatcacttgaacaattgcatcaaacaccaagtcagcaaggcaaaccgcccctgcctctagttttcaaccagctataaattttgagtaaatacatttgatcactagtactcattttccttttagtatagctatgcagtctaaacaacaatagattttttatttcagcaactaatctagctgttgaataagaaaagttctcatagagacacctgttcctccaaatctcatagacttcagcagtcagaacgaagttgaaaactgctgcaacaaggccattctctttgttgttcaaccactctgttcagccattgtatctgctaggccaagggacaacaccaagccagcaaaccagctggttaaaatcctgagaagacagattacaatcgaaaaatctggttaaaaatctgagaagacagattacaatcgaa

SEQ ID NO: 4498 - DNA, 847 bp, Cannabis sativa
aaaccacaacagcactacaccctaaaagagaagaaattcgaaaatatataaataatcacaaaaaagggtaaagttggtgtgtagtagaagcattacagtaaattaatattattatttttatttttagatgatttttaaaataattaagaataatggaatctcatccctaccccacattatgaggtgggagttcactttttattttatttttatagaaatttcactttttatttatctattcatatttttctcttaaaaagtaatttatctattccttttgtttggccataatatatatttttttaaaaaactatttataatatctgcttcaaaaatatacatatataaatatctgtcatttattaatattcttccttagatttttcaaagctttccttttcaatgtatatcaaaatcaacaatatgtatgtaaaatttagggaatttttgtgttaagatactgtcgtcagtaatgacattaatttagattttttttatgacgtttattataatcatagcaaatctcttgtaaatttagaaataaataacaataattacaaggctaatattaattacagctcaaaaattatgttgcatgcataaatatttgaacgtgttttgaattctaatttcgacatcattaactatttaaactttataaaaatttgcaaaatactcattataatcaatttacgtacctaaaataatatcaataccagtacgaaaaataaccttcgactcacatatttgaaatttgaatatttttttatgacactttcactaaaagagggaatatattaaaatattagaattttgggaaaatatagcattatttttagtatttatt

SEQ ID NO: 4499 - DNA, 562 bp, Cannabis sativa
tacgtacattaattgataaatatagttttagccaccaaaaaaaaaaaatgactctgttcaccagttttacactacatataagaggcccatatatttaaggttattttatgtagctacccatcaagcaaacagatacatgaatataggtgtaaattttaacacctcaaatcttgattttttttttatttattttactcgcaaaatataaaataaataacatatatcgcttacaaaatataattaaataacatgttagagtatcaattcaattgattggtgcatggatgatcatttagctttaatattatacaattatagaaatgtaatatttttcatgtatattgatgattatgaacaatggtactaaaaaaagaactattatataccgagtaagtggcagtgagtagcctaatattccaacctagtttccaatggttcaaatctctctctgtacacaatgcataaattactgtttgtaataatgccattaatgacatgagagctgtacttgaataaaaacaaggatagtccttgctcattttagtctgtcaattaaacaaaa

SEQ ID NO: 4500 - DNA, 546 bp, Cannabis sativa
caacctggtaggcaaaaacagttctctgatccctctctggatcagcttcaggctctgctaactctttcttatccttgaacctcctgaaattcatatttcatacagcacagtaagatcaacaaccagaaaattaaataaaaattaaactaattttatctctcattggtaagaaaccctcatttaaattaatatatggagaagatttcacattaagcctttcactagttaaacgatgaaaagacgaatccgccgaaaatgaaactgataattttaacatgaacaggaaagacaaggcaagtttaacattatttttagaaaatgtaaatgtaatgcttaaatgagtcctagttcgggattatagtgagttgattaaaccagtttcgtttctttgaaacaagaatatgtcggcaaacctgtctctcatctcaatctctcgttccctctctttgacttccctatcacgatcagatcgactcctacttctttgagatctttcttcgcgatcgcgactctgactcctgcttcttcgaggcttttcgtcacgaa

SEQ ID NO: 4501 - DNA, 777 bp, Cannabis sativa
atccttcagatttttggccaagagatgggaggtcgaattcttcaaattccgagaattcctagtccattcacagatcagattttttggaagcataatcaaaaaggccaattttcggttaaggaggcttattatgtagaccaagagtggcgatttgcacaagcaaaatccatttggaaatggatttgggataagggagttcatcctcgaaactctgtttttctgtggagaattctaaatgaggcaattccaacaatgaatagattgccttttgtttcagacaaggaatgcagcctgtgtgggaaagaaggggaaaatgccattcatagctttaaagattgtgggttcactaaagctgtctgattgggaggctattttccattgagaattgatctcattccaggcgaagatatgatatctttcctggaaaatttgcttgctgatctgtcagattttaacaggaatgatcttatcaattatgttggttgtctttgttctgagatatggttccaaaggaatgcctcttgcatcaggggtgctgctgctgatccatccacaacacttttgaagatcgataaggctgttttggagatcaagaatgctgtgctaagtaatggtgaggctgggattattgtttctcatgatcctgatattagtgcagaacaaaattctctagtatatcctcatcaggctagagtttattgccttatctacacggatgcatcgtggaaaaaagaagcagcaggtcttcaagcagtttgtgtcgataaagctcagaaa

SEQ ID NO: 4502 - DNA, 1436 bp, Cannabis sativa
  modified_base (1128)..(1128): a, c, t, g, unknown or other
cttctttgaatgccatttggtatacctgcaaatggcattcaaagatgttgttagttgctctaatatatacattagaaaagtattctaaaaaggagcaacttgtttgcaaaagagacaccaacaaacatgataattcttcttgaattgagaaaagtactacttaaatgtcattaagtagttgttccacaatatacttgtccatgatctatataacataattaagtttaataaatataaaagtaaatagcggcataagtactcaatgtttataaaattactctgttattatcttaaacaggacacatataaagcccaaattctagatcattgggtctagatagaaatatatagtattagttacttccaaatattcttttaataaattcaatcaatactgacgaaactggaaaaaaattacaattttacaaatattgagtacttatgccgctaaaaataaatattgagtttatgccgcttacaaacttaaaactttaaatacttatgtttctatttaccctaaatataaacatgaatatatcaatacttagaagcctaaaatttaaaggataaaacaaagctaatcttgtagtacaataagaccaagataaagaagtcaatatcctacctttttaaataccaaaaacaaagcaacaagggaagtatacgcagtagtcagtattccggcctcgtcctcagccgaaataggcagttgatgttgttatggtggctgagtttgcagcctctgcagttagaatttattagtttttttaagaaaaaaaaagaacttgagcaatgtgaattattggtattggcaaagagagaagagccttgcctgattagggtgttcttgatcttttcttgagctgtgttcatacagagaacctaacagtaattagaaacagcataagaaaataaaattgattaaagccattaattttttgagttcttttacagctttaaaacaaatgcgttataaactatgaagaccttcttcaagagtttaaacttttcataattaaatatagggtaaatagcagcataagtacccaaaattttatgtttgtaaacgacataaactaatgtttatttttagcggcataagtactcaatatttgtaaaactgtaatntttttctaattttgtcagtacatactctattattgtcttaaacacggcacatataaggcctaaattcttgatcattggtctagatagaaatatgtagtatcaattacttccaaatattcttttaataaattcaaaacagtactgataaaattggaagaaaatcacagttttacaaacattaggtacttataccgcttacaaacataaaattttagacacttatgctgctatttacacttaaatatataataaactctgattcaggaagtgttaagttcttcataattttccatacaacaatatgaata

SEQ ID NO: 4503 - DNA, 876 bp, Cannabis sativa
atattgatgatgatgcaaataatcaaatcatcatgcgacagtttatatttaaatactaatgaatacaataattatgctaaatatatcaagggattttttttcatattcgaaacgcgtattttaatcacatttaatattagatacatgttttttttaacaaatactttgatgtcatgagaacttatatgaatatcgtaaaactagcacgaaccttaatcgtagttcttgcgattgtaaatatcaatctcgaaagtatgtataagagggctaagttttgcaaaaaggaacttgtttcagcataaaaaaacgtgtgacataatattcatatgcgagactactcacactatgtgactttacaaactaaaatgaagaaaatatcacttttatcaacttatatttttacattacttaaagttatttttttttcttttatataaccttaaattttgaagaaaatgaccataaaatttccctaaaaaattagaatcctatttttacctaacctaaactttcgtctacatatatacttcccgtttttgctccatagttactgttttctgtttttacttacaataattttcgtttgtatatatttcaaaaatttattacatatcattttttttagtttgacgtaatttttttattattattttagtttgacgtaatttcaatacacctaatccaagttattcaagcatgttaatgttttaaggatatttaagtacacttttctaaaagtttaataatttgagttactgacgtcttctcaacttgataactcagaatagtaaacaatataataaacagtagtatgaaatagaaacttgttttcacatatcaattttcaatatttttagctatcaatatatatatata

SEQ ID NO: 4504 - DNA, 2519 bp, Cannabis sativa
gtttttgggttttttatttctgaagttttattcgtatttctcaatagtgttttgtctttctgagattcaatcagatctaaactctattaggtctggctcttagttgggtggttttagttttcatttcagtctgactcgattttgcttggagtttgctcatttatgttcctatatttagtctctgcttgctttttttggatgagagctattgacgtgggtatggagtatgggtctatactatatgccctattttctggggtttgcttttgtgtttgctgacatctttatttgtgtaatgcacagtggtggcagtacttttgtggaaatgtaccatgtgccaaggaatggaaatgatgagaattatatggtaattccatagttttgcttgcccattttgttttttagtgttgttttcttttaacttgagctggttgaatttttgagtcaaacatttttagcaatattttagttttgatatcttatagagcgtttggggttaatttgtagattcaaggtatggatccgaacatgcgtttgacaagtccttttgaacaagttgaagccatgtacaatgaaggagcccctgagtttgttgttgatcagggtttagtatatcctgctgccactggttatgggtattactgtacaggtgcatatacatttcttttgtctctgtttaagttaacgattcttagctatgttcttattttattcatgctaaatgaatattttaggatttgaatcacccggagaatgggaggatcagcgaagaatttttggtgttgatggtcctgaaatccaatatacggtgagtatttttttttttttctcaccatgatgagtgtgtaggaatatagttttcatgctttttctagttaaatttgtggttattctcaatatctgtttttcttccgatgcagggtgcacaaaatgagagttttccttatgtatattatacgcctacctatggatatgcacagactccatacaacccatacaatccttacataccaggtgctgtgatgggagttgatggctccttcgcaggggcacaacaatattactccgtttccccttatcatcagaatcctacttctacggcttatttcccagttgttcttcaatcagatatgattccaagtaacacacctgagtctacggttgatactggagcctcaaataggtctgatgtgaggggatcgaaacataacttcaattcaacttccggagccttttctaactcaactaaatctacatcaaatatgaagaattcattgacaattatatcagaaggacaaaaatctagcgttggacctagcaagcatgccacaagtaagggtgtttctaatagtaactatccatctccggcttcatcacatgttcttcaggtaatatttccatagatttatttttctttctataaagtttattgatatgatatatttcaaaacaaatacaattttgacatcttttttttggggggcgctggaggtgttatgatgggttctagaactggggttcttgtttattctttcaagtctattcttaatggagtgaggattgattcctcccacacatatattatttatttatttaaaagtgcttataaataattgatatgctctttggagtagtttcacatctttttccctggaatttttctgcagggtagaaattcatccagctcaactcaaccagttgactttattccgaatggaaaaattctctctcatcaaaatcatgtgaaagtaactgtcccgggtaataatagtttatctgactttggaacagtcactcacgggagagctacggtagctaagcttcgaccaaaagtaaatgttggaagatctatgaacgatattaataatggtttagattccttgggtgagcagaatcgaggcccccgaatcagcagatcaaagaatgagctggctgttaaagcctacacaaccagggcaggaggtgctaatgcccaaggaaacataattatctatactgaccagtacaacactgatgatttcccagttgactacacagatgctaagttttttgtgataaagtcttacagtgaggatgatgtgcataagagtattaaatataatgtttggtcatccacacctcacggcaacaagaaactaagtattgcttatgaagaggctcagcgaatagctgcaggaaaacctaaaggctgtccaatctttctattcttttcggttagttttgtgcacctggcttttattagtctttggactttatgcatgataatttagctataaataagtaaggaattttctgtaaactcgttactgattgaattccttgtttttgcaggtgaatgtgagtggtcaattctgtggtgttgcagagatgattggacctgtcgactttaacagggatatggatttctggcagcaagataaatggagtgggagcttccctgtgaagtggcacattattaaagatgtcccaaacaccagtttaagacatatcatactggaaaacaacgagaacaaaccagt

SEQ ID NO: 4505 - DNA, 982 bp, Cannabis sativa
tccattcttccaattagacataagctcgtggatgagggtgaagctaatgtggtggataaaaatcatcaactgatattccaaaactggaccaaaggccaagactcaagggatctactttcattccatctttgagtaaggcaaaatgcaaagtttatctcctgggacccgtcggtggatctaccaaaacaagtggtggatatttttgttgctagaaatggattcatctcgctattgggaggtgacattgctccatttgtggctgatcttcttcaacagcttgggacatccatgtcccagcttcgcctaaagagatatatgatggtcttaaatgaggaccttgtcttcctgactcaatccatccgacatcgaataactagggcaaggtttcttctcttttacttttgtggctttgaatttcctttctcccttttttggctaactatattctttttgttaggatgctcctctagcccatcgatcttgtttatccaaaaaagttggattgatgatgtggacattgttttcgacatttatcatgatgggaacaaccccagggccccacatcctgggataggttagagttaccacactggaggcacccatttaagcaccaagttctaggaaagtcatctctgagtgatattcttgaacgagcatgttaaaatgaccttagaatgatgaatcgtgaagttgaatatgttacatggacatcctaaagctcatcatgggcccagtacaagtactgggcacctaggttgacaatatgtgccctagctcgcatcaatttttgttcctaataacttcttaattatatggaatctgattagccattacactggaatacatgaaagacatgccctaaccaagttttagatcttggagataagtctagacaaaaccccacttagagacaccatgtgtagactaggagttcatgttaacattcagtcaatctggaaaacacaatgactagggtttaggt

SEQ ID NO: 4506 - DNA, 579 bp, Cannabis sativa
ttctttccaagtagtatttgtgaatggaaaattctgcaaggatcccaagcttgctaaggctgaggattttttcttttctgggctcaatgttccaagagacacacacaacccagttggatctaatgtgacccaattgaatgtggacaaaattccaggactcaacacactcggaatatcattggctcgtattgattatgcaccatacggccaaaatccacctcacacacatcctcgtggctctgaaatcctagttgttgctaagggaaccctctacgtgggcttcgtatcgtcgaaccaagacggaaaccggttgtttaccaaggttttgaaagagggagatgtgtttgtattcccaataggtttaattcactttcaattcaatccaacacatgctccagctgttgcctttgctggtctcagtagccaaaatgcaggaactatcaccattgcaaattcagtatttggatcaaatcctgctattaatcctcatgtccttgctaaggcttttcaagttgacaagaatgtcattgaccaactccagaagcagttctggtatggcaatgacaattaaacatggtt

SEQ ID NO: 4507 - DNA, 2660 bp, Cannabis sativa
  modified_base (2002)..(2006): a, c, t, g, unknown or other
ttttagttgattcaaaaactgaagctatatcatttgtatagctgagcatatcaaagtggaaaaatggtgtaaataattctagcaaaaaaaaaaagaaaaatagtgtaagaactcatgtattttaaaaattacatacatttatatactttaaattttgtttttttttttatgttaattaaacaaaactgggatacttaagtgtgatcgaccgacaatatgtgcatagccatataaagctttgattgtaaaacacacgtgttgtttgtttggttgttatgcattgttcatatatacttgttcatgtccatttgctttaatcattgttctctccactaataattgaatattgaattatgccaatttactatacatattttctctctacttcactatatctaatctccattaattaataatggattaattccattactctattcttaaattttattgtaatgacgagcaaataaaaacaagtataacaattaaatatttgattaggcatatttgggctgggctgatcacatcattatataacctttctattctttggttttattttctcttttgatttagaataactcaactctcattttaatataatttaaatataaaaattgcatggtaatgacttgacatgagctgatgatgtacatgcttgttttccttgtcatgggttttttttcttttcattttcatttttggcgtgtttgatatttatcacaattcaaaattagatgggtcaaactcatagaggcttctcacaacttttgtaatttctatctatctagacaaagtactttcatctttaaaatgattctctaagatcaaaaatttactaatctcttgacctttctttctacaggccttttccctttactcactttaatttggtaaaaaatggttggacaaaaagcatgttggcagagtttcattgtttagggttcaaataattttgaaatagttttttaaaacaaaagcttttgagtgtgtgtcttcattcaaattcagaaaagaaaataagagaaaaaaaaaaaaaagtgatcttaaacactcaaataagccaaaaccaaagctaaaatttgaaaatctgttatttggtgagaaatacattgtatgtaatgctgtacaacaagttcaatcttaatcaactcagcaaatctgatttgatgagctcaaaatcaaatcaaatttatatataatttaatttctgttgaggcaattgggttgggttttgttgtgatttgagaaaagacatagaaaacattagtagtaatgtgttcttgtgttgtgtcttaagtaaaaaagaatggttattataaggtacgtactctatcgtctttgcctctaccaaatcttatttgtattacaaagaagaaaagaatgaaatggttaagcttctttcctctttttgactttttgcagcgttttactctctcaacgcactgtctaccatgcatatttcattgtcataattgtcttgtcttttactaattttgcatcagaagttgtttaggaataggatcgattgaacagatttgcaatttggaaaaaagaaaaaaagaaaaaacactttacctaaaatcttcctattaccgcaatgtgacaggttgtttttttttatttgttgttttgcctttcaactataatagtaagtagtgaaatgagtaaatatgctgttagctttcaggctgtatatttctcacatgcacattcattctttctcttattcttttttctttctgctacactctatatattgtcattgtcaccagtcaccactaatatggttataacataaatactttttcaaacttgtgtaaattgtaaatattatgttttactcatttaatataaaaagtcatggcatatacctcaacatcatgttacaacctctcagtcaacctccacgcccgaaaacataggtcagaatattttttttttcaatttttttttcacaagagtgtttgttatacttataacatcattcctgtaaattttnnnnnaatttcaaatagtttacagtgtcgaaaatacatttgaagttttttaaacgcgcgtggtaaactggaatatcaggaactctgttttcgatactgtaaattatttggaatgtttcaaaaatttacagagatgatactgtaactgttaaggaatatagttagttatggttgttagaattggttattttctgttagttttctgaactgtcataacaaactcttctctttgcttttgctgttgtaactgtgtatataactcatctcttgtaatcagttcattttcatagttgaataacagagtttctttcttgagtttctttctctcttcgtttctgttatttcaccttatcatggtatcagagcattttcgttcatatcgtcttcaacacagctgcaatgaataccttcttcaccggcggcaatggaggttcgtctcaaaccggcggtcttgctcctaatcttccttgatccactcctgttactttttctcactctctctccgttctacttgacgaacacaactatcttccatggaaacatcaagtatttgcaacaatcaaaggaagtcgactacagggattcctcgatcctctgcttactcctctaaaatttctctctgaagcagatcggcactccggtacagttagccctgagtac

SEQ ID NO: 4508 - DNA, 616 bp, Cannabis sativa
aatttggtttccccattcccttccacttcagtagcagtctccgaaacaatagggcatctgggaaggtcaaaggatgtgatcgcaggagtgggatggtaccatgtatgtggttttctctttttacagcccagcagatgaactatcatcatagagaggtctgggggattagaaattagagaggcttgggccttgtaaagatttgtaaagtccggcccatatagttggaaaaatttagactgggcttctaaatcatcattgggccattttagataagtaggctcagggaaatcatgaggggtttgggacctacacagccatgaatggggaatttccaaactttgggcaatagtgggcccaatatcaggtataaggtccaaaccatctgaattgaaagagaaatcaggggttggtaattcaaaaatattaggcccatcagtctgctgaacattctctatctgtctattttccacgtttttccactgggggacaatcatcgtacagcttctcattccctattgcacgatcctccaattccgtccctgccacgtcaggtcgtacagaggtagtggaggtttgcccttgcacgaccttgtgcttgttgctctgtccttcaccg

SEQ ID NO: 4509 - DNA, 610 bp, Cannabis sativa
  modified_base (510)..(517): a, c, t, g, unknown or other
ttcttcgtcgttttgatccaaattcagattattaaatttattattatatttttaaaaaaaataattagaataatattaatattagtcagtcaatgtttattaaagtataatctaatcaagcaataaacaatgttgccactatcaataaataaataaacaatgttgcttacaaatggagattatcataattaatatttggtttaaatatgtttgattgagtattcttataaaattatattttcattatctaaccaattgcaatatttaaacaaaatagagcaattatttgatttgtcattagcattagtttactcctttacttttaatatagtattatttccatttacctttaaaaaaaaaaaaaattaaatttgtgaaaggaaatttgataatatatgtttaaaattaatttattaactaaaaatatgttagtatattttgcatgcaaaatatacttacactattgctctcatccaattttacccctaaacatctctctctctctctctnnnnnnnnctctctctctctctctctatctcaactgaattctgaatctcgtatcaaaataaaaagtaaaggttatttaaattaagaattagtaacatttaa

SEQ ID NO: 4510 - DNA, 3440 bp, Cannabis sativa
ccatcaatggttaaggtatgaaagagtccccaaatatcaacatggattaagttaaaacatttttctgtaagattatgatttgacacaaaggcaattttttctgtttagcataatgaactatggaactaaaaaatgggcacaagaattattctaaaaattcaactttttattcaatgaatgagttttgatacaagaggaatggccttatatatagcgccatgtagcatcttttgaaattttagaatctattaaagatgtaaatacaataggagcattgctagaaacagtagtttttaggtaataaagatgctcaattctttcacccatcccaatttgtaggttgttctgtgtgtcctgaatcacacacttagcaaaggaaaatatgaactcaaatgtggaagcctatgctaaagagctaatacatattactttggtacaagtaccattgggctatttaacaaaaatgataaaggatcaatgaaagtatttgaaaataatgacatattatagtaaacatgatgagttgcacttgtatcaataattcatttatcaaaaatattgggattgagagtaccaaaaagctgtgacgccagtggttggcatggatggcctgagtgggaagattctggttgctcttgcattttttagacaacaaagctattaatttttagcaataagttgaagtgagggctgacattaattatttttcaatggatgattggcctccttgctttgattgatcattttgtgttcctataaaattggcactagcagaatttattaaatttgaggagcattttttattagaaaatcttccatgtaattggtgtccaggtgaatgctcatgcagcctaagcatttgaacattgtatgactactagttttacagtgtgtgcaaaacatttttgatctgtgtgattgtacatagtgttaaaaatacgtgccgaactttttgacacagcacgaaaacggcacgagctcagaaggcacgagcacggctaggtacaaaaaaatgcaggcttgagtatgacatgggacaaaatatatgtccttaagcacgacacgacacgagaagcacgaaaagcacaaaacataagcacgaatagactagcccgaaaagcaagacatgcgataagcccaaaaggcaagacatgtaataagtccaaaaggcacaacatgacatattaaaaaccttatcatttattaataacgataataatatataaatttatcaattataaataaattaaaataataataaaatataaatataatgttgaatattattcaaaagttatataaatatgactgacgctttaaaatatacatataatttagtaattgtaaaaaaatatgaaaaaataaagtacgaatatgaaaacggcctagcctgtttaagaaatacgggctgacacgagcaaaacacgacacaaatccgagcacgacacaaaaatatcgggtctacacgtcgtgttgggccaactttttaaaaatattggcatgacatgacacgacccatattttttttgtggcacgacacgactcattttttaaaaaacatggataaatatgggtcatgccagcacgacacacacaaacttgcagcactaatagtacatcatcagtaaaatttcttgtggaagaggatgcaggcttgtcaaattttgtttgaacagatcagatccctctttgtctttcctcttggatcacagaaatgtaggctttattgatcctagtattcttgaataattttcatagcaccacaactaccaacagattgtggtctgaatttttaaatcatatcccataggtatttcaatcttgtaaaatagtgacatagtttggaccttgattcagtgcttgcatagctctcttagcttcaaatacttatggagcatttttctgatgaaatctttcttgaagttctgaccaaatgtcgactgcattatctaggtataggacactgtctcccacttgacacggcatgaataacccacgagatcactacactattgcattgacactagagctcataattctcatcttgagcatctagttcatgcaattttccatctacaaacttcatcttgtttcttgcaactagtgtcaccatcattgtgcacctccatgaactataattttcacacccagtcgggattttgggaacgagacttactccaggataatcactattagaaagagatagtaaggatttcgtggatcatcagaaaaagaacgagtattaggttccaagattgagaatcaattaaagtgcttggagtttggccaccttcacgggccatgaacgcgagcaaagcaaaagaacaaagaaagagagaaaaaagaaagagtttcactttgaacgtgactctaataccatattagaaaataaaaggagaagtaatgaactaaattctgtgtactgaatcaattattgtgcaatactgggtctaccagcacggcatgaattagttacaaactagtaactatgtaatcttactgtctaattttctaacagattcaactaagagtaaaatagctaactagctttttttcattcttgatagttattaccaaaataaaaactaaaaaaaatagcaaataataatgaattcaggaaatatactacataatattagttatttcatttttgtattatttgatctagttgattcaagatccggctgattttagcagtaagatattggttataaattaataaagtagtaattaaagataaataaggctaataaaagaaaaatacaaatttcgcctttctttatctttccttcattctttgtcattatttattttgaatttcaccgtatatattttttatttttaaatatacgtattgtttcttcctagtcaaacaaacaagtactcagttaataacattacataaaataatatttatccataatatgtgtcaaaacaataaaacacaatcatgtaacaaactgatgtatcaaatgaacaaaatgcaaatcaagattatgttttatatacttttatatgtatacttgcacatttatgtgtatattacgagtaaggattatataaacatacacatacattcatatatatatatatatatatatatattacaataaaataatcatacttacaaaggtacgaagaaaagaggaaatgagaagtacatgaatgtgagcggagaaataatcgcctggtgtttatgaacctgttgtatgtttgtgttcattttttaagagaaaaaagagacaagaaagaaactgaaagcctccttctctaccactttttttttttctatatatatgtatatatttatacaaccctctaaacaataccttaacaaccaaattaacataattaccgtaattatatatattatttcattctgtttcttcttttgtaacttgcttataatactccacacatttctaacttttttttttttt

SEQ ID NO: 4511 - DNA, 942 bp, Cannabis sativa
taactaaaaggagatttattagttttagtgcttaattgtttaatattttttatgatatattctatttacttataagagtaaaattaaaataaaaaatatatatataatttaataaatattacttaatatataatttttattattgttaattataaatatattttaaatgacatagataaaaatataaataaattgatgtatggtgtaatataaatttcttagataaaatagagttttgattagatatttttaatgatagagtagagaaattttagggaatgctcatctatatttatttgtatgaataagggtagagttgtaaaaacgtgtgtgtcgtgctacccaacttatattttttgggctttttaaaatataggttgttgcgtgttgggccttaaaaaatataggttgtatcgtgttgtgctataaaaaatgtaggtcgtattatgttgtgctatacaaaaatatgagtcgtgtcgttcgtattgtactcgaattcgtgtcgtattttattcacgtcgacttgttttcttatatgggctcaaattcatgctttatatttttacatcattattacaattaatgagctcattactttaatgtatgcatattttatagttttaattgcttttatatcctttttcaataatagttaacacacattcttataaaaaaataattataattattagaatttgaatattattctcattttaattgataaataaatatttattattattaaattattagacttttaatgtgtcactctttcgagttaatctatccgtgctaacgtgccgtgctttcaggcttgtcgtgtgtagcgtgccgaccaagatggtacgatacaacctaagtgatgcccacgaggtggccaagtggtggtcaaattgtggaacatatgttggagtgcttgctgattcttagtttgtacagcaa

SEQ ID NO: 4512 - DNA, 1095 bp, Cannabis sativa
caaattagagtatgcagtgtatggcattggtagctccttgacaaaccttctgttacagatttgttgaagggaaatcagtatggtaacactgtcaaagtttcaactattaaactactagacacattgttgaaccaagttcaaatattaattctcacataatcaaatcaatgactagatctaacttctctaagaacttctctaaggcctcatatcacataaccatgttgaaaataccatatgacaagaaatattataatcttctttagttgcataggaaatgttgtattaaaaaagggcaaaaaaaaaaaagaaaagaaacaccataacagaatttcaaagttgaacttcgaacataaacataaatagacaaaagcataccaacaaaattgaatcagaaaaaaaaaatctccgtctaaaaagcagataatacccctaaaaagcagcttaaaatgcaatgattaaacctgtagactctatcatatccttccattcattttgtttactaacatgataaaaagaaaaaagaaaaaattgtcaacatagttagcaaaaacaaaaaatgacccaataccataaaaagatttaattccttgaaaaaagtcatcaaaagatcagaacttctcgaaattcatttggttgcaagaagaataagaccacttctatctcccactctgtataagattctttctatataaaattcatttggctaaataaaaaagcacacaggagaggaataatggcagatattgctatatacaaactgatcagatatttcaaattgacaagaaaaagtatagtagaatcacaaacagattacagtttgaaaacagagcagctcattgagattacaatttcctccatacaaccatggcataaacaacaaatgtaaggaattctaagctaatagtgagacaaggagagctgttttttcttcttcatgtcctttcctaaacaacaaattaaatccaaatcaaatcacaaaagaacctagtttaaagaacttaacctttaacatggattctagacaggtggacaaacattggttctacgaaagtgggcatcagcactagttcgcacatgcaacttggaagtctc

SEQ ID NO: 4513 - DNA, 1457 bp, Cannabis sativa
acttttgaagtctacgtttatttaattttttagcaatttattactgaatgtggttcagtatggagactgttcaaattgactttcgacagcttacattttgaatttgtttttgtcttaatctggatgtctggaattattctctattttcaaagaatcaattctggtcattcagtctggttggctatattaagagaatgacaccacctctttaactacttgacatgtgcagactgataccaaaaagatatctgctgtgtctattttctttgagacaatgccgtatagattggatgagagcactggatatatcgactatgaccaggtagctttggtgtcctccattaagtgccatactactttttttctctttcggtgaaaattgacagtgcttgattaaatttaaagcacaaaatcctcatttctctgatttatattctagatttctagttgaaaaacaggacacagaaaaagagaagatagctaactctttgttggactatatgacattaataactatgatttgtagatggagaaaagtgccacattattcaggccaaaattaatagttgctggtgctagtgcttatgcacgtctgtatgactatgaccgtatccgcaaggtaactttctttaaacttatttgatccatgttataaaacttatgtaaattttggtacgtacttatgaatcgttttatggtgaaaagtccagtcataattttcttactatttgatagatctgcaacaaacaaaaagccataatgttggcagatatggcacacatcagtggattggttgctgctggtgtcatcccatcaccttttgactatgcagatgtagtaaccaccacaactcataagtcacttcgtggtcctcgtggagccatgattttcttcaggaagggagtgaaagagatcaacaaacagggaaaagaggtaaattgctgtaattgctttttgaaattgtaaactctttattgtatatctgcaattagctcacttaagatttttattgaatctgactgttgctgcttcatatttcctcttgaaggtgttgtatgactttgaagacaagatcaatcaggctgtctttcctggacttcaaggtggtccacacaaccacacaattactggtttggcagtagcattgaaacaggtaaaatttggacagacaaatcctataactgctgctcaatgacttttttgtggagttaaaagatttgttttgcatttgcttatcttgggacctgggcaggaattcagccttttttgcataatagttttttttttggtatatacttctttgtactgtatttttatttgtgctgattaaatgattactatggcttttgtgattagagctcatcacctattctttgattctgataaatagaaaaatcagatgcttgaaagattgaatgattacttatggcttcattcaattttgagaagaaataatt

SEQ ID NO: 4514 - DNA, 2703 bp, Cannabis sativa
aagagctgaccgatctgtctatttgttgttaatcttcgtgacaagctgatgataatccaattcaatgcaggtaattggcaattgaattgttgagcaccagttgaggccatgatcaagggcttgagtttttgcaaagatgggagaagaagctcctagtttgggtgaagagagggtagcacccatgttaccatcccagtctctgaccacagcacctagacctgtacaaaaaaatttttaaatcaagagcagcatcaacattcaatatgtactccccttgagacaattgtgatttgttgggaatatttgaaatagcaagggtactcaagaaagaggcaccatttgacaacctactgatgcaagtcttgtcctagaaatgttgggccaatttatagtcctgaagataattgctagatatcaagggcctgatcagagagttgaaaggatctataaagatctactacgagcactcctagtgtagcctgaagtgtgtaggactaggaatgattatcatcatgagccacaaaacctttaaaatggcagttgggtttactgtggagacacggtggaagtaatctccaccaagaaaaatctaattatatattaaatatgataaaacatgcatagttaaaaataaatgaaaattagtaacagcaattaaagcaagcagaagttggattttcaatagtggaagtgcaatcgtcaggaaaacaaagacaaaaaaccaagggaaaggccctagactattccagaaccaaaattggagagagaaacttcccaaggaagactttttctaaagtttccaagttgtactaaaaaatttgttatattattcctgataataatataatatattgattaaattatggtaaaatttgcatagcatatttgggcatttataaatttgaagaaaatcttattaaacgagttatcatttcaatttcacgcatacaacatcgttctaaaagatcttttctttttcttttttttttcaccttctcctttttataaaagtacaaaattattgattcaagtatatcaagtgatatctctcaaaaaaaaaaagtatatcaagtgatatatggcgagtaaggattcatatggatattgtctgttattctcttaagagaaatatgtatacctctacagtttgttgttaatgttatagtgtaaatttttcgcttcgaaactggaaatcaatctcttataaaattgacatgtggattcaatcctcaaggatggatgagctattaattaatgattctctgagagttaacctcacttgaactaaactcgcgagatgatgcagccttaacaggatctagttgcatactatgtatcgcatagaataagataagtaggaccaagaaggatttatacaagtcgcgcatatatcgagacatatgcgatgactaggtagccttctcttacgactaagtaaagatcgttactttacgtaatgactagtccaaatgaaaaagtgtgttcgataactcgatagggactcgcatgtctcatgttgtcgacgcacatgagatgtccatatatgcgagtcaaatagaatgtagaattcctagtacgatgctcattagccttttttaagaatctagaatgcacccaaagcctgggagcttgtgcaggaatatggacagaaaactcgcaccctacaggtcgcatatgttgttgtacttattagaacagattaaactattcttcatttatcctttacgtttattctaatttaatattgttattaattgtaaaacgttcttataactagtcaattatgtgtaactaaaaggataattttcctgtatataaaggagtgatcaaagatatataaacaaagtaggatcatttgcaacagtgtacttagcagaccgtgatgtgactgaactactatattcttttgtgttcattttacttttcaatttgttctattttctaggtagtcttctttgaatactcgctgttctaagcacaatattcattgtttttcttttgatcatttattgtttgtttacattttggtattgtccaaattcttccaacaacacttaacaacttcattatctcttttttagcaatttagttgttaaaatattattatatttatttttgaattaaatgatatttttttgtgttaatttcgtgactacgggtgtcttttttttttaaaataaaaacttttatttatagttgttcctttttgtttagaaaacttgtcttactacaagagaaggatttctctttatggaaagttacctatttttgaaaaaattgactccctttctctaaatgttcatttggatttttcaatgtatataacaaatcaaataatctttatttggtaagtattgtagaccaaatcgtgatcttggtcctttttagaaattttcccgatctacaatagcataatccaaatttgatgtgcgaattagagttttttttaggaaagtcttgtacaactttgaaaatgtgtttatgatcgtctctagagtttttatgttcaataaataggatgtagacagcagccaaacatttcttatctcttttagtctcatttttcatatttatctttgtgagaatagtgtttcttttgtgaaaacctacaatgttcagctaggttttagtatttgttttgttcttatcctgttgaaaaaatttgttgaagaacttgcttgaacaagtgtaggtctttgtgag

SEQ ID NO: 4515 - DNA, 812 bp, Cannabis sativa
ttttccttaatcaggtagtaaacggatatggcttcattccgggcattcttgaacagtccagttggtcccaaaacaactcatttttggggcccgattgctaattgggggttcgttgctgcggtatgtttttatgagatatgaatccattatttgttaattgctttatggcattactcttagcttgtcaacatgtcttatggatacatcaggggctagtggacatgcaaaaaccaccagaaatgatttctgggaatatgaccgcaggttcaaaaacctaattgccttaagtatttaaattctttcttttgcgagttagatggccagattctcatgtcacttggaattttgttttgcagcaatgtgtgtgtattcagcattgttcatgagatttgcatggatggtacagcctcgtaactatttgcttttggcttgccatgcttcaaatgaaactgtacagctttatcaattatcccgctgggcaaagggtcaggggtaggtttccgagagctctgtctgtttatgtttcttgcttgttcattatttcatgccttctggtttagtgaaaattattgagatatgtgtcttctccagttcccattaacatcttcatttagctgaactgttattgagttgttgtagtcatgtttccagtagattccatttattttgacctttgttttcttcttcttttatcattcagtcatatatattttcttcttcttttatcattcagtcttatatatgaatgttttatttaatacatatagtgtaaattgtaacttttgttcttcaaatcacacaggtacttgtcg

SEQ ID NO: 4516 - DNA, 923 bp, Cannabis sativa
  modified_base (100)..(101): a, c, t, g, unknown or other
ttttttttgagtgtagcgtaatggacctaagttatattcttagaattccataggtattgaccgttaaatgtcagattattatttacgtgtcattttcttnntggtatatttaaattattatttttttaaaaaaaataaatttttaatgacgtagaccaattagagattatcatgtggcaatttacttacctatagaatttactaaaatataacttaaatattattacggtaaaaaattaaacttaaatatttatttacaactgataattaaacttagttatttataccataaattattctggttcaaattcacagagtgctcttatcaaatatttcatagcagagaacttttaaatttttttaaaatataagcaaaaaaattctctatctggtgaatgtgtaattcattttacaacactatttttcgttctatatatggaaaaaaaagttagagatccttcaaaaatcttaaattctattagattattattttctctctctctctctctaaattaatttttttttagaataatttcgttttatattattttaagaaatttttaataagaaataaattattaagttacaagttatttattattatttttttaatttttaaattatttacaattatttaataatgatggttaaaaataaatgtaatcataatgattacatatttgatgtaattattaaatcttcatccatatatatatttgatgatgattcattaatttggagtactcccattgccattagtgttatcataatagctaaaacttaaaatttttagctgaaggcttatattaactcttccttaaaatgctttataatttagctacaacagatttgtacaaactccaataaaataaatctttacatgtagttatggagaaagagtgagctttttttttttttttttt

SEQ ID NO: 4517 - DNA, 2529 bp, Cannabis sativa
aaatgagattaaacgtaccgttggcgcatctttgcagggctgccaagaaaaaaaaaatcaaagaaaaagtaagtacactttgattaaaagcaagtaatcaactgagaaaatgcaaaaaaaaagatgcagggccggtcctaaggtatatgggacctaaagcaaaattaaatttcaggcccctatatatagtttgattattattatcaaaatgatagttctaatattttagtgtagtttaattattattaaaatgatagttctaatgttaaaaaaaataaaaaagtagagattagagattgatccttgacttcttggcttaaagtaaaaccttttaccactacaccaaataatatttattatattttttcttattaaatattttatttatatattaataattttttttcttttcacaatatcggagccctgagcgattgggggccgaggcgcatgcctagctcgcttaccctcagggccggccctgaaaagatgacattatagaggtgataataacacaccttatttttatcaattttgcatgagttttcccaccaaatctttccatttccattaatggttccaccacctgaaattactaaaccttgaactctgtcaaagattagccaatgtcttccatctttcttgtaatctgataaatcattagaagcttctatggttcccaaaatctgaaatttttaccccaaaattagtgatttagtacatatatgaaaatatgttcattgcttttaagtgcttaattaactcacctgaactataatgtttttagacttgcaaggacctgaaaatctaattggctttagaagataggtattgctttcaggcacaaccatggaagctcctcctttagatgaacaagctgccttccaagccttcacaaaagcctaaaacagaattccaaaccaaaatcagaagatgacccatgttcttacatacatacatatacatatatatagactatatagtactcaaatgtagcttaagaaagcaaaaaactttaatgggcaatcaaaattagcaagctacaatggacaaagacttgttacctcagtgtcatcatttccatcccctttagctccataatcattaacattgatagtcttaagcttaattgaatcagtttgatcaccaactttcttctccatagttaaaatatcaacactttccttgatattaataatccctttgaactttgaaccatcatcaaccatgtcaaagtaagaaggataagcttgttgaagaaaatcattattagatgtttcctcaacaagattattatcatgaagttttaccacttcttctaaattgcccatttgaccaaatgatacaaataaagagctgagaaatattagcaacataacaatgaatgagagcaaattatgcctttgaaaagccatgtatgtatgtatgagtagtgtattgaagattattggatgatgtgaattaatagatatataatgttttagtacttgtgacaatatgtcccaaaagattggattttgaatatatttatagggagagaaagagaagttaaaggagccatttgagaccctcttttctagtttgatatgaactcttcaggtatggtttttagatacagagagattcagacgttttctttttggtaaattatgactttttgcccataccatacaacatccttgtacgcaaatctacatgcactatatataattatacttatatatatgtatatacatttttttcataattattttattgatttttctttttagagataatttgattttgctaagttataacaaattattggatgatgaggaaggaaagtaacaattaataataataataataataatggtttttgtggcctttgtattttgggaattcttgaagccaagccatgatgacaaagtgttgagaacagagtcaaaaaaagcatcatgataacataaatgacttattattattattttaattattcttactccattgcctatttattaaggaagttatatatataaataaataaatatatatataaattcacttacgagtaaagttatgtattagatatagcatgcatattagcatgtaatttatacaatgttcctctttcttctagataattaattaaataaataaaaattaaatacatgagctttttatttattctttctagttatattcatttgtggataatttatttgttttcggctcttaattgtaaagtgtggtccctatttctcagcctatatcaatctcactttctcaaattgttgacatggtattaagaagttaaaacagttaggccaactattttaactattcaagactctagctaatataattggttaattttgttgctacttccttctctctcccatgctactaactcataagcctatataaacttacctagactgatcaattagagaattagacaaattgatgtacaaagttggttatgaaaccatgctgagagttggtgagtagagagaattgtagagttgttgcttgagtgaggtaaaa

SEQ ID NO: 4518 - DNA, 1011 bp, Cannabis sativa
tatatatatgtataatatatactatattatataatgtatatgatatatatggtgctcatatagtgtatatacactgtatatgcactataaatatcataattattttaattaataattatattattttatggaatattcatttcttaaatttaatttgaatattaaatatatataaaattagttttagattttaaattcaaatctttaatcactttaattgtttaagataattattgtcttaaatttaattaaatgataaaaagattttattatttaattaaagataattaaagacaaaataatagtgataattatattgtctaaaatgaagtgtttatttacgaaaaaattaattaaaaatattttaactaatttaagggttttaaaattattttaaataaaagagattatttaaaataattaattcaaaatatttaaattaatttagaggcttgtgataatcctacaagattacccttagaatgaatcaagatgatggagcttagatttataatttaatttttaatttttttaagagttgtaaaattagaaatactcaatattttactcggttcattatcattatttatttattattttcaaataaattttcattaataattgattaataacacgatcatgcattagtgaataatatgtcatacatagaaattccacacaatttaattatcatgcatctcatagtaaaaacgaatatattagaattgttttatgcgtttatgtgaaactagaagcatgtaaactaactaagattaatttagaattaacttaaaaatttaaaattaacctaatttatatttaaattataaatttaaaagtgttttaaattttatttaataattgtgacgagaaatttatttataatttgagacttttcttataaataaattaatcaaaattattaaaaggttaatatatattaagagtgactatttaatggttatatttttggaataattatacaaggcaccagtttttgtaaaaaaatta

SEQ ID NO: 4519 - DNA, 1521 bp, Cannabis sativa
ctacaacacaacaaaaaacaaaagggggaaaattagctcatattaagaaatcaaaattatagcaaaattatgttaggagaaaagcaatagcagtatgcatgcatgtcagagcgagttatgtgttcaaatgttctcacttctcaggaattatttacggtaatttttcttcataagcacacttcaaagtttcaaacattatttgcaaggcataaaagatcatactagggaagaaaaaactgaagttattattatgcatcaaatataaggaattatttagtaaggaaaaacagttgtacatggattacctctccaggacgacgactgtttaatgcctgaacatcaagcttgtagttatgctgaggaatcaactgtgatgcgtctgaagaatgaccttcaacattctaaacaaaagaattatgacattttttattagtgtcagcaccttaactatatgctagccaatgttggaacaactccatatttatgctcattattcaaaatttaaatgctaaaagctttaaacaaaaaaaggaatagccaaaaataaataaagaaagaaaaatcccattgtctcacggataatttgttaaatttgcattgacacaatcaacaagaacagatataatatcatagaaggacaaggtgcagttatcaagtgagcaaggtctaaccaaaacaagtgagctaggctagctctttcttaacttaaagaagatcgtgcctcttcttttttttctttttctttctccatcaataaaatgaatcttatttgaatttttttacctcattctttccacgccatctgatcacaccagagccaccagcaaatgcataaaatttaaaatggcgtgaatccgcagtacctggattttctgaaccctgcacaaaatttttgaaaaagggcaaatactatcatatagatgacaaacataatagtactgggatttcaagaatgaaaggcatatagctattcttactagaatcatatgtaatagttttccttcttttttgaagaaaaatacaaagcatcttaatttattagtctgttgcaaaatcatataatttgcagccatagtatcattaaaacatcctatttgggttgcaattgtacacgctacactttttttttaagaaacaatgctccctgcctagctctaaaatagtaggtccctgccctacccaagattggctcgaacctcagatattgagggataacccacatgcctaactgtttgagctacccctgttgggtgcatacacatctcatcttcaagaatacatgataccctaaaatgtcacggatcaagcagcattctcctcttgaagtgtaaactattcagtagttactagctattataaggtagcagtaacacactaaatctagttgcagagcttaaaaagaaatattataaaactttctatcaattataaaaattacaagatcaagaataatcaaacaaacaaatgcttataatgcaagaaaaaattgactttacatccttctcggttgtgcttcttcca

SEQ ID NO: 4520 - DNA, 1482 bp, Cannabis sativa
gattgaaggtaacatatatgtagttaaaaaaatagcgtaaaagtataccttaaacaatataatataaaccaaaaatcatataattttaaaaaataactaatctaaaaataaatttaaaggttacttaaatattttaatatagcctaacaataattagttgattattaagatttatgcaaataaattttaaggtaaccaaactatatcttaaacccatattatataatatatagatgttatttttatgaaaaagtaacttattgatttattattaatatcataaataattaaaaagttacttctcaaatgcaatgcaaaaaaaaataaataaataaataaataaatggaattatctacatttgaggtattttagtttagaattaaggtatattttaatgatgtggcaatgtattattgtaaatgagatttattaagatatttttataattattttacattttacctatattttttaaagggtatctacacatttagtaccctatgtcttatgtaaatataagttggtaccttgtgtttttaataatacttatttagtatcttgtattttaaaattatatatattttgtatcctaaatttaaattttttgatgaacttttatcaatgcaatcaacaatttaaaatttatgaattctgaattcaaatttaattatttgattacatataattaaaaactatttggttaaattaataaaaattaaattttactttaacgttataatttaaaaatataaaatattaattaagtattattaaaaaatcccaagataataaataggtattccttacatttgatttgttatttgttaatcttttaatgaaaaatggtttcgcgcccttttcgtacgatcggagaagagaagagaaaaatatctccggccagaaagttggtcaaaatggacttgattccgttcaaccacaggaggccggaccagctggaaaagcactggcagcagctgcagtacctgaccttgcaggatcaggtaaatcagaagaaaatcgtacctttgattttctctgtttttcttttttccatttttggtgcctttgttcttaggtttatgaattaagaactttccctaatggtgaatgatattgatgtatgagttgagcatttgattttaatttgtagtaatgattttccagtcccttcatcactgagtaagactatggttaaagctgataccaaatcactgaaatcatttctctgtttagtgttttctgattggtttgttgactttttgaaagagcttcaggctttgaatgtttctgttttatatacttatttacactttgagtttacatccaatcttaaataactttacttataaaggctcaaccttgcttggagaagttccatttaggattttatcaaggctcacgattggagaaggagtagattctggtaaactaaatttctcagcatctcagaaactctgttatttgctgtaatttcaaccata

SEQ ID NO: 4521 - DNA, 1389 bp, Cannabis sativa
atttattttttcaataaaattatttttgacaaaaaaaaaaataacacttatttgaactcataaacaacttgaagaataaaaaattaatacacaaatatgggttctttgaggatgagacaacatagaaggatgttttgtgctttatttatactagtttattatttttatagaagaatgttagggttttattttcatattaggcataccttaatagaaatttgttagggtactttatctttaaactagtgtgcgttaatagaaagatatgttagggttttacgtacgttaatagagagatatatgttagggttttatttttaaattaacgtactttaataaaaccatttagaatcttataaatatgggaagtatgttattctatttataataacgctctgatacttcaataaataattgtaatagttaactaataatttagtatttttactagatatgtcttaaattatatagctctaataataattataaaacaattctatctataaatcattaaattgtcgctgctcattaatttatattgaggtaaagattatatttttagtacttttagattttcttacaatcatataaatgtatcatcatttctcaacatgtattgtagtaataatttataaatactataaataatttatcactactaatttattaatgtaagattacttgtaatactaattcattagtatatagtatatatttaaatctatgatcaaataaaaaacatcatgatctaataagagctaaagtaattgttatcttttgtctgaattatagttattagctaatgataataactaaatatatagtttatgtatatttttgtatttattgtataactttcttacttacatttctctctatatatataggtgcatgaaccagtctacacattgattcaacaagcaaatttaaacaaatatcttctgaaaccatatgaatcaaattttgagttgcaaatatgtttgcatgaagatgctgaagaagacatccaaaatgatgatttttcggtaccaaatatatcttaccaaaacttaaacttataatatatataccaaatttctagtgcactttcaaaataattattttggtagacctgaaatttattttcaacatctatatatgaaagttttttagtttattttttttttcataattatgtatgctatagttagttaagactagcttcttttaaattttttaaattttttaaataattacagtaccaaaaataagattcaaatatttaacttgttgtaccaaaaataaggttcaaatattttttctcatacatatggtaatcaactgtttaaatcttatttttaactctattctaaaaatttacaaaactcttaaataattataacatataca

SEQ ID NO: 4522 - DNA, 2341 bp, Cannabis sativa
tagtttgtctacaaggaattgaaattgtgtactagggagacttttggtcaatcaatcaactacttgatcatgtgaggggacatattgaacttccaactatttgttgagtattttatctttaacaaaattcacatcaagtttgatgttgttctagcatgataaacatgattggaggccaatgcattagcccatgttatcacaccatgtgattggtgttgtagccagaggaaatttgatctcttgtagtagggattgaatccaggttatgtctgtagccacttgagcaagagctctatattttgacttggtgttggacctagacaccataacttgtttcttagatgaccaagaggtcatgtatttagataaacataataccctgctatttggtcttctgtcatcaagataacttacctaatctgcatcaagaatcccattggatcaagtctatcacaaatgttgatgtgcagtccatgaaatggaattcttttgagataccttagaatgcgtttagctgtattccagtgtgctgttatttgggctttgagaatctgagttcgcttatttacaataaagcttaagtcagatcttgtatgagtgaggtattgaagggccctaataagacttctatactctgtaggattttctaataattcaccaatagaaatagagagttttccctactgtcatgggagttgggcaaggtttcaagtgtagcatgttggttttctccaatatttcatgaacatatttagctggaattaaatagataactgtctcatctcgaacaacttctatgcccagaaaatactccagtagtcccatgtcttacagagcaaattcttgatttaattttgctgcaagctgtctcaacttttgaattgtttccagtaatgattatgtcattgacataaatcaatactagcattatatcataattatattggtagtaaaacaacgaggaatctgcttttgagttaacaaattgccacctagcaagtgtgtttttcaacttctcaaaacaagcttttggtgcttggtttagactatacaatgatttgagaagttaacacacatgtcttggtttgtttggatcaatgaaaccccattattgctgcataaatactttctttatttcaagctggccattcaagaatgcattgctaatgtccagttttcgaatttcccatcctttggacattggaatgggcaagaaaagtctcactattgaagcttttactgcaaggttgtatgtttcactataatctatcctaggtctttaatcgaatcctttagtagccaagagagccttgtacctttgaaataaattatttacatttcttttcactttaaatacccacctgttaccaatgatattcattttaggtgtgcaaggtataagaatcgaggtattgtttcgaattagagaaccattttcatcttgcatagtttttgtctagcctgggtgaagaagagctttagagagaaaaattttctcctcaaagataacatgccacttggcttcaccaagatagaccttgggtttaaacacacttgcttttctcctaatgaccatagggtgagtaggaataataggtcttagaatgacaacatcataatagtagcagtgtgggagtcagcaaaaagttggtcaacatcatcatcatcatctaaatcaaaagcaagatgagatggagccagatgtgacataccagatgagatagaaattgtatatgaatcaagagcaaaaccaataagaggtgatgcttcaggagttgttgtagagagattgagatagaaaagtttggataattagaagaagggttcaaggtgtagtggaaatattaggaagcacaacaaaccaggaaggaatatagacttgtacaagttgtttagattgaaaaatattaaggaaactaaattggaaagggaatccatcttcattgaagatgtcattccttgaaatataaagtctacctttattactcaagcatttatagtctttgtggctatcactatatctagtattgacacaccttttggagtggtattgaaacttatgagtttgatatggtctgaggcatggataacaactacacccaaaaaccttaaggaacttataataattttatttctttccagacaatacatcaaatggtgagatattacctaatacaagtgttggaagtctactgattaagtacacaaaggtttgaaaagcatcccaccaatatttttgtggaatgttagcttaagaagggagagttaaacccatttcaacaaggtgtctatgtttcctctcaaatctaccattttgagctgatgtatgaggaagggtgtt

SEQ ID NO: 4523 - DNA, 745 bp, Cannabis sativa
tgcggtgcatgaatgagcgtttgatcaaaggttgactttgataggttttgtaaaaccaaatagtattatttgaattttcaaaatggaagattaaatttggtagttagctagaccaagggggccaaaatggtattttcttttcattgaaacttaaaacgatctctttgtgtattcaaaatagttgcagaggagctagtagattcatgtcctcagaaaatcttctaaattggtccagacactccaaataatgattttatttttgatttcacactttgtagtgtaagctgattccagttttccaataaaataccataattgaatgaaatcacgactacttatttgtcaatgatacttaaaattatgagtcacatgaaattcaatgtcaccattatttgcctgcttgatttgtttgaataatatgtcctttatatttttaaagagacgaagggattgttctaaaggatcttggctctaaatgggaacctagtgatcgaagtggaaagtggttgaaattgaagcctgattatgttcgtgctggttcggatctggacgttcttattgtaggtttgtaatttgcttcaccatgtataaatcgaagaaacttatatatattcaagaatctcgaagtgtttgtgtaattgttttttttttttcgtttgtgtaattgttattaggaggatattatggttctggacgtcgtggaggagaggtaaattttcttttcatatttcatatatatatatat

SEQ ID NO: 4524 - DNA, 2234 bp, Cannabis sativa
ataaactaatcgatcatattaaatatttctgtttaaaaatgcgtatctattaaaaaaaataaatacatttgtgtgggcaaattgatatttatttcattccatttatacttattatttcaatattttgtaggctataattctcataattatgataaaactcactcttggtacccaaaataacatacacctctaattaaaaacaattagaagttacgattacttgatggaaagaaacgtaatattgcataattattaagtaacactacttaagtatatccatgcttcactatttccgttggtatctctaaaatgaggattttgtccaatgtgtatgcgttgccaaatgttattgcttatactcaatcgtcatcatttaattagtaactatttatacaaattaatagtaagtcaaccactcgttaatttggagaaatatataacaacaaaactagtgattttttttttatgtatggcgcactgcactttgtggtggtccaatatcgaaaactatatggtggttggcactaatgtaggcacttccaaccaacttatgaggagattataaggatggagtcagaagattatttgatctgaaaatatcaatttggtttgaaatttttaaaaaagcaccacaaattttggtcggttatttgttaaatccgttaaaaatattgaacgcatgtaacgttcattgacacaatagtattgctctttttttcttttttcttttttgaaatgtaatagtattgcttttatatatagttttttttgttctttaacaatttaaataaatatgattgaaaaagtacgcatatcatatgattataggaataataataataataacattattttcctatcattttcaatctatgaggtaatattagcaacaagtgatattgccctcgagatagattctattgcttttttaataatagtaacattggtactaaaggatccggtatgtccacgctttaaatttggcattaatggcattttagaggtcaaatgaagaaatgcaaaatcattcacctttgattaatttggtttcaactcaataacgcaaacatgtttaattgatcaaatcaattcgagttgctaaagatttgtttaagaaaatataaaaaaaggaaaaaaaaaatcaatcacttatattaaaaaagttaaaaagtgccattacaataggaggaggaggagataactcttttaatgaagaaagtttattttatttatcctttatgcatgtttaccctattcatgccttgtaaaattaaatttacgactaataaaaaaaattatatttaaaaaataataaattttaatattttacaaaaaaagaaaaattgtaataatgtataggaagtaattaaacacgtacaacctcagagctagtgtgttaattagaaagaaaaaaaaaacgtttagatttttgataaaaaaaaatcaattttaaaaatatttgcaataatatattatgtttttcattaatgtaaaaacatatcaatatttatagaagtgttaacgtctattatgtcgaagtttttttatttttatttttatgaagatgtggaagtatatttaagctgatattatcaatgaataattggaggattctttgaaactaaaaaaattattattttttcttgataaaatccttctaattatctataattgtgttttggcatgagataaaattaaaaacaggcgaaaagtgagtgtagataatttaggtgggtaccaccatatttttcttcttaggctgtgatgggaataaagtttgttaagaatttaagatagattaattgagggtgaaatcttctcttttaatttttatacacttaattttttttttttttgactaatttatttaaatttgtttttctttataaatttcatttaaatattgctaaatgctaattggataatcattatatacaccgaaaataaaattttgaaaacaacacatttataatttaatgtaatatctaattagcatatttaattaaaacaaataaaaaaatagaaaaaaacaattaaaagaattgtaccacaaaataaacattaacttattaatttatatttgattatcaaactttgaaataaaaatttcagaaaaaatctaatatttttctctctatcccaaacgatgagaaatagcattgtacatatttattgggaaagtgattttatttttatttctttttattcagttcgctacttttgaaacaaagttt

SEQ ID NO: 4525 - DNA, 1316 bp, Cannabis sativa
actttgagtttggttttgagataatgaaaacgctctttgggaagaccctttgtaaagatatcagcaacctgatcaatggtaggcacataacgaacatcaagttctttgttgagcagctggtcacggacaaaatgctggtctatttcaatatgtttgcaccgtgcatgaaaaatgggattggcagccaatgacgctgcaccttggttatcaacccagataacagggacatcaacaagttggacttgcaattcaccaaggagagaccgaagccatttgatttctgcagcagtgttagcaagtgcacgaaattctgattcggtggacgagcgagcaacaacttgctgctttttagcagaccaagaaatcaaattaggaccaagaaagatagcatagcctcccgtggaccggtggtcatcgacgcagctggcccaatcagcatcggaataggcagaaagggacagtctggatactggttttagaaggattccatcagaaatagtaccctttaagtaacgcagaagccgtttgcaagcttcccaatggacatgagtaggtgcatgaataaattgggacaacttatttatgatgaatgcaacgtcaggccttgtcaaagttaggtactgcagtgcacccaaagtgctcctatataatgtgacatcatcaaaaggagccccttcatttagagacagcttgtgggaagtggaagtaggactagcacagcttttagctccctctaagtgaactttgagtaaaagatcagtgatgtatttcgtttgtgacagatataagccttcatgactcctatgcacttcaacacctaaaaaataatgaacttggcccaagtctttgagtgagaagtgagtgtttagatccaagatcagattttgaataagaaatttgttaggacctgtaacaagaatgtcgtccacatatacaagtagaatcataaggttagaaccagtaccatacacaaagagagatgtgtcagcttttgatgcttgaaatccccagttaagcagagttgtttttaacttgtcattccatgcacgaggggcttgttttaagccataaagagccttattcaacttgcaaacatgagtaggatagtttgagtcctcaaagccttgtggttgactcatataaaccgtctcctgaagagtgccatttaagaaggtattggccacatcaagttgtcgaacttcccattgtgatgaaatagcaagagtaagaactagcctcactatgacaggttttactacagggctaaatgtatcttcaaaatcaataccaggcttttgaagatcccctttagcaac

SEQ ID NO: 4526 - DNA, 1024 bp, Cannabis sativa
tgcgttgagcttagggtcattgggcatagggacccccattggtagtcgttggttcatgggggtcgtcgattctagggtttcgtttggggtactggttgttagggacttggttgggagagacccaacaaagagaaagagagaaggggtaggctggcagttgatattcaaataagacaagtgtgtgtttaggggtagggttttttctagggtttgtagaatgggctttggccgaatatttaatattttagactttttttttaagtatttgttgcgttaattagttataaactgatgctactttgcgtcagtttaaaaccaatacaaaattcaaaatggggtttttaataggcgcaaacatgcattgttacaaaatagacaaaaaaaaattaaagtggtctctttgcgtcgattatggacattgattgacgtgttgacagatgcaaaagaccatttcatagtagtgtggatttttattgcttttttttttttcttctcccttgttgaatttgttaggtaaaaataaaagtacaatgtatgaatgacgtaacctgtagattaaaagaagtagaagtcaagtaataaaatataacaattaatgatataaaatgaccttaaaattaaatctactacatagggtagttgaaggttgctaatagccaaaggttttgatgaatcttattaaataacccaacctagttagccgaaccttattaaataaccttaattaagctttacctatttcaacttagaaaaatagtacaaaagtgatcaaatctcgagagcataatatgagtgttgctattgagcaccagtggtgcccaacactttttattggcgacattctataattggttagcgatactctctaaaatcaattttttaagtatatgagagccgatacttaattacaccaatagcagtatgacaccgcgagaagggtgctagacaccagtagtaccttttaacaattctctatttatatttatatgtttatatagtataagtactcgattttcttaaggca

SEQ ID NO: 4527 - DNA, 705 bp, Cannabis sativa
tgtgtaaactcattaaataaataggtatggagcaatggaaagttgaagaaagtgagaggaagagcaatggcaaattcaggggaaggaatatcaatgacggtattagtgactcttcctctagagagtagagtctctccacttatcccaaaacaaactattttatgtgaaaaagaagaagaagaagaagaagaaaacaatatggtttttaactctttctcttttgaggattatgcatggagagtttaccatgagcgtcttcacctcaaagatcctctcgataagtaccgagttatgacctaagtaataataatatttatgtaatttttacctaataattccaactagtttaaatttttggcagaggacagatacataagtcatttatgtttttctttggttccaattagctagattgattcttggtatgcgcgttatttggtttatttgttgagaaatgctaaaaggtactacatcagtgtttagtattctccaatgtgttaatatcgttattggtttaaataagtatgaggtcccatatagtttaatataataacttttaaggagtattgctagccaaaacgacatatctaaaagtactagacaccattaatgcacaataacaatgctctaatttcttcttaatgcattgcgggtgatgacataaaactattacaaattccgtgtgttgtgcatttttgctaaatg

SEQ ID NO: 4528 - DNA, 2072 bp, Cannabis sativa
taaaataatttccaacatattcaaactcaaccttagcaagattagccctggcagattggttgtttcttggcacaacccagtttttatcgaatctatagtgacatacaggggcggtatggccggatctgagacaaacttgacaaatgacccgttgctgagtgaacctaggataccctcgaccacggccagaggcaggctgattgttatcagttgagttcttagagttggcatatggtcgaacaccaccagaacgtccattgccaaaggtcaagttagcctgcattttgacagccaaatctgtcatagattggtgatgctcaagacggctttcatgagaaagaagtaaggcttgaacttcttcaatggtcagattctcactccgtgaagtaatccctgctacaacagagtcaaaatcttgtccaagaccatttagaagttgtaaaaccaagtcttgatcaccaactggtgaaccagcaacattgagagcatcagatatagattgaatcttgtcaacatattcagagatagaaagactttcctttttgatattacagaactggcatttgagttgaaggcgacgggctttagtttggctcgagaatttctgttctagtgcttgccacactgcaaaagagctttggtagatagcaaccgacgcaagaacagcctctgtcattgaagatctgagccatgaaagaaggagctgatcttttcgcctccattgaacatattcaggattcgatgtgccattgacaagattcattggtggtggtactccggtgaagagaatttcatcaagatcgtgtccaatcacagttggcacgacctgggatttccaagagaggaaattaaggcggtctagtgtgagagtgagagaggacgtgagtgaatgagaaaaaggattccatgaggtagtagcaggagctgtggcaagagccattggtgcaaatgcaggatcggttatggaagaagccatgaacggtagtcaactagcgattgataccgtgtaagaacaataaccatggaaccactagaacagagaaagagaaaaatagagaggaacataaatgagaaggcaaaagctaacccaagagattagcaacatctttatttatagagagagattacagagtctttacacagaaagaaaacttagcagaaaaaataactacctaactaataactaattaacaaagttaacagaaataacagacaaccaagattagttattaacatcgaagactaaagatgaaaagtttcacactcttaacagagaaacaatccaagtacctttcatgaatagtcataatgtttatcatgactatgcatcccttgatgatttcaaggttctcaaactccgatatgaaagaatagcattaggtaataatggaaatcaaacacaattctctatgtactcgcttcttcctcatgatacgtacggattacaagatatggtgaaaaagttcaattcagatccgaaactgttggcgcccaagagtcttaataatcatctaaggaaggtggaactttctcgtgtgtcaattcccaagatgaaattctcttatggtgttgatgttaaggagttacttgaggatcaagggttaactttgcctttcagtgtgaatgcagatttctcaaacatggttaatgtcaatcctgttactaatgtttatgtaaacattatggttcacaagtcttgtatcgaagtgaatgaagaagggacagaggctgctgcagccacttttgctagaatcgcattcggttttgatccagattgtgagcctactccagtttctacctttgttgctgaccatccattcatgtttatgattgttgaagagttttccaacctcgttgtttccaccggggcagttcttgatccacaaaactagaaacatttttgtttatgaactgttgtttgtaattagtaatagtagtttctagacattgttttcagcttctttttacttttcttttggtactgaattttaagctagtataactattaatacatatatcgtgtatttctttcttccttgtaatgaagtatttgaaatggtattagtgatatt

SEQ ID NO: 4529 - DNA, 1516 bp, Cannabis sativa
gtgtgcacattcgagatagtgttccaatctgattattttatccgataatgaggctgattgcttacacatttttggtagttctttaaaacgcgttaaaaaagataattaatcgcccacttaaattaactggtaattttgttcttctttgttttctacaataaaaatattagggtatcatatatgttttttttttttgttatctatgctttttatttatgctttattgtacttaaatatgcttcttatataaattcatattaatttgctttaatggcattggattcctttcttctccaaataatattcagtttagttttagaaaaatagatacatcgatgcaattattgtattaaaaaaaaattatatgaactttaatttgtcattttcaatgcaaggtgtgcgtaattaaaaattaatgtaaaatgcattttttacgaaaaaaaaatcttttgcaatgttttttaaaataataaaataaaatcactaattatcataatgctgatactgattgtaattatgttattttaaaatttgacacaaaatcttccaatcatatatattattttcgaaataacataaaacccttaattttatagtggacaagttaattattgattctccatgcattcaaaatcataaaactaaagtgtcattattatcattgaccatttgatcaaatcataagaaaagcttatagcatatttgattcaaaaacatagatcctttttattatcttccttgatgtagttatcaataataatcaaactagcactactagctttgtgcttcattgaaaaggagtattatttatatttatatatatatatttatatataaataattgtaattgatgataatgaacaaattcttagatgttttctcttttgcttagctatagataaggagagatagggaagtagctagtggatgactaaatgccctctaaagaaaatgacttaattattgagttcaaatatcttgagagttacttatcaccaacaattattattacatacaattatataaattttcatttgataatacaaaaaagtctcttacataattatatataaaatatatataaactttgttttcatatatatccactaaatcttataattaaataatttttgtaactttaattaattttgttgaaactgttggctgtatctatctaagctatcaaaggttatgtcatgtcagcctgatatgattaaattttgtgtatttaataattattaagataattaataatatttgttatgataatgataattacagagaagaatttgttaaattatacttgattattacttgattttgtttaatttatgttatttttcactatgaaaaaaggagctttatcattaattgtgtaaaagaagttgaaaaagaaaaacccttttaagagagttctatttgaacttgatgctttatagaataattgagttggcaaccaatggccaagtctaacttggcagttgaatatgaaaatatccatttatgatgtacatca

SEQ ID NO: 4530 - DNA, 2982 bp, Cannabis sativa
catgaaattcattgaaggtttcatgagcgaacaagattcaatacgccgatggacaaaaatggtaaacaattgctaagtaatgtaaatattaacctttcttttgttttaataatatgtcttttttatcattctctctcttctctttcttccatggcaaagaaaagaagaatagtgcaaaagccagtatctcgagtgaaggaacccgattcaaacttagctttgcaagaggggaagatagagaatgaagctaaaggtgaagctaatggtctagatctgattgctgatatgttggatggagaagatacgattaaggctatcgaacaatctggttctaaaaaccaggttgtggaataggggtacttgaattgggctaaggaagtggaagatgaagctacttcagaaaatgatcaggttcaattccaagaatcaacctgaatcattgtaaatcttttaaggaggagaagaagtactatcgtgatcccaaattgacatatacataacctatactcaagaacgaaatcaagatttcacaactcgaccatgaggaagtcaaagaaaaagctgcaagttggaatacaacagtgatttgtatggttcttggagcttatcctcctatgactgtttttgagggatttataaagtgaatttggggacacctttggatagttcaaataataaagatgacaaggggactggttatggtcaaattcagtgatgaagcatctagagatcaggtcttgaaatcaagagtaatccaatttaataggacaccagtgattataagaccatggtctactgatttaaatgctgtaaagctgtttcgatcagtacccctttagattcgtcttcaagaccttagcctccaatattggggaaataattatctaagtgctttacttaatatagttaggaaaccaatcatggtggaccaacatactaaggattgcacaagggttcaatttgctaggatttcggtggaaatggacattacagatactcctcctagatcagtacaatacgttgatgaacatggtcagctggttgaacaaagtattgattatgaatggctcctggttaagtgcaaaaactgtatggggtatggacacataatggcagactgtcgaaaaggagaggcgaagaagaagttgtaggaaactgtagttgttaactaagtcaaggaaccaagaaataatgagatggagactaaaatggctaacaaggcagacgagaatgattatccagctaattttaggaaggcagatcagaagaaagtgtctaatgaggttacccatgataaaaaatgggttacaccttgaaaaatgattcctcatacataggttaaagctgctgatgtgtcttttgaagctgttgagactactgctaatagtttaagggcttagatgaagaagagaagggttcgacaatagaaatggtgtccaaagaagcagaggattcaagtataattgttcataaccatggataattgcaatattgcatgttaaaatgttaggggtgtgaataatagagataaacaagatgttgttttggagttttgtagtattaataaagttggtgtaggagccttagttgaaacaaagttgaaggagaataaaatcaaagagatgatggagaataagtttgttaactgggattatttctcaagctctactcttgaaggccgaattcttattgtttagagaaaaagctttgtcaaagtgattgtcattgctgaaactcctaagcttgtacattgctatgtcaaaatgtcagggaatgataaagcttactgtattacttttgtctagggttattagcactgagtctacaacttgtggtagcactctgttctaacaaatctgccaaaaatggtgataaatcggtcctcacacgaggagggagcctctctgtcagttcagctctgttcatgatgggaggggtcatctgattccactagtcataattggcaaatttagcattactcctagaagagatgctggtagacaacttcctcatctcctccacctcgcagctgcgcctttggtactagaatttatccactgcctccagtctggcttcttctccttctatcaactgtacaggcctgacaggaagtgtgaaaagtaacaagggcaatggaggcaactcagtcgtttgcctggacaattgggttgaggtggccagaagcacttgaggtgctaggggtggcgaaggaaggtcttgcttgtcccttgatgaatgagtactttggcttggtggccttccatcattagaagaagttgcctccttctgtgatcgagaatctgtgatctgcctccttgaggttgccagctacaggactttctctttggcctttatgtttgccttcttgtttgctccatcatcaaaaatgctgcctcgcctcttattgggtctgatgggcccatcacagtcagaactatcttctccagaattctctaggggaatctggttcagaggctccatgaataggataggcttggtaagatccacgatggcagtggaggtcgtctccgtgaccgaagcctttagagaagcttttggattcggtactgggggtgctggcttatgggctccacttccggaggcctggttctttcttccaacattatcactttgggtgatctccctaacctcgttaaaacgggcgtggacactacccaagaacttgttcagaagctccatctagagagtggctggttgatctacataaagcacacgaagtcatcattaaaagaaattataacaagaagcatgaagtttacaacatataagcatgcaagacttcagggagatccaaaccattaatcctagcataattggcttttcccctagcaaacagagtgatgtcttcttgacctaaattagttctgtattggaagaatccgtggaagattttgccaagtgcatccacttggacatgatgtgcacacgagggacataatgattaggactgtggacaatgca

SEQ ID NO: 4531 - DNA, 1956 bp, Cannabis sativa
  modified_base (357)..(361): a, c, t, g, unknown or other
tgagtgagtgagtgagtgaatacctttttcttgtgaccttggtactctctgctgtgtagagtcttccatggaactgagtcctccgccattctcaaaaagctcagacctttgttaaacccgtagagatcaacaattggtgtagacgaaggaaaagtagagggaaagaaaatatagaaggaaaggaaaggaaaggaaaggaaaattggagagatagaaaagacagtattttagtaacacttttgtttttaatgtttttaattataaaaattttgtttttaaaaataaaaaatgtatttttattttttaattttaaaaacaaaaaaataaaagtgtattctataaattttatttttattnnnnnttgttgattttatttaagttgagttcggagttgggtttgaagttgggactgaggatatgtccaagtccgagactggatccaaattcagttttcaagatctaagctggagtcataatacaaaatattaattaaaaaaatatgtttaaaaaaattttaaaagtgattttttcagtttttaaaatttagatttttaattaaaaaattaaaaagtaaaaacaattttatagaatatgattttagaaaatatttttacttttctaattttaaaaacaaaaaactgattacaaaaagtgttaccaaacgcactcatagtgtaatcatcattaatttgtttagttacattttacacgatattcagaattgaaataaattaatagagaaatgtaacggaataaatgaaaaataatcagaattaatatatgtagaataattagcggcgaaattctttatattttaatttttatgcacttaatttctacattttttggtagcaaaacctatttacttttctttataaatttgaggcgtcaattatatcagacttaatattaattacataaccactatgtgtgtatacatgaaagtaaaacttctcatttttttttctcttattttgtattttcttttccaccaaacttctcattttttatgttctctctatttttctcttctacaatttctttctttccacttttcttcaaggccaaacatagggtaaaggtatggacaacaaaatgggtcatatttagagcaacatctctaatggtgaatcatttcactaattaagtatagaatcttcacactattcaacttcaagaaaatactaaattagtgtacactaaatttcatattattaacagtgtcagatattgaatctacttaaaaaaaattatgccatatataaatggtactagacagaattgtactgatgtccaataataatactcatttttaattctataattattattcattaatattaaacgaactacgaataagacaccaattatttgggctcgcgttgtttgttctttttcaattcatcagtttagtaaagtaggatcggccctaagtataagcgagctaagcgtgtgcttaggaatcacattggagcacaaaataaaaaattaaagagtttattaaagttttattcaagtaaaattaaatatattgtaaacaataaatattcaatggtatgagtttaattcccataacacctttaagcccataatattttattagcatatttgcaaaaatattaagaatacaattaccttaaatttaaacaagaatgcataactttccaaaattcttttgtgttctaaaatagaatctagtttattattaaaataaataataatagaaagtagtttcccattttctcattaaaataaaatatgttttttattattattttagaaagtatttgattggttcccaccaagccttcccctactctcgtcgcaccatataacacacccctcctcctcctttgggatcggatctgcatagtccgtacactcggagcccctccgatcgctacgcctcggaagaagaagaagaagatgacttagcagagtctattgatccacaca

SEQ ID NO: 4532 - DNA, 3026 bp, Cannabis sativa
tatttaattaaataaaaaattatagttaaataagaaatttattaatttcagaacaatttaaattagaatattttcaaaatatattttatctatttatttatttgtattggagggcgtgtgttgctcctttcttcctcccatagcgaagaggagaaaaggtgttttgaagtctagtttgaagagtgtaaccattccgagagtgagtcctgagcttcctttaatccaagaagaagaagcctctgctcgtacagaggtttttttggacccttgtgaagaactagaaccagaatgggaggagatggaacctggccttgtgaagtcaacccctactgtaacgagttgggcggatgaggtggaagcgattgatttccaggagtcggtcaaggtggcatggagcaaattcaaggttaatcaggtgagaactccttcttcccaactgaattttactgagcctttgaaaatcggagatcaggtggtcgctaagcttgatttagaagaagttgaagttgaggcttcttattggagatcctcgattgtttgtatttttttggaggccaatccaccgttcaaagtgttcgaaggctttattaagagaatttgggagaacttgggagtggaaaggattgttagaatgcattatggttttattttggcgagtttcaaagatgaagttacaagggacataatcctagaaaatgaggttattcaatttgataaaaaacttgttgttcttagaccttggtcagaagacatggatacttctcaaatgattaaatcggttcccgtatgggtaaggttgaatggtttaggccttcaatactggggaagaagaatttaagtgctcttattagcacaatcaaaaaaacccataacacctgacaaggttacactagaaagaaccatgattaaatttactagagtgttggtggatgttgagatcaaagatgaacccccaagatccattgcctttgttaatgagaagaatcaacttgtggagcaacaggttgaatacgaatggttaccaactaaatgtgcagcctgtaacttgcttggccataatatcttgaactgcaacaaagagaaaccagtagcatggatgaaaaaacagcatggggataagagaaaaaatggagacaaagatgatgagcctgggagtgtgctactgcagaagaataatgaagatatctcagttgctgtcatgaaaaaggctattttgaacaatagcttagaaaaagggaggatgataatgagggtgaaccaagtcaggcactccagagttcgaatgctcaagagagtaaagatgcagcgagttgggtcattccaaagaggaaggggtccaaaattgttatttgaacacagcaggaagctagaattagtaatggttatgatgctttgaatgaagcagaggggggattggttactatttcaattaaacttgtttaatggataacatacatcaatcttctaggttgaacgttaaagggagggctgaataaagttgagaagcagcgagagttatttgattgttgtaagataaataaagttagttttagggctctctttgagaccaaaattaaccatgacaaagttactagtctgatttctaataacccaaactggaagatctattctagtcaagaaatttcgtatagaatcctgttgatttggattgataaactggttgaagtgaatgtccttttggaggatagagaaatggtccactataagctcaaaatggttggattcaaagaggagttttacctcacagccgtttatggtagtaacatgttaaatgaaaggaaggatctctggaataaacaatggattattcttggggatttcaatgccatgttcgcttataaagatagatgtggtggcaggaaaatcaaggattttgagatccaagacagtcaaaactgcttgctcagggacaggttgaagaactcaaagctttaggctcattctttacttggtctaacaaacatgaggagcggatcagaattcattcaaaactggacataatttttgctaatgaaagttggcttgattattttccaaacattgaagcgagttacagatggggagttctttatgatcacaattattgtctcattaaacactcaaagactagtaataggggctctaaactattttgcttttgcaactattggatgttcaaggatggttacaaggaaaatgtgctaaccgcttggaggaagaagaatattactaatcttaaaagcttaaaccagcagctgtataggatcaatgttcttaaaaactgctatgtttccaaacaggaagatgtggctagcatttataaagatgctagagagttgtacagtaatgctcaagtgactctggccaataatcctcactgtagtgtagctgtaaagggggaaaaatcttcatacactgctttcaggaggctcgaaaacaatatatcagctaccttcaccagaattcaaaagtgtgctggctgaggtttggagatgaaaacactagttatttccactcaatcatgaaaaaaagaatagcagagaataggatttgttcctacagtgttggtggaattgtttttgatgagtatgataaagttgttgatcatttcctcaatcacttttgtaacttcatggggaggcagagctctgctacaagaaggatggaacatgattgccttgataatggaaacaagttgaatatcttgcaacaagtgcagataacttgtccgttaaataagacggatgtgaaagaagctttatttggtattcactctttgaaaagccaagggccggatggttttggtgttggctttttcaaaggtctttagggtgagataggagatgacatttctaaagcagttttgggattctttcaatttggatcccttccgaaagaggtgaatgagactactatttctctcgttccaaagattgataatcctcaaaatactagtgactatagacccattgcctgctgcagcactatctacaaatgtatatctaagatgatatgtacgagactct

SEQ ID NO: 4533 - DNA, 824 bp, Cannabis sativa
caattaatgtgtaagaggactaagtttggtaactccatttaaggctgctaatactaatataacaaaaacataaatgtaattctcgataagacattaaatatttttcttgtcagattctgaactgtacacgttagaaatgaataactgggaatagttgtggtttattttgatttttgattgataagccattagagaaaaagaacaaaagaaagaatgataataattactcactacaaacttactatatatatactgtacctatagtagtagatgatttaacaaaattttttgaaagccagtacaagtaaaaggggtaagatcacagctatcaataagcaaaagactataacttaaagcataatattggaatttttaatctttgacaaattcctagcctacccttagtgaaaaatctctgtggttgcatgcatggagacttccgtcaaagatttattagaaaattgaaagacagttggacagtagaacaggttacaaaattcatgggttaaagtgtgtgaaaaacattacagagggaaaagtgttgaaggcacataaaaatgaagggaagggctaaaatgcaatctacccattaatacttaataggaagaaagtgagaagcagactacccattcaaatagtcaggagtaaagctgttaataatatttgacaaagcacacagaggtaaataaaagagatcaaataaatgttagcaaaagtttgaagtagtattattctttggtttgcgaaaactatattcatctggttgaatcagaaaagctatgaatgttgactgctgtaacatttcaagtgattccatatatata

SEQ ID NO: 4534 - DNA, 613 bp, Cannabis sativa
agatgtgaagatgtaatgaaactgggcctttgaaatgaatatacatatgtataaacttagatttgaagatgacatgtctcttatattagatgtataaactgtaaacttaatattgaatttcttttttaatatatacttgtcgcatttaaggttatgttagttgttattgtaagaatattgtgatcatattgtgacaacttgttaagtttgaatgtttgggtgtccctgaaaatattttcagtcactacaaatttggtaaaggaaaaaatcaatcttaaacttaaaaaacaactaaatacaagtggcaaaattagtctggcaatggaggcttctcctctagtggcgttgcttcaagagatgcctgtcagtgtgctgcattgatgagctccatagtattgacagccttgagttcaatggaagaagtgaaggtttgatcacaaaccatctcaaaagaattgaaaaaaccagtctgattaagggacaagtactccctggctgttccatgaccaagccacagagagaaagggtccatacagttaaggttagttagttagtcaaggctgctctagtagctgttttggttgtttatgttgtaatataatagtcttctgta

SEQ ID NO: 4535 - DNA, 2810 bp, Cannabis sativa
tttttttttatttggaattgttggaagagatagatttagggttgtggaaggtcagtagctctgattgtcgaaaaaattattggaaccaaaagagatttaccatggtgttttaaaccagattttttttttttggaaccctttgatgactgtagttttgccaaaatatatatagtataaataattatgtttagctatcactatatataaatacaagaagtccaatttcaaaaaatatatatatattatattttttaaaaaaaatatattagttaatttctagaactattaattttagaagatattatttagtttatttattttgtaatatttgatttcactaagtattatttaacattattttgtgttcgtaaaaaacttttaaaaaaaattataaatgtatcaaaaaaaatcaaaattgtagtatcttttttatatattttgttttgtcacacatgagtgtaatctagatttcgtattattgatatataatatgggtataaaattgcgtatatacttaactgtgtcttttttatatgtgatggatagtgaataaaatagataaataaataccatatttttttttggtcattaacttataataaagttagttatataactaacattcaaatttagaattaacatttcattattttgtgtttctttgtaagaaaattgatctaaaagcatgacattccaaatcacttgactaaaaagaacttgcctttaattcttacaaaaatttagtttggatttccaatgctaacaataatctttgagcttaacaagtcctatatggtgaagctatacatattttggccattcagtagtattattaatcctatttatctccttgagattgtaatcagttgaagcccttgcccttggttcaaagaaaggtttaaaagggagctaccactaatcgttgtgaagatgcatcggcgaaaattgttgatgatgtttctactttcgactatcaaacaacacaaatgcaggatctcttcgggacagtttttgaagagcaacttcatcatacttcattgactgaatatgcaccaacaaatacttaaatatttaagggaggtctgtacctttgtgtttcttctataaggaagccgttaacttttactagcgacgagtcaaaattccctgaattgagcctgcaactccacgacgccttccctgaacatttggtacgcaatatgagtcatcatcatgcatattctcttctgatttgtttagaaaatgaaatcttactcaccctttcgttgttaaataagtcgtcggcaactgcttccatttgctttcttcttttctcttcttttacaaactcggtcatttcctcatttccgttgtcagattctctgttatcaagaagcaaataaggaaatgatatcaaacacctgaatatactttaaacatcacaaagaaaggagttagccatagtcgaaggcaaatcttacttgtaaggatacttcgagaacggaatcaggttgttaaagctattcccagattcagtatctctctacagttcaattccatataaagatacagataagaacttgtaatcattcaaataaaaatacagataagaaattacatggaaaattgataatatatgacttggattttaattcaatatatatagacacttaatcatataccgtttactacacattagatattctgcagaactaagagaaagttcaatgcccaatttaaatgtaacaaaagttcatataacagaataaaataaattgcagaaatatcaaacttaaaatagttataaagcatgccatttggttccccactgggaagtgcacaattacctttctgaaacgtttgaagttaacaacttcattgtttacagtacgtctggttgtagaagaagcactcatatcccgaacaattaaattctggctgtaaatgatatccaagttttcaccttccgtctcgctaaccctgtcatttttgacatgactactggtactactactgcccctaaagcttgataaattaatttttaaagcacaatccttctgttcatccatgttatctacagtgtcaatgactgctgctgcaggtgcaatagtcgttggaggaattggtgtaacgatgttaatgacttcttcagaatgtgcagaagcagtcgttggaggaggaactggcgttacaatttcaatgacttcttcggaatgtgtggcagctgttacatggaccgaagatgttacagcttctgcttctgcttcagcttcagaatcttctacaaatgtctcgtctgtggagcatgaggatgatacaactactgcaccgagcatacattcgaaatgttacttcagtataaatatatttgtgatacaaataaatttacaagcatgattatgtagattgagatgacatctctatagaattatatgtctaaattacagcagaggagattattattttgacttgtaaattatgagaattaaatacacatgagatatgcatgtagtaaagaagggaaagaccaactataaagaatctttttctgactaatggaaccaaataaatgataagtacactatttaattgaaactatcttaataattaggaatattttagggatataattacatattgataagaattttactaagtttagcttcatagatatatcctagcagacacaggattgtaagtgttctattataaaaatattaaactagttgtgaatttcaatctatgattgtaatcataacagattattgaattatcattctcttcctctcattttcttcttccctcttctctttactcttactttctatacc

SEQ ID NO: 4536 - DNA, 527 bp, Cannabis sativa
agtattggatccttgtgttagattctgcataatcttcttagcctcaaaaatccttggagcatttctttcattaaatctatcatgtaattcctcccaaatttcagccgcattatcgtgatacataatactatcagcaatctcaccagatatagcatggagaatccaagatataacagtactgttacatctacaccaggcatcatattcctcttgatcctcatcaggttgcggaagctttccatttacaaacttgatcttgttccgtgcgactgatgcgatcatcatcgatcttctccaagtattgtagttctcacttcctgtgagaatcttaggaactaaaatagctcctggattatcaccagtggaaaggaagtaaggattggatagatcgttcgcattcgtcgacttcgaattttcaccaagaacagagaactgattcgagtctccttcatcgcgagaactccgagtttgaatttttcctcctcgagccatgaaacgctagaagatcagcaatcaatgaaagaaaa

SEQ ID NO: 4537 - DNA, 1013 bp, Cannabis sativa
aattagtaaaaattattaattagtatcaaatgagttaaaaaaagtaacatttggccatattatattttgtgtcaaatttagtcaaacttttactatatgctaaatttaacatatattttacactactattagagcttcatttttttaaaaaaatggctagaatatagcaaaacatactttataaccctccattagagatgctcttatatttttcatattttaaaggagcattgctattttctactataatagtgcttgataccatcataaaagcatcttcaatagagtactataaaatagtatattgccattttttaaacattttgagaaaagtaaactccaacatagtgtaacatatatatgtgttaaatttgactcatgcaaaaaattatgttaaatttagcacaaaaaatagcatgagttaaatttcaatccatgataaataccacatttttttattactattttacctctcattaatacatttattaattaaaaaaactttttatttttaattcacattttaatctgaaaattataatagtaaaaaaaagttagtcataaaagaattaattgtattgtacaattttaataaacattaattacttattgatgtattgattttttttagttattttgccccttttgtattagagcatagttacaaaaagagtttggtgtatattttgagttaaatttagtaaaaattatacaaaatgctaaagggcatcagtgacgcttaacacccctcctcgttattatattactattggtatagtataattaactctcgaattccatataatttaatatgataacttttaaaaatatatcttaccaatcgtaatacctctagaatgtgctatacaccaatattgatgcctgacaataatactccacaaattatacattttgtattataaatgatctttggtgacatataataataattaaattaaaatacataaaatacaataatgaattacactaatataataacaataataataata

SEQ ID NO: 4538 - DNA, 800 bp, Cannabis sativa
ctcgatagatttttaattcatatttatatcatgcactgattcctgttagcaaatcaggtctctttatactttatgtgaaaatatatatagggctcgtttggtaagacgtataagggccgtattgtattatatacaaataatacgaacaaatagttctattactacgaaccaaaatttgaatacaatgtaagttttattatttaatacataacaaatagttcgtattaatttgtagaataacatttacaaaagatccgcgatcaaccccaatctcgaacctggttcacgatacccgaaccggactgagagccgggactagacttggacatggacccgaaccaggatgcaagaccagacctggattcgaactgggacttggacgtaggacctgacccgagatcggactttggactcgggacccaaacccgggctctgacctggacacgaagcccggactcaaacccaaaccccggacccgaacccaaacttcaccccaaactatatacctgtgatgcgagactcagacccaacctgaagtcgatgttgggatcgagtttattaaaaatatatcctaattttacacaatctattaatacaagtcaataccaaacataacattgtattacataatattaatacaatacaatacgacgtaccaaatgagcccttaatcattactaattgctaattgtgcatattaaaaacaattactaattgctaatttagaatgaagtacatactagagaatgaaaaactgaaaataaacttattacagatgtgtaagaaaaatgacaaagcaa

SEQ ID NO: 4539 - DNA, 1467 bp, Cannabis sativa
cggttgtgaaactaaatttgacatcctcactttcgatttcccgagtagataccaataaaattaatgtcatagacaagagtagcattgccaggtatattgcagtcacctatatgaacaaagcatattagatgtcactatctcttttgttttccttttttgctgaaaaatgtcactatttcaataagttcataagtaacagcatatgctctttcctttctcctcttgaagcacatggaatgaattaaatcaatcttcactatgaagttataggaaacagaaagtttctggtcttccacttgctataggtttagtttaaaaattattccaagtttatacttttcacctcataaaagaaaaaggtgtttagagacttctaataatgaggctatgcattctaatcaacaaaccaaaaagaaagagggtagagttcgaaatgtaattagaatgcacctgaaaagcatcctgcaggctctggaccatatgctaactctggaggaatgtaaagctttcgtcttcctcctgtgtaagtgtaataatggtggggtgaaaatccttctgcgagaaggagaaacatataaaacaagaaccagaagtagatggtttgtgccgaattcatacctactaacataggaggaactccctcaccccctaagattccctgatccagtcccttaaggacctgaagatcaagaaaataaagtccagacaaaagcaattattagtaccgctgtgttgtagcatgtcaattgtgcttgtctttttatcaagagcaatcgctcaaaataagagataacaaatcagagggaatatgaccctcatgaaactgacaatcagtaaaacatcgagattgcctagctaaactatgagcaacacaattagcggactgtttaacaaaatgtaaagacacattactcagagaacccaataaaacctgacagtcctgaactataagaccaaagacagaaaacatatcaacattactacgaatggcattgtaatgtagatcaaaattttgtcattttacagttcctctggactaataacaataattatgataaacactttgccttaacgagaaatcaaatccaacaagctttaattgtttcataaggcaagcaaacttgatggcatgttagaagatgttgacgacaaagaagtaaaatgagattttaaagtaatgcgaatcaaaattttgtcattatgagaaatcaaatcgaacaagctttaattgttttataaggcaagcaaacttagtttctatgtgaagacgagctaatctctctactagataacatatacaaaagatcaattagatgtaatcatggagtgaataaaaaataagtgattatctaaccaaatttagtgatcacaaaaacacaatctcagtggtgtgaagtgtgaacccatagttaatacatcttataagtggataaacaaaaatgccatcaccattggaagtaaacagaa

SEQ ID NO: 4540 - DNA, 1674 bp, Cannabis sativa
cttccatgtgcatttttggccgttggatgaagcttggacggtccgatttggttgccttattttgtagggcttaatgagaaaatttcccttgtactcaaatttctctctctctgtaactaatcggtttgagtttcatatttatgctaatttaattatagaaaaatgattcttcaagtcaaagctggattaataattggtgttcaaagctgacatagttaactaagtacctagaaatcattccatatatatctagtgacggtctcagaatttttaatttgtggggcttatttatcataaaaaaaatatttatagttacattctaattactcttacgaaatttatctaattttatggaggcttttctactatacatttaattttttaaaatgcagtatttttgttagtgggggcttacattaatgttaatgggctcgtccctgtatatatcactctatttactcttcatattcttctccttgatcgtctttcttaatccaattctcaaaccctaatcacattcctcgattcttttacagctctgtcctcttcgatcttcgccaccgctctgctgctcaactgccaaggtttggggttttgacggcgactaatggtggtgaaaataggttagttattagtgctagttgtaatcgcaacgacgtagaaataatcagtgatggttgtggaacttcttcgaagaattcaaaagtggatgagttcagagcagaggatgaggagaagaagttggttgatcatcaaagcatatggaaccaaatgaaggagattgtgatggtcttctactaaaactggttcctcgaatgtctcttgaagcttactcggatgtagactgggctagctgcattgatcatcgaagatatactggaggatatgctattctccttgctataatctcatttcctagtctgctaattgctaggtcctcaactgaatctgagtttcgggcattggcaaatacagctgctgagattaaatgatttcggtctctatacttactaaaatgcaagtacatttagttgatgtccctattatttgggttgataatcaaggtgcaacttcgttagctgttaattctatattttcatgctcgatgtgaacacatagagatcaatcaatattttatttgtgatcaactactcaataaagaacttgatgggcgatatgttcccacgattgatcaagttgttgacattttcaccaaaagtcttctcaaggatcgatttaattatcttaaaaccaaactcaaagtggtgtctacccattttcgtttgaggggaaatgataaccaagttagttagttagttggttttagtctcattgtctgtattggttagttagtttcttcgtatagtttctgcactaaacgaaatctgtttttataatagaattcttactttgtattttgtccattcttttgtgctataaataaaggatttggatcttattattgaggtaagaatttcaagcattccttgtgtgtttcttctctctattctcctctgcttcttcttcttcagaagtccctacaaatttgtaacaaacaaatttagacaaacttatatatatccatttaacttacatagataaagataataaagcacttatatatatttctagaatatttgatatttaccataagtttaacgggtccacattgtt

SEQ ID NO: 4541 - DNA, 2632 bp, Cannabis sativa
ggtaaaataattccaacacaattgaatgcagcattcatctaagaaaatcagatcatcttgacctcactgccttttgcgatgtcgattgggctaccgatcctgatgatagacgatcaacctcaggctttgcaatattttttggctgcaatatcatagccttgcagtgcaagaaggaacacacaatgtccaggagcagtactgaagttgaatttcgcagcttagcacagactgtcactgaaattagctggcttcactccctgtttatgaaattgcacattcacttgtctcgacctcctactatatggtgtgacaacctcagcacagtgcttcttactgccaatccagttctacatgctcacaccaagcacatcgaacttgatctttattttgtccgagagaagaatatgcagcatttggttcaagtcaagcatgtactagccattgaccaaattgctgatggcctcaccaaacctatatctagccaattattcttctcatttcgacacaaacttacaattggtgatccctccaattataagtttgaggggtgttaggacaggctgttattccttctattatttcaggttagttgttaggtttggttagttgccaactatctttagttggttaacttgttggttagttggttaggtgtttgttacattgtataaatatcatcttgtaacaaatgcttattcaataatatcaaaggcatcttttctctcctcttcctttcttcctctttctctttcttttctctgttttctctgttctgtttaatggctaaaaggtctggcgcctctcacatatattagggaaaaattacttatcactattgctatactcattttgtattagggattcaagattattgagactgttcttgggatattcttgaattataacaaaagagatatatcaataaagtattcaaaaaatttggcacgaaatatactataccaggtgataagcttgtagctaaagaaaataagttgtctaaatcattatcctgaaagcaaccttaaaattcaaaaaaatataaaagattcttcatatatatatttagaatctaatatatgctcaagcttgtatgtgaacttgtatttaacatacatatcaagaatgttagatagatatttaagtaattctataaagaacttttgatatacagccaaatgggttataaagaatttatggagaataaaatactatatgttcacttaaaaatcagaaaacagaaaatttagagatcattaagatttctgatgatcttctaaagattttagtggtgtgattttttgtcacatatggctgcaaaattagaaatggcattgaaaactattaaagatatatgttgtgacaataaatcaatcaaattgtattttagtaacaacatgagctctacatggtcaaaggcacattgactttgagctaattgtcattaaaataaagttcacagttataaggtgtctatagaacatgtaagaacaaactccatgtttttggattcggatcattaaagatataccacttaaggcttttcaagagcttcttgctcatatatggatgtggtattaatttaagattgtgctagtttagtgggagtttatatttgggatgttttatcaagttgatatatatttatggtttgattctgcaaataaagtatggacttaaattttgagtactctgaatgtattctttttattaaggtttaagtataagggtagaaatactaaagaattgatctcaattaaagtagatcagttggagataagcatgctaagatcatatttgcatgtaatttttatactacacatccataattggtctatgtcatttggttatattgatatatgtgatcattgatggatttagttgcgctaaatgtggcgaaagccactttgatcctatgttagtataattaatggatgagattgttttgaaatacctataattataatagcaaagtttaagtgcttataaaattacacactataagaaaacatatgcaatccaagtgggagattgttggattaaaatctctaatgtgggctcatatgtatttgtgtgtattgctatataaagtttgacataaataaagtgatcaatttagtaattgtgggtcattgtgtattaaatgtcatgaattaaatgtgtagatattttaagagatatttctaatttattgagaggctaaattagaaatactaaaattaataacttattaagatatataatggtagcaatcctcaagaaacaagagaaaagttctattctcttcccccatcaagagagaaaattagagaaccctaagtcttgtattcttggaagatcattatccaaaaatctagtctacttatggacatcactaaattaattatctctatcaagaaattgaggtacccttttgctattcatgttttttatcctctttgaatcatcaatggatttaaatctatagttatacacttctaataatatgtaatattttatgtatagaatttaatcttaatataatatattttatgggtgttaaagaattttaacaattaaaacaattaaatatcagattttcaacatatttttttttattaagatttggatgtatgggacctaatattaacaggtc

SEQ ID NO: 4542 - DNA, 1778 bp, Cannabis sativa
gagacatatcccaagctgaaaacacaattaggatataaatgggaagctctagcaaactctgagccacatcatttgctggtcgcttaacaaaacaaacaaaaatatacttcaagtaaattttacaatcctgaaccacaaaaccaaaaaaaaacatacttattgagcttcgtaaagcttggactactgcaaaacaaccagtttcaattgttaccaattgtcacaattttgttttgatcaaacttaaagcttcacgaagtctcattacttttctattaaagttgtctaactaaaatggttctgattttttcgtaattttttaactcgtaaatatcatatgtactgaagatataattcaaacatttagttgcatatgtgcaataattattttgaattttatttttgatacggtaaagtactatttaaatttttttgaaaacgaacaattttttattataattataatatacaatgccatatataaaaaattgggatattattttttaaaatatgaaagtaaaaaacaccaatataataaaagtaaaagtgatacactacctaacaagttccgtaagagttaaaaaaaaacatagaacaaaagtctttttaatttatttttatttttgggtaagtgtcacatccaatgattttaataaataattttatcaaaataatttttctgagatcttattatatatattttctttgaacaaatttaataagcacatgcataactctaacaatcattttcaagtttgtttggatacatttctttattaattattaattctctcttgtcattattttgcaaataaattaattttatcattgtttgcaagttataaccatattaactaatcaaatatattgaaattaattaatactcccttaagtgatgtaatatgtttgaccaaaataataaaaatacatatattttaacttgttatttgttaatacataaatttacaagtcctacaaaaatgctaaaatatcataataaaattaaattttatacttaaactttgacaaattaacattttattttctcgcatgtttatttaagtacaaacttatatacatacatttttttaattcattatattttatagctaattaaaaaaatagcataacataaaatataatagattaatgatttctaatttaatatacaattatcaatctaacacaatcccatacaaatattatggaagaaaagagtgtaaaacctctttagagagaggtgaagcacaataatatcacaatcactaaaaaatacaaactatatatatatttatggtttctaaattataaatttacaaaatttacaaaatatattttttttttaaaaaaaaaaattgtgaattttaaaaaaagatataagaaaaatagtataaggtaattgattacatggtttttccatattttttaatttttttttcaatttttctcatataacttttttgaaaaaaaaaatttatattttttgtgtagaaagtataaaaactcataaaatttacaattttctcttatagatatacatatttttttggctttcggttcggtttgaattccataatccctcaatacgaagaaagaggttacatgattagggtcacaaaatgtatttcaacacagatcacaactcaaatatgatacgagtttttatcggttagggtttgaaaaattagatgagtgtcgaaaaagtatgttaaatgattagcacagaaacaaataataagtcaaacaaaataagacataaatacaataatacaacaaacata

SEQ ID NO: 4543 - DNA, 650 bp, Cannabis sativa
tacatataaaacaatatttttaggatgatcatgtatttgcaatatcacaaataaatattatatatataaacataatattattttagtcttcgttctatactaataaagtagctcattatctagaactttttaagtttttagtttctagtagaaaagaaatgaatattaatattattagttaaattcatgcatatatatagctagctaggtatacagttacaatgtatacacatatatatatgtattatagaggtggagtatatatgatcatcaacataagaattataaattagtaattatatatattttctaataataataattagtttgttaatttttttatatatattaatacaagatatatatatatatatgtgtgtgtcaaataaagggaatgttatatcaatattaagccaataagttcaaactatatagttacataatacatatctaacaatgttattcattttattatatattcatatattatataaatatatatttattttacactaatattaatgatttctgtaatgatcaacaatatatatacatagatgtgaaactataattgctataaatattacactaaactatgtaaagtaatagttttgagtatataatttgctaaagatgttataacatgcatg

SEQ ID NO: 4544 - DNA, 842 bp, Cannabis sativa
caattcattcctgcaaaatcaaaattaattgatctaatctaattcaattatgattgcaagagtaataatttgtacaccaaaaaaccttcagataatttgattcaaatttttattaaaataaaacgttgttattttggacttattgtaagagttgttctttatgagtttagatataattgctgttgtatgatttatggagatggattttaagtttgttggattaattttgaactctgtagttaaagagagaatctctttaatgttcacattttaaagtacttgtcaatctttatacgcgtagaagagtacacacataagcatatcctttgatatataccattccttaaaacttagaagatagaaaaagaaggaaggaaccctcttttcggcttagttacatacatacatacttgttgttgtcaagatgtccaagttaggcccacatgaaataccaaaagagtttgtgaaatagtctttttaattgaagtaatctatttatttgattaaaatcactctcacttaccatgtttcttatcatttgtcacttgttcaatctctaatatgtaaacagtacacgaaacagcaaagtttgatacatgtcattcacttagtatcctttcttaaaacaaaaggacagattattgatcaactgaattaattactcaaaactatatttatttttgtctataagaaaagaagggaatcaactcaaacataacagctggcctagtctctgtttttcaaccactgcatgtttatccctctttatatttatctcacttacatcatatacagtagtaaagtttctccaagtggcttaattgtagccataatttactaat

SEQ ID NO: 4545 - DNA, 520 bp, Cannabis sativa
atggaacaattccaagcagcataggtgatcttcttgccattaaggtaatcaacctttcaaacaacacttttgatgggctcataccaacatttatagggaatttgaaagaacttgaatcattagatctctccaacaacaacctttttggtagaatccctggagaattggcaactcttacatttctttcttatctcaatctttctgggaacaatctttctgggccaattccaagtggtgggcaattcaatacttttgaaaatacatcatttgtgggaaatgtaggattgtgtgattttcctttgtcaaagaaatgtgaagacacaaatgctgttgatgagtatagccagcaatgtgatgaatctgatgaaaatggatttggttgggaggcagtgttgattgggtatggatgtagttttgttattggagccattggtggatttgtgattatctccaagaaaccaaagtggttggcaaacatttttggaagatatcttcagtgattatgttcaattcttattgt

SEQ ID NO: 4546 - DNA, 677 bp, Cannabis sativa
ttttttttggctagaaagaaccgttcatctcaatgactagccaagcgcaataactatcacacactagaagaaggagatgtaaagaataatacgtacatatactgaggagtaactcagggcactccgtgataaagatgagctaaagtagctaaagaccatctctttttaatgtgtgatgataaagtgaaaatatagcataatccgtttacatgccctataaagggttgtattgtattcgataaaaataacactatgcttggaatagacttctgtatttcattatttatttaatacaatataaattattttatttacaatacataaaaaatagaacattagcttatattgtaatatttataaacttaggttgtactgtgataaagttaagacaaggtgtcaagttcgaggccgaagccaagattgggggtctagggttcaggattcaaattggctttcgggtccagagttggggtccgaggcaagaggcaagggtcggggttgaggtcccaagcatggtccaagtacgggtcaaggttggggtccatgtccaagttgaggtcgaggtctaggcctgggtcccaagtttgggcagggccccagatctggggttggggttcggggccaatccagctctgggttttgatgcaactaagagccctcttaaaccttaataactg

SEQ ID NO: 4547 - DNA, 1113 bp, Cannabis sativa
aaaaaaaaaaaaaaaaactgatgcggggcccgatcgtcatcgcttttattttatccaatatattagatcatcagtaacccacctgatgtatgattaatcatgacatggatttaatatttgtatatatgtgagaggcaaaatatagtgtaaacaaattgtaatttgcagctaaatcctctaagcttttaatttttatacatttaattttctaaattcttgtttcaatggctatgtaaatttgactgttatcatatttaaataattaaattaattggatcaataaaaatttaccacaagtaagtatacaaaggaacagccctaagaaatatgaggcttaagataaaattaaattttgggaccctataatttttagtgtaatgataaaagttttaaaaattttaaaaagtttcaagattcaatcttttataactacacattacatattttttaagaaaataaaaaaaaatagaggttaagaattgatctttttgatttcttagtttaaagtaagactgtttaccacttcacaacaaatttttgttacattttcttcttatttaatattttatctatatattaataatttttttttacaatttcgaggccctgagcgttcaagagcttgaagcgcactcctaactgacctacctaagaccggctctgtgtacacaagtagcaatttcagttggcaattttactgacgtttcaaatttattaacaaaaatgaaattaagaaagtattaccacacaaaataaaaagatcaaaaagttcaatttataaaaattgaaacataaaaagaacttgatgaccacaatatccttcataattttaatgtgtgaaatttaacacaaaatttttgtactacgacttaaaaaaaaaagataaaaatccattgaagagatgttataagtggcattgccgtatagacatagattgtcataataatacctttttgctttctattttatgagagatatgcaatgcatggagcaagaattcaaatgtccgtttttttgaggaaatattttatagcacctatattatttttttacgttataaagtgtaattgggtcctcgtggtaattccaaggccattgtttcttttttttttt

SEQ ID NO: 4548 - DNA, 1884 bp, Cannabis sativa
atgtttactctagccctttctttgttgatgatgagcatatcatctacatatattagtagataaatggcttcattcataccagttcctttgtagtataggcagtgagcatataatagcttctagaaaacccaagcttcagcatgaagccatcaaaccttgtgttccactgcctaggtgactgccttagtcgatatagtgattttactagcttgcaaacatagttttctttgccctttgttgtgtaccctttaggctgtctcatatagatttcttccccaagttcaccatgccaaaaagcagttgtcatatccatttggtttatctccatgttgaactatgtagctaaactcaacattatccttatagtcttctattttgcaactggtgcaaatacttcattgaaatctaccacttccttttttaataaaaccctttgcaactaacctggctttgtaccttataggttcttctttagttctcccttctttgtccctgaataaccatttacaatccataatgctattgtcttttggtttaggcactacaatctaggtcatgttcttcttaagagattatatctcttcatcaacaactcatttacatttccttgaatatggtccattaatggcctcttcatatctggggttcattgttgattgtatttgattcactcatgaagtcatatgaaatgtcttcatcgcagatattaaaattgtacttagggtttggttttggtacccttttgcttctgtccatggtcaacggataatcacctaagtcttcttgagtcccatcatctataattttagttacttctctttcagattccacctaaatatgatccccaggttccacctgaacctatccccctggttctgagctggtgtgttctcttatagttccacctgaacagatcgaggcccgacttcaatgcttgtacctgcatggtcaatttcctttgtacctatactagggttagatgtaataggaaaacaaggaaaacatattctttaaatattacatctctgttgttaattattttaaaacctatttattcccaaacccatagtctatagccttttatcccttttggatatcctaagaagacacattcatagccctaggttctaatttctctatactttgatgtgcataagctgcacatccaaatactttaagattagataagttaggaggtttactagggtgacaatgtgcttaaacagttagatattacattagtgaactcattttaatagggtgtgtgtaaaagtatgatatgccgtgttcaaacgagattcatgcgcagttctaaccaactattatatgtgacaagaataatcaaaagattaaaaaagatgtaactatatcaaatgatttaactttctttttgaaataatatacacaaatatataaaaaaaaaaatgtaaaacaaattataaataatcaatttgtcagtgcccttttatatttatttccatgagattacgaattagacagataaagcctaataaggtgtaacatatacatatcatacattatctttatcgtaaaatttgacactttttgtgttaaaaatgctagttagctagcttcattgattatgagctattatccaaaatattaatttaatattacatcaaaaaattaatatattaatttagtaatgttgtgtattgtgctgtgtgcaataataataaataacatatttttgaaaaatagtccaaaatcggctaacaacctcaaatatatgattccttttcttcattatttaacaacttcagtcattgtcacacagtaagaaaaaaaggtttaggaggcctagagaaggaggctacacacagtacacacacgatttcatttcatatagatgcaactcgagcc

SEQ ID NO: 4549 - DNA, 690 bp, Cannabis sativa
cttatttaaaataattcatccagcatatactattagatattaaatttgattatatttgaactcttgcgcacattgaattgaatcaaaaatttgaaatcaacaattagtaaagattaaaaaaaaattatgaggaaaatagtacaaattgaatttgaggaccactcctatttaaaataaatcatttttaaccttcatatcacacctataccatacctattcacataaatgagttacaaaattaagctatgtaatattcaagatataagctaattatatatacataaaaaaaaaaaaaaagcaatcaaatattattatataaatataaatcactgtattaaatgaaatgaatgtaataaacatatcatataagttaattaacttattcgtacattttttttttttttgagaaaccgtatttcatattttacactatgtacttttaatttttaattttttttggttgttttcgcgtaattacgtcatgaactgtattactatttctatccagataaatcccatataatgtattcttagtgtgtgtgctagcgacgcgtcactataatttacataaatataatatcacttacgatgcataacatatctttttcctcattatatgtacttaaaagaaatattcggctgtaaatttgcgacatgaatattttttgaaaatttccctctcatatttag

SEQ ID NO: 4550 - DNA, 3341 bp, Cannabis sativa
  modified_base (2509)..(2511): a, c, t, g, unknown or other
gtaaaataattccaacaggaacagcaccacttcgacccacggtggaccaaatcgaagactgaacccaaggtgaccgatccacgacccacgatgactggatcaacgacccacacggtgcatgccacggtgaccggacccaatgtcgaaggtgtgttttttttttgtgagaaagtcttaaaaattaattttgtttgtgactttgtttgtgaaacctaaattttgttagttttagggaaattttgttaaatgggaaatgggaaatcggatccgtgaaatgggaaaaattttgaggaagaagaagacccgatgggtccaatgcttgcctgatattggtctgatggttcctaattttccgtttaaaaatgcaaaggtctgatgggtttgatgcttgttcaatatgggtccgatggtccctaatttcgattttaaaatgcgaaggtccaatgggtctgattgtcctttcatttgatatgggtctgatgtgtctgatgcccaatccctatgatctgatacccagtccgatacctagccttgatggtcaaaataaggaatttttgttgtggtattgtagtctgatactgtgtccgatgtggtctgatatatttagtatgatgcccagtccgataggatccgatgcccatccaatagtgtagaaaaaataatttaattgtcaaatttaattaattattgttttattaattgagattggagtatttaacaagaatatgagttaattattaattattgttttcaatttttttattttttcattttctttgtgaaaaatgtgaggtgtgtggtgactaacacttttttaagaaaaatataaaatatttaattcttggttttttttttatagagacccggacttctaataattccagtggcagagcattacacaggccatgtcacttggcgcggtggtagttattactacccgaagattaaggctaaatttgaagaattcaaactatgggatagggtgagggaatcccctttcaaacagttcttcgagagagagcctttataattttcaggagcattgattcatcagttgatattgcacaaaatcaaacctgacaagccacacgaggtacatttttacgtggggaagaagagatgtagatttggtaggttggagtttggtttggtgaccgggttaaacttgttgcccgaacctactggtgagaaattgaagagaaaggaagttcagaccggttgattatggaatatttcaacagtagtccttccatcagcttttgccaactgcgcagagtttttgagagctgcacaaaagttgatgatgtctacaagttgaagatggccttgtttgttatgggcgtcctcactggtaaggaggagaagactgccattcctccttttgtcataagaattgttgacaaccttccattcttctacaattacccgtgggaaaagatttcgtacaacaagctgatggaaacttgtaatagagactacttagatatgaagaataagatgcttaagaagattgaaaaacgagttagtcagaagaaggctcaatactcatcttacggctatactacagcgttgtagtattgggcatacgaggccatagagttgggcaacgagtatgcagtgaagaagtcacattacttttcgagaatggtgaactaggaaagtaagccgaaaacgacactcaggaaagatgaagtgatatgattatttgctagaaatgtaagtttcttacgatttatgattaattcatgttaattttcatctattaatatatttttttttatttttcagttgagaatttactctatgttatgtccttcagcaaatgagattaagcttgtgagttgcatcactggcggtcagacacctttatttgttgacttggaggaacttgtgttgggtgaggatgggcaaccaacacaagatgctttggaagccaggccgaaaagcttgcctcgacattggaagaacgagcggatgcagctcgacatgagtctggtattgccccatctgcaacatcacaggatcctcctcttcgcccgtcagcatctatccccagcacctcagaggcttgcgaaccagtataccctgccattttggtaaggttggagactgtggagagggagcagattgcttaagggaaaggcagactgctaagcaaagaggacagacaatgattatggatcaattgaagactataatgagcctcctacaagatcctggaaggcccacaccagatacacaatcacagccacaaccatagccacaattagaagaagagcctcagtcaccggaaaatgaaaacattctcccaaatgattatagactggatgatgatgatatgttctgtacacctacgaacacgaatatcaccagcatcagggatacccaggattcttaggtacaggtgttagagacagcttcagaactagtggagaactggaggaagagaaagcgatgtaggtggttcgatgagtacactgaaatgaagaagaagtccagggcatcgaannnacttgtgaatgtggacccacttagagtcgttgatcggagagctccacaagctcatttttcaagattagaaaagtatccataaggtcagagcatatctctctagtttctctctctagaaagtggagcatcaagacttagctatttttctgtaatccatctcttgagaaataaaactcgaagtagacgtagctccattactgttgcgtagagggagtgaactattacaaatccttgcgtctctcttatctatacttaacttatacttcattttagccaatttagcgagcgggtgtggcctagagatttgcatcaaaatttctccctcaacacataaataattatacaaaaatatttttggtactcagtgccctagaatagtcaagaagaatatgcagactatgttttcaatttttcaaacattttataaatcataaaaattagaatatgtataatgtcattcaatacataaataacaagtccagtaatcaagttctgtctctacatccttaggatcatcaaactttctccaaagagacattcctaacaaactctacatccttaggatcatcaaactttcttcaaagagacattcctaagcccttaatgcttaagttccaaatagcttactcactccaaaatttactttgtcctacattatctaattaaataaataattataataatggcattgtactcttcaaataaagtctaatgatatataacacgatatcattcaaagatatcataaaaaaaactagcttaaccacagatactagcggtattcggtagccaaaaatggtgttctgggaacagtgatagatatttgacat

SEQ ID NO: 4551 - DNA, 739 bp, Cannabis sativa
gagagagagagagagaggaagagacaaagaggagagagaaaagcaaaattgggtttttctcgtgtaattgtaaatctcggaatggctccttcggttttgtaaatactatatacccaaaacgcaagaaaaaaaaaactgcattttatatattccgctgtttttttccttaattaattgtttatttactttctcttttccctccaaatcgttttcacgagggctttctcgattttcaccaacggtccagatctggccaaatcagatgggccctccacgtaagtgaacagtagctgacgtggcgatatctgagttggagaaaccgagtttgctggcttgttttctaaccctttttcttcagtgtgaaatcgtacgttattgggtctagagtttagactagattctcacgtacgacgtaaaacgcaacaaagggtagaaaaaaatggaataaaacgaggaatgtcgaatgtacgcgtttaaacgcgagtggtaaaactatatggagaaggatatcaaccatggatttggaaaacaattagctaggaaatttttgttaagggaattttcacattccttaaataaatcaactagataaattatgtttgcaaataaataaaataatagtagtttacacttgttttatggtctaaaatcaggtttagaattatttcaatcaatgtctaataaaactaactttgttatatatctctattaatacagcttttataaatcttttgagttg

SEQ ID NO: 4552 - DNA, 1595 bp, Cannabis sativa
ttttttttttacatttttttatagtattccataaaacaacaccaaaacaacaagaaaattaattaaaaataacatcaaaacaacaacattaaataacaaaaaattaataagagtacaacataaaaatacataaaaaaaactgtattttctataaataaaatcataataatcgtgaaaatatttaaaatttcgtacaaccgtatttttgtattttatgtatttgtgaaataattcttactataaatcgatcctaaacaatgaataattatagtggatttacatttcaatttttttttttacttgaatttataattcactacaagaaatgtcacttttgctagcacatttttgtgctggcaaaagctaatattgcgctggtaaaatagaatttacttatgatgtgttggtaaaagggggttggcatatcaatgttggtattaaaacttttgcaagcataaaataaaaagcgctggcaaaaaagatttttcctagcgcgtaaatgtgctggtaaaaaagttagattttagccactgcaaatgtacgctgataaaactttcatctctttgccagcccagtttttgaaatgtgctggtaaaaattaattttaccagcagtagcgaactgtgctaacaaaagtgacatttcttgtagtgattatagtattttattattacccctactacatatacatgaccaaatataaatgtgttgaccccctaattataattactttaacataatctatgaaaaaaggcacatagttattaactacttaaagagataggatcttttaatattacatatattttgtagctttgtttcccaaaataataaacgatggggaatcaagattatatatgtatattttctttcaaaattcaaatatattttttatattgtttattatttcataaccatatataattaaatattataataacttattttttttatataaataaacattgtttaataataatatttatcatttcaaataaaaaatgataattatgataaatgcatgtattcatttttttaagctataaattaatgtaaactagcacttcattcctttatatgcagtaaaaaataagagagagtaaactcataccaaaagcaaaagttgtgggatatataaatatataatttatttatttattttggaaacctgctgtccaattgaatattatgagcttaattaaatccaaattgtttcactaaattattctattcttcttcccaatccattggagagattttgtgagttggtgtaacatgttatatagtttatataattatatatatacatatttgtgtgtgttcttgtctttaacataaatcgatatatattggtccaaagtgaggggcatgcaaaattacaagagcacgtgtagctgtattaattatgtatgtgaatatcgtcaatatatgtaagactccaaatgtgtatatatacaattgtttatataattatagggttaaatataattaatataattatatatagttattcttcaaataaaaagataaagacagctaaatgaagaccggagttggccaccttcctttggattaaaaaaataaagtatgtatta

SEQ ID NO: 4553 - DNA, 816 bp, Cannabis sativa
catgatgtaattcatatattgattcttgaacaaaaagttttttttttatcaaattaatactaattattaattatgcgatgtaatatcattctttttaatactaattttctgtagagtattattcgaatataaaaattgtttatttcaaatttgctggtgaaattaatatttttctttaaattgtgaaaatctttaaaaataagtttccatagtagtttcactaaatagatgagacttacccgaattgctttttttctttttaaatcccaatttattagaatattaaccaatttaaacatcattaattataatatataattatgtgatttaactactattatagaacaacatttatgtaatattaaaatttatataatgtaaacatatctttatatgaatatatataaagaaataagagatgaatgccgtgccacctaattaatcaccttgtgttgttattattttattcatttatattttatcccacactacactataaactctacaaataatgacttggaatttttactatctctaatggtggtgattatgaaaaagatattattattttaggatttagaaaattaaagaagtcaaaattggactgttcactattccatgctgctgtcatcatgaggaagagatttcatcaccaccaataccataaaacttactaaaactaataataatatcaaaagatttttctttaattcaaagttttttttttctcttttcaaaactatacacatgataaaaaaaaaggccaaatatatgtattctattctgtttaactaaaattaaaaatagaaaaaaaaa

SEQ ID NO: 4554 - DNA, 523 bp, Cannabis sativa
taataaaattttatgcatcttaatcacacattaatcttaaattttaacacgatctcaaagttaaattaaactttaataattttttaaatattagatccaaatttaataacgggccaaaaaaatgagttaaaagaagtttttgtaatctgttgtgagcacaaatgtcgatttaaaaatatgaatcaattaatagtgtgtttggtaacactttttaaattaatattttattttttttatttagaaaaataaaaatatttttccaaaaacatgtcttataaaattattttcactttttaattttttaaattgagaattgaaatcttaaaaattttgaaaattaaaaaaaaaaaattacttttataatttttttcttaattattattttggattctgactgcaatttggattttggcaccgagacttcagtcccagttccagtccagacctaaatccgacttaaataaaattaaaaaataaaaaataaaaattatagaacaagtttaaaaatataaattttattttt

SEQ ID NO: 4555 - DNA, 773 bp, Cannabis sativa
aagaagataaaactacaaaatactaataagtttgaacttatgcctctagagtcctaacacttagttattattggtgtcagatttttacattgcccaaggaaacattagtttatccagctcatgactacaaaggatttactgtaagtaaatgcttaaccttttgttaacattcttatagattatattactactaattactaagctactaatttcaggttagcactgtgggagaggaaagtctatacaatcctcgcttaacaaagaatgaggtaactttaatttcactcttcttacaaaagctccatgtttacaagagaacacatcttttcatgtcaaaaaaaaaaatctcaactgcaaacttatattcttttgcaggaaacgttcaagggcattatgaaaagtaagtacatgttaaatctatataacaatcttacaattgacaggaaataagtaacttggattattaaactgctagctgataacaagctcaatcttaatttgcatcagatcttaatttggcatatccaaagatgatcgacgtagctgtccccgcaaacatggtttgtggtttgcaagacaccgacatcaattagccaattatttgaattgcatttgcattgtgaaatcaaagcatgtttttctttattgtacctaacaaatttataaacttgtgaataaaagtgacaaaagctatgtaaaataaaagcaagaaagaatgagagaatgatcaatgtgtccacttgattgatttggtgaatgaagtttgtttaata

SEQ ID NO: 4556 - DNA, 895 bp, Cannabis sativa
caaaaggaccgaggcgggacgaatgaaaaaaaaaaagtacatcaacataagaaatattgcatcttgtcgcggagaccatgacttatggttgcggcaagaatgaggtagggagatgttattttaagtgtatacagtggtcgcggcgaggaagcttagggccgcgacaaggtcttcatcaccgcagcgaccatgccttatggccgcagggagaagactggcaaaaagaccctattttcactttgtgaagtcaccgcagtgaggccattagtggtcgtagcgacaaagtccgtacggaaataaggggcagttttgtatctttgatattttcaattgcaaatttgttctatttaaggggattttgaatttcgaaagccaggcatatagaaatggaaccctagaagcaaaaaggaagacgattagaggaagtgtggcaacccggatcaattctaccactagtttctttcttctcctttttattttcttatgctaatttctatttttaatttaattgtggatttgaacatagagattatgaactaatttctcactttacgaatatgacaaatgttagtagattttattccaagggttaatgttaatttctattttatctttcttgatcgtgcatttttttcatatttgtgcttaatacatgtttaagattgatcaccttaggcatgatttatgatctcaataaaatatctaaaaagtgcgtattgaaaatgctctaattgaattaacttaggttttgatgtaaaatgagtatttacatagcctttgtgacgtttagattattgcttaatgcaaattgtatgttaatttatctcaaaaatgcaatagataacatagagtttaggaccataatgatctgaaaagagtttttctcaattttata

SEQ ID NO: 4557 - DNA, 2849 bp, Cannabis sativa
atacaaaaattattactctaactctgctcaaaaaccaattattacaagtgcctccacctatgacatcaaatctatacaaaaattccatttcaatgcctaagtaattcttatcttcatgccttttgtgtagtagtagctagtagtagtaatctcattcccagatatgatatgatactatgatgatagttgatatctcaaaaagtatagttgacaaagttacaaactactgcagaaatatagtaatgtccaataatggcagaagaacactcccttcttggtcaaacttgagtcaagtaataatatttcctgcccaggaagatcaggattcttaggggtcactgaaagctctgaaattttcgattaagagatgtaacattcttctgctaagcagcctttccaattgctcaaccagtccaaaacttcagtttggtcatttcattttatgttggaagaaatctccaattgacaaataaaaaactaataagagtatatatggatatgtgtacaccaatatattatcaattcaatcctacccacttcttaaaaatcaatccttcctccctctttctgtgttggccttcagtttggaatttgggagttttgcctctgtaaagagttttgtggtacttcaagaagagagtcctgtatttgtacttgtccacaaacatattacctctctccatcatctcaactacttcatttgctcggctgaaaaacccgcctctcacaaatgtgtaaagaacagaatccaagagttcctgatcaaacttcattggggttgcagaagcaagagatttcatctccccccacagttctgtcacttctatatagtttccgccaatagctgcatatgccgtcaccatggaatggaatgtctgagcattcggtgtatgcccaaggctcctcattttcttcagagccttctctgcatcttgcatcaatctcttcttagagaaaaagtggatcacattgttccaatcatgaaccccggaatctactctttgcccttctttgatttcgtgtaaaagctttcccattaacttagcttcacttccctcttcacatcccttaaccaacttctcaaattcttgatgaccggttttcggtatctttgcaactttcatctctttgaatagatggagagctccttgtgtatcttcttccaccaactttgactgaatcaatgcctggtaagagctggaatctagctgtattcctgctctacgagcatcgcgaagaagtgctgcaacatctcctgctcggtttgcttgacaatatgcttttaaaagagaagaatatactgaagaagcaatgttgaccccagccaataccatctcatctaaaaggtcatgtgcttggtctaaccaaccaagcaatatgcatgaattgatgacatgaactatcaatgaatcatcattggaaacaggagaatcttctctctccaccttgatgagaaactcggctaaatctttaatctttcctgcttctagaaatgccttgactaatttcaccaaaatttcctcagttggttggataatacctcgttcagatgttaacaattcaacttgagtctgcagcttagctaacatggtatttagcacttcctttgcttcagtatcgagtttcacaaagttccgatctcttaaatactcctcataagacactaaagagattttaaaaggtctatcatattccgaacctcctttgctagattcttcatggctcgaagttggcctggaaccaagaacacaagtggatttaccatcattttcaacagcatcaactaccatcgatgcagcagcgtaagaggacctagctgcttttgctttccgaagcatttctaaaaccatgttcgatgcagaaccaagattgcccagtttcaaatggcattgaagcaaacaattatagaactgtcgtaattgaacatcacttaggttgtgtgcatcatttatgtatcgttggagtttcctaagctcttctcttcgtccatttctctcatatatgtgtgccatgactatcaataagtcagtgtcaagtctcacaccaactcgaggcatcatgtcaaggagttgctcggctttcctatgcgttccaaacaagagacaccctgctagagcaatgttgaaagcggtagtattaggcttcatagcaagcaaaggtgcattactctttttccttggatctatcctactatcttgaaatagataaccaatctcaagaatcaactcagctgcaagataagccccagaaccagtttgacacatatatgccaaggttgtagaccaagcagaaacatgaggaaattgctccatttccactaactttctcaaaacagttgatgcaggaaccgataactggactttcgcaagagaaaaagagagataaattagtgtctctttctgtaacaaattctgttttcctttctcgaaaattcgttctactatcccaaacgccttctctaaccacagaacatcaaggctttcagacaatgccgcaagaattttgttcacaaccgactttctagggaacccatctatctgcatatgttgttcataaaatttccaagtatcgtcaagtctatgctcatcaattgcattctctatttccaaacttatcttagctgggtctccagcctgcaccaagattgttcctgtcatagttgataaagacttcatctcaagagggaattcatcattccttcctaaaaatacagccacctcatttcgattggctaaacaaatgtgagataacccacgaacagaaatcgaactcgaaaaagctttcaacttgtacacatatgaagggaagagtgcagtgatatgatgacccatttttctcctaagtatcat

SEQ ID NO: 4558 - DNA, 1055 bp, Cannabis sativa
gtacttcaaggtgtaggaagatgataatggtctggatttatggatatagctactagctagaaaggatcaaatcctccatattctttcttttttgttcttattattataatatgcatgtgtatttttttaatttttttttttcagagttaatcacaacttggttcattaaaaaaaactctcaaaactcagaagtaacaagaccaacaaaagaaaaggcttcttaaacatgaattagttcgtgctgaagataacaaaattgaaagatttatccttacttgtggaaaaccaagtgcaaagagcccaagtccagttagagtcacaagaggaatcgcagcaagaggactaagaaacctattacataacatgaaacggacaaattttatcaaacaataatatagcaaacaaagatatggttgaacatacaggtggaaactttgaaaaaccatcacaccttgcaaaaattctgacaaacccaaagaatcccatgagaatttgaagaaaagcagcaataatcagtgctccttgtacagctctcatggattgtctaaacctctgaaatcccatttaaaaagaactagtaactagcagcaactttaaacaaattatgatcatgtttactaatccataacaagaatggccattcatgggatacaaaattacaaaaattacagaagatgggttagaccaacctgacgggggttcgcatatatgctaaacctgttagaaaaagctattgagaaagagggtataatggaagcgtatgaagaacccattacaaccggaagacgagctccaaaccaagtctgcaagagtgtgtttataccagcaacaaacagcacagtttcaataacttcagccttctccacctatttcaccatacatcaaagtaaaattgggttagaacgaaatgtaccaaaacaaaatcacataagctaaaatcgggcataagattttccattgagttttcttacattgccaccacccattaaagggacaagtattgtagggatgaagaccgtggtcccaagcattactatgaagtgttgaaatcctag

SEQ ID NO: 4559 - DNA, 1447 bp, Cannabis sativa
ttataactcaatttaatgcctatcttttttttacacaagatcacactatcatcatcttctttactgtattttttaaatatctttacctcaacttttatattatactttatatcatcttttccatttttttatctatatcatttaaatattatatattattatattttatttatataaacatatgtaaaagttaaaaatataaaaaagaaattattaagcagttatgtcaagaagcaatatggtgtaaaattttaaacaatttttgctcatttgataattttttttaagaactttcatgtatattttagcttattcagagcatcttcactaggggagctaaagttagtaacttagtatttcaatttataatagcttttagttgatataatgctaaaatagcgtacttatctaaaataccatcttttagagcactttaatttcttaaaatatttgaagaattaaattaaaaatacactaatgtgttcttagttaaatgtagtagcaatcctatcatgttcttgactatataattttttcattttttttatttcacctcatacttttatattaaatcatatattaattttttttttatttttttctatattatttaaatattatattttctaaaatatattttatttatataaacaatatgttaaaaatattaaataaaaaatagaaaaataatagataaattattaaaagaatgaatattgtgctttttcacaagtagaaaacattattcataaggtgaaattttgaaatattttaactcatttatttgatacccattttttaaactatttttctttatatttgacattttgagtcattttattaaatataagtgttctcaataacttgtttataataactctcaagatgttagtgctatgtaaattgaggttacacctttttgtgctcacgccgcaaggcatgacttgccgtttccttataatgatgtttgattaatgaaagctttttgttcaaaaaaaaaaatttattttatctcaaaagaaataaagtaacactacaccatatgctttactctatatgtgttttagcttaatctctattttctagacatttggaactcctatcaacttctctattttattttttacaattactttatcaattatttttttatcttacatatttacattataccatacataattaatttttttatattatcggttacattattcaaataatatatttataacacaacaaaaaaatatattatatcctatatatctacattactttatagcgtataaccaaaagttaacaaaagacactatcaaaataataataaaaaaacatatatgcctactaaaattttaaaactgtaaccacatttaactgaacattatttatgaattaatttttttggttataatagctcatatatttcatgtgttattttaacactttttct

SEQ ID NO: 4560 - DNA, 1901 bp, Cannabis sativa
  modified_base (1643)..(1645): a, c, t, g, unknown or other
aactcaaaccatgctacatccaccaaaatttccatccaattctatttaatttactcttagatgcctaacatgaagattatccatgtaataaataaaattgaatgagattaaacggatatataaatttattttattcaagtctatttttaaataaaagttccactatataattattactgcaataaatgaataaattaaaaagataatttgtatttagagatttaacatattgtcatttaaaaatatttattatataagacatttttagcataaagtgccaccgcacaatatgtttggcgacctcattcatggtagtgaacctaatagcaatcctcactttaataatttttttagagcattgatatatgcattagtagtgcctagcacctttagatatattgctttataattgattagcgatactccttaaaagttattacattagactatatgtgactcgatacttaattagactaatgacgatattaacatgtaggagtatattaagcaccactgatactttttaatatttctcttttattattgcctacatatatagtaataaagttatccaatctacttacattaattttagctccaagagttaggtttgacaccaaatttgagaaatacgagtttttccaatgcttgaaaaaaattattcctttccaagaaaggattccaaaccccacttattatgcaataattgcatttatagggcggcctatggtgcttgttgtgttgcgaatgccctagaaagacgccgagatcttgcaaagcaaccacaagtggcggaagttgatttttcgttccatgggcccaaacgtgaaattggttggcaaagatagcacaaccaaagaagacaaaaacaaatccatgaatgatcggatggtccaaaaatatgtgtatagggagcacaataaaggtgacaatggaagcaaagggatgtgtcctattaacaaactcatgcttagtaatcctcattggcaactcatggtgcaattggaaagcctttacttggttgccaaagattggtgtagaggcactgccgtagttgtcaactgcccaatggtacaatccagatacaaggtcaactaccacatacccaacaacacatgcaaccaaagccaaccaaacattatggtcctttgagttggtaacaccaataactaacctagccagagaaaggagcacagtggtgcaacctgatgcgagccatgcgcgatgagaccatgtggaaagcatggttggatcaagctgggttttgttttcattaggtgatattgctttgtgttgggatttcattagcatgcttcttttggactccaaaggtactcgactcagacatggatgaaagtgtttatataaaatatatatgtatataaatatatatatattatgtatatgaatatatataatagtataatgaaataatgtagcttgtaattaatttaatttttttcactcacgtaactacaagaaataaataagggagacttccttcataggaagagaggatgggtaactaagttaggttgggaggtcctaagctatttaattgtagcctaagaagaagtttttcaatttactaagatggtgagaattgcaaactccttaactacacttttttattttttattttnnnttttaaaaaataaaataaaattggtattgcttggcgattgttccattcagctcttcccgtggctacccaattacggaagcggaagattcttgtgccgcaattttgtttgaggtgtggtgaggagtcgaaaatgccagaacatgctttgtttttctgttcaagtttagtgcagatgtgaatttgggtgggtcagcggttgagtttacgtaagtgcctcggtgatccgatgccggatgtattattgaggttgttagag

SEQ ID NO: 4561 - DNA, 756 bp, Cannabis sativa
aaattttatgtaattttgtttgtttcaattattgcaatttttattgtttacgaaactactggcaaaatttaatgaagtatactactccaaatccagaccttattttgatgtttgtaaaaaaataacaaaattttatcatatatatattaggataattttgtgacatattttaggttttaattaaattctaaaatgcatgcttcaatcttctttttctcttttgtgtgttgcaacaatattacatataaatatatgaagatcaccactacactatgtagttaattatgactttcaaaccaattttaaatcagctggctatagctgtcatacaattcaagtactggatagcttaaaataatgcattttaattttattatgtcccgttttcactcttgtcaatggcattgtacaggattcatcgtgtgaactttagatgaaatgaaagtgaatatatgcaattgtttaaaaacacaaaacacacatgtgaaatatttgaaattaaatattccttaattataatgtatatctttcgattcttttccttaatccaaataatggttaaaaaaaacaaaaagatgaagataagaaacacgtgtatatgaactttctcgtaaattttagaatatatattaacgatgcttccatgaggtatgagaatgacgcaggtatgatgatatcagcatgtttaggtcaaaattcggaaatttttttggaagggactttagaacttatttaaattaatcaatataaatttaa

SEQ ID NO: 4562 - DNA, 1404 bp, Cannabis sativa
tgctctatagacctctcaaagcaagaggtcttaaaaaagaagcacgttgactaaaaacaagaggcaaaagagaggttacacctctcattatacacagtataccgattttgtggacacatagaaatgagtacacttggccacaagataaaatacttattatcaaagatctccttctctgtactgagatagctccaagagaggcccaaacaaaatgtgtgaatatcacaatgacattggtcacacaatcaatgagtgtaagacttgaatgacaaaattaaaagtctaattagggatgggtcacttgtaagaatggatcaaagataggttgcctcacatgaatggcagacaagttggaactctagtgcttttgggagcaccaactcaggttctgcatgtgttagtacctccggaactattcaccatcaaccaacaactaaacagcccccaaggccaaacaaaagggtagccatgatctaaggaagaccacatgtaggagcaacaacaagaaatgagataaagagttatgccaaagccttagatcatgatggagaaatatgggaagttagccagctcacagtgtaaagaccacaacttatggatcaacctattacctttacagaggaagatgctaagcaagtacattttttgcaaaatgatccactggtcattaaaaatcttatcaacagcaaagctatctcttaattttttgtagacaatggaagttcggtgaaccttctatccaaggatgctttcatcaccatcaaactcaatattcaggatctttccccgaatggttcacaactcatgggatttagtgggactacccttgttcccatggggaaagtgagactccctctaactttctatccaaacacctcccaaaacacgttcaagtattgccccttcattgtggtagaatgtcccacgacttacaacacaattttaggtcatccgactttagtttatttcaaagctataacctccatcagacacttgtgcctcaagtttcccacacagacggttggaagaggaactgcctgtgggaatcaaggagaagcaagaaagtgttacagtgtggttgtgcagcaatatatttttatgatctgaaacactgccaaagcactcttacccaaaagtcaaaattaattggaccgtcacattggctctggaactgcattatagcctatggaggagattgaggaggtaagaagttttgatcaagacccaattagagttatccgcttaggaaaaggcttggtcctgatgaacagagtgaaatccttgttgggattttatgccctaaataaaacccatttcaatttaatctgatttgttatcaatagaagattagaagtcatatgtgtttacatgtaattttcttgttattggtttaatgtgtacaaa

SEQ ID NO: 4563 - DNA, 1306 bp, Cannabis sativa
taaaaaataaaaacttaattaaataataagggataaaaaaatgaatatttcgcttactaatattttaaacgagggtaatagattttatttatttttattttattttttgatattaaatatgtaaatgataatttttttctttaaaatatatctttataaaataacttctatatactataatttaactcaaaataacaatttagttaatttaagcattccaattacatttcttgataaagtaaataagataaattactattattctatttctaaataatcttagtaaacgacatattacaaatattgattttgattattcttcatttattttgttatatttttttattaatttattttgattctgaatactgtgtagtaaagatgccataaaagtaaatatgtttttgctaggattaaactcttgatctctataacatttataaaataactcaatcatgtcaaaagctaatattatatttatatttatcactttaaacaataaatatatattgtaccaaaccaaaatatgtgtacatttttttccaattttttttttcaggggggcgactgcctcctctccatccgacctttatatgggtttgtccatgattgtacacatgtcatatttttattgctacacacaattttaattacttaatatataaaataaaataaaattaataatttaaaaaaaatacaaaaaatgattttttttttcttctctttagaaccttcggttcattcttccctctttttattagatggactaatagaaatctctcatgtgtacaattgacagactaaggtcgatggaaaagtggaaaccaaaccaaaaccaaaaagtatgaagagtttagctctaaaaaatttagtgtgaggagttaatcttacaaaacattaaagttcagaaagtttagccaaaaattaccttttttttttaagataccaacaaaactaaagccatattaaaattaagaattataaacaatcatcaaatgccaaaacttaccattatcaaaatatggaattagaaaagaaaaagaaagaaaagaagatctgagaaccctgagccttcgatccttcgatccttttctcgctctctccttgttcttcttcagcgccggacaacgataacgccaaatgtcgtcacctacagagaaaagagtaaaagagatacaaatagtgaataaggaaaaaaaaataagggaaagagaaatctaagactacctgtgtgttggatctaaggattttgggggttggggatctcaaatttaggatcgtcagtccttttgccgtcggtctgagg

SEQ ID NO: 4564 - DNA, 1042 bp, Cannabis sativa
catgacatcgtaagatgtctcgctcgaatgaattttgaatcccaagacccagaccttgatcggacccatggaccaggactcggaccctagactcagacccaggtgagagaaaatgtaaaaaaaaaaatattggaaaaaatataagaaattttttaaaaaataatatattttttttaaaaaaatagaagacacttctgatgttttataatttttagtttttttactcaattttaaaaaaactgtgtgaaatccccaatattaaaattcattaataataatttatcaccttttatggtgcttgacacctttagatacccttcagtgctcaattttatttgtttttgtttcccaattgtgagttttgtttgttataagttttaccattgaaattaaaatgattgtaccattgaatggtatccttactttttttagggttgggcccgggtgacagaaagacttggtgggttacacttacattacatatgactaactattttgtattgatttatataattttcatcatttatttatacgaattatattgttaatacataatacatgacctatttatacaattcagttctggatatttccacatctcaagaactgaattgtatgaatatgaatatataattataatatgagaataatgatgaatataataagcatatatatatatatatgatatacgtcaacgtgggaagactcaactcaatcatggataagggaggatttttctcatctaatttatggtcacaaattgatgagatttcattatagccgacgtcaacgaggttatggagaacacccactttccttcgtataagatggaatatacattgcatgtacataatgcatgtgacatatgatattgcgtacaaaaaaaggttatccgtcccaacaatataggactttttttcaaaacaaaaaaaaaaaaaaacaaaaacaaaaaactttgaccaatcctatctcctatatataacacaaaagagccatatatccttataacacaaaatgtctagtcttacattattaattattt

SEQ ID NO: 4565 - DNA, 923 bp, Cannabis sativa
tggagattatttgaacatggaaaatatataaaagtggacctagatatcatataaaatggatttagacttgggtagctaattctacttgcaagatccttttttgctttgttgggttttgttgaagaccgagtttaaaatcgattgttgagtgcatggggagcgccaatgtgggcttttagcttagaaaataggatataggagtggctaagctaccaagtcttatttttgtacttattttgtatttttaggagttgtacttgaaccacctgaagaaagagagccaaaattgaacttggtcatcaaaaatataagacaaaggcacccatatatcctatctatgcactaggtctagtgctcatctcacttgggtggggtgctaggtgccttttctgaagttgttttttttttcttttttgagcaaacactgattactagatttggcattacaatctaacgggtgaatattttgtacaatcgatctggttatcaattagcttgttccttagaagatcaaaataactcatcacttcactgtcaaatgcttcatggtggcaagctttttggaaactaaacttaccttcaaaagtaaaaatatttgcttgggagagtcattaacaattccatactagctgctgttaatctgttcaagaggaaaataattaactcttctgcttgcaacctatgttcgaatgcttgggaatcaattggacatgctattttcagttgtaagcatgctaagtcaatttggagatatttagattttaatcctaattttgctgtagcaagtaggatgaatgatggagattatcttattcaattgtcagcaatacacaccaaatttgatctggaaaaaataatttgcacaatgtggtctatttggtctgacatgaataatattcttcgtaataaaacgcaccagaaac

SEQ ID NO: 4566 - DNA, 1475 bp, Cannabis sativa
tactgtttgatagccgaaatattatcccatttttatacataatcttattttaacatatatttctacaatataaaacttaaatagagacaattatacaaataactttatgtgatttataaataaagatttagattatatttgtggaaatgttactgtctttcactttctatcatcatctctatttctctcaacaacttataataaagtgaatttggacaaccaaagcacaactaattgagctggtccacttatgtgctgtaatatcatatccttaaaaaccaaacactatatacttcaattgcttcatcttccaattattggttccaaccaacatatcccaatattatatatttgtatattaatgactagctagttttaattaattaattaatattttataacactagtttaattggacatacattacaaaactttttttttgttaagttcacaaaatgagactatatagtacatgcctttatttttaagagagctaactttggtcccatatatatgtgacaaaagctagtgtgtgtgtatataattataatatatttatatagagagattatccatacttgatgatgggaaacaaggcagcagaatctagaaagttccatgatatatgttagtgtgttggattaagtgtttggagaatagaattaattaagggtaatgattaggtgtttattagatctttttaggtgaaagggagtatatatatatatattatatgagttgtagctgttgagtggagagaagacttttttttcatgatgttattgcaaagtgaagtattgagaaagagacttacaatcatagtgagatgaaatgggcatctcctctaaagctttgtggttgaaattgaagactatattactagggatatttgtggtacaatgagaaaaagactttgttttcatcaaatcacacaaaaagtctctctatgcagtctaggcataaacaggctaagttcgtgtttaaggcttacattttttaaggactcaaaataaaaaataaaaaatattattacttttatttaagtaaaattaaatgtattgtaaataataaatattcacagtttaattggttgacttgaagtgtgtatgtattgtacattacacaatagtgtgagtttgtgtccctctttttaaatatatttctaaaaataactttaaatccatatatttttaagatcaaccctgctttttatatatatagtatttacattttcatatacaatgtgtttcattattattctttctaaactccaaagtattgtcctcctaccaactatgtcatcattccaataatagagagcaatatagagctatagtacttattccatatactcctatgtatttgattattgttattattataaattggtattgggttttgaaaaaataaaatctttacagttggaattggcacctatagcatggccaaagtacaagtaagatatgtgctaactt

SEQ ID NO: 4567 - DNA, 595 bp, Cannabis sativa
cgccacttgtattgggccgaaaccgaaagccccaattaccttcaccaccgccaatcccacggtggccttcaccacgccgcctaactacgccggcagactatctcacctcctcgccctacaaggcttcgatcccctgtggtgccccacactcctcgtacagtacacccccaacaccatctccgcactcaaaccctatctctcccccatatcactcgactctctctccgccgtcgctttcacctcccgcactggaatctccgccttctcggaagctatcgccgccctcgaccaacctcctctatctcctgccggcgaagatttcatcatcgccgccctcggtaaggactcagagctcatcaacaacgaattcgttgctaagctatgcgaaaacggcggtcgagttaaggttctggttcctccgatcgcgacgccgagaagcctagtgacttcccttggggaaggccgtaaccgaagagttctctgtccggttccagtggttgtggatcttgaggaacctccggtggtgccagacttcctccgggatctcgagtcggccgggtgggtcccggttcgggttggagcgtacgagacgcgg

SEQ ID NO: 4568 - DNA, 1093 bp, Cannabis sativa
aagaactctaagaactgaaactattaagccaacattgtcctcgaatattttttgaacattttttattctttacaagtgaaatgacactatcaaagtcacgccagcctagatagtttttaattcgactgcaggaaataaagattttaataccttatctaagagctcgtttagacgcttaaggacccttcgtgagacagaaataacacctacttcacgaatttgatcccagtatgtagagcctattttgggagagacacctgggtaaatctcagataacataacttgagcctacatgattacaaaataaaaagacttaagtctgcatagtgcaaataataagcaatcaatacacacttgaaaaggcaaacaaccagaaaccatttctcttaaaaagaaaagttgcagaactttaactttctctgtgtcattgcatttctagtcattgcattttgttaagaaaaacattcatttttataattttaaatgagtaaaattattatgaccatctatgaaaaatagtaattacctgattcagaagctgctgagagatctttgctgaccgtgcagaagtagcagcaatatcgatacaaagaagaatctggcgagaaaagcatacaattttactacataactaagtagaaactgtagttataactatatcaaaacgctctgccacttgcagaggaaataaagaatataatacaagaacctacagcagccaaaggacctaattgggtgcgtaaagatgaaaaatctagatcttgcaccatagaagtcccatcagcagcacaagacaccacttcttccacctgggaaaaaaaatgtgaaaacatcaatgaacactaaaataaaggcaggaaagtattagtccacagacataaagaagtaaccacaatatttgatgcaagtactcacgttgaaaacatcaaaattcacaatatagaaaatgtggtgcgcaatattcatcaataataaataaattctcaaattcaatactattatcccactccctaaaatagctatagtgaactaccttgggcagaaatagaatttagattagtcataatctagaaaaagaaagaaagaaagaaag

SEQ ID NO: 4569 - DNA, 1348 bp, Cannabis sativa
tttgcatatacaccatatttttttaagtttataaaaacaactcatgttgagttagttttttctttttaaaaataatattaactaattggtttttaaaacaaaaaataacaaaatttttgctttttgaaaactgttttaaagtaaagtcaaattgaaaataattttctagttttttagttatgatatgaaactttgtaaagtcaaattgtttgttttttgggcattacaattaggaaacatattgagttgtaaaattaaaattatgtttttgattctgctaaagaattggtatttatttatatgtaaaaccaaattgtttgttttctgtcttactgatttagcatctccattttcatcttatcaatatatcagttcaaagaaagaattacaccaataacagtgtgttggcacaaaggtggtcataagtaattttttttaatttttaaatttgtttgtttgattttattttattttctaaaattttagttttgtgtttgaaaaatggtcaattagtttttttgcttgatgagaaagaacagtgtaagctaaaaattagtttatgagaaagtgggtgattagaacaactttcagttacacaacaattcgtattgccaagtgtcaatgactaagaaagattaaagagaaacgttattaatgaaagatcattttatttataggacaaatcccattgattaagatattcgataaattaattctacaataacaaatggtattgtatttcttgataaatacatgttacaagatcataaattcactaaagctaaaatcttgccactctgctctagctaaaagatatttttcaattttttacgtactccaaaaataaatattaaataaaagtactattatggggtgtttaaaggagtttagattaaaggaatatgcaacatttttattccctaactcatacccaaaaccacatgtctcaacttagcatcttttttggaaaaaatgatgtttctaagaaagagtattcccgaagatagttttttaacctggtaacttaggttgtccaattgatgtaaataatcatggtacaatagcttctttggaaagagtttgctctaaataacatattttattttgcaaattatcaaggtagagtgttaggaggaagtttttttagtttactaataggattcatgtgtgtgaaaagcgagaataaattataactccagaagacatgctcaaagattgatattcaaaaagaatataagaaaaaaaaaaagctatagaggataaattccaaacctttacttagtaaaaaaatgaaaagatgagtaatcaattttgaacagtaaaattgtttgttaaaaaaacgctctct

SEQ ID NO: 4570 - DNA, 1303 bp, Cannabis sativa
ctaataagaatatgaattttcaactcataaataagaggtcaaacaaacacacacggtacaccaaccattccattagtatgcttacgaaaaagaaataaaaataatgcaacttaccgtgggattgctcatgcttatgtagccttgatggaaaatgcaaaagctttcccacaaccagcttcttggcatacatgcttcctctcagtgttctcacattcagtgctgggggaagctcgaccctcattatgcagttcttcaacatgtctcttaatgttagctttgacagaaaattcacttttgcagttctcaattggacatttgaatagttttcctttgtgtatgagaagatggcgattcaagtgatcctttcttctgtaactggaagggcaatcatccacaggacagacatgcggcctctgttataaaattacaacaccataaactgttaaaacaaacgaacttactaacatgataactatcagagactaacataaaaatatacgcgcatcaaacctcaaactgaatgtagcgtgatcaaggtccacttgaaggagcttctcaggaggtcacccaacctgatactggtccattcaagtcaaaaccatctgcattttggagttctttctgtgggatccaatgcttcacaccaaaaattatgtaatttttgttttcaaaaatattggttcctgcccaaagctatcaatcaaaaattcgatctataagaacacataagaaatctaatgatttccattcagctaaacacccatgacaaaaaaaaaaacagaaggtacatccatatcaattaagggaaaaactcatattaccagtccacgaccccaaaatccacatttaaagttgtaaccaattgagagtaaaagttaaaagtaaacactaattgctgtatacaaacaacattcctcataaaaaaaattacaagctctacatgttagtaatagttcatattgacatttgacaataatctattgcatgaacataaggactaaaaaatatagatatcaaataaataagagaatatggaaaatggaaagtacctcggtagaatggcttagcatatgctgtttcaaataagcagctttcttgaaagtaagaccacatttttcacaagtgttttttgattcttttaatccctctgtagaattgtctcccccagccctcaccttgtccaactcgtcctgtatgattaaaaaaacacataaacccaagttcgaaacttgaaattccagcctcagtttactgtagtcatccgactacacaaagataaaactactccttattcgattagcaa

SEQ ID NO: 4571 - DNA, 2103 bp, Cannabis sativa
cagccactacgaagctcaatggaaatgaggccaatgccaaagaattgtgcaatgctgttaccaagcattccatttaccgaggttagatggcaaatcctgagatggacttaagtttcttgggggagggcgttgaggaagtcttagcttattgtgagaaggccaagaaagaagaagaagcagcagctaagtcggaggaagaagaagaagaatccaagtctcctacgatgtaggattggtttttaacctctcttttttttatttaagaaaatggcctttcggccgagacaatggtttgccccttgtggaaattttttgtaaagataaatttgcactgttggatggcaaacttttcttttattgcctcgcatctttagatttgaacttaatatgtttgcttatttgcgtttttaatcacagcttaaacaattatattttgatcaaacttaagatgctttaaagtaagcacttccattgatctcatttttcctttgagattgcttaagtagttattaatctactatatatgtacacaagcaattatattctgctatgctttctatttgcgagcagttcttatcagttctacttcgcacgagcagttataatctgtcgtttataatttggtaagcaaacttaaacgtactttgaataattcatcttatgaattactttgtacattttttgaatgctttatttgaatagttaggccttctattcatattttagtttaagtattatttttttcaaggcatctcggtgcctcatttataatacttgcctacataatgtgagccgttaatatttaccctcacatatagcttaatgttgttattatgagtcattctcattcactactgctacttcgtttttcctttctggagagaaagattcgatttttgactttatattgtccatacacaactttaatcaattatttagaaaaaaaaattaaagtggagtggggagcattggcttttttcattcaaatttatggggagcttgaagggttcgaccactaggtggtgccgactattccttaagcattgtgaatgactactcaagaagagtttgggtgttcatattgaagataaaagatgaggcctttgaaactttcatcaaatggaagaagttggttaagggtcaaacaacaataaagaaggtctaaaagttgagaactaataatggtcttgagtgatgctcaaggctattcattgcttacgatgacaagaaaggaattttcaggcataaaaaagtccctaaaactcctcagcaaaatgtctttgctgagaggatggacaggacattgattgaaagagttaggtgcatgctcaaaggatcaaatttgagagaaaatactagggagaagtagtaaagacaacttattatctcataaacatgtgtccatccattactattaattttaaaatccacaagaactatggacagaaaatgcccctaagctagatcacttgagattatttggttgtcttgcctatatccttatgaggcaagacaaactccaaccaagtgccctaaaacgtatgttcttgaggcaccctgatggagttaaaggctacaaattatggtgcttagaagagggacacaagaagtgcatcataagtacagatatggtattcaaagaagatcaaattgctatggcacaaatagacacatctgttaaggacaagacaagtgatatcattatcgaaagaagctcaccagttcagtttaaggtagaaatgcatcaagtcacttaaaagacatggatgatgaagatcaagttgttttaaatggagatacaactcactctaagcttgacaactaccgattggccagggttaggtctagaagaaaaataaaaccccctggtagacttcgatgtcttgattatgcaacattttccttgatcacagtagaagaaattgtaggtgttgaaccaacaacataccaagaagccacggacaactttgagagtgataagtggaacaatgctatccaagaagaaatgacttccctaattaagaacaagacttttatagtagtgaataagcctcctagacaaaagcctataggctataagtagatattaatgttggtttttat

SEQ ID NO: 4572 - DNA, 1605 bp, Cannabis sativa
ttgctctttcaaatattttttgagttaatactattttagatgttatattttgtaaaaattaccgaatgaactttttatttgttttaagtgataaattggaccttatatttttaaaaatggtacaaaacaataccatgagctcgatttcgataattttatttttaatattactaatttgaaaataaattctaaaacgaacaaatatagaaaatatacatagccttatcataacacctctagatcaggttattattaaattttattttgagaaaacatctgctcaggatattattttggggacaaccagttcatgtgaaggtttcgacttgtggtaagaggcttttacaatggggtgggagttacatgtgaaggtttccttcatccacgcggaagtatttctccgctctttttgtagaaattgtctaagccatccaactctctttttaacatattttcccatagcccacctccagggtgcacccctgcggctatagtgaacttaagctcatctttggacacttttcctactttggtaacttcgatgttgaagccctgaatgtagctttataaactttcttgcccctttgcttcacattggtgatacttgtgataggcataatgttatcacatgcagcctaatgttgttagaagaattcgtttgaaagttgcttccaagatgtgatcatcctcggtcttggccatgcgaaccatttataggcggctccttttaatgtgatcatgaaatattgacaccttgccttacatgacacctttttcatcttcattagctcattaaatgcaccaagatggtactttgggtcaatggtaccatcatatggtgtcatctttagctcctcgaagttcagtggaagtggtttcatttgaatatccctcgagagaggggattcatcatcaaactactcatcatcattcaagtctcccctgcgtggcaataactatcttttgacatagctcttgcatttctgcctccaactccatcctttctcatcctctctcgggggttagcaagtggaacttgggttttttgtatggtttttactaggcattgctcttggggaggagccctaggcgaggtgccctcagtataagacctcttgggtgaagtctcttccttaggttatgggtgtttccctcagtgaaatctccttatggtggataggctcgagttattttaactggttcgttgggctcttgtctcaggataggttccttccatgttcatctcttggggtgctattagtggatggcatggaatcacctttgctagcatcggccagttgagatctcgtttcccatttggtggcttttgtgacagaaatgtgaggcttaggttttgcctttgagtatatctttcaacacttttagcataccagctacagtagtttctagcctcttgtccttttggaagaggtcgcttacttcttcttcataatagtgagctcgagagcttggactcatcgagcacacatgcttttcctttttaggtccacgctttaaagggtcagggtttgatggcacagatggtggaaggcaccataccagagatggctttctcagtagttgaatacttctatcgatggggtt

SEQ ID NO: 4573 - DNA, 862 bp, Cannabis sativa
tcgattgaattgctcaacattttttattgtttagattgaacttagataaaattagcagtagtaaaaatttatatattcatattgattgactatttatattatactaatggaaatcatataccacctacaacatatataactgttttttgcttaaacaaaaaattaataaacctaagtacctaagcaacacattgataatcagagaggtagtttagtactaaaacaaaatgtatattatttatgtatgtgtattcattttcaataaccatggaagtttgtcctcgtggccacatagtaatgcaagtaagtgaccaagtccaaccacatgacaaatttgtatttggaaggtatcagaattgaaaaacaagagaaattttcatccaaagtaaaagcaactgtattaaccataaagaaaagaaaaagcagccctataaatagcttaatgatttgaacaggacccattacaaaggaaagcacaccgagcagagcaaccatggttgtccaagttgcaatatcttttctttcacttgcaacaagcaattagtcactgtttgaatcaaaataagaacactctttctaggactttgactccactataaatgataccaaagccacaagataagaagctagtaaagtaacaaacaaatggaatgagagaggaaaagctagaactgagatcacttaccagataaaaagggtaagcaaacagtgaaacgatagagttgttgcatgacataaatacaaacaaacacacatatattgtatggatgccaagattcattgttttctaaattataaactctaaaattatgtcaaaacatgttaatttaaaatgcataatgtgtagagaaagatagttact

SEQ ID NO: 4574 - DNA, 1259 bp, Cannabis sativa
taaattgagaaagagaaatcgagactaatttggaaagagaatctgtttgtgagaatggagttggaggaagatatggaggtttaagctgacacggtgtttaaagctcttgaaattgacatcgaatacaagtttgacgttatacggttcattgatttcactcggtagaaaactcaggcaaaggcttctgaagttgagttgtgcttaagtttgctaaatgctaccttttttctcgtgagtctttaaagcttcttgttttttctccattatgttgattcttgctcttatatgattgcatacacctaaaccatgtattgattaaaaaagtttgattgctttttttttttttgtggcataatgctaagtttttctgcatttttcatttttatattttggctattctagattttgaggcaaagatttttctcaaagaggttttttcttggtaaaagtgaacgtttcatctgaattagataaaggaaatctgagttcttcactttatggcagttgtcttgtttgtgaaagtgaagaaattttagcaaatgatgtgtataatgaagacaatgtgtatgattgtagattatgaagaattgtaaaaaggttgtttatgtaatttacacttttacaggaagctttgaattaaccagatttgatatgtttaggtgatcaagttaatgccagggtgttattcaccatattaaagattactgatatttacaagtgttctttacatttatgttgttatttttagtgaacccaattgataatctagttgaaagtactagcttttagcacgatgtttataattatgtatattagttctttcatgatatttattcgccacatgcttatttacccaagtaatcaagaaataatcacaagtctactttaccatcttgccataatggcaagtctaattaaatttgtaagctttttcatttttcacaggatggcttaccaagtaacaaaccagaaggtaaaactaattcttaggtgaaagcatcttgcaataggagctcagctttaatgaagccaacaacaagtaagcaaaattgacctgctcgtgagttggtaggtccaagtacttccttcagatcaaagtgattatagtttttctcacttaatcttatttgtctttataattacaatcgaaaagtaggggaaataatatttgagctaaaattattaattttatgtgtatgtttattagattgttcattgtgaatttagttactcaaggttctatgctgaaatagtatatt

SEQ ID NO: 4575 - DNA, 2036 bp, Cannabis sativa
  modified_base (1397)..(1398): a, c, t, g, unknown or other
  modified_base (1444)..(1447): a, c, t, g, unknown or other
gatcgataaactctttttaaaagtgcattgtaaaagtattcataattatatataataattaatggtgactagatttgtgtgctcgtagttagagagaccataattattgagagaagaacactaaataattttgtatttttgtaaatggactaactatatcttccaacaattcctcttgtgcttttctcttcatgtaagaatatgatgggtcctccattcccactaataattaattaaataatcattccattttgttttgttttatatttataagtttagctgtaaaaaaataaaaataaaagacagtacatctactcatgtcatccatttataattatagatacgatagggcataggtacaaatcaatagtacaatcatattgtatgaggcataaatatataataaactcatatatattattgagtaatttgtagcaattaaggttaactcttagatgtaaatgagttaaaaaaaaaaaacctttaagttgttaataaatatgtttaagtttaattttttgtattaataatacttaaattataattttggtttttcgtaagtacttaactgttaaatatcaaatcaaatcattattatacgtattatttttttattagtatatttaaattaattttatttaaaaaaatttaaatttaataacctagagcaatcaataattatattatacacaataatttacaattaatatttaacagcatgtacttaccaaattaaacttataaatatttatatcgaaaattagatactataatattcattcatatatatataaataaaaatatatagatggcatttttattttttagattaatatacgtatataaatgacatagtttggagtgtacgcgttgtgtatagtttcgtaaagccaaagatattactaataatttcccaaaagctcgtatgaacaaaagaaaaataacttcttactaattcacagttgtatgccactatacatatatatatatatattatataattaaatacatacttttatgtagttaattcaaaatcaagataaaatcacagcataatatatgtcacctacattgttctttgttgcttgcatgtgtgagttgtgattatgttttcttcaatctcactatttaattaaataaaaatattgctattcactaaaaaaaaaaaaagaacaactatgataattttttagttataatataaattttttgtgattaaatataatttttagtcacaacaaaaagttacttgtgattaaaatatagtatttaaatacaagttgtcactaaattagttttagtcacaacaagtattgtaactaaaaatacatttagtcataacaaattatagtttttgtgactaatatttttagtcacggatcttttagtcacaacannagaataataatttataattagtcttagtcacaaattttgttgtgannnnaagtaaaattttttgtagtgattagccacctgcggtgtttaattcactatataagatgacactttgcgattaattatatataaacggtttttataatagtcaggtctgactctatattattttgggccttaagtaaaaattaaaattggagcatttgtataaaatgaggttatttagaatatttgaacttttaagtttaacttccaaattattactctaaacaaattaatgcaacatatattattaattctattttaatattttttttttttttgtcaaaatggggtctatagtggggggcctaaaacgactatttcactcgtttcacgatctcatgattgaatctgatattttattatactaataacaacttatatatcatattgtgatagtactgaatattactactggcctctttactatcctaaacaacttatcaatacgagaatataagatactcaaattatgtaaaattaaaattacttgatattgtaaatttacaaattaaagaaaaatattaaataaacaagaagataataatcaaagaagagatacaactcaactcaaaggcataataaccttttaatgg

SEQ ID NO: 4576 - DNA, 896 bp, Cannabis sativa
gacaaaggcgcaaaggccaacaccgccagtgctaaagccagtgaggaagcggaggaggaggtaggtgatgtagtctggagtgagtgctgttatgcaaccaaagatggcatttagtaaacaaactatggttagtgagccttttcttccaaggaaagagtctgagaggtggccaaatattcctgcccctgaaaagtataaaatatttgtaacatatattagcaattgtatctactaaaaatgctaatgatattccaaagccaatagtgttattttgcttgtagggatctccttttcttgttaattcagtattgttttatttccctgaacttaggctgatcaagaatattggccttatggtctaaaactgttaaagtctcagtgtaaaacaaatcacgcaatggaattagaatcttgattaagctgccctccatctaactatacgagcttgcttgtaaataataattaaacagatgatcatacttaatttttaaaagcttggaagaaagggaacacaatttctcatagcaaatggtaaaaatctgatttcattactattactgagttagaatgaccaaggaatcctatgttagaatgaacaattcactcttaaaacctacctatcattgtataacacttctcaaaatgaaaaagaaactaagacacccattcattagaacggaattaggtgcaaaagattacacggtctatagtttaatgctagtgcccatcattgtaacaatgcatcttcgttgagtagtaaaatttaactatattctactttcgttcattcatctgtgtttctttccctcaaatacgaagataaggtgaactaaggtaaggcataattattcaagtgataactatcttatcctattatttgcttttaatttggtgaa

SEQ ID NO: 4577 - DNA, 805 bp, Cannabis sativa
ccacataacctggggagtttgattctgccgaacctttccataaaaatgatctacaaatagcattaatcttgcgtaagatcaatttagggagaatcgtgatttgtgcccaatatgaatgaatcgtaatgagcactgcattgatgagtgtaactcaggcggcaaaggagatgtttcttgttctccaaatgcgagttttatgcaccatcaagttaataattaaatcaattgtaatattttatatattaaactcattcatttcttcaattgattattctgatctagttagaatttagtaaatgtgccataaattttctttgttattagagataattgctaccctttgttccagattttctattccatcaagctagaaatatttcgactaataagattgtttggcttttcttttctatatgtcttacattcttggtgaccgtagaagctcgccaactaagttacttatttggaaaattatgaactaggaaatacacataaaatataaaatgactaagagcttgcatgaactcaataggttgtagagataaataaatgaaattattgctctttgaatgttcgcaataaaaaattttccaactccttcaattgatgaaggaggtttttataggagctttattaactgtaagatacatgtgtcaaagggacaagataatactttgatgaatatcaaatgacacatacaagtggttttggtattgaggtaatactcaggtgtcaaatcgtactcacacatgcagatggctgctggaattacttatacaacaattttatttattttcacgagttt

SEQ ID NO: 4578 - DNA, 1475 bp, Cannabis sativa
tttatttttttattttattttcttgctgagaaaaaaaaacattgtattatttaggtataggtaattagggtagctagtctagtctaggaaaaaaagagggaaacacgtagtacttaatgattttgtggtggattacatgcatgcataattaactatccatgaatctatgatcacaaatttgattatatatatattgaaatcctataatataaataaaaataactataaagttatcatcgatcagtcttgagataataattaatatatatctcacccaaagatatattgtagtacgtaatgatccttacaataataaaccaaattaaccctatacatagtatttgatgctcagctaggtatattacttttatggaaagtaggagagtgttttcttgctttcatccgaggctgatcctgaattgaaatggatcataagtaaaaaaaattgggcctttattataaaaataaatggtaggagaacttacccgcggacctagttcgccttagcctaggaccgactctgcttccatcaaacaaaaatgcatgtttggaaagttattgtgtaattagaattgagtataatttggagtaattataagatttaacatatttatttaattgggtaattaattgtacaattttttttgttttatatctaaagtaaaatatgagtattataagatattttttcaaaaaattttacaaaaatactttttttaatgcaaaaaaatatcttatataaaagtttggatcttggaatttaggtgagcattaagtacggatctagcctgctttatcccaaaattaagcttgtgtaattaaaaataatcgagaaatctcaattatgttttctaattcttatggtatccatgagaatatagggtatacttacactatacaattacacaatattataatttttagataatatataaatctatagaaaaaacccttttaagggtgcactatataaactttcccctatattattataacatatatatatatatattatatatgggtgattttataatgcacccacttaaaatggatgtattgatgcactctctatttatttcggcatccaaaaaaaatttttagtctaatttttttttcatattcatgtacgttatatctatttaagatatccaataaaattttaagaaattcggaataatttacaatatataaaacaatgttcaaaaaatctattttacacacgtataaaataaaatagtcacgcgtgcaacacattgtttgaacgcaatttttcggcgtgttaaacttttctaaatttcttaaaattttgcaagatatcttaaataagtataatttatatgaccatataaaaagatttcactaaaaaattattttagatactaaaacaaataaaaatgtatcgatgcattctttttaaggagtgcattataaaatttccaaatatatatttatagtatgggttcttataatgagtg

SEQ ID NO: 4579 - DNA, 1478 bp, Cannabis sativa
agcatctgcaaattaaatcactatgtgttatttaaacaaaatcatctaaaaaaactaataaaaacgaatactatatataattgtatatatattatatagttaccggaagaagcaggagaggattgttggctttaataagtggagtaagtgagtagatggtgccaaggaaaaggccaaggcaatagagagcagtaatcactggttctccacataatcccataattatcaatccactgaacaaataaaatatcaccaataaccatgctgattttaccgaaacttcacccgctgctattcctaaataatgtttgttcaatctgaaatacacaattgtattgtattataaaagacttgagttttagtagttcattttaaaagggcatgtagtttttattttcatgtaataagacccctaaaatatgttacttacttagacatatctacatcataaatcttattaatgaagtaggcattccaacatatgaaagcaaataggccagcaggtgatgcctcagctagtagagaccactcaaacaaacctgggctctcagtcatcactcttgtaaacaccgatctgcaaaaccaataaaataaataaatttgtatgagtagtgtaagtaactctatatatattatcaaaagaaaaatgtaagtctacaaaatttatgaataagtgtaactttatatatttagatatataaaaaagtcacatacatgaatgctacaattgttccaattattgaatagggcctcacgaattttaaccacacgtatccaaaatttggagccaccacttgaggattataactcacttcaccatctccgacttgattgtgtgcctagtgattagattaattttcactttagcacttaaaaaatataaaacattacacacaatgtgaagttgtttcaactaactatgtcactgtgtataataattgggtatacattaaataagtggcaatttctctctctttacctcttagttacatacatgtttggtactattgtattaggaaaagcatgacataaactcttaacaaatcatgatcctatcatttttatttacaaatgtatgtaaccattgttaaaaaaaaaaattgtgttttaataaacaaaatttctattatttaaatctttgtgcttttttttttttggaataatatttgtgcatttctagattttccccaatataatatacataaacatattagttaatcaaattattagatggttgctacatgtcatgagatatcatttacattgtatagctattttaattacaagttacaactcacaaaattttaactgatttttttcagatgaattttaactgaacattgatgccttgttaatacaatatatatacaagaatgatataaaacaaaattaggaaaaattaatatgaataacatacttggaaagaattgaaccccctcggctggctgttcaataatgatttgaaacaactatttctg

SEQ ID NO: 4580 - DNA, 506 bp, Cannabis sativa
cttctttagtcaaacttccttggaattaagtttgtgcgggtctggtattttttctttataaaactttgttatataaaatttcttacgatggccgctatgtttcttaaaaggtttttgctactcaatatttttccatcataactgtgatgcagtagtctattcgaaaaaagtaaaaaataaaattaacattcccttgctaagttgccaacacaattataattataccaattgataataatgtatatttatacatcacattgtgcacatatcacaacttagtttgttgtcttggaatgggaaccacatataaaatatgtatatataaactactaaatactaaatgggaatcgtatcaaacaaatagattaacgcactttctttctgcatgattttcttttctttattatgattactgcaatgtaacatttcacagtttacttgaactttttattaatgttcaattgttcacggcctttctttttattttattggtttatttatattgg

SEQ ID NO: 4581 - DNA, 1231 bp, Cannabis sativa
atacgacccaatttatattttggagtacataatgtcccaattttataaaaatgttacactttactccctaaagtttgcttattacaattttacaactctattttttgcacataagggtgtaaatgagaaaaaaaaagtgaaacaattcctaaaatccaaaagttttgctatctccaatcatttttaatgggaatatttcatttattattattaaaaaaaatagtatttttaaaaatggacgaaatgtgtaatctctgagtagtacaacgaatcatatgttgttttctctaccactacacaacacaacataattaatcatatttactcaaaatatgtagttaaatattactctgtttttttttaaaaaaaaatatgattggttcaaaaatgataaagttactgtgtgtaatatttgagtgcataaaaattagtaaattacacaatatatattcgaaaattacctcttgtctccatacatgattatcctaggcatattttgagtaaaaattaatgaacaaatagaattacaagttcgaagatatttaaatctgtatttttgcaataacactcattaaaaatgtcattggttaccataatacaacaatttctccatacatgtatttatgtcacacagactaaatgtttgtttggcccaaatgttttagtttcgaaagcccaaaatgtgtttttaaaacttggcccaaatgaccttttcaaagcccactttcagtgatccatatataccatcaccatgtattgtgctttaaatcacttttgatgtaagagaaaccattagaactttaggctttcgaattccaaatttacctcattagactatacccaataaatgtgcgagacctgtattgaagtttgattatattataaggtcttaaatttgggtaacacaaacacccaaacaccttgagcatggagtaatttggtttgacattgaataagagttttaaggatgagacattgtgtagctgaggggaaggattctattgatgaaagagacaatagacatgtaagcttcattccaaaattttaaaagcatgttagcctgagctaagagattcaacccactttccactatatgtatgtgtttgcgctcaatcactctattttgttcatgagtacgggacaagatactttatgaagagagagtctcatttttagttctcaacatataaatccaaatgtgcttagagaagacatcaagaaaactaatata

SEQ ID NO: 4582 - DNA, 2915 bp, Cannabis sativa
atggaaagaaatgttgaccatattgtatattgttattgttaataattcagttcacatacattggattcgtatatataaatatatacataaatttattattatagatacagataggtataaataatccaggtgtagcctatgtataatctctttaaaatactacaattagctagcttcaaaagaaattccggaaaaattaagaataaaattttaggacagcttttataagaaataaaataaaattattaagacagctcatgataatgtttaggttagccttataaacttgaattatattataaacaagtattatatttatcagaatgacttgcatttaatttctttgtttgtaaatcttatatatgaaatgtggttattttgttgatttaacaaaatattttaaaaatataaaaatatcgttattattagagttagttttataattattaattatatttattttagattatttatttatttaatttttgaaatgagtttagattattaatattatttattttatgttaattgaacttatattaattttaaattaatttaaatttacataaatattaataaattatgtgtaatattattttattattattatttttaatattaggagtaggtttaattttaatattttaaattttatatttatttgtttcaaatttttaatacattaaatattattttcttaaaaaaattaaaaaattaaaaagtagttttcattatcttataaaattttaaatataactaagtaatggtgcaattttagtatgtattatctatgagtatttattttattattggctatttaattaaatctaataattgatctttatcgttattaattaattttaaaaaattaataatatttcttgttataacttattactcgataatatgtcatatttgttgcttctccattatttgtttagggctccattatttccatttcaaaagacaacaaatttaaatattccatatacatttttgtgtatgatctattatttattttattttcatattcaatgattactaaactataccactacaaattaagtctttagaggcaattttttcagttattaataaaaaaaataaattaaatcattaaaatattctcgttcattaaaattgacatttaatgacgattatgttataaaaatcgtagctataaagtgcacctaattactatagctaaagtttttttcttttagtcgtggctgggaaatgataaggcatatatgtcgtctgttattatgaaataactaacaccatatgtaacgccctactaaattaggcacattatcgtgattttaatttactgtgcactcatttattaatcaaaagtttattaaaaaatgtgaataatttaaattttcataattaaacttaaatatataaatattttacatgatttaggatcccgttttaaagttacaattttttttacaaaatacattgtcacaaaagttgtcgtctagcaactatcaaaataaagtcttctatcctaaagatcgaatactcctggtctaaccgtcccaatatgtacaatctttattagctcgagctcactattgttcatcctttgttttgccttcaactacacatgtaaaaacatctgtgattcgacaaaatcaggaagaaaagcatagacataacataaacatacactgaattataaccaggcgcccatacacccattcacaatcttatcccgtgtccaacgtgtcctaagtctggaacgttcatacaatagtacgattgaccataatattagtctatactcggtactctagtcgtactaatgtgatatcaattcgtactttgccaaatatatatatctgtcggtattcagtgcaattctatgtacactattattgctcttaataatatgttatctaatatccaatcaaaaaacatgcacgctaaatatgtaaacatttatgcaactattatactagtcttaccttaattttgaactcaagtgtgtcgatcaactcaagtggaactatttacaggcccgtaagtcacaacatacgtaaaactggcaagtgatatgttaaataactttttgaggatttaaactcaaaactaaaagtttctctatcgataaataatgtggcaataccctaaatacaaagaaaatactaaaaaaatgatatttcgggaaaaataccccaaaaaaatggcaggccattttttctggttctaactgcttgtaatcgtttctgaaaaaatggcctcccattttaactacaaaaacataaagaatctcatttctcacacaaagctaacccaaatcttccaataagctccaaaatacctatttgaaacataaataacataattcatccaaaaatttcatcatgaactaacaaaaacataaatcaccatgaatgacctaattttgagcttaaaagctcaagcttaggtgtttctcactatcaagcaccaaaaccaataagaaccaccaagaataactcaaacataaccccagaaaacaattctcagcaatcccaaaactaacaacattttaaacctaaaattgcaagtaaaacttagtatttaagtaaagaaattaaaagataaaagtcttagcttagcttagcttatgaaaatccatagcttctactgaatgcctcttgaatctaatcagaattggtgaggataaattatgggttcttagcttttagtagtggccgaactaagagagagaaagagagacttgaattttctaaattttttgtaatttttagctaagtataagtaatgggataaacccatattattttataagcttaaaatctaataattctaactaagaaattatgaaaattccatttaataaagcaaactaaaagacaaagtcctattactttaacaataagtaaataaaccaactaggg

SEQ ID NO: 4583 - DNA, 703 bp, Cannabis sativa
tgtagataataccttcagtacacatagacaatttactttgacagtttagagttaaaattgaataaaaatgactaaatactaacagagcacaaattggatttcaagaataattgataccaaagtaagcttttaggagattttactgcaattaaatcttttattttatatttaacaaaaatatgtgtattatttttgccataagaaaaacactatgaaaataatgatgagaaaatggaatagttagagcatgcctagctctcgcaatttggagtatatagatagagggagcccaactcaactatttttcatttcttgcactttaagtgggaacatacagtctaatcactgcttttcaaaagctatatatatatacaaatatatacatgatgaacaccctgaaaaagtactacaccatgtgattaacctacctagctatatgcaatatcatctatctttctcttccactttttttttaaaaaataaataaataaaaaatagatgatttattgtaagaaaatttgcaggagaagagagagagaggttaattagtttgtattttcccaattttcccactaaatggtcaaaattaaagaaaatttatactggcatctcaatataattcatatatttattcgaatataaattggataggaaaaacaagacatgtatttgagcctctagcgacagttgtttgttcttttat

SEQ ID NO: 4584 - DNA, 2209 bp, Cannabis sativa
tctaatttgcttggtggtaatttgaataaaattgttcctttctcttcaataataataataataataataatagatattcaaatattgataattgaaaaattattaaaaatgaaaggaccttctataaaatttatgagacaaaatgagatttaattgtggttgaaaactgtgctttttttatttttttgaggggaacttagtgatttttatataaatattataaggcatgaatggatgtatcatccaaagggcaaacaataaataaattacattttaaaataataataataacaatgtgaggtaatgaaaacaattctatacaagcttgttgtcattaatagagtcctaaagagattaatcagcttttttcacaattgacttgagtgagtattaactgctttaaaaagtcagtgagaaactgaaactgccccatctaacacaacacaactcaactccaatgatgttggagaccaactaccactaccactactaatacatctcaaatcaactcactcattacatcctaaaatctaaaacacaaactgtattgttggcgaaacacgacgcaattttgtcgccttctttgttccaacacacttcgaatatgcctccgttacctgtgtatgttttcacgatcttcccgtcttttagcgaccagatatgcatggatctgtcaagggatccgctcgctaagtattcaccgttcgggctaaaggcaacggaatatacaggctccctggtgattgaaccaaaaagttttttaatcagacgaaaaagtaagcacataaaagactattatgtttttaatgagtttgagttcgagggcttgatcggttgttaagagtaagtacctgtgtccattcaaactgtagagaagtttcccatgttctacatcccacaacttcacagtcgagtcaaatgacgcactgtcaacgataaacacacgaaattaataatttattctacaaaacaaaatgtatgtagagcaaagtaactataactatatcaactcaacattcaacttaaatgagaaaagcagtatatttttaccttgccaacaccaactgcaggttaggattgtttgtcccggggccagtaggactccatctaatcgtgtatatctcctgtaagagagttattttaatgttacaaacaacttcaaacaaaaaaaaagggaggggacaaaaatattatggttatacagctttgaacattaccttagaatgctgtcttaaatcatgaacatacttatcgttcttcaaactccaaatctgcataatcattcacataatattcagtagaacaacacattaaacttcccaatgtcaagaatcaaataattaccacaaaacataaatacactgctattaaacacgagcaaataatatactacaatgcatttcttcaacagaatttacctttgcagatatatcatcggaacatgaagccaacaatgaaccggttggatcccattttacacagttaacttcaccctgcagaagcacaattttatagttattaaagcgagtgccgtggaatattttggcggtcagatatgatatgatgttcaaaattgaggtgccagatgaagatgttgaaaacctgatgtccagcaaaagttttgatagggcgaggttctccaatcctgaacacgtgtatcatggtgtctgtggagcttgttgcaaatgaattattgtttcgccagtctacgtcaagtgttggacctatataacaaaattataaatgttcacattccttgagcaagaaataattagatgacaggagagggaaccgcaaattgctaaagtatagatgcaacacctgcatgaaaatcaaattgttgtttacattcctctgatttcacatcccacactattgcagttttatcacagcttccggtgagaagataatccccttttttgttccatttgagagaaaatatgggccctttgtgtttactcaacgtactcctcagttcacctagaaatgaaacagcataatttaaattgaaacactatcaaaataatgcagtgttttgagaacctgatgagaataaaatttcataccgtttatattccaaattctagcctgtccatcgtatgaacctgtcgcgagcattgttccctcaccctgtgtatgagatagaaatgtgaaggttcgatgagaatggtgtagaaatacatcttagaatataagattatttattttc

SEQ ID NO: 4585 - DNA, 1858 bp, Cannabis sativa
  modified_base (243)..(255): a, c, t, g, unknown or other
tgtcaccaaataattattatctcaatattacccccaattctttgttagtagtagatgtagaagtaggagtaggataattggtgaaaatagagcttctataatgctattttgcaatgagactttgttttgataattttttgcaaaattaatgatctctttaagaattcctcacaaggttgacagagactatgttgtgaaaaaaaaaatatcacaactgttttatttgtttatttattattattnnnnnnnnnnnnnttattattattattattatgaacacagtaaaattattgaagaaagctatttagcaaaataattctgttttcaccaattattattattgttattgttatattatgtacaattgaagttaccatttatatatatcaaattcatgaaatattaaccacgtgatgtatgtgcacaagggtgaagatagaagaaaacttgaggtgggggtgttagaggcgttacatatttttatttggtggacactttaatttttttaaaaaaaattttttaaaaaattattgatcaattagatgtaataaaatgtaaattaatatatgtttaaaaaaaatttaacaataaatatattaaagtaacttttatgtggtgacattttatattattaattatcttgtgattcaaatctcaataataatatttagctttttctaaaaaaaattaaaataaaagttgaggagggtagaacttgtgacttccttaaactttcaaaagttctttaccattacaccaaataatctcacctcacttaacattatttgaatagaaaagtattgtttaatggccaatatatatatttaaatttgagttccaaatgccttaggaccagtcaaaatttaaagtggggcaactgccctctgcccatgtatgtgcatatgtgttttgttgaagaattagagtgttgatgcaatttttgttagttggtctaagaagatcgtaaaaaatatagaggactgcgatgaattaaatttaacttataaaactgcaataaattaaattgacaccagaggtttatagtagttcaccttttatgtcacgatgataatgggctacgtttacttgtattttttttaattagatttgacacacctaattaattatgttctcaagtgtctgtggacaataatacaacaatgaatttctaggtgaaatctatattgagacttatgaacacaagtctgatgaagtataaaaacaggatgtgtatcaatgatgtttgaggtcttagtgtcgactgagtattgtggactcaatgaaaaagatgaagagtaagtatggtcttcttggctgccgtcaaataggcctcaaagaaaggtttcagaaaaaggatcccctacttcaacctcttatttctccttatatagtttgtagggtttgttagtgatttcccacatgtcggggtgtctcactaacaaatcccgtatagcatcttttttaataaataaaaaattacaagaaaataaatatctataaaaatctccttgtttctaggctaaaatcccacaagcattgggaaaatggttactttggttgagggtgcaccaatttgaaatggaggggcttatgaagccttggttgacttttctcacttgtatttgatacatggatgttggaaatataacttagccgatgaaactcctttctgtgtgtagtggctgaccactgccaccaattatgccgaaatcgtggtagtggtcggccaagtggtttccataccacttggtggcttctttcacttagttttgacatatcattggtgaaaatgtattgttcacaaaaaatctcacttcccctcttgatgactgaccactaccgttctcttgtggcaggg

SEQ ID NO: 4586 - DNA, 1051 bp, Cannabis sativa
ttaggcccagaataaatttaatgtaagttgggcctggattagttttcagctagaaatggaaaacaaaatagggaattttcatttgtatggtttttaaagtataaatttataaaaatatatggttttcttaaaaaaaattatattataggaaaattttggaaaaaagttaaaaagtaaagaaaaaaatagaataaggtatctggttaaccccttatggtaattggttacccttcggttaccataagtgtacttagttacctttttatggtaactggttacccctcctgttatcataagtatatctagttacccttacttaatttttctatttttttcaattttttcttcagttttcccataaaataatctttttgaaaaaaaaccacattttcccacaaaatgtataaaaacccataaaatttataattttctcaacaaaataatcacccacaattttggtatttttatttttatgatttctcaggtacaattttatagaaatgtagtttttttttttatgggattttttaaagtaataaatttaaaaaatataagaaaaaaagtataacataactggttactcttaattatttttcctatatttttattttttttttaaaaacaaattatttttgcacacattgtacaaaaattcataaaatatgcaattgaaaaactcctttcaaactttatacttaaataatagaacaatttatataaccagattttttggtgagtttgaaattaaaatcaaaatcataatgttcaagatgatattaatgacactaataatttaaaccatacctatgatcttttgtaagaataatttttttttttttgaaacttttgtaagaataatttaaatgtataaataattagaaaaaaaaaaacatgtctaggcaatttaataaatgttttaagaaaaaaagtatatggttaaactaattaatttcattttccctttcaaataaataaataaaaactaatttcattttaaaaccaaatgcacactttttcttttaaacttttcgaattatttagctcaatttac

SEQ ID NO: 4587 - DNA, 570 bp, Cannabis sativa
taatttcatcaccaccattcaataactgatcaacaatattattatggtatatatgagtttattacattaataacaataatataaaattaagtgtaaataccattctagactttgtattgtaaaagttattgattggatatttatattgttaaatgataattctggttatattttaaaatgatataaaatatggggaaaaaaaaaaaaaacagttaaaggtaaccagttaccataacataaccatttttgaaaaaaaaaagtcacattttaaaaattataaaaaagaaagttcttttttgattaaaaaaaataaccaacttggagcctaattcaagcatgaagaaatatgaaaaaaaaaataaaaaaataagcaataacaccttgagattgggttagtattttcttcaactaatattaattggtttcaagataaaaaatacaaggtctcaattatcatttggaaaaaaatagagagtgaaattgataagtaattttgcaaaacataaaatttaaaacaattcttgccctaaaattaattaacagtaataccttgatttcttctatgaaaga

SEQ ID NO: 4588 - DNA, 1290 bp, Cannabis sativa
agaaaataattctctttaagagcaccatggccagatgtttccatcatgagatgagtttcaatgccatcttcattgagatgcacacctttatcaataacattcctataaccaactcggtacaagcaatggtgaccacctttagcggtgataaatctagtaagtgccatgctcgtacgagcatcggtcacaatagtcgtgccagggtgctctctcagcacaatggccgacatcagagcaatgagcttgtcaccatttattggattacccttgttgtccaccacaccgctacggtccacatctgtgtcaaacactattcctaagtccgcggtgttgttcaacactgcggctcttgtcatggccatggcgattttgtcttccgggttgggaatgtggttaggaaacattccgtccgggtttaggtggagcgagccgaaggtgtctgcgccgagtttgtctagtacatcccatgtgaagaaccctcctgaaccatttccagcgtttactattatctgcatacataaatgcatgtagtgtataaaatatataagagctagtcacattattatttaagagagtaatgatttgtgtacataaaatattgcattatcacaaataatgaaggcttaaaaaaaaactaactaaattgagcaccaaattaacaaaatgttgattaattctacaatggttttgatcaaaaacacaatttctactgtaaatgtgaaaacaattgctggtcctattttgatgatacaaataatttttttttttcacaatttcgaactaatcttagtgttaggggcccaagatgtacacataactaacttttagagccgaccctaaccatagtggagaatttctctctcaaaaaaaaataaaaataaataatcactcttgatcttctctcttttcaaagtctctcaatgttgacaatatatagcttctctctttaacagttcactctttttctataatgtcaaaatgaatacaaataaaatgggttgaaaatgaattagctcctctaacttgtagcactacaaaaaacgatattaaaatagatgttgcaacttttaagacttaaattctacacataatatgtcctaaatcatcataaaattgctaaaggagataagcaataccaaataccaatagtaccatactcctattgatgtaatatgaaaaactatgaattacttataaatgtatttttacacttatataatcatgttaaaaatgtctcatatttcccatgtgatgtatttttacacttatatatacattttatgtacctga

SEQ ID NO: 4589 - DNA, 1484 bp, Cannabis sativa
aacacattatggctaatcttaaaaaggaattctcaatcaaaattctttgtccattattttactttttaggggttgaagtactttcgaccacagctggcatgtatctttctcaatacaagtatataattgatcaagcatggagggtgtaaaatgaaccccaaaccaaccagtttaacttaaatatataagatatagctttcattatgaataagcttagtcaatgctcttactgttgttcattatgattcttgtaagaggctattcagatatctaaagggtactttaaatgatggattgtcaataaaaccaactctatctttttctatacaaggatatattgatgtggattgggatttagttgtttggatgatagacgtagtactagagttatgctataatttttggaaaaaatctcatttcatggtcaataaataaacaacaagttgtagcagtttagagctttggctaatacaggcatatggttaatgtctatattgtaggaactcaatacttttgtttctgttgcacatgttatttgagttgacaaccaaggagcttctcccttagaagctaatcatgttaattttaatcaatggtcaaagcacattaaaatcgaccttcaatttttacaagatcaaatcatagaaaagcaattggagctgcgatatgttccatcaaatgatcaggtggcagatctcttaaacaaactacgaaagattcatctacttaaaatccaaacttaaggtcttcaccacaccttttcacttcaagggggataataagcaaactctaccacgagtagttaaatcttatactttcttgtatagctttctgttagttagcacaaattgttagtgctaattagttttgttagcttagccaatattctaatctcctctttatataaataaagtcaagaatcttaattgagattaattttcacataaactttgtacactctattctttctaatgtcaaacataatattgtattgacaagttcttccaaacaccaacaatttttaatttttaatataaaaataatttttttcttgaatataaataagaaaaagattgcttcattacatttgaaaaataccatatattatattcttttagcctacgtctacaccgtccatatatataactcaattcacctaatgcatcaccgaccacaccttcgttttacccaacaaccaaagaaaggcatgtaagctttttgacattagtaaataaagtttcaatgttgtgagattttttatatatgcaattgttttttttcttttcatattgctaaaaaaacgtacagatcgatcaaagataatatttaaataagaacaacatcaaaaaagaaaaggacttcagcacgtgatttttcactcatacaatgaaatattaaaaaaaaaatctttgggtatgcgtggctaaggagtgatgggtatttcaaaatattatgaagatttgtacatgatgtgtactttggtt

SEQ ID NO: 4590 - DNA, 522 bp, Cannabis sativa
cttggaagcccacgataagccatagagaatggcttgggattcagcatcaagagctgaaggcgatgacacatattgagatgtgtaaaaccaggtattatcttcatgattgactaagataacagcaatccctgccttaccattacaccatgaggcatcagtaaacactgaaaatcttgaggagataaggctagtgcagggtatgatctttttggaggaaggaattctggtacaaggcctgtttgcatctatatattctttaaacatagcactaactcgataggagaaataagcccatcaggatttgtaagtttgatccttgatttattcctttggctccaaatttcccatgaaacacagccgaagtacagcagggtaacatgaggcttatggttagggaaattagacactaaattttcaataaattgagtgatagaattacccggtatcacgtcaattcggatcggaaattcccccaaaagccagaaagccttagcaaacggacagtctctgaagatgtgaaga

SEQ ID NO: 4591 - DNA, 3459 bp, Cannabis sativa
ggtccaaaccaactcagattccaaaaattcaaatgatgaaggccacaccattctacctcagttgaatgccctgcaataccagcaaatattgaatcttcttgccagtcaacaaacgggtatgccaaactcagatcctagtccttcttcagggccaacaggtatcattttatctcatcattatgtcactcctgataatggttcctggatagtagattcaggagctactcaacatatatgcaacaacataaaaatgtttcaatatgtctctcatatatgtaaaactaggttgattctccctaacaatgactccttttttgtccatcaaagtggttccatagcagtaaacaaatatcttactctgactaatgtattatatgtccgtagttttaaatataatatactgtcagtcagtagtcttactaataatggttctatttctgtaaagtttcaatctaacagtttttatatcctggacaagcacaaccagagggagattggcagaggtaaggtcatcattggcctttatgtgatggatgccttgacccaagattcatatgccttctctgttgtgactgcagaactttggcactcaagattgggacatccttctcaaagaagacttgcccttctaagtgacaaattagattgtaatgttagctctttacataaaaatgaaccttgctatatctgccctttggccaaacaaagaaagcttccatttcctaataaaaatgcttttgctgccaataaatttgatattgtccattgtgatacttggggtccttatcatattagttctcattcaaactacaagtattttctaactttggttgatgatcacacacgattcacttggatctaccttctaagacataaatctgatgttactgaaataatacctcaatttttgtcttatgttcagactcaatttcaatgcacaatcaagaaatttcgttctgataatgctcctgaacttgtgtttaaaaatctctttgcccaacttggcatcatgcatgacttctcttgtgttgaaacccctgaacaaaacgcgattgctgaaagaaaacatcaacacctattaaatgtggctcgtgctcttttctttcaagctaaattgccaataatattctggtctgaatgtgttatgacagcagcttttttaataaatagaactcccacacctcttcttaaaaataagactccttttgagttgatttttggcaaagcacctgattattctaacctcaagaacttcggttgtcttgcctttgcttgtactcttacggctcatcgtacaaagtttgcaccaagagcaaaaccatgtgtttttatagggtatccacaaggcatcaaaggttacaaactctatgacttgaatagcaaacaaatattcatatcacgaaatgtgattttccatgaaagtatttttccatttcagactctaaataaatctgatattgatgttgatcccttttcccatttagtttttccatcttctactatatctaacacaaatgtaagtgattttcctacagaaaatcatactgacagtactaatgttgctggtttggccaaggatactgatttgcaccaggatactgctactgccgtgccttcaaacatggagattatttcatctccgaataccaactatttccaggaccctccttctacaccagatattgattcaaattcacccaacagaacaatatccaacaacaactcatccaatgatctaccaaggagaacaacaagaacaacacgaccccctgcatatctcagggattatgagtgtcattctttaatacaggatcaatcatccactcctcactccctaacaaaatttctttcttatgataaattgtcaaaatctcacaaggctttcattcttgcagttactgccctctttgaaccaagaaattacaaccaagctcgacaacacaaagtgtggaatgatgctatgaacaatgaaatatatgctctccttcgaaacaagacatggactgtggtgaaacttcctcccaatagaagagtcattggctgtcgttgggtatacaaaattaaattcaacagtgatggatcagttgaaaggtgcaaggcacgattggttgcccaaggttatagccaacaagagggattggattttttcgatactttttcacctgtagcaaagatggtaaccttcaagttacttctagccatttcctccatcaagcaatggcccattttgcaacttgacatcaacaacgcttttcttaacggagatctccaagaagaagtttatatggcgttgccacctggtttctctccttctcacacagaggacaattctaatcttgtttgcaaacttcacaaatcgatatatggtctcaaacaatcttcgagacaatggtataaaaagctctctgacgctcttttaacagccggtttctctcagtctgcagccgattacactctcttcacacgcggtactaatgtcgacttcatcgctctactcgtttatgtcgatgatattatcatcacaggcccgaacattgctcttctccaccaactacaagactctctcaatgatcaattccaactaaaggccttaggtccacttaaatactttctgggttttgaaatcgccagatcagatgacggtgtgttcttatctcaacgaaaatatactctacaattgctcgaagatactggatacaccagcagtaaacctgccaagactccaatggatcccagaacgaaactcgacaatgaacagggacaccttcttgatgatccttcttcatacagacaacttataggcagacttctctacctcacgctttcaagacctgatataacttttgccgtcaacacgctgagtcaattcatgtcatctcctcgcaccacacacatgcaagctatccatcatttgcttcgatatctcaagggcagtccaggtcagggacttctttacagctcaaaatcttcactacacctaagaggcttctccgattcggactgggctgcttgccccaccacgagacggtctgttactggtttttgtatattcatcggtgattgcctaatatcatggaaaacaaagaaacaaaccaccgtttctaagagctcagcagaggctgaatatcgcgctcttgccagcaccagtagtgaaataacttggatccaataccttctagctgatttccaaatcaatcaacctacacctgccttcatatattgtgataaccaatcagccatacatatcgcaaataacccaaccttccatgaacgtaccaagcatattgatctagattgccacttcattcgggaaaagattaaagcttcgactattcgcctcataccagtcaacacaacattgcaattagccgatgcttttacaaagcctcttccctctactactttatcatctcatattcgcaagatggctgtatttgatatctacagtccatcttgagg

SEQ ID NO: 4592 - DNA, 789 bp, Cannabis sativa
ttggacgaacaaaaaagagcctaataataataatctcttgtagtagttaacatcataatttgttttcttgcttaaaagatagtggtaattgggtcaaatgtcgttctcttctacaactttggtgttttcaatgacacaaacattaattttatacaatgtattattggttggaacggaagggatttcatcaccacaaaatccttttcatgaaaatgatataatgaatatgaggattgctatattagagtgtttggttagaggaaataaaatagtatagaataagaaggatttttttttatcaattttttttatttagttgtattttaaagtatttaaatattatttttattttagttatgtttttattccttccaatcaaacactactgtttgttatgtaagtctgaattagagggaataaacatggagaaaatatgaaacctatatgtttgaggggattaacattaccactattctaattaaaaaagtgaagcttacttagaaatataaatcccttgttatttaatttaatttaaattttacattcacattctagtctaaacttcataccaaatgtctcataagacactagcaatgtttagcaccgcttagaggtgtagcacattataaatgaataacaatactcaataataattatattaaataaattaaattatctataactcgatgcttaattatatcaataataatataacatttctaaatgagtgctgccttctaatatttctaaatgaatatttaattacaccaacttaaatttgacttaata

SEQ ID NO: 4593 - DNA, 622 bp, Cannabis sativa
ttttttttttttttaatttcagtaaagtcactactttttagttaaaagaaaagtgcaataaaaaaaatataaaaataatttggttggaccaaatgaaaagtggaaaattcccaaagaattatttcacacttctctacatgaaatttatataatatgtagtaattttaactgagagcaataaatgatctatttttcaaaaaaaaaaaaaaatttaatatagtaattttatttgcattcaaaaatttatgaaaatacattatattttatttttttgatttttttgaatagttttttattattttgtataatatatatatgtattttaatgtacatacccactttctttttcttctcaaatttaaaaatatatataaaaaatattaagataaaagagaaaaataaaaacttatatgaaatcttgttagaataataatagaataagatttcatatacattatttatatatatacgaaaaaagaataaaaaaaaattattgtaattaacacagaagagtataaaagaattttttttaaaaaaaatattgggtgcttatataatttttgggttttaaatataatgctgctttttcatattgggcgaggggaatcaattgggacatcct

SEQ ID NO: 4594 - DNA, 842 bp, Cannabis sativa
gtggctgcagctgagccgcgaggagccacgaggccagggcgggagttgggggaggatgaggattgtgactgagaagaacctctcaccattgttgagcgtgtctttgaaagaaggagacaggtgtgtttgtgtgtgtgagagagagtaaatttggtcactgaaattatttggtttggttggtgagtttaccaaatccaataatactgtatttataataaaaaaaatatatctttttttaatgaaataaaatatatcttattaggaatataaatatatcaacaatattttttaacaaataatatcatagatagaagataatattgtttgttattgtttcaaaaattatattttaatttgtaacaaatttatagatagaaaattataatgagatatttatttttaaacacataatatatttatatttatatattttttaaataatattttaagaataattacataaaatatcaattttgtaaaaattttatactattaggttcaaaattttctttttttattcatttttacgatatttgttaaaaatacaagaaaataacttaaaattaataagaaaataacatcaaaacaatatcaaaatgacataacaaataatataccgataacaaaaaatcaataataaaataataagaatgcaataaaaaaatacaccaaaagtcttctgaaaagtgtttaaaaatgacctttatatagctaaaaaaaagataaaaccctaaatttctcaaagtttaaaagagacgggtcacgacactgtggcccgtgtcttccaggcacggaaacccccttcaaaaattttcatagcgggccgcgacactattttgtag

SEQ ID NO: 4595 - DNA, 2726 bp, Cannabis sativa
aaaataaaaatacagagagagctgagagatacatacctcgagcccgattattgcaaattaaacactttcaattctatctccacaacacaatatcccaaactctggcctaagcatacacaatgaaataaaaaattacaaatctaaaagatcatgatctatgcaaataaacagaataaaatttactttgtgaacactaacatcatcagtacttcataaaatctcaatcatcttaaaattgaaaacccgtcttgttaaatgtgaaaaatacttaagacagaagaaactacacattaagcaaaatcagatgaaaatagaccaaataaatataatggtgagagtgtctacgtatacaaataccaaagcaatatcctcaagctaacaaaaaatagtattggactccacttactagtagctgatagttttatgcctcccgcaaaagatctgaataatgagagtattttaatgtgggaacaacaccatctcttaaccaattaacaaatacaaatccctgcaaataatcagagcttaaggactcatgtttccaaaattaatttgtatgaactaacattcagcaaataataaaacacggcctcttttgttgcttatatttttcttttctagattacatattacatatgaaaagataaaagagaacatacattattattatgaactataaaaattacaaaataaactcgacatttgctaccttctgacagacagatgcatcatgcggacacaaactaataattcaagcttttttgtgcagatacaattggcccaacaatggcagttctgagacaagatatttatcagaatattcaggtagagatgtagaggtcagaaaaacaacacaattaaattataattacatcacacatatatatagtaccttggggctgcggtctccctgcgccgtcgacggcacgaaatggccgactaagattcgacggagagagacgttcgcggttgcgggttttagggaccgggaaatcttgtggtggggtccgattggaccgccggtgacgaaaaatacgtccggggctgagcggagaagctgtgtgggtgagaaggtgagaagtagagagagagagggaattgatttattaattaatgattttagggaaagtaattggggattttgacctttatttattgaacttgctcttactggccctaaatatgtaattgtttttagaaattgagtttttttttttagttttaacaaaaaataataataataaaaatattgtacaaatacctcttacacacaccttcaacctaagacttgtacttcctgagcaaccttcggacattcgcagcaacccaacgcaaccgaaacgaaaatccaacaagaaagagaaccataattattaattccagcgacttcacctgagaagacaacaagaattaatcaaaacagaggctgttttaaatttatgaacaaaaattgcaaaaaaactactacgaaactaaaattcaaccaaaaattcagtttaattcgcataaaactaatgtcctgactttaattttcagatcccaaacaacccaactcaagtataattcaaaaaaaaattacatcaatattatagtaaaatgtttatcctagtgtattttcgttgttttccaaatttctcatggtgaatttgttcatattaattcacgaagagacatgtagatagagttacgtacgtagaaacactgttctgatttttaatgtttcataacagttgcattacagttttataaacattttgctaatagttatttctccacatattactattaaggtacaagtaattatcgatcaatgacaaaaaaatactgacaaatagtttcttacatatacacatcacccttatcaccctcgcaaccaaaggtgacaaaaaacagaccatctacatgctcagtaacagaaacagggaacctacactgtgataaccagataccagataggattttcatgagagaagggcgattatagggtcggatggtatggagcttaagaagaagactaatagtggtaggggaagagttagaggaactggcatcataggtaaaaatagtactttcatcgggtgggaagactaaagtattagattcagtgttaagaaaatcatccctattcaaagagaaggaagtacgataaacaacaataaagaaaataagaggagaaaaagtgagatgaaggagaagatacctgaaccttactatataaagatagaaccagaacactcttagaatccttctcgagtactccctagtcacatccctagcttccaccatagtagcacaatgatgaagaaggtctgtatggcttcgggaacctagacgtccgcccccattttacaatctccaaggggtagaatgatgaggagcgatttgagaaatcttaattaaacggcaagaagacgaaaagggttaatggagtaaaatgagaaacaaaggaaatggaaaagggcagattaaagaaggcaatagtaagcctcagagcaataaatgctctcattaaggaagagagaggaaagtaattgacagttgaatgaagaagaaaatgacaaaccaccacttaacaattcaaggtggacgagatcctccatagacaggaccaagaactcacacaaggagtagagggatcgcatacctaatagaaggctctagagagaaaagactttcataaaaaatcggcaaatatatagaggaaatataatcaaactttttttttt

SEQ ID NO: 4596 - DNA, 1109 bp, Cannabis sativa
ggtagttggaggggagtggttaagattaaggtggggtgaagagtgagtggtgtgtaagcccataagtgtggtttgtggctagctgagatgttgtactccataagctgaagttggttcattgaaaggggcttcggatatgatggaggcttggtgaaaccagtaaggaggaggcggagccaaggaagcgggattggctatctgaggtcccagctgagtgcgggagcaggcaatgtagaagggattggatgtaattcgaattttggctcctaaggactgatcatagtgaagtagaggaggagttgaggaagagtcacatttagcaaaaaattcatggcaatgattcacaatatggctaagtcttccacagtaatgacagaaatcaggtaagttttcgaagcaaaattcgagccaaaccggggcagccatgccatgaaaatggaagcccgtaccacgcgggagaggctgagttacatccatttctattcggactcggagataaggaccccaagtctctttgagggatgctgtatccacttcgataaactgccccaggacttcaccaagcctttgtgcaagagcacgggaccgttttaagaagggaataccatattaatccactccatgacttggggtaaatccatggaccctccaaaatggtatttaccctaattataaataaaaaatatattaattatggtgtagtttttaagaattaatttgagccatttgattaaatcaaatgctacaaattactatccctattgataagtaaaaattacaatacctattgtattagctcccatcatatatataacattagtgtcccactaatattagtgtgacactatagactacaccaaatatatttttattagtttttaatatttaaataatatatttataagtaaatttttttgtatatatattctttgtgtttatttataattttataaaatatataataagaataataaatataacttcagtattgcgattggaatagaaaaaaatttagtgttaaaattctattatttttgtgttgatttaacactaaatttaacatttaccattaaaattgccaatagatgctataaattttaaaataaata

SEQ ID NO: 4597 - DNA, 676 bp, Cannabis sativa
cattagttaggtatataattttataacagcctgcaaatgatgttagtctaagaccatcttcaatgcatgatacaaatttgatagcaaatttggctcaaaaaatacctcaatgttatatttagcttaaattttctaattgtactccaatgcatggtatattaataatccccaaaattataaagcttttaattagtaaaaattattaattagtgacaaataagtgaataaaaatgtaactttaattgtggtgtaaatttagctcatactatatcttgtattaaatttggcccaacttttaaattgtctcaaatttgtcatgtcttttacacgactattggagcttattttttttttaaaaaaaaacaataaactaaaatataacaatacactattatcataactctctattagagatactctaaggccacataaggaaattacttcaccatcccttgaaaaagggaagcgttgccctattgttaattgactaaagctcgtgtatggcactgcttcgagggtgtcctacactggattgaccactaaaacgggtcatagcatgctccaattgttggatttctagtcgctaactcatgagtgagcaactattagactccacaccacctcaaggtaaccacaatctctggctccacagagcacacctaagagcatctccaat

SEQ ID NO: 4598 - DNA, 1471 bp, Cannabis sativa
agaagaggagaaaataaaaaatgttcatgccataagtcagattttggatagattttgcatcataataagttttcaacattaaagcaaaagtgtacagtggtaatagaccagtatcgaaatgtctggaggtgcgaacctgttagcgcggatagaataagaaaactattgctaaatcaaacaagctagaattgacatgtaacgaacctcattgcatgattgagtatcatcagtactgtaataaacgaatatccatggaagaaacccctaaaacacagagacaaaaatttattaattggtgagctagacatgtagaacttgttacaaaaagcaggatcggaaaacagaaagagtccaagttacttgttcatcacagcatcaaaatcttgaaccaatattgcagcagcattgaagatcattccaaaaatatacagccaaaagttttgcacatttatattccttgaagggcgctttttaattatcgcctgcagcataaaacaaggtttcgtaaacagttatgtttcagtttcagtacactcagataccacttgactcagtggaggtttgagtccctatttattagtgtttctaaaaatcatttgaatccaatgtgaacccaaacctaggttaaaacaaagagcagagattataagaaagacaagaaaatcacctcagtgtaaactccagcaaaaccacttaagagtgccatgacctgcaaaattggtacaaacacttgtgatcacgaataaataacctgttttttttttttttggaaagagacgagagcctgaaagctattgaaaactcacaatcgccatcatccaaccttgtaaaggtgtttgaagaacatgatcagaactgccaaacaaacaagagataaatatgtgtaagagacgtttaatgcagctgctttaaaatgttgcctgatagttgaattttatcctcgggaaggttataatgatataaacttattaacctaagagtgatggacagtgtataagcaatagggatcctcaacccctgactgatagtcaacaaacaaccaaagagccctaaacagactctaatggccagcatgctaaatttgatactcaaggagacacaaagatgtaattgaatgatgctgtagactcttactttgagttcagttgtgctgtggtgcatcctgcacatagtagaataaacgccgcccactgaatctgacttaacctgcaatatatgaagtaatcagaacacgattcttgttaagaatattgcaaggataatatgacaactctccgctgcatttatacaaagttaaattgtttagtccatccagtctcacatccaaaagcagctctcctcatgtttgtaccgataaaacatggttttctccttattgacaatacatacgtacatgttttctcaatttcaattgaactttatttgctcactaatgtctctctttgccccccataaattcagtcatttcttt

SEQ ID NO: 4599 - DNA, 952 bp, Cannabis sativa
tgagcgtcacccgcctcttcaacttggccttcatcaagggctttagctaagttgcgtgtgcgtttgagcattttccgaaactcttcagcattaaggcattcgggccgacctagccttgccttccgagagagattagtcttgggggttgaagccgaggcagttccaatagcaaactgagggggttgtgtggggttaagatccgcaaggatggtcgagaaggcttgggaaacagggataacatggtgattatcataagaagtagccacaacagtagccgtagtggtgaaagaggccttaggaattgaagcctgaagctgttcagcagtggtgacaggagccgagtgattgatgttaatgttgggagagatatggtgatgaggggacatgtgaaagcttgaggaagatgtgatagcagtagtaaatcctgaatttggagggctggggctggggatggtaggttggttaaggtcatgaggttgttgaggaagaatatttggtgaagaagtagtcatataaaaacgaagggaagtagtgtgtggttgactcaagggatgcataccataatcagagggagagtcatggaaagaactttcagtgatgataaaaggttggttgaggcggtataatggtgcaggagccaaaggacatgggttagcaatatgaggtcgaagccgagtccgagtgttagcaatataaaatgggtttgaggtaactcagattttagcacctaaagattgatcatatcggagtggcggcggagcggaggaagagtcacatttagcaagaaactccgggcagtggttcacaacatgactcaaccggccacagaaatggcagaagtcaggaaggttttcatagcggaattcaagccacacaggggctgccataccatggaaatgaaacccagtgccacggggaagaggctaggttacatcaaactcgatacggaccc

SEQ ID NO: 4600 - DNA, 597 bp, Cannabis sativa
acttttgggccttttttttttcttctgagaacactactcaatgaaacttagatcaaaataaagttgttagttgatcaaaataactcagtaatttaagtattcaaatgttgaaacctcttttacgagctcaaagaaattgttgtagcgtgatcaatcatgaaggtcaatgataatttctattaatatcacatagataaaaattattgaatttggattttattatcccaaaaattactcaatatggcatgagataaattgacacgtaacaaaaaaatagacagctagtcagtaaataataaggaagattgagagtcggatgcactagctggaagataataaaatataacacactattaaaattgttgaatcaggtaggaaaggtcctagagtgttcaactggccaatcacccaaccaattgtgtaaattgtctgactagtggtgcctaactgacatggagcagcataattcttctcaagagtttcatatgaagataatctaatcagttcaaccgaccagtatgtttgacttattctaaatctacgaaaatagttcctaaattcctaaaaaagtaggttattgttaaaattagacctctc

SEQ ID NO: 4601 - DNA, 3528 bp, Cannabis sativa
aattaggtccaaacactcgtactgctgagtctttagtatttaggaacactcttcggagcaccgtgtctcctatgaagaatttttttttcttgacatgtttgttgaagtgccttgctaccttttgctagtagacatgcagtgcagcttctttaggttgggttggcttggcttgttctcttctttcttctacttcgtcaagggactctgctagcagggtgctgtttgtttgtttgtcgtaggttgttcttctatgagacggtggcactagctctacaaggaacatcgcatcatagccataagctacagctaatggagttttcccactggccgtcttttcagttgtccgatgcgaccataggaccattgggtgcagttcaagccattttccttttgcttcctcaaggggcttcttcagggtgtccttgagggtttttttgacagcttctacctgcccattttcttgaggatgggtgacggtagagaagcttttgatgatgccatgtttgttgaagaaatcagtgaacatgtcactatcaaactatttgccgttgtcagacataatcttctatggaaggccgaaccgacagataatgttcttgacaacaaagtcaaggatcttcttggaggtgattgttgccaagggttcaacttctatccatttggtgaagtagtctactatgacgacataaaactgtacccctccttttcctttgggagttgaccaattaagtcaatccctcacactacaaagggccaaggagatttcatcatcgtgagctcatagggtggagctcttggtatctttgataattgctggcacttgtcacatattttgacataatccatcgagtcttcaatcattgttggccaaaagtacccctatcggagtatctttctggactagctttaccccctggcgtgattgccacagaagccttcatgcacttctatcataagtcgttcagcataagctttggtgacacacctcatgtgtcatagagaaactccgtctgtacattatcatgtctaggattaggtacctagcagcttttcttcttaattttctagccttgtttttgtcttcgagtagggctctggtttggaggtaatctgcaataggtgtcattcatgttggtgtgtcatccaacatgtcgacctcctttgggaagacaatgctgggttcttcttggaactagatgggcagcaggtttgctttgttagctatggtactactcgctaagtgggcaagtgcatctgctatggcaaatgtttctctggggatctacttgattgtgtagcctttaagctgacttaacaagtctttaaaattgcttaagtaggccaccattttgtcacctcgtgttgtgtattcacccagtagttgattcacagctagttgagaatcgctaaatatgtctaggtggtcagtccgtacttcatgtgctagcttgaggccagctattagggcttcgtactcagcctcattttttgaggctttgaagccgaatttgattgctctgtgcagttgttgccccaaggtgttgtaagggcaatgcctgcaccgaacagttggttagtgtagcttccatcaacgtggagtttccatgttaaaccttcaagattttgttgctgctcttactctcgcttcttctctagctcttgattttctcctgtgtcttgagagacctcaagagttgagttggtgcactcagccacaaagtctgaaagggcttgatcttttatggatatccttggctggtatgtgatctcaaactgggcaaactctatggcccatttgagtagtcagcctaatgcttcaagtttctgcaaaacctgtcgcagtggttgatcggtgcacacctttatggggtgtgcttggaagtagggcctcaactttctagaggccaagagcaagctttaggttagtttctccatgagtgggtatcgactttctgcgtcgaccagccttttgctgatgtagtacacgaagagatgctgacttggtcttccttttagtgagttgtacttccatgtggcacaggttatgtccacgtaagcatgccacgtcatgaggacgaaaattgggataacattatcattttggtcttctaattaattctttatcctttagtatcattaattcaaaaatggaagtataatttagatcccatctaaattttgtgcataactttccagtctcacaattaacacttaaagggatccaacaatcgatgtgttttgagaaatttttagaagtgattggtgccagggttcagcttcttcccacttggtaaagtagtctacaacgactacggtgtactgtacccttcattttccctttggtagttgaccaattaggtttatcccctatactacgaagggccaaggagagtgcatcatcgtgagcttattgggtggagctctagggaacttcgagaatctctgccacttttaacattttttgacatattccattaaattcttgatctttgttggccaaaagtacccgtctcagagtatctttttggataggctttgcccccaacgtgattgccgcagaagccatcatgcacttctatcattaaccgctcggctttagttttggtgacacaccttaagagcgacattgagaagctccatatgtacattactccatctagaattatgtacctggcgacctttcttgtcaactttttggcctcattcttattttcaagcaaggctccaatttagaggtaagctgcaataggtgtcatccatgatagtccaacatggaggacacctgttgcagctgacctccaaattggagtcttgcctgaaataagaatgaggcaaaaaagatgacaagaaaggttgccaggtacataatcctagatggagtaatatacatatggagcttcttaatgtcgctgttaaggtgtgtcaccaagaatgaagtcgagcggttgatgatagaagtgcatgaacgcttctgcgacaatcaagctggggaaaaagcctatctaaaaggttctccttgtcgttgtttgacctcaataaggtcttccaactgtgattgtattagcctcgaggatgagaaatgtgtgtaaaattctcgggaaaactcattccaagaattaaatcttccaagagcaagcttaatgtaccattgctgagctatttccgatagggtagctgggaatatccgacaccacacatcacaagtaatttttttgtaaattaatttgcatttcgaagtatttgatgcgtgccagtgggtcttctcgcccggtatacatgttccatactggcatcttaaacttgggcaagggcaatgcattaatatatactaagaattatgatccccttgacctgtctagttcaaggtttgatggtttctggccagctaagcccttgatcatgtcccttattttgtccaactatgctgccacagtatggtctgttgctgcagggacatggctgatttgccctttatgaaggggctacaacccgaaatatgccaaggtttggctagccactccaagaagg

SEQ ID NO: 4602 - DNA, 545 bp, Cannabis sativa
ctgaggtacttctgtcaagtttctttgaattcattttcaaaattgtagtcttatatttaatcaaagatgatgattttactgaagtaagatgtgggctgactaggaaattctgttatatatatatatatatatatatatatatatcttctcttgtgtgtgtgtgtcttagtatatcgtgtgatactatgatgtacatattgaataacgttattgattgcataggaatgtggcgagcaaactagaagtgaagacttgggtacgtcaactgtgaagacgttgaggtttttatatcgagactttgcgattaatgtatgtaaggatctgagaaagaagctcatgaaggatgatgttcctagagttcttggcattttaaaggtaacttttttttgagtttactatatagcaaaagtttgataaatatggcgatgagacatttaaaatttaaaaactatactattttggtcattgtgaagcttgttctaaattaactagatttttttaatggagatatggtagagaaccattaaattgataaagcacaaact

SEQ ID NO: 4603 - DNA, 511 bp, Cannabis sativa
tctcttgcactggtttattggccatacttcatacacactgctgtgtatctaatcaatagaacccctactccaaacacacaacacaaaacacctcatgaattactttatcataagcctcctgcatatgatcacttacgaacttttggttgcttagcttatgcttcaactttaccaagcaaaagacataaattttcccctcgggccaatgcttccattttcattggatatccccaagggatgagagcttatacacttcttgatatagcaacaccaaaaccatatttcactcacgagatgtaattttctatgaaaatatttttcccctcaagggttctaccactcatagcctggaccatttcttccatatcagcaatacaaacatttctccaatacaaccacctgctgcacaacctgctgcaacaacaccatctgcagcagactctcttttgactgcctctcctacaccacagccctctgatgcacaaactccaccacctgctgccaccagtaa

SEQ ID NO: 4604 - DNA, 1438 bp, Cannabis sativa
atcatttaaggttttaatgtatttgtaatgatgagaaagatgagagtattacctgcttgaagcctttggaccaatcttttacctataaaccctgtagctcctgtaattgatacaatcatcttattttcctacaaagaacctaaacctaatcaataataaatctttcatggtatcaaaggcaacaaaataacaatgcccaatatgtgtgagctagtgattgaaattctcagggcttgattgatttgtgagtgaaaaactaattcaattttgagcaataaagcatgcatttagatatacaactcatcaaccatataaatcttttccaatttcctatccaactatttataaagcaatgttgttgtacaagtaattttcactcaaaacaacaattatgcaaaaaaacatatataaatttagatgtgataaaaggatgagcagtgaccataagaacaaagaagaagaggaggaaagcacaatatttggtttttggggttttggataatgcaaaaaaaaaatgataaatttttgaaaataagtttaaccaattaatgtttgtgggcctccatttttgtgtttcaagatttataatgaataaaaaatggagcaaaatataatcttgactgatgagaacaccataactttacccattacctaattatgatatcattaatgaccaaacaaagaacgacccatcatttttcaaaaagagaaaaaacaaaaagattcaaactttgaagaacaaaccttggtttgatcaatggcacaacaaattctgagtctcttggtctcaaacctcttaagaagaaaaaaaagggagcattttgtgagcaaagaaaggaaatcatattgtaaaagaaagaaaaataagaaatgggtagtaaactaaccagaaggggttgaggaatgtgaagagtggtagagattgttgtgtgagtccatgacaaagcagtggctctgtggaactccattgaagaaaagttaaattaaaggatgaagcttttgtgttttgtgtacttggaggggtttttattagtgtatgtagaagactacgtagagtgatttggaaccacaccaaattttcaaaccatttccatcacccgttttatatgtattctaattaactaacactacttcttaattcttaattctttttctaatatttaattcattagtgatgattgattctaatataaattattaaatgtggggcattatttggtaattcaataagattttttttctaatataaattacatcttttctttttctttatctcgcctgttaaaaagtggtgtaagtgttaaacaaatttaagtttaataagtcaattaattttttatttattaaaaaaattaaataaataattaaatagttagtatatttaatagagaaatttgcggctaaaccctctatgttttaattgttatacacataactc

SEQ ID NO: 4605 - DNA, 632 bp, Cannabis sativa
gacaaccattggaacgaggatctgatacgaagctagttccgttctgaagatgctaggaggattctgaatataacacttcctagtagggctgcacacgggtcgggtttttagattttcgggtagtcaaatttgggttttcaaattttgggtgttggaagtgcacaactgaacccgattttcgggtggtcggatatggcgggtttcgggtcgggtatatcgggtttcatgtggtcgggttcgggtattatttgaatgattcacatttcctctcgataacacaaaaaaaacatgtatattatataatacatatatatagttatagttaattaatatatatatataattgatagtatacaatagcagctattgtatctcgagaccaagagtttattggactttcagataaaaggtcaaatatttagttaatgacgtccaagtttgtgatttctatggttatgtttccttagctttgatggatgcagagcataaatagtggtttgacttacgcttggaactttacatgtgcatctctatggaaactttgaattgtacacatcaaaagaaaaagtatctcgagaagcaaaacgttaacatgtgcaattaatagtcattagtattatatatattatatt

SEQ ID NO: 4606 - DNA, 1419 bp, Cannabis sativa
  modified_base (139)..(162): a, c, t, g, unknown or other
  modified_base (297)..(300): a, c, t, g, unknown or other
taaaaacacgtatatagatgaaaagttccctttcttaattatatagatatagatagggaaatttacatggtatactaacttttattatttatttacaaaaatactgcgaagcggtatttttacttttttactgtatttnnnnnnnnnnnnnnnnnnnnnnnntactgtgttaagttttcattggtgttctactggtgttttactagtgttctaccgttgttttgagttatactgctttgtgttttataaaaacacagtatttttgaaaaaaaaattcgtgtgacagtatttttgtannnnttaacccaaattccagtatttttataagtttccctttattaaattcttttgttaaataacaaagttgcacaactatcagcttttctattctaatttttaagatatctcactaaatttattcatttttattttacttcatatatttatattatatcataccttaggttctctatatttttctttatatcatttaactattatatatttagggacacaattttgttatgttattgtactttcacaaaatatattccgtgatgtacggaatgcactagatgggtcttaggataagttattttttttaaccctaattaacctagatcaacttcagtcctcagatcaaataacctcttttttcatctaacggctgtcgtacattacggaacattaaaatacaaaattgtgtctctataaaatgagtggacccaaaaatgacatcgtgtgaatgacaaaaaaaacaaaatatttggaaatgaaattgcagaaagtagacaatgctaaatgctattttggtgttattgtcaattgatttattaacaacgtgaaacattattgggtctggtggtgcggcaggacggctaagaaccagagagagagagaaagagcatgatatagcaggtggattagaagaatgtgtttgtgagagagatgtagaagattgcattgaagtaaaaataaagtgtaattaaatgtcatttttaaaaattgattaattatccataaatttattttagaataggtggaagtctaatattaatagaaacataaagttttattgtaaatattataattcattggtttgatggttaaaaaaattaaaggctttttcatttttacacttcaaaatagtttaataaatttttttatagaaactcctattgcaactagcgctgcaactactttagaaattcaaaccgtaaaaaaaattaaaaaaacaatatatgagtaattctccaaaaaaaaaaaaaaattataatagagatttaaatatgaaaataaaattatttataaatatttatttctatttttttaataattaattataaatatatataattaatttaatctaaaaaaatttaccgattattttccccaaagaaaagataaaataaaatttta

SEQ ID NO: 4607 - DNA, 2607 bp, Cannabis sativa
ttgactcttcttgttcaatatcatattatggatacaagatctgtttgtatagcactttttttctcaaagagaagttgaaaaattatatgcaataaagaaaattcattaaagttctgaagtctctagtgttatgattatatgcctatgagcatatataagaaaaagatccttccttttacatatcaactaataaaataagagaacaacaatttttacaatttgaaataaagggtattattgcattaaagtgtaaggagataattcctttaaaacattttgttagcatcagtaatgaagttcttctattgaatcacacagatacaagctttgcaatcaagtgtggaggaccacagatgttaggaaatgatggcatagtgtatgaagctgaagagatagttcttggccctgcaaagtttcatgttagtggcaaagagaattggggagttagtaaggttggtttatatggtgataaaacaggtaaactagatattgaaggaacccaggaacaagtcacatcaaccaatgagaagccagagttcttccatactgcacgaatgtccccaggatcactaagatactatggtctcggtcttgtgaatgggccttatactgtcacgttgcattttgcagaaattggttttcctagtcaaagcacaaacttgtgggctagtctagcgaagcgtgtgttcgatatttatattcaggttagtttccaaaagaagaagaagaaataatattttccatatttgtgatcagctcaaataatttaaaaattcttcattttcttcttagggacgtcgcttagaaaaggactttgacatatctaagaaggcaggtggagttttgaaagcaattcaaatgaagtacaatgtcaatgtgacagagaactatatcgaaattcacttgttctgggctggtaaagggacctgttgcatacctaaagaaggttactatggtccattgatagcagctgtccatgctgaggcaggtaatgtgtatacccttaatctcaggtggttcaacctacttcagttctcctatttgatacccgaaaatgttttacatattgatcagatttcaaagtatctaaaggagaaaacaagaagaagacagggataatcatcggtactgtagtccctattatggttgtcggtctagcattgctactattagtattttacaagaggagaaaatatgatgaagatgataatgaaggtataagtatattggtaggatcagatagcaaaagtcaagtatattttatgtgcatatcagtatttacatgtcatattcttgcaccgatttgcagaacttcttggtataggccccaaaccagatacttttagctatgcagaactaagagctgccacaggagacttcagttctgcaaacaagcttggggagggaggatttggtcacgtttataaggtattatattttcttctagttttcaaacgataaatttttatatttaggtgtgattgaagtaattttcaattattatagattatatttagttcagtttaacattttatcaataacattgacatgtctttgtagggtacactttcagatgggaaggaagtagctgttaaacaactttcagtagcttctaaccatggaaaaggtcaatttatggctgaaattgccacaatatcagttgtacaacatcgaaatctggtgaaattgtatggatgttgcattcaaggaaatagacgcatcctggtttatgagtatcttcataacagaagtctcgatcaagcactatttggtatgtagctattcagttatcttatactttacaattcaattctgcaagaacatattgtgtattgcagtcttcgttgaacaatcgtttcttgacagatatttatttctgagtcagtaactaataattctttatgatgtagttattcttataatcatttcataccattggaaaaaagaaatcactaaattgctaaccattgcaggaaagaataatttgcacttggactggcctacacgattcaatatatgcttggggatagcaaggggacttgcttatcttcatgaagaatccagtccaaggattgtacatcgagatgtcaaagctagtaatattttactcgacgatgcactttgtccaaaaatatcagattttggattggcaaagctctatgatgataacaaaacacacatgagtacgcgagttgcagggacaatgtaagctcttaaaccaactgtggtggaaatatatacttttgactattagttatggaactaattagattatatcaaattttaaaactcataatctagaaagaaattgccttgaagattagaattgatgcagatgacaacatcactaagacatgttttatggtgttgtagaggatatttggctccggaatatgcaatgcgtggccacctgacagaaaaggcagatatttttggtttcggtgtcgttgctttggagattgttagcggcaaacccaacttttataacgaaggcaacgaaagtatttatctccttgaacgggtatgaaaattaaattgccatgcattttgttcttgttactctgtccaaaatgagctacaagtaatattaagagttaatcacagatg

SEQ ID NO: 4608 - DNA, 1849 bp, Cannabis sativa
tcgaaagcgatggtttccggctcccatggctgactatttgggggttagactcgaattcaaacgaattgctgatcgtttgataggtaggttggaatttaaactgaaaggagctatgagtattgaataaatggatcgagtgtggtttgggttcttcgaaatcgttggagctggaggaaaatgaatcagaaatttggcattgatttatttggttgagatttgaagcattattattattagtaataggagagagatcaccaagaagaatttgcttgatgtattcaagcttagaagcatcgttcatggccgccatgtgtaccaattaaagaaccttttcttgtaatttatataaatggtgatttattaaaatagagaattttgacataaaaaaaaaacttagaataattttattaagaattgggagaagtaggaaatgagagtggaagagagctttatttatagaagaactgaacaactttcttccatctcatccattctcttaacattattatataattatctaattatatattaatatttagttcattctgcaaccccacgatttaatttgttgtattttaaatattagatgagactggagaaaatatattttgtacaatgttgtggtaataaacaactcatgattcattatttttatttatctaaaaaataaacaaatgaattaaagtataattaatttcgttgggcaccgtcataatcaaaagggaataataaagaactattccacaagttgtcgaagaagaattaagaaggatcgactttcaatcatatgtaagtggctaggttgactttgactttttaactttaacatgaattattacattctcacttaactaatggtaatatttaattagctctaaaaaattgctagtttctcattcttaaattcttagccactgtagttgttttttttcctttggctaggccggtcggtcattcttgggcttccgcgtgacttggttaaagtatgtcgttttgttactgcaattaaatttttactactacaattagtcttttctttatgatataattttgagtgtttttaatttaggttactacaattagtcttgtctctataacataattttattttgttttatgatccttattggttagtcctttgattcttcaatgacttgtcatcaaatcgatattagtagtacggattaacaagttttttgcagctgaatgtgttattagtagtgcagttacgtaccttgcacaataattgagtgctcaaactaagggattgtgtgaacctgctgttgcaatagtttctaatgttatatctcctaaacggtggaagaacccgaatataggtgttcttaaggtgaaatgtgatgttgcaaactttttcatcagattttattttaatttttttgtcaaacgattcgggaatcaggcagccgatttgttggcttttttttttttgaaaaatttatataatagggcaaaagtttgaaaaattatagaagtaccctctcacgaaaaaatcttcatttttacttttttaacttttttatttaaaaaattctcttcagtaataataataataataataaaaccatttataaatgagagagagatacctctgagtttgaatctgtcgtggcaaagagagacgagatggtgggtcgtattcgactagagggaagagacaagagggatgagatggggtggtcgtagatgagggagagagaaagagagagacatttaataaaatcaaaattgagaatttttaggttttatgtagcacgagaatcgtcaggtatagtatctccgacatttaaaaattattgggtacaacagttttcttaattttaaggtaata

SEQ ID NO: 4609 - DNA, 761 bp, Cannabis sativa
tataactatgagaaggacacatctctaaaaggagtacctatcttctcgcattcagcacgcactttaagtgccgtaaatgaaatgcaagaggtcgagtgccgccttaatagcatcacaaaacttgaaaaagggagagcccaacccatgaggctaaaaagatcccttaaccttcaacggtaatcttgaaaaaggctgagcgcggcccaagaggctatacaactcccttaacatcaaataagtaactggtagaaggttgagactgctcaaagagtctatcctcccttcataataaggttacatcagaaaagaggttgtgaaagcccaaatgtcaaaaggatccctcgaacaaaagatctcaaggcgcaagtgccaaaagagacaaccacaaaaccaagacaaaaggaaagttcttaccaaacttagtctacaagaacatttagaagagttcttatagacttaggggcaagtattaactacaaaaattagtagggttgatttttgaggttagtcaataattagtctcgggaagcgagagacatcaactttaagagttggctgaggaatgattgaatcaacacatatggcccatggcttgttaatcccaagaattgacgcttgcaattcttaagatatatccacataacttagagatcaacgccataacaacttatgagtgggtgcatgcatgagcacatgtgtgtgtgtggggggcgtcacacgcgagcccatgtgcatgtgaatatatgtgtgtgtgtgtgggg

SEQ ID NO: 4610 - DNA, 1009 bp, Cannabis sativa
taattaattaattaattaatacagggtaaatgcttgcccatttattgggattaattatgcacagacgggtgattttaccaatcttcctcttctctgtcattatcctgttaaggtacctaactaattaattatatttattttaattaattaattgaaattattatatctatttatgacgtatgcatgcatgcattgcgaatgagtaacctaataaaaacattttatatatatttttgtgaacaaaatttagttatatagatttgaattaatgttaaagagttattacggtaataaagagaccacctataacaaccatatattttaattttaaattaaatattatcaattatttttatttccaattaaataagcatggctttagcagataatatggtcattatcaatatgtgattcggatatttatttccactaataccaatatgtgataattttttttattgagtagggtaagagaaatggtagatcttttctttcttgctttacatgaatataaatatatatgatatatgagaatattattagatgaaaatcttccttatattccaccttagtattaattaattgaaataaatattaatcccaaaactttggcatcaaataacattattttgatgacaattttttataatatacaaacttaaagattggtgcaaataaaattattattttataatgtgtcgtatatatataggtgatagagtttcaatatggacaagtctatatattgaggttgtttagatattatataataaagttgataattaatatatacacacacatggcaaatatataaagggatatactgtcactctcataaagtaattaattttagatgagaaatatatatagttgagtttactttatatatatacatacaaaaattgtgatagctaggttgtgtaaatatacaactaataagtaataaggttagaaacaaagtcgatatcgtgaaacccataacgtttacgtaataataataataataata

SEQ ID NO: 4611 - DNA, 1572 bp, Cannabis sativa
accgctcttccgatctattttgggggtcggggatgagttttgaggatttgggcgtgagggtttggtgtgcgaacgaagaagaagatgtgtatcgtttttttaatatgtaaaagatttttaggggcgacaaaaagtcgcctctaaaagtcttgaaatttttccaaaaattttgaccgcgaatatttcccacccttcggactttccactagaatttcagaattattagaggcgacaaattgttgccctaatttttcgcccttaaaaatcatttttgttgtagtgttttaccccatcaaagaacctagttgaaccctaaaagccctatcaggtatgggtacgcccatatccgattcccatataagtagaacattatccctttgtgcaaagggtcagaaaatgaatctaaggggggatcaactgagaattagggtttttcaactacgacataaatacttgtaagaaatactttgaagctttaatttctagctcaatactattaactcgtggactagagttctttaacactcgaaccacacataaaaaccttagtattttcttctttaatttacttctttcttaagcatctttattttataactagtttccaaaacccagtagtaaacaattacaaattctgttaaatgttgatttggttaaatagaatgcatacatatcaatatgttagcagtgcaactcatttttattttttaaaaaattattaaataatcttaaaataaatagcaatagtaattgaactggtgggaaaaagaacaatgaaatttatgtttttatttatttaatttttataattaaataattattatttagtttttttaccgttttcttatttaataaaatttttgacagtggataattaattgattgacatgtgttatagtttaatcaaatttaataagatttaacaatctggattagaagttgcaagttgcaacaaaaacataacatataatatttaattggtaaaaaaataacatatagtatttattctatcgaaaaaaaaaatatgaggtatataaatgaaattaaaaaaaaatatttatgttacaaatattctttttttttttttgaataaatatgctgcaaatattcttaaaatatagagaaagctacaaattttatgggtttttatattttctgtgtaaagctataattttttttttcaaaaaaataaagattttatgagaaaaattgaaaaaaaaaattaaaaactatagaaaaatcaaataaaagtaaccagatacttttagagtattcagagaacttaataaccagttactttatacacttttttctatagtattaaaatttttccataaaatattattttttttagaaaaaaccatattttttacaaacctataccttaaaaactgtaaaaataagaccaacctaataaagcaccatatacagtaattctaagtatcacttggtgtacgtacaatgcttttataatttatttatgcgtatctatcattatattttactacctatatatatacatatatattactaattttctatgccactaatatatatgatcaatatatatat

SEQ ID NO: 4612 - DNA, 760 bp, Cannabis sativa
ttttttttttttttttttaacttcgccttcttattattccttatatctctagggttttctattttttctgatggcggaatttgaaaaatatagctttcccttatataaagcttcctttttaatttctcacttttaacttaccatttagggttttagatcatcaactaaaatgctgagtttatcagtacctaccgttcttgtaaagtttccgcgagagtattcacccgaagcagttgctgaatggtccaataaagttcacaaagatcacagcagatctccagggttgacagaaaaggccaagcgtcatctatcgttcatgggttggacttttttgctagcgaagaagatggaaaccaggcaagagttgcgttacgtctcaccttctggacgctgttattactcgcttcgtgctgcttgcaaagcttgtatggagcaaggaaacggcactactcaagcaccgcctccaccagagccaccatcagcaaatatgaggagttctttgattattgaaccccatgaaaccccactaattagcactactcaagcaccgcctccaccagagccaccatcagcaaatatgaagagttctttgattattgaacccgataaaaccccactaattagcactactcaagcaccgcctccaccagagccaccatcagcaaatatggagagttctttgattattgaacccaatgaaagcccacaaattagcactactcaacccccaccaccacagccgccatcagccattataaag

SEQ ID NO: 4613 - DNA, 1102 bp, Cannabis sativa
tcctcttttacttatattaacttgtaagaaaagaagtaaaaagttcttgatcttcctcaaaagcttttacagagattttaatagcgtaagtgttctattgaatgaatgatttcatatccctgaatagtgaaatggctccagtatttataaagaaaagttacatcaattttgtttccgaaaacaattaaaaaataaatggaaaaacttatttactttcctaaaacacaaaaataaaagggaaaattatgtaggttttctcttctttcttgtcggtgcaaatctatcccacaaaattaaggatgtgattgaagtttaaacgcttgaacatatagggaaaatacattttaagatatcacaaccggatttactctggccgacgtatgcaagctagttgtgaggttgatgcatgttgatcggatagtggaatctaccttgtctggatatttctagcttcttctaattagttttttgcgaataataaatcaatttagacggtacatcatggagcatactgcgcgtccaggtcatgaaatattcttcacgcgtcactcagatagatggcatgtcaccctgtgcggattttgggataacatttaccccccaagtttgtatgggaactctttgcttgcacgtggacttgtttggccactaagttggtcagaggggtgacacgtgatcgatcttgtaccctatcttgatccaatctgactaaatgtaaaagagaagatttgactgtctcttcagatatttgggacatttaatgtcacgccatgaaattcgaacctcgattggcacaacgatgttattgagtttagcatgcctattgtatgtactccccaacattgatgattacacttttttggggggaaacccaaaatttgaaatttaaattacttaattacccctctaaccgcctatataatgggttaaaaattctttacactcttttagccattttcattctcaacgataaccaaagcacatttcttttttctttgaaatctttgaagatccctctgcttgaagcttaattcgaaggacccaaccaagtacatttgcgagcttaaaaaacgtaagccttctttcttcttctttttttttt

SEQ ID NO: 4614 - DNA, 2581 bp, Cannabis sativa
tttataaataaataactactacactacaatggaattatgggataacttttataaagattgattcaaaagaaaaagatatacaaactcttgaacatattttatcccttttaaagaaaaatttgtaaatttgtaaataacaaaataaaataagaattttgattaaattcaggatttttttttttatgaaagaaaacatgtttcgctatttttcccaatggatcaatttcattttttttagccaatatgaagatatataacatttatttttatacaataaattatgagggaaatgtgcatactaataataaaatatcagattatatgttgatcacctattatgaatttaataaaaataaataagatttacaatccttaaatttaaactgttaccattttcaaataatatcttaaaaaaaaaaacaaataacaacctccaaactttttttattaaaaattctccatgaactatttctttactaaatgctaataaactccttatgtaacatttgttggtgatgatatcatatatcaatgttatatgtataatttaattaaataatttttttgattgatttattatttttaaagatctttattttaaagattttttaaatatttagtttatcatttatttatttttttaattgtatttatatatgtgtagttaatataacaaataatactcatgtgaattcaattttttgttagtcaggtaagactgtaactgacataatgatttttgagcattatattaggcactaattgtatgcaacaccttatgtaggtggcgtctcacggttacttagcgatatcctttaaaatttattttctttaattatgtaaaatctgacacttaattacacgatattaacaccgaaaaaagtactagacaccaataataatttttaacaattcatttagtattaaaaataattcataaaggattttaataattgaaaacctttaagaccataatttaaaagtgaaaataattgagggagcataaattctatttattcttttaataatttaatttctttaatttcttcattttatcaattaattaaaattaatagcaattgttttctagtgccatagaacgacatcttaattagtcaactcttaaaaacaaagcacgatgcacacaaaattggagtctataaagtgtttttattaagagacactattaatttaattctcacgtaaaaataaatatataaataatataataaatttttaagctatactttgtttgatgtacttattatgtaggtattgaatccaaaataaagagtttttaaaataaaatactaatttttaaagttatgccttcctttgttcaatgtatttctttaggtattttacccaaaattaagactaataagcattcttggttactcccagcttctctatatgtgtctttagtgattttcaaatcttcttaaattgatcaatattgttatgaagcaccagtaacattactataagatacattaataaatattaaatactagagatatttgaaaaaaaatcctataatatttacaattattatatatatgattctaataaaaaatagtagtagcaaaatatcttatttaataatttgttacagtcgtacctttaagtgtcaatcagggcagactcaagcaatttggaaaaatattaaaattgggtcttttattaaaaaaaaaatatcaattaatacttcataaattcaatttttttttttaaaaaagaaaaaaatacttcataaattctcaaataagcaaaatgtttagaattatgtgtattgagaccacaagaattttatcatttttttaaatgctaagtttatatttgttctcgtgaaaatttattatgtatactatacaaaagatagttattatataatatatataaatagatgatagaaaagagggtattttaacattaggatccttatgcaatagcccaagttattagtatatgttttgaatttttgatcgatgctatgctggtgtcaattaagaaacacacgtaacgacatattattggatcgtacattaaataagtattatttatcttattttttatattaaaatatataaattaatttgaatagaaaaacattaattaaataaataaaagcttttttcttagaaaaaaagcataagtttttatttgtttaatatgtggtctgatgatatgttgtcacgtagttttgagttggtacttaacgggtttagttggtatttaaagatacggctgcaataaaattataaaataatatacttttgtaattattttttttttattaaagtcatatgtgtaataactgtaaatattaaataaatttattgcataatattttttaacatttctctaaattgagcacaaaattaaaaaaaactattaaatttcccttacttgccatttttatatatttataccattgaccactcaacttatagtttgatcttcttttgcaaatggagattattattattattatacttaaaattactcagtagaaagaataagccaaaaaggtgaaaacaattgtatttgataagatctcgtaaatatatatatatatata

SEQ ID NO: 4615 - DNA, 925 bp, Cannabis sativa
gaagggtaaacgtcaaagaagtcttgtctctagtcaatctgaaagttctgcatcatatattaaattggaacaagacttaagtgatcaagatgtcgtacattctaaaggaggtttccctgtacccatcaccgtcaaagtagaagttcctgaagttgaatctgtagaaagcccatgctccatcctttttgccagtgattcctccttgctttatgaagatcaagtggattcttgcgaggttttacagagagaagcaactatgattgcgacggactatgattgcatccaagcactgtgcttagatggccaaaatgctatctgtttccttgtggattcttacggagcagtacacagaaatacgatcgagattacagaagaatgtgatctggatattgtacctctgtgttctgatagacaaaatgcagtctgttcttttgttgatccttctttgattgatgacaatcagagggatactcgtggggtggaactcggggagactgaaatagcctttgaatgtgatcggggaactcaaaaattgatttacgcaacaggaaaacttgaggattctgttgttagtgaagtgtatcgtgagttctcggaacattccactcctgaggctcttcaggctgtagaagactcggtcgattcttgtggagtagtacccaaaaaaatgactgattcagcagctcttcaatgtgttccagagacccagatgtttatctctccgatagaagaaccacaattgtgtgctcaaaatgaagcatgctttgattacatggaaaatcaaagtcctaagccagttcagaatccaagtgcgtcatgtgacgatagtaaaatggttgatattttagaaataaagagtcaacagtgctcagaattgcctgtattagaatctataggagaggaaggagaacctgtgttgtcaacc

SEQ ID NO: 4616 - DNA, 2425 bp, Cannabis sativa
actctttgtaaatattatataagcaaataaaaattatttgttatattttaaataataccattcatattgtattaaaatttattttcataatgttaatacgatacagaattttatccaaatataatgttccttattatttaatacaatagacctttatacgggctactaagctcttaaagtatagtgtttagcaaaattaagtttttaattcttatggattctacatcctctagataaaactatattgtacaccatatgcttgtggtggaaaaaaatttaaaaatatgttaagaggcatcttaaggtagcatattgctattggtgaatttcaacatcagatctcatacattttaatttaataaataatatataaaattgctaaccaattataaaataccactatttagcaatgctcacaaaatttgtatcacctatttagcaacatttgaagtttttgttatcagaaaatccgtccattatgttgcgactatggaaattactacctatgtgtcaaagtcaatattggaatgttgacagttaaaagtatatacgttgacaatagttcaataataaatgatatattcagtgtccaatacaaccatgtcactttctgtctatgttcctaaatttcttttcctcttcacatcatgtaccatgttgtgtgaattgtttattttcttcaaaattaaatgtaattaacgccgtttcccttggattatttccttgattaactctaagccatgaataacaagaacactattacttgccacaaaagaagaagactgtttaaatctatgcagatatatagacaactgattttgtacccagaaatgcaaaacatggaatgtattctgttgtacgacaggtacgtaataatgtgtcctagggtacgtaataatgtatttcggggtacgttactattttttaactctaattatctctagatcaaccccagctttcagatcaaataattacctcatttaacgactgtcgtacatcacataataaattccgtgaaagtacattaacggaacaaaatcgtatccctatatatattataacgaccaaaaattatatgggtgaaatgtaacttgaatgatttttttaagaaaaaattacatatataaaatatatataaatatcaagctgaagactcaagagagctaagtttgatatggtaatggaacttacatatttcatcagtagataaaggtaggtaaccaaaacgcttgtaattcaagaataagcacaaacttggaatatgacagcttctgatcgctttccctttcaataatagctttcctcatctctatgtttgtatattattacttacacatttcaacaagtactacttatatataatttaaattttaaagtaactaattaattaaagaaaccaaaatgagctttaattatattaaagttcacctgatctcgttaccaaacaacatatatcatcataataattatattccatgatatcactttattggatatatattttccaaactaagtatctttttcttgggtctcatgcatatttccgcaattagaggttaatatatatatatttattatatatatattactagtattattaattaagtttaattaattaatttattaattaaacactgagatatgagatgatcatatatgatgatggtgaagtttgatcaagtccaaagaggctcccaagtggtgcccaaagtggtgtcatctagaaaacaagcagtgtcaacgtatgggggctgttgctgggaatttggggggtcttgcaagtgtgtgacatccatgcaaattagagcaattaaattggcctgttggcattgcatattcacgagttcagcctgtgccttagccagttgtccctgcaactcactcacttgtttttgcagctgacatatagccccagcacatccgtacactgggtctcttattcttgcatttgcttcgtaaaccatgctactcactgcatcagctctctgactttctggaatttcctgatcatcaatttataacattttcattttattttcacactctcaatctattattattatctacctccattcaataattgcatatttgaaataattaattaacaattaattaattagtgttttggattaataattacagtctctagagacttctgagaatccgatcccctcatgtgatgatgaaacatgtgaaatgaagagattttattctaaaacaaacacctaactatcttgactctaaattccgaccaatatatacgtcataatgaaaacactttttaattatatcaaaattaataatttccatataattaaattccacataaacatctattaataattactctcgctcttaaaaatagctagttataaaaaaaaaattactttttaaaaatcgaaaagtcacacaaaataattaaaga

SEQ ID NO: 4617 - DNA, 1310 bp, Cannabis sativa
taaaatcgtatatggcgggtggggatgacaaaaaagaccttttgtagttgcttgaggccctcctcgactgttgttgcaacattctgaatattgtagtctatcctatcaacaatggtaccctgtttgtggaaagaaattcgattagtgacaaaggaatttctgtttgaatgtagcatgctatgttttcataaggttgatcgtagcgtatctaacctggtctatcacaagtaccgaaagatccttcataatctgagcaagctcatttacagatcccaccacctgtaccgaagtaaacatgagaaattaaataaaaacaaagcattactgatgagagaacacgtattgcagaaatgatcgcttgcctgttggatctctcgctctctttctactgagaatgcctcgctctttttaagctttgcaagttgatgctcattgaacatctgttgaaaagaattgttatactaattttagctttcgactcaaagtctcaaatcgaaggaatttagtcctatatttgaaatggttaacgagatctaaaaagtaaagacaatatgaagaaattttcagcataccatgtcatccaaatcgtcatcttctactctagatctacttccatttagattcatctctatatcaactccatcaccctgcatcaaacaaaatgcatgaatattttttgagctttataagtaatatacaattcatgtcttaacaaaacgaggtatattcactagatactagatgcaggaacatgcacatgtgactcatttactcgttttgagtgcttgaaaaacaattacatactgaaaacataaataaacttgcataagatttaatgatctcggtcaatgcaagttaaaccatagctcctacctacataataaaataaattgatgaatataaatattctccactaacctctttttgcagcctgaggcgcttcaaataagcggactgtttcttcctaagctccaccgataggttctgcaggtcagtagcaagagagcgctgcagcaaaaacatgcaaacataaccagagttcatattcatcagaatattctcttaattttggataatatttagactttattgtgtttccatagacagtttaccaaagtgcaacatcctaaattctctccactgttgagacaggaaatgataatgaaactatgtttgcaaatatgcaaaagaatgaagaatgatgcaaccacccctggaatggagccaaattttttcagcaagctccagacattatgtgtaacttttaatttaataatagttttttcttgatgatataaatatggctaaaa

SEQ ID NO: 4618 - DNA, 4150 bp, Cannabis sativa
aaaaacaagtttaacaaaactgtggaaaaaaactagctaagtgtttgataaattataaattttaaagtattatgagttgttaagattctactataataatgataatattgtaatctagttaattataatcacaaataaacataaaaaaattacgttatataaattttttattttatatgtatttttaattattttttcccatagtataaacttgtatggatttaataaaaataatttataatatttttaaattatatttttatcaattgtaagaaaaaattttatagttttgaaaaaactataaaatgatatggttaaaaataaaaaaaaaattaaaacaaactaaaaataagaaaatttaaatattatttattttaaatatatttttcgttcaaaattaaaaaaatatttttattttttttttgtaattaatatgtaataaataattaaatacatttttagtacaaaataatttattacagagtcttttaattaaaacagatttttttaaagttaagttgtatcaactttagctttcgataaattgttcaataaactaacttttaactggtgtttttctaaaaacggaccctaataaatctaatttttatttgtattaatgattgttttttttatatgcatacaattaatgattatttttagctttatttttgtatatcataaaattatctagatattgaaaattaaaaaataaaaaaggtttttaaagtaatacccttacttaaaatattctttgtatatatgaagtactatttcattttaacaccaattaataaaattaaaggtaaatataattattctagatttaatattctcttaccctttatgctcttgtgtgatattcttaaagctaactgctgctccaccagaagtaatattgtgttatatattgatgagatagaaaatgatgtatcgagaaaaaagaagaagaaataattaaaaacttataagctttgatgtaaattgtcataccaagatataatgccaatctttttcattgtttccctttttcatctcaaattattatttaaggtttgcagaaaaaaaaaaaagcctaactttacattttcacatgcacgcattgatgaatcttggtttataataagtagtaatcaccacacctcttcttaatgtggaaggtcttaatttaaaatcccatatccatacatttcaagtaaaaacggttaattaaaagtaaataaaataaaaaataaataaataaaattcaattactctttctataaattatatacatttttttttttaaaaaaaaaaaacaaaatcatacatacaaaagaatcttacaaattaaggattaagcgagtctcactgtaaggctaagctcgcacaagggagactaacgccaatctatatggcactagctttatttgacaaagtttaactggctaaagcgtgagctaccccattagcttcacgatatacaaaagaaatctcatctagattatcagctagcaacaaattttgaatatgacccatgccccatccacatccctacaaccattctccttactctggatcaaatggacagcttcaagataatcagactcaatactaaaatagggtaatcgtctctaaataccaagttgtaaaccagcattaataccaagttgcataatataaatttgttaaaaaatatgtaaatatatattttctttggggggggccatggccactataggcttgagtgtacatccgcccctgcttgggggtcttccatcatgttttgtgtcatttctaataaaccacatattctaggaaagcacaagaaaatactcaaaagtctcccgtggccataccttggacaacctcatcaaaagagccaatgtatcctcctttccaatacgcttcacatgttgcttaaaccacatagtttccaaacttgtcgattggatttacaactccataaagcatgaaaaatattctctcaaactccaccaaaacatcattgacaagttggatcaacatccatacctcttaaagataaatgtgcattggttggaagccaagaatgggctaacttccacacaaaatataatttgatcttggatggaatttttagtctccaaagatactttcatcaatttgccacatgtttatcattcgattgatcaacctcatttcttaactccacaaccattttgtagccgctttaaccgagtattccctatttctactatagtgccagagaattttatcctccaactcctaacctgtagaaggcagttggagaatcatattagcatcatcaatattgaaattgtctcatactctttatccatcgtctattagaaaattttagatccaccacataaagattctttgaaaggtgatgtttgtcaaatatcttaaaactcctttggtcgtgccaactacaagtcctctaacactcttacattgttaccctcacccactccacctatagccatttataataatttccgtaccccatatcaagcttctccaaataaaagaagtatggttcccacatttggcttgtaagacctctttttttggaaaataacatgctttcaggaccttactacaaaggctggatgcgaaacaaatgcaatttgcttagcaagcaaagcttgattaaataactccaaattttgaaatcccaagccatcattctcctttggtttacataaatgacaccacttacaccaatgcactttgtcatctttctttgaagagccccaccaaaatctcgctaccatctttaaatgttattaattgtgctcttcggtagtctaaagcaactcatggtgtatgttggaatggcttgaactatagccctgatgagaacttcctttccctccatggaaaacattaagcctttccacccccgtagcttgttccacaccgaatatttaacgacattaaaaacctgcattttatttcgcccaacaaatgatggtagacttagatacttcccatgattatcaactactctcatccccatcaaatcgcccaaatctgccttctcagcctctcccactaacttcccagaacaaattttttatttaaggaaattaacgacctgacctaaagcggttgaatatttctctaacagtgctcgaaacctttgacaatcaatgtaatgaccgcttagttttattatgagaattagtagataattagggcttatattcataaatagatttttggttattatttatgaaattatggagatatatttaaattctagctgtattaaatatgatatatgtgaaatttttttatttttatattttatgcccgttaacagtggaatgcgatgtatgacatgtatagtcacttagatataatttggtatcctagaaatattggagcattatagttagacaattggattgtcggaaatattcggggttatggattaggactattttactccttggtgtgttgtttacttcttggttatgaaagggtaaaaatgtcattttaccttaggttattattatcgttattttgagtgagattttaataatcctaagtttagtatttaatggtataagctgaataaaatatgatttttttattccaaataacacttagcatttttcaccaaaaaatagaattctaagcccccctctctctctcctagggttggctacaccaagggctaaggggattcaagtttttcttagcaattcaaggagttttaggtaagaaattcatagaatttagaagataaaagctcaaggtaagcttgttctttttcttctctttgaattttaagttttgagattaggtttttcatacaaaattctaaactgggttactgtatgaattgttggggtttagttttgttttcttgggttagtattaagttatttgagctgttttatgctggttttgactgttgtggttgacaaagaccaaggtttgagcttttaagctcaaactgtttaatggtagatttgatttcggggggtttttttttccttgttatttctagttttattatgtttattgtggcttaattaagtattctggaaaatttggtgcaatttagggaaaatttgagttcattttgaagtttttagggttttctacaaagaaccggttaaccagttcagtataaccgattgaccgtttccctagg

SEQ ID NO: 4619 - DNA, 773 bp, Cannabis sativa
aatgcagattaaaatattttgcagcgggcgttgtaatttacatttttgttaaatcacacggtacaatctaatttgtgattttaattttaaaaattatagttaaaaccacaccgtactatatattataaaattactaatttttacaatataaattttgttttttttttcatatatgttcaaatatgatatattgcattattttttttaaaacaatttaatataaacactttgataatttatatatatatatatattgatgttaaaattttaatatttttatttgtattgttaaaaatttagttattattattcctattccaagatgagttctatgtgaaaattacggaagggtgccacgtcagattagatattgatatcataaatctttcccttaataagattgtggaaggtgctataatactcggaaaaaatacttctccagcaaaggccgcgatggttctggaggttctcatcgaaagcttccgctactgtgagtgaatgggagtcgcatacgctccaacatgatagtgaactggctagcccaggaagaccttagccagaaactccgtaatgcctaatccagagctaaatcctacggttgcatatcttctaacaccaaaacagatcttgtcctctgcgtcagatcgtggttgtgcgcatatatgctttgtagtgcctattgtctaacgacttgtctaggtaattacttttaaaggagaaacctttgagcgacacgtgtcaagaccctcctgagatatcttacactgatcaag

SEQ ID NO: 4620 - DNA, 1497 bp, Cannabis sativa
aaaatattctcttgtgatcggttgtaagtctggtctaaaaaatgagacataaaagaattttttgtaatttattgtgagtccaaaataaaataccatgtatcatatttttcaataattaatatttaatagtaattagattcaattggtattagaattggagagtgtaactacatattcatattcagacaaaaacataattatctccgattataatatagcttcctaaacgtgtctttatgtggtaaattatttttgatctaaaataaaaaagaggaatgaaaattacttgccactatagagtttatgtttgaattgtgtatgcaaatattattactctaccattattgcatacttcatttccgggttttctctttgtagaagaaaaagacaactcagagacaaaagtaataatatataataaaaaaaaaaaaaaaaaaagaatggaacaaaagtcttgagatagcagcagtcagtttactctctgtcaaaacaaataaacaaagtctagtcatttatttagttttatgagtattttttctaacgtccaataataaataataataataataataaaaaaatacgcatagaagaagcattttgctattgcacttgctctctctctctttctctgtctttctctatatatagtcttacaatggtattggtaagtggtaactcatacacattatactcatacatacctctcaacaaaacaccaaccttataacacaacatccttacaattcattttttttttctttcttctttgttttcttttactttcatttcacaaaaagaaagaacacaaaaatcccaccaacccatttacttgattctctccaacctcattatttagctccatttattcacaataaacttttgggtctttctttcttttctttgtttgtctctccttcattcatgttcttttggtagcttatacagaacaactgcaagtgctctgtttttcttttttagtagttatttgagatcagtggaagattataatggaacagaagcatgttttgctgtcagctttgagtgttggggttggggtaggagttgggttgttgagttcaggtcagtcagtgagtaaatgggttaaaggaacaaatggctcaccagatttgatttctgcagaccagattgagtatgaactgatgaaacaagtctttgatggcagagaaaccgatgtctcttttgataactttccatattacttgaggtaattcaagatcatcattttctttagggaggggggttagtgtgggggtcttattcttgttttgtttttcctatattttctttccgggaaaatgggagggtcaatatggataatgatgccatcagaattcagggtagagatgatctcttttgctagtgattttgttataacttcttttagcttcattttaattaattttgagacattttatttcagttttaggtgcttcactcttcttccagattgtagttttttcttaaagagatcaactc

SEQ ID NO: 4621 - DNA, 3526 bp, Cannabis sativa
attatcctcttcatgtccttgttatcgaacatcgtctttctttccaacagaggacagtatttgtttcttgttacataccaatccctgaaaacacgattcaaacttgtgtagcatctacatagtggtatttatgaatttcatgaatcaagatgaaatttggtttgtatttctctctagaatttaatatgcaattggcctttaagactagtctctgatttatgcttgtaattggaggaagaggcactcagcttggttttgtttccattcatctcatttttagatcagtaaaaagtggagagattttttccatccaaaaaaatttattgtctatctttgggggcatgttaaaccaatcctgccacaacattaacattgagattgatgtaagaaagagatgccgtttgaaagctagacaataaaattttaatattagaaaaaaaaaacctaggatgtgtttcccatcccactaaaaatatctacaaaataatgaaaaggtggatcaatattaagtaggtgacaaaaaaaatgtgaaattttgtatatttggagcaaatatcttttgccaaaattacatgatgtaaacgtaataactataacttatctgtgaaaacttcattgctgatagtgtctccttagtatcttagatcagttagttttgctgtgcatttggttgatatattttgtttaagaaaagtctaatcttgttttctctagtgttgcttaatcatttttcagatttttatcactgcctgtctattatcatattatgtattcacattttctgtgttctgtatctatgatgtgattatgtcatggtgtgctatataatcaatttcactttaaatagtgggagctcaattcataatgagaatggatttgctccaagtttgatgccctcaaatgctagaaaggatcatggggagagaaatgttgctgaggtatttcttctttctttataattatttacttgtatgtatttttttatcacgctttgtgccaagggaaaaaattggcaaattggaaagttcaaatagaaatactgaaacattagaatgtatatactgaaaactcagaagtttaaaagaaggaagaataaataggaagaaaagtaggaaagaaaagataaatttctgaagtttggagtgaaggtatgtttgaaagtaagagctatagttccaaattatcctattttgaactagtcaattaattcaatctttgatttttgaagcattggtctctgtctaggaaaacattggatgaaatgaggggaaaatatctttaagcaattagagttctagtacttattttgtttgtgctgcttggttcctgcaaataatccccatctcttcatagctctactaaccttgtatgaagtaaacctgaaagagagacaaatgactaggtatatgtatgatgtttataaacttatatgaactatctccaagtccttatattttgtattctttttcccacctaaatgcagattaaagacacctctggtgctgcaaatgatgggaggtataataagctttaatttctctcccatttttcttttccaaaatctttgggaagttggtcttaaccctttgtaccttgacactgacatctagaatgcttccatatggaatacaattagaactttgttctaccatcatttttgccctttgaaataaaacatgcatgtcttatctggatatttcttctcctcatcctgttggacataaacattggccctgattatgtcaattagaatgtttttatgtttcaacactgttgcagtgctatacagtgtcatctttttctggtcttcccatttatttccttgtaatcaaattttgacagacaatgtggatatgatgggttgctagggcacaagaatgatgatgaaaaagtattagagttttctcaggaagaaaatgtatgttaagataaaattgtctactctttttttctaatcatattatctatattggattaagaattttcaacctctgtttttttttttttttgcaggctactaaagattttggcacaagttcaagctgtaagtcaacatccatgtcacttgtctcagcatctaaaatgttttgatatttagaagtagcttattctatgcgatattaccaaggaaggagttttgtgtagtgattcttgaggataatattaagtgggaagcccctattttgatgtggacttgcctgctaagattatcaattagtaaaggagtgatatcaagaaacttgacgttgaacattcttccttaacttttttaactattttaaccaaatcacttgttaaggaccttatataaaactagcagcctcagcaacacttgatggatgtatttttttcgatgcttagtctacactgttggtgatgcatgttgcttggatagttttcttttctattgacatacatcttctaatgttatgaatacctatttttcctaaaatgtttaatgcttggcatacaggtgtcactgagataaatcctgtcaataagaaactgatagctacagcagagaagctgctaccttctggagcttcttgtggtcctcaacctcaaccacgaaaagcagaactatttaatggaaggactactttggattcaccaagtatctcaacttcaacaagttcagttgcagatgttacctcagagtcctggcctaagccactagcaacaactcaatcggcccggcctcaaatttcacaatctaataaaagttctaaggtgagggatatgtttgttttcaccagcctccatgagaaatttcttttgcttgatgtgagtgggaccatattgatttagttattggtataacactgctggctagtagtagcaacaactaataacgagatgatgcattagtctcagcttttttttttttttggcacattcttcttgttttttctacatgctctgcagttgggttctatttatgtttttctctttcactataggaatttaaactcaacccaggagcaaaaacattctcgccatcttttacaaatgccacatcaacaactcctgcagtacaaacaattgctggcgtaggttatatgcctaaccattcatctgcaatacctgttcctgctcagtcagaagttggattaggccattttggatctcattcatctgtaccagttaagattcttccttacggtaattttccaactggaaatgttgttgcggcttctcagtttccacaacctgtaagtatcattagatgttattgaattcctgcaagtgttatttatattggtacttggtctagcatgtcctttagactaatcttccatgtttggaacaaccttatttagaaaagttacttgaatttaactatttctttgatgttaaagaaatgtttagctgagtttttttagggttaatattattattttctttctggctacagattgttgggcatatgggaagcaggatgcaaccacttagatattctaaccaatatcctattcaggctgtaccaggcattatgcatccaaattctcaatcagtaagtgtattg

SEQ ID NO: 4622 - DNA, 2581 bp, Cannabis sativa
tttttttttttttaaattgttcttataattcatgtttaagaaaagattttttttttccttccgctgtaaatttataatgtaagtctatttctcttttcttttctccacttttgagatgcgaaagtcgggatgtggaaatctgggtagtggctcgatggcaacgacatcataactgggcgtgctgatggagacgaccttacgagcggatctagacagcgatgatgttgcaaacgaatctggcatgttgacgacttatgaacgggagttcttagagcattgcatttgtgatatatcagagaggcatcgtctccctctcctttgtcgtcttagccctctgttattggggaagcattgtgcctttgatggttttagggttgaagattccagaaaagatggtttaagttatggtggatcgatataggtatttcattttcattttttttttttgttttttcttttcttttattgcttctattgcattataagtcattcctttttgcttgagacttacttgatctatttcacttttccttttaacagtggcggcattggagaatatcatgatgtctcaaatgatcttgataacattttagcatcaataaagaatcttgacattagttcagaaaatattagagcttttctgcccaaggttaattgagagtagccatgtagcaggagggtgtggtgcagaatgtgaagcaaggtatgcactcttgttatgtgagatttcaacattgttctattatctgcattgagatttgaaaatgttagacttaaaaagactgtaattgctcatgactaaaagaccaatactaattgtgcagttaaagaatttaattttactattgagtttataaaattcaataatggcaaagagctttatgttttctctatctctagtgctcttgatgagtgctaaggtacttgatagttggtacgactgaaacgtttggggttctcccatggactggacattatggacttagttggaaggattctttttgtttgagttacctttctgtgtttgataattggggatatgtcttcatattatattatgtcccagactccccaaacaattgttaactatggttatggattttggtccttgtggctcatacttgtttctgccgtttgctttactttctttcatcacacaatccgagtcgtttacagttacaatccacaaattcagaaacattattagatttctggagatcttttatgaatttgttctgaaaaaagttatagactcttggcaaaactaaatagtacagatcgccaaaaaataaattttcgattagtaacatagaacatttgaaagcttaaaagatccttggactaattcgaggacatctttttaggcttagaacaaccttttaacttcgaaattgaactctgaaatttgactaatttccatcctatatcaattacttaaacagctttagccaattagacatgggactagccaggcagcataccttggtttgtgtgctatatcaatcaccatttagatgattagatccattttcatattgctgttgtctcactattggtgttggtttctccctaaagcatgtgtccttctacgaagcaagctttgcatatgtctatgaatgtttagtttcttttcttgtttttcagttttgctttcctaatgaacttttttattcaactttctgtattctatgttgcattgcaggtgccacgagtgtctttgatcatattgaagatagtaagaccatattatagatgctcgccggctaataggtatattgtaagtaccactcttctttgtaagaactccacaagcacgcaaatagtaaattaaaaataaaatatggtcctcacgttgatgtttcctcactaatatgatatgtcccttttattagttattaactactattttttgttatcagcttgttatcagtgcaagctatatacacagtcagcaaaaaatgttttcaacttttagtttgattgttgcggattgcaaagctctactctctacattacttaatgttcagttacggtttattaaacaatcagcgaatcgggtggcacattacgttgctaatcgggtggcacattacgttgctaggaactcctgtttcaatactggttgtagcatttctgttttttatgttacaaaagacttaaaaaatcttatgtattcggaatgctaactatttcaatgaagttgatattttattttttttttaaaaaaaaagtactattttttgtttaagaaaaagtattaactgccatttacaacggatattaaattgttgagaaatagtctattctaatactagactaaacattgccacaaaatccattaaaaaaaacaacttagactaaacaccgagatgaagtaaatatgtattaggggtttttttcatatcttacctaatatataaaatgtttatttaacgtttttgttgtgcacttaacagaatataccaaaaaaaattaacaaaatataccaaaaagaaaagttaattttaacagacatatattcaattcataagtaaaccaattttattcacaaaaaaacccaaaaagaaaagttaattttaac

SEQ ID NO: 4623 - DNA, 2372 bp, Cannabis sativa
aaaagttggattcaggtttttcacctgctaaagcttgaagtatttgaagaattccggcaacaccaagttgacacttttctaacaccaaaaccttcaggcaacactgaggattcataagcattgatgataaaggccctgtgccctgttttacataaattaatcatagaaattcaaaaaaaaaaaatctcattaaaggataaaggatatatgtattctaacttgataacatataactgtatcggatcttccttgaatatttcatcctagaatttggagtcatgctaacaaaataccatcttccttttgtctgctacttgtagagatagtaatatgtgaagccaaaaacaacccaacaaaggtcacaagatatgcaagagagaaagaactaattctatctttatatctggcaatatcagagatgcataactatcaataaagcctcttaacaagctatttcaaaccagccgtgtaatctatatcagctatatgcaagaaagaaaggaatgtttgataactttactaagatggattgactaggagggaaaaaaacaacaaaaccctccagaaaagaatattaacaaaaaggcaattgtaatcaaattgggcataagacaattcagtctgaaaaacaccgagccaaaattatatgacagaagtcaagtgaccttaccagtgagaaccaatagctcaagtgattagattaattgcaaaacatgtcccaacatgattattcaaaggcagaaagctcaatcataggaccatggtgttaagagtaataatgtttagtacctattgtaactaactctgtttgttaattagttagttagttaataggtaagggcagtttagtctttttgggtttctctgtaatcttctacttaaaaggctgtaatacttcatttccaaattaatgagaatcattactttccaaacttttatttctttcacatggtatcagtgcatatctgattctcattcttgatttgtcgtcagtcagtcatcaccctcaggtgctgcagcctcatcattcatgcctattgtattctcccacaagttagctacgaaactggatcatgataacttccttctatggagacctcaagttctttccggcattagaggtcataagcttcaacgatatattatcagtactgctactccaccaccgcaatttctctcaaaaaatgatcgtgcttcaggaacattgaatcctgccttcgttgattgggaacaacaagatcaactgctattttcttggttactttcatcaatgaccgaaccaattctcacacgagttgtgaatagtgaaacctcaggcaagctttagtcagttttcggaatgtacttcacgtcacaaactgaagcaaaaatcgatcaatacacaactgagctgcaaaattacatttgttcagacattcattaactttaaactcttgttgaaaaagagtttaatcttcccgtaaaagggctgcaatttgattggggggtgaatttcaagccttcaccccatatcttgttgacaatggcattgatcatagaatctcttgtcccaccactcatgaacaaaatagtgtggcagagaaaaaacataaagcatctcattgaaactgccttgacacttcttgctcgtgcttctcttccattaaaattttgggatgaggcagttcgtgcctctacctttcctattaacaggttgtcatcttcagcactcaaagggaatactccctttaacaaactctttcacatgcagtctgactactctcaaataagggttttcgggtgcgcctgctacaatagacacatacttgcctttagaactgaggaatgcacttttcttggttatagtctaaaacataaaggctataatgtgtctgtctacctctggcagactctttatctcgagatgtcatcttcaatgagtaccactttccctatgctaaacataaacagcctacacctactcaaaactattacaactgaagatccaactcctactattcctgttccaaaggcccatctatttttcaccctgctactccaactcttaactcaccatctcagtctacacctgagcctacaccaccatcactgatctagaatcttcctctccaccctccatttcctctcctgcagttaccctctaccaatgctcaccatatgaaaacaagagcaaaggcaaatgtctataaaccaaaggtatacatcagctccaaaaaacccttgactcttgttgatgctcttgttgatcccaagtggaatgcagccatgaatagtgaagtgtatgctctcaaaaaaaaaaacaaaaaaacttggacacttgtcaagttacctcatgaaagaaaagtcataggttgcagatgggttttaaggat

SEQ ID NO: 4624 - DNA, 654 bp, Cannabis sativa
tttgtgaaattataaatatattacaatgtccaaaattagtttcggaacaaattatttcacacatttgtataaaacagacttcaaaacaacatattttgtattttcaacattatacaatatttaaaaattttcaaaaatttatgagagatttcaaataatcataacgtgcgatatataaattttttggattgaaacctatccatacattgaaaacacaaacataagttgttttgatgtttgtatgcgagttaaattaatttttttcaaacttatttttgacatcgtaaattattcaaaattttacaaaaacgtataatagatccttaataactataacatacatacattcatataaacatgattcaattataatttttttccatgcaaaaatcgctcttgtcgctggagctagaaggcatgacctcaagagtcttacattgataatatgtgaaaacttaatacaatttaagaaaaagtgtggcataagtcctcaaaaaatttactttgatgcaaataaattctcaacctcaaaaatggcagtattagtccccatttcccaaggtcacatttcttgtaagcccgctagtctccaagttaattgataagttaagtgctaacaagaataccacgtgttgaaggtttattggtccaaat

SEQ ID NO: 4625 - DNA, 2531 bp, Cannabis sativa
taaaatattatatttgtcatttctatatttgtttcttcaagatcatgttatcttttatttttgaaaaaaagaactactaaaaagtgtagatataaaatgagatatttgggttgttctgttctgtgtatgggtcctatacatatatatttatatatacgaacttattaattaatgaaaaaaaagaacgacaaaatgttaggatatatttttatatatagaacccgtgaaaatattacaatgacccaattattaataattagtttgtatttatatatacatatgtataagtgtgcatgtgatcgaaaccttcaaatttgtgaagaaaaagaagtttcatttatttttcaaaagtaccatttaaatattaaaagggttgctaagggatatcaaatgttagaaaatcaaataatccaagatataatattttatataatatagaacacaagaataataaataataattaggtatatatattagaagtagttttatttatctcatttatcaataacaaaaaattgtacaaaaattaagggatatacaatttaaacggtttttattttagaaataatctattttctgagaattggcataaatgtatacctgttcttgttgtcaccttttgttaccaaatctcttaaatgaagattatcataactcccttaaaacaaatctcgctgtaatattggtgtaagtggcaatacatgcgtaagtcgaatgaaaagggtggcttgggtttcgagacttggagttatttaatcaggctctgctggctaagcaagtttggcggtgcttgagatacccaaccttacttagtacttaggttcttaaagcttgttattatcctaatagtgctgttcttgatgctaaatgtggtagtaactcttctttcatgtggcggagtatgatgtggggaaaaaacttatcttgaaggggtatcggtggagagttggtgatgggaatgcagttagggcccctgaggacccgtggttaccaaggccggtcacttgtcgtgtgtatgacaagccggagttcccccatcaattgtatgttgtggacttgaagttagcgaatggtggatgggatgaaagtttcataagggcacatttcaatgaggtggatgctaatttaattttgaggttgttgagtggtgattggggagtggaggataaagtgatgtggcattatactagaatggtgaatatttggtcagtagtgggtatcggttggcgcatgatatgagggcggtctctcaccaatcgaatgataatgttatggaagcatggtggaaaagtttgtgaaggattaaggtcccgctaaaaatcaagcattttgtgtggaaggcgtgtcatagttggcttcctaggaattctactttatccaagcgtggtattcaagtggtgcctacgcgttctcgttgtaaaggagattagattgaggatataactcatgtgttgtggggctgcccgaagagtaaggaggtgtggaagcgctgtgggttatgggacgtgattcaaaagggtcgttcgaatgatgtgttgatggctttccacgagatccaaaaggtttgttcttcttcctcttttgagtttattatggtggtatcttggcatctttggtcgattcggaataatttcattcatggagagtgtcttcctagagctggggatatattagagtggtgtgggaattacattcaagattttcagcaaggtattggagataaacctgggggagtaaaagggcggaacagaggtgggaacagccacatgttggatgtttttctgtttatgtagattctgggttttctcttcaaggagagggggcagcgactggggtggtcattagagatggagagggggttgttagctttgcctcagctactgtggtccgttatgcaagcattccgctggtggcggagctgatggcgataagagagggtattaaagcagccattcagcgtcgattgtccttgtttgaagttcgatcagactgcttgcaaactgtaagtcttattaatggagctgaggtaagttgtcggcaagaagatggtctcattgtggagattcaaagcctacttcggcatcactgtgccaatggggtgcggtttgtatttcgggaagcgaatgtagttgctcatgtattagccaattacactttgacaaacaaagttagtgctatgtggattgtgatttctcccccttgtgctcgtcacgcgattgagcgtgacttgccatttccattgtttaataaattgtcctttcctcaaaagaaaaattctttagcttatatattagtttttcaataaattagaaatattatctatttttttaaaaatatttaaaccctgacgatttaatagtcaataacttataactactaaaacataggcacatattaaagattttaatctaacataatactattaaaataatttaaaaataattacattaatgatactatatatatacattaatttggccaataggtaacgaacaaatgagcatgtggtacctttttttttttttttttt

SEQ ID NO: 4626 - DNA, 705 bp, Cannabis sativa
tggtggtggtgattacaggtattgttactctgtttcattatatgcacaattggttatgcatcaatagctgtttttgggtacttaatgttcgggtcaggagtacaatcacagatcactttggatcttccaattgggaaactcagctcaaaaatagccatatacacaactttggtgaatcccattgcaaaatatgctctaatggtgacaccaataattgaagctgtcaaaaatggttttccttgttatctaaataagagagtgtttggtataataattggaacagctttggtcataagcagtgtgatagtagcacttgttgtgcccttttttgcatccctaatgtcattggtgggagcaattttgagtgtgacagcttcaatcgtaatgccatgtttatgctacttgaagatatctgggatttacaggacatttaatcatgaaatggttgttttagtggttatgatattgatggggattgttgttactataattggtacatactcatctgtactagatattttagtgaatctacaaatgtgaagacttgttttattatactctatttctcaatgtatatattgagatttttttttttttttttgggttgttagagcaagtctaatgtggctgcaaatttgaggatgctctttccaacgtagcactattagtttagcatatatgtggtgtattatataattttatatt

SEQ ID NO: 4627 - DNA, 983 bp, Cannabis sativa
attactctagaatgacaaaaaaaaaattcttaagtggtgtattataaacttatcctatattatatagtatatcttaggatagtattgagtttttaattaaatagatactattacccacctcaactcaaatggtaggccaagagctgctctgctggcataataaaatgtgaaatttgtaataatatgggcctgtgcaagcagattaaaaaaaaattaggaaattatatataaattttataagtgtttatatttttagtgtaaaaatatagtttcttttgttttttttgttttttgttttttttttttatatgagaaatctggtaactagatactcttatagtaagcagagaggtaactaataattactataaataaataactaagtatcttatgttattttttttaaatatatattttttaacttttttttttttaagaaaaagctatagtttttacaaatttatgctttagaaatcataaaaataaaattccaacgaatatatatatttatataaatatgggagtgtacaatcttactttaataaattttttgatagaaatcttactttaataattatctcatctaactaaatggtgatcttaataaaattaagaaattagtaacagaaaaaatatgatagttataattaaagagaacatattttgtgtgaagatatgattattgttagtaaagttaaataccaggaaattgagaagaaatgcagtggaaggattttgcttccatctaaatggtggaacagaatagacagtcccaccaaaaataccaaaacagtagccaaatatatagagtggtccacccttcatttttatagttattatcaatccaaacagtgccacaattatgctcataatccaagctgtgtttactgatatttcccctgaagctagtggtagatcaggcttgtttattctgaaaattattactcatcaataacttaaaattcatcttaattttttttttt

SEQ ID NO: 4628 - DNA, 1608 bp, Cannabis sativa
cgggttagacatgtcccgcccgaacagaatgggttttttttttaattttacgggttgaccaggtcgggtccagacgagttggtcgggttcgagccaaacctggtcgaaatgttcaatcctagttttaattccaagaagcatggatcgggaattgtaggtgtgtgtaagagatatttgtgtaattttttatttggactatatatttatttatttggtcggttggaagtacttttataatattgttactttttttggttaaaattaaaaatttctaaattcttagttgtttgaatacactaaacaaatcaatttttgtctacaattttttgtgtcaacaaaagttgttaaattataaagttcataattttgttaaagtcaaaatacttctacatatacatatgaatttattttgcatgggtagcaatagcattagtggtctccataatcatttgagcaaggctaaattcatttaacgattgaaaaccagaataatatcaaaccgaatttaaaatacattccaacttaatcaaaataaaaaaaaaaaaaatcaaaaagaaaaaacaaaacaaaatttatattacatcacagaatacattccatatatattgcatattttcatgttcatataaaacattttcattgcggtacatattttttaaaaagtttattagagtacatactaattttaagaattatttctagaaaacacaaaaataacaaaataattacaaaaatacagttatataaaattttaaatattttttacaattttttgaaattttatttacataaaatatattcatttatattgtacttttattattttattattaagtttttattatttgtatattttttatgtttgaatattatctttttattattttcatggacaccataaaaatattaaaaaaaaaaaatcataaatgtataaaaaatttgaataatttatgtaaattttcatgaaatctaatactatctgaaaaaagtagcctaagactcatctatgaaaataatgaatacgtgtgtgaaaatataacatgggatatcatccaatcaaatttttcatttgtggtatacatctagcaacaaaaaaatcatacatccacccaaaaaagtacctaaaaaaccatcatatatatgataagctagcaaaatcgatgaaaactattatcagtattatttcaagaaatcctaaactattttttatgcaacagaatacaacttcaattaggagtcaagaatatttttcaatgctaattacaactccttagtcaaccttcacgtccaaaattacattttaaaatattttttaaaatttttttttcacaaccgtattccttataattacaatatcatcgctgtaaatttttaaaaaaattcaaatatttttctgaataatgttgtaagcataacgaatactctcataaaaaaaaatatattccaatacatattttcagatgtagaaattgagtaagagattgtaacaagaagtttagggtagcactcctctttttcaattctcctgtaacaaagtcaatcaatagtgacaaataagtagtaatcataatagaagttttcaacgacttcacaaatattactccaatg

SEQ ID NO: 4629 - DNA, 819 bp, Cannabis sativa
ttttttttttttttatgattctttgcaaataattcttgagaaacactcgatgcttttatctaatatttaatgttgtttcgtaaaacattatagaataaaagtcatttgcaaagtaacattaaagaaaaatctatttcaatagttactcataatgttaattctaatttgaaatatttaataggttttaatgtaacaataattgtaagcttgtaactatagacatatatggctcgtttggtatgtcatattgaattgtattgtgttatgatagattgtactatattgtattgtattagtagtatttaatacaatactatatttgttattgacttgcatgtattaatatatagtataaaggtacaatatattttcaatagaatcgaccccaacactgactacgggtaagaccaactacgggtcgggtccgtgttcggttctctagtccaggtccaagtcaggcccgggtttggtcccaggttcgatgttcgaggtccgggtttggggttcaagtccagggtctgggtctgaggttcgggtcccagtcctagttttgattttgggtctgggtttgggttccaggtccgggtactttgtaaatattataatacaagctaatatggacaatttactatgtattaaataatataacttatattgtattaaaaaatttagtcataataattaatacaatacatttattcaaacataatagtatttattatttaatataatacggtctatattaaataaatatgtaatttcagtataatttagaattatctctttatttgtctctgtagaagcttatcaagctaaatc

SEQ ID NO: 4630 - DNA, 1192 bp, Cannabis sativa
actactagtcaaacagggcaatagtgtactggggattacttcagctaaaatttaatgactaacaaaaaaatctacaactgctacttcttcttctttcaacttagctcacagtaatgtagttgtatttaattttgattaataaaaatgttgaacaaagttttttttggtacttcattaatattattcaattacagctcatagacctaacgacgctcttaaacaatgagtgaagcttgtagagttagtctcgagataactttgattatttctttagtgagttcaacaatgccgacctacgaatctatgaataagtggatgagtgctcccacgtgtaacgcttccctaagactcgtgatcaagaaatcccaacgggattttgtatggcatatgactaatgaagttacttctttgatcacttgggggcacataggatatgttatggtatacgagagtcatatgttacatgatcattcaaaaaaataaaaattgcatgcctatgttagtactttcatggtaaagataacattatgaaatattgacgtcactccgagtgattgagtttcttaagacatggaatactttgcaagtgtaaatgtcaagcggtagcatataaagtaaaaaaaaaggagcaaacatcaaaataaagtttttattatgttggaataatttttaatttaattcaacaagtctgataaattgttactaaggcttatccacattaaaaggccacccgggatgaccaactaacacactaaagctaaaagctaaaaaagaaaagaaaaaggactaagacagtgtcctataaagcccagaacctatctaagtcaacaatagcttcaatttgttcctcgttccctcttggtggcgcataagtaggaggaggaatgtcaggtactcaaggttgtagcttttaaccctcgcaacttctttgattgttggctcaccaccattaaagtcaaattcaatcctcttaagagcatcatcattgaaatgttgctcacaatgttctataaataatgagactttgttttgagggaaggtcatccagttgaatgattatgcaccaccattggacgatgaggcatgatagatggcatcaaagcataagcaatcatagaaggacacatcaatagctgctttttcctccaactcggccacttgactcctaaggcgttgaactagtcctctaact

SEQ ID NO: 4631 - DNA, 998 bp, Cannabis sativa
tataattgcactttcaatatattctttccaccgccttaacacgtttcaattctttgtgtccgttatttatgaggttgttagtataaataggtcatcttcccacgatatttcataccacctctttagtcttctttattgttctcgtcttgttgtttttcaattatattcatcctcaaccctaagtaagtttgttttccatatctttcatcaatttcttttctttatttatttacatctagtcttcaatctgttttcattcattagttcactccattcctataatattttttttcattgtgtatatccgttttctattttgcatagttaataaattaaaaattggtcataattaagcatagtgtagtagttttgcaccccttctcacaaaaaagaacatcctaagttcgaattcttcctccttcaatttcaaaaaattaagttaacgattggctaattcaacacatacgaacttgaatggatctttgtatgtttgcttataagtgcactcttatctcttctatattgttattttttttttttgaaaaaataaataaattataggcattcaattgaagaaatacaaatttagtcagttatacaaatgatacacttggtcaatcaaaattttctatttgacaaataattcatgagaaaattcatagtattatcctttttaagcctaagcttggtaatcgtgtggttgaatactaaacgagatcaaagtctgcctcatagtgttacggccggttaattgtgtggtaaccgtttattttatttggtggaattggaatacttgtatttttaagcaaaaaaagtttatgattttttatgtgaataatttgattaaagtaacgcttaaagcgagattacttctcatattgataggagaaaaatctctaaaagagatcaacaaattttttattttgtttgtaatttgtaggtgagtcagtctcttgctagtttgtggatacttgtttgtgtagcatttgctctgtttt

SEQ ID NO: 4632 - DNA, 987 bp, Cannabis sativa
ctctctctctctctctctctctcttattaccccatcagccattataggcttaccaatcgtgctaaccattgcacttaggcacttattagcccaataatagagacctagatcatgtaattgaatccgtaaaggaactcatggtctcacaatcattggcttttgaccgaattggaacactccctcctccaagataagatctcgagtagcaacatcattgaatttgacaatggtaaatctcccattcattcgaacaatttatgctattgtgagttctccccatttgcgtttaatcaaaccttcaaacattgcaatcagatggttaactcctaacaccatacatactatagcagaatttcaatttgcggctttctctttaacctctaccacatcaacttgagctattctttttccatctttcaatataggtttagtataggccagattaggttctcaaaaaaaagtcttaccttcaatgaatttcttccattattagttgagaattcgagtggaaatcctcatgctcaacctcctcagtccaactatcctccatcagttcttgatcaattttaagcaaatcacctgatcacaaagctttagcaatcaattctaatccttacgaaccaacattcacctcaaaaatcttcatatcttcttggattgaaggggcatctgcaagattcaatctggtaaccggatttcgaataactcttttctttttcaccatggaatagaataaagctgatcatgcaatgttaaaaaattttaattgttgattttttttttataattttaatagatttttattttatatattttttttaaaaatttgaacttttttttaccatgattttaaatttaaaagtgcaaaattaatgttgcattattctaaaaaaatattataacttcttaatttcttaatcatccatgaaaaatgactaattatgggacaagcttaagtgaaagaaaatcaccaaaaatttataaata

SEQ ID NO: 4633 - DNA, 1254 bp, Cannabis sativa
cactcagtccctcactcttactctctcgatatccctctctctcagtttctctgacaccgccggctgcaacggcccacccaacctcgacgacaacgaacactcagcagctcagggcaggctgcagtgccctctctctcgttgctgattttgcaagctaggaagctggtgcaaaaggctcaagaaaagttgctcaacaagtttcatctaaatctgaggaatctgtgaaggtttattggagatttcggtgtgggaatattcataacatagtgtgaaatctctctctaattcaatagctaaagagtgttgactggactggacttggcaagatctatgatttgattttgaagctactttgaagatggaaggaactacaaaggaaatttacttagaagaggaaagtaatgatgaaagatatagtaaagattctgaggatgatgatgaggaatattgctatgcttctgtaccagtgtctaagttacagcctaggaaagttttatcaaagggtcgttggattaaaaagatgggaatggctgagattgaagttcataagggtacaatgtggaggacaacaggcatagtccgttgtggcaaaatctattgctcaattgaagaagttttgtttatggccgaactggggtctttccttctgatggatgatgctggtgcaagtatttctatggaggagatatatatgaatctttcaaatgaaaagaatggatgttcttgggagctttttcaggcctacaaactgctgaaatcacttggttacattttggggcgatatggtatcccccggtctcttaaacatgttaagagcaatgctgaatcttttccttcacagtgcttttcagaaactgtagtggatttgaaatccgaagacgaaatctctgttctaggaatgtttagtaggttgcaggttgaccaagttaaaccagtatttgatgtttatctcccaaataccaagtttagaaagtcttcacctggtgctccaagctttgtgctctgctttaccagtggctatccgccatccaaacccgaacttcaacgcatggagagaaaatgtggaggagttcctttgaagttttgtcatgttgagcagggacgagtgagtttcatttcctttgacatagtgcagcttcctatcctaccatgacatgcagttctatgctggtttagtattagatgcaaggaaacacatacgaagacattcaactaatctgagagaaataacagactctttgatggactggaaag

SEQ ID NO: 4634 - DNA, 1200 bp, Cannabis sativa
gagatgacatgtcatacagatccacttacggaggtaaagaaaaattgacagtgggaaatggtaatcaactctctattactcaaatagggtctggtactttaaattctcctacaggttcctcactattgttaaaagaaatgcttcatgtacctgatatcacaaaaaaattgattagtgtttcgaagctcacagttgataacaatgtctttattgaattttattgtgatgtttgctatgtgaaggacataacaacaaagaaggtggtgctggaggggaggcttaggaatggcttgtaccagttcaacagttccaacactcacccacaaactgattttcaaccacaaaccagcaagaataaaaccagcagctgtgtttctccttttactgctattactgagtctagtccaaatgtgagtcagtcttgtatttccctaaaggacaaatggcataggaggttgggtcatccttccactaaagtactgagtcaagtattgtcccatgctaatgtaaaactgtctatgaatgaacaacatcacttttgtgaagcatgccaatttggcaaatctcacactcttccattaaaattgtccaagtttagagctaaaggcatgctttatttagtccacactgacatttggggtcctgcccccataatgtctaacacaaatctaaagtactatgtgcacttcattgatgattacactaggtacacctggatttaccccttaaaagtcaagtctgatgctctaaaagctttcattcagttcaaaaccttggtggaaaataaatttgaaagaaaagtaaaaaaggttgcaaactgactcagggggtgaatatcagtcattcacttcctatcttcaagagcatgggattgctcttcaattgtcttgtcctcacacctcagcacataatggacgtgctgagagaaaacatagacacatcacagaaataggtctcacacttctagcacaagcaagcatgccacttaaacattgggtggatgcttttcagtctgcaatgtatctaataaatagactcccaactccagttctaaaaggcaaatcaccttttgaaactgtgtactctaggaagccagattatcaattcttaaaagtgtttggcacagcttgctttccatgcctaagaccatatcaaatccaaaagttccaatttcactcaaccaagtgtgtcaatcttggg

SEQ ID NO: 4635 - DNA, 1027 bp, Cannabis sativa
tatttgtctcataacaacctttcaggagagttttccattgaacttactcaatgctctcgtttaatgttgcttgatttatcatacaatcacttcaatggatatgttcctttacagattaaccgtttctctgacttgtctctttccttaacctttcaaataacaatttccaaggacatataccagagactattggaacgctaatatctgtactggcaattgacttttctaataataacatttctggtgttataccaagttcgattagtggttgcgttgctttggagtatatgaacttctctaacaacatgctgcaaggtcctataccagagtcaatgaaagaaatcaaaaatcttggagttgtggacatgagtcataaccaattaaatggcacaattcccgcttggattggaaatgagcaggtgatcaaaaccctcgatctctcatataacagattatctggagaagttcctaaatatggtagcttcaacaattataccagaagctcacttgtggggaatgtggggttgtgtggtggctcaacacaaatgaaacttcctccatgtaaagttcagcaccaaacacgtcagataaagaagagagtgatattcgttgtgatcttatcagttacactgagcctcctttttctgttagttgctttcatttcatggtacgttttcttcaaaaaaagttacagaaagaaagatgataaggttacaagtgggatccctagcaattatgggaccaaaactttcacccaaatggaacttgaaagtgctacagatggattcagtgaggctaatcttcttggccatgggagtttcggatcagtctataaggctgtcatcaatcaaggaaaaactacagttgctgtgaaggttttccataaagattctggtctgagttaccaaagcttaaaaagagaatgtgaaatattgtccaaaatcaagcacagaaatttaattagaattataggattaacttggacttcacagttaaaggctcttgttctagagtttataccaaatgg

SEQ ID NO: 4636 - DNA, 519 bp, Cannabis sativa
atagcagaattcctatccactgaagaagttgaagatgtaaaggaactgtttagaaagatggacactgacaatgatggtattgtttcaattgaagaattgaaatctggacttaaaaattttggatcccagcttgcagaatctgaagttcagacgcttattgaagctgtgagtgtctttcattcatgttctgttgactctcacttcatatcttatatgctgcacttattgttatgcaatcgggaccattcacattattacatatggtgctatttattttctagtaggcgaaatctttccatcccctagatttacaagaactgtagttgaaatatataattaattaactatggatattgtccagtagctaatttctttctcctgaagattagttctctagtttgttgttttgttaagttcgatggacatctgaggcaagcaggcacattttagacaatgccatatgtatgttctgaattattaatggatacttttgactgttgggagttaatggagccactt

SEQ ID NO: 4637 - DNA, 575 bp, Cannabis sativa
ctaatatcaatatttataagatacagttgcgcaagatagtagatttcctcaatgactatctcctcaagatcaagaatcttgttgattttcttgctactattggccatgtttaatccacacaagatcacattgagactattttcaatggattatttcctaatacgatgttttgtaacatctataacaaccagaaaagatgcatatatgattgctcaaattgaagccttgctcatggcttaatctacaagaatcgacaaaggggcaagagaattagatacagttaaaacagaagttatatagacattttatcaactaattttataaaattgtgaccaatattttattcattgtatgggttatgatcttccactaaatattcataagtagagttaggtatcttcgtctattaacctgtttaattatttttttttatatgtgaattagtgtccttaatagtctaacaaaaatttctgtaagtcatatatagataaaattttcattcacaatagaaaattactcctctatttttaagtacctctattaatacttaaatgaatatttagtctagtttcaat

SEQ ID NO: 4638 - DNA, 603 bp, Cannabis sativa
atcaataggtcaaattgaaaattgagatttcctccctatgttttaaggggaaaggaagagccttttgtgctggtggagatgttgctgctgtggttcgtgatcttaatgaaggtatacattccacttttcctatatgttttgctgattttgaatccccattattgatgtttaattctggacaacttgaggtgtcttttactttcataccttaaagcaaaaaggtagcctaggttgattaggttacttttcttatttaagctatttttcgctcggaagatgttagttgtttcattagtcgcaaccaatgtgattagtactaaactgatccctttgttgagtgaatggaacgctaaaaaattcctaaaccttttactttggtcttaaaataatctgcaactgacattctgttgtttcctcttgtacaatataggtaagtggaaattaggtgcagaattttttcgaaaggagtttaccttaaattacttgatagcaacgtacagtaaaccacaggttagtgagttttcagttgaagtagaatcttatcataagcctatagccattatttcctttgtaaatatatttgatcaagttatttccttacca

SEQ ID NO: 4639 - DNA, 1465 bp, Cannabis sativa
tttttttcaattttattctggccttttcataattcaaaaagtcatacaacaactttttaattatgtcaatatattcaactagctagctataatttataaagacatgttttttttttttttttgatgaattatagtatgaaaaagtaagtttaatttcatgtgttgcttcatttggttggcttccatgatccataagtttttcttatattatttcaattttacccattttaactggatttttcatcaactaaattcaataaaaaaaaatgaaaatagtgtttgaagaattatagaagaaccaatatgtgaatttttaattaatagaagagtggtatttaggtagaaagaattacaatgctcaagttccagattttataacagtgtttggacatagtttagatctctttgcaaatgttggcctaaccctatttataggcaataaatgggcttaagggtcgttaattagttagacctacaacaagtaattagttagtttaaagtgattatttcacaaatatataaaaacaacaacaacaacaaaattacaaaaatacggtacggatttttaaatatttttataattttatttatagagaaaatacggtatttaatttgatatatttttatattgtactcttgttaatttgttattaatttttgttatttgtatgttattttttattgttgttttaatgttgcttgaatgttatttttttgttatttttttatttattttttgttatttttataaaatatcataaaaatataaaaaaaatatttgaacataaaaatataaaaaatttataaattttttatagaatacaaagatagatgtaactcacatgtaatgtgataggcgagccatccaaaacttgatgggtgatgatataaaaaaaatgaaaagatcattatttatttttatttttaattattttttacatgtaatttttaatagaataatttacgacatagatacttaagtttaattttttatgataataatacttcagatatttccagaactttcgtaggtacctagccattaagtatcaattcaatggtcacgtggcagtcccttgattggtcaaagccattaaatttttattttttatttaaaattaatttaaacataccaataagaaaataacatgttaataatgacttcacacttaacggtcaggttcttacagaaatttcagaaatatgacttagtattattactgtcaaaaataaaatttaagtatttatttgtaaccgagatttaaacttaaatatttacgctgtaaattaataatttttttttaaaaaaaataaattaggggccacaacaccctttggccccttgtctccatcattgggcgacgattgccaacctattaatactttattagaaaagcatacctaaagatgtcacacaatgcatggatgtgcatatttccataattatttacttaaaaatttataa

SEQ ID NO: 4640 - DNA, 705 bp, Cannabis sativa
agatgctatgggtactgtttgggcgtcttgggctataggatctgttggtgatttcaaagttgaggtggcagagcttttggctcttcgtggggggctgcgttgggtggccgaattgaggttcatggtgtgaaaagctgaaacagattcgttgattgtttataattgggtgaaatctccaaatggtaatcttgcttttagaccggttattgctgagattgtttctcttttagttgttgttggtggtggttcgtgtcataccatttcacaaaatgtgaggtgtggcccatatacgggcaaaatttattactaggttaataggagttaatgtttagacgaatatttgtcttcattttattagtgctcttgcaatagttggtttgagatttgttgatgaaaacatgttttccttccaaaaataaaaaaaaagaaaaaaagaaaagtaatcgggtacatgttcacaaacaaagggaagcgatcgtggcacgtataccccaagattagaaaagtaggccctctcacaatagatgatgacacgtgtaaagtaggaactgtacgacaagaaccgtattggattgagccataccctgcaatcctatccaacaacatccttcgacttcattaagacagatttccttcgaacccaaactatccatcccccatctccaatctccttccccccatctctctttctaactccattaatga

SEQ ID NO: 4641 - DNA, 848 bp, Cannabis sativa
caatttgggaattgaaaactcacatcttcaccctaaactcaagttcaacctcaaactctcaccaactctttgtccacaccatacactttctactctacacctatctaaaaaaattattcacaattgttggaggtccctcttatttttaccccaacaatgtaaagatgaaaacaaaaactggtttcattaaatgatttttggttgaaaatgattgaaaggtagacccactaatatatatgaaattccatgcaaacaatgaaattggtcccattttttttaaagaattgcagctttgaatcataacacaacaccaagtctcataccatttgcagcaatgggcctcaagaaaaccagatccatgtaaaccaggctggactggcccatttataacaaatatgaagtccagggtccagctaactatgggctttaaaacaaaaaacaacgtgataggtttgtatcaagttatttttagggtgacgaaaattactttttagaaagttaattattctctatcctttgtctcaacttttgtttatagttagaacaataagataaagataaattttgacttatttttatcgtttgaaaagttattatgtaaaatattttttttaatgaaaaatactttttaaaggtttttttttttcttttcgaaaatgagcatttattgattaataacattagacgatctcatggtcattacaaaataagtcttccaaaataagaaaatttacaagttaccaaattgtttgtaagtaaaaatccatttggctacattaaaggcagcaaagttacatattctcggtataaaagtaacaacgtagccatcaaaacatatagagagtttt

SEQ ID NO: 4642 - DNA, 1857 bp, Cannabis sativa
aacttacaagaaggctgccaagtttcctcactggcagcttcaaatgagtgattaattcttggctttgcagaaaatcaagactttgggtttcatatctctattctctatcaccacatgctaaaacccttgactcaaatggattttttggaattaagaaattgtggtcttgtatgtggcaatccaatatccctacttaagcttaaacattttatttggagaactggtgtccttcttgtgtcaattgacttaagcaaaaggaaaataattccatccccactctgcctatttgtggttccaatgaggaaattttgacctatgccatggtgagttgctctctgctatatgtacgacctctctaacatcttgtttatgttaataatcctcatattcctcgtaatgaaaaagtaaaaaatattaattgtggcggctaagcgtccacgaacaccattgaggatctaatctcacattaacacaaatatatatattttttttgatgaaaaataaataaaataaaattaaagaaatattcctatcattcattgacttcccacgaatagaaaaccaagcaaatggtttagaagattggagtctgctaagtccaaaaacaatggatactcatacactcgtctcctccacctcttccatcatactatccaaaccacccgttttcccatttcgtacatcttctcaagcttatcatccttctctttcttccttagcttcctcctcttccaagaccctcaaccttttcttctctccatccgcttctcgcttttctccagtgcttcggaagaagctttctgtcacttgcggcgctggtattcaggagattgaccagacccaatttccagagctggttctcaagtccgaccgcccggttttggtcgagttcgtcgctaattggtgcggtccctgccggttaatctcccctgttattgaatgggtcgctcaggttcatttctctatctcccactctctcgttctaatctttcttaattgtgtttatgctttttttttttctattgtttgggtgtttttttttttttaagaaaaatttacttttgaatactccatgttaagttgataattgaagaataaattatatctgtataagaaaattgtgtttgaacgaggatattagatgtatttgaaagactgatttaggttgaagaatggagctgtagcttgagattgaaaatatggagaagtgggttgaaagtagtaaagagattaagtatgatggattgtgatagagaatgagagaattgtaatgattctgttatgattaagagtttttgcagacaatcaatctctaaatgctattatttttaagttcataagaagattctaagttgtggctttttactaggcttacttaaaaggaatttgctttaatattactttttagagatcaatttagtgagcaagttactcatcaacaactaaaagatcctttcttatggatgagctctaaggaggatataacaaggtagagtgttaaaaggaatgtagtcactaagtgagaagaaggttactgctttagaagcttagcttgagaaatgatgtttggttgtttcacgtgcattggcaaatattataagttgtatcaaattgaaacacaatgattgagaaaaggagttcttttgttgaggtctgttatttgtattagtttctaatttagaatgggaaacacttcccaatgtttactttctcttttttaatgaactggtggttactaaaatctgaaaatatttgccagaatgttttagggaatatcataataaagaaggggatcaaaatgtcattttcattgaactcattggaaagggaatgtgtttcactattctagtcactttt

SEQ ID NO: 4643 - DNA, 928 bp, Cannabis sativa
atttatttattattatcgtggtatttttttttatcaatttgcatataaaaatattactgtacactgtatgtttgagtgatctctaaaaaaattatactaaatataatatttactccttataaaatatatataataatatttattcttttttaaagtaatttatttttatttttatttttttttcaaaaaaatcccaacatctccatataaaaaaaattaaaaagatataaatattatattatattgtttttagataatgcactcaagatattttaaaatattatattctcatcttaaaaaaataaaaaaaaaaattataataacctctataaatttaaaccaatcactatgtacataattatatatataattatttattataatataatactatatatatttatataaataaatgtaacaaaaaattaaaaaaataaacaaaacaaaaatgactatggtgaagatcaaaccaagaatctcatcatcatcaacatacatattatgcaaaatattgagctaaaatttatatattatatttcttttccatatatataacataaatttaatttttttaggggcttccaaaattgtgtggcccggagcctaggcctcggttgccccacctaatggtcggccctgatcattactatcgaaaggtgtttgatttgctcctttgttcatgttcgccaagttttggactactcttaaggctccttcctttcttagtttagacgagggggcagaatcttgttttgttttgtttgtttttatatttgtttgttgtgtaataatggtattttgtaccgtttgttcttttttatgttggttttaggtcgtttttgtatagttcgcccttttggtttgttagtcttaagattttgcttcttttataatttgttagtttgccaaccgtttagacgtttagtca

SEQ ID NO: 4644 - DNA, 1860 bp, Cannabis sativa
  modified_base (333)..(335): a, c, t, g, unknown or other
agagagagagagagattcacctacaacattctctgtataagaacgctcataaataacaaagactcgtggactacaactcattaatgcatgaaccacgtaaaaactacttccattaatgctttcgtagctctccttattatatcatttaattggttgccaaaaattttggtcaacagtttccactatgatgacatcactgtaattgtgaattactatatgttctgcatttattagaaaatgtatattaaacaacaatcatgaaaataatattttaaattaaatgagttctaatcttctattgatagcaaataagattatattgaaatgggtttnnnttagggcataaaatcccaataggcggtgcatcatttgggactgcccttgcagcagtagcatcacgttgcaattcactgttccttcagtttgactctgctagtctctgtcaaagttgacggttatccagttctacatttggtatgtatctagtggggtcataagcatcagagtttgttctctctggtttttcttccccatctacatttcccattcagtagggcttcttcttacattatagccttcttgggttgagttccctgtggttctttcccatggcaatgcactgtctcctcctttctaacattgttattctgcgaattattttccgtggtgggaaaatgttcaagctttttttcttttggggagttgcattttttttagagtttaattttcaaaaaagagctctcaatgaaagcaccaaactgttaactgagatttttgttaacaacaaatgatgcctttttatgtattaaataaattatgaataaacaaaatattgaattaaaaagtatatatattagcaaaggatatttttacaagattttgtagttaaatatgcatagttcatgagtcactcttatttatgagttttcagattacaagatacaacttagcataaattctctccatcatgaaagaatcgataacaataactgtctaaatttgattgactcaaataaccgtcacttttgatctcatctttcagcagttatttatcaaaccatctttttgctcgatatttatccttctcgcaaataacgtagatgatttagcgtacatcattaggatgcttctcacaattagagtgattcatttagcattcttctcaacaacaattgtcttaaatggagttttagataatttttgtataattcttataggcacacttcttcaaattatatctcttgtgcttcttgtgatgaaagcatttcatctttcaagtagcataagcttcttctttctcgttgaacttatttttattaatacacttctccatttatcatgctctgtacgtggatgcagaaatttagacaaatatatttggccacacatgctcgctagatttgcgagaacgtatcatgaggtaagcataaataagatagacacaaccatttatagcagttcactctttgtatcatgctagtaatggagctacatctacttcgagttttatttctaataggatgggttacagaaaaatagctaagtgtagatgctctaatttctggagagatcaactagagagagatgctttgactttatgggtactttttcaaacttgaaaaatagctagtggagctctccttttataggaaaggaggtactattaacatattaataaaatattccaaaaaaattttgaaaattatatttaggctatttttgattgtagatgacgatctaacgataaaaatgactccaaaggtcagtcgtcaattttgggagcttgatttatgtctgtgggactcactttgggtacgttgtagttacaatttataactctcttgaggacaaaattcagac

SEQ ID NO: 4645 - DNA, 2570 bp, Cannabis sativa
agcactttgattatcccaaaagatatccacaattttttccttgaaactaatctcttgagttaaacccttcaactagagagcttccttgaaggcctcagttgttgccatgtgctcagcttcagtaattgagagagaaactacccttttcatgttagacttccaactcactgtgtttccacacactcaaaatacaaaaccagtaagtgatttacttgtgtttatattggttgcataatcattgtcaacatagccatacacttcagcttgttgacctgattttcttctaaaaacatgtcccaaatctgttgtcctttggacatatcttagaatctatttgatagctttccaatgatcctctccaagatcagccaagtacctaataacaacacttaaggcttgtgctagatatggtatagtacaaaccatatagaatacatcaagttgcatacaatattagtatagggtaccttttcaattgccatctttttcggtttgtggacactaagtttgagacaatttgacatgtgctgccagaggagtggctaaatctttgaccttgtccatctttaatttttatagtactttctccaagtaattcttctgatgcagcttgattataccttattccggtctttcaatctcaactcccagtattctcttggccctgctaaggtctttcatctcaaattaactgttcaactgcaactttagcttgttaatctttatttttttttcccactatcaagatgtcatcaacatataacaacaagaatatgttgttggtaaaatagacacttggattgaaattgcttttgacaaaaccaatttgagtaatgaattggtcaaatattttgttcccttttctaggagcttgcttgaggaggcaaaattcattttggttttccattttcaaatcctttatgttgtatcatataaatttcctcttcaagtgggccatgtagaaatgtaatttttacattcatttgttccacctcaagcctatccacgattgcctaagccaaaattactctaattgaggttttcttgactattggagagaagattttagtgtagtctatgccctctttttgagtgaatccatttgctataagcctgcccttgtacttgtccttctctacccaaagattccctctttccatttcaaaatccatttgcaactgactagcttcttgccttttggggtctatatcaatttcttcttttgtaacaatttgggcatatgctataaaatcagtatatccaagtctttttggtgctttgatttctgttctttccctatctctagctagttaataactcttaagatttccagtctcatctacggcttcaaaaatttcaccttcatttgtttgtagcgttggttcaggtactacaccagattgatcattcctcccctttgttcattcttaccacctgtgcaacatgatcagtggtgacattttgagttataggcgttattctcattggcatttcttcttatgtaaagagaacatcccttctgattatgcatcttttgaaaccaaattctaggcaacatagcttatagccgttgacagtagtagggtaacatgaatttgatggctcttggctccaatttttcttgcctaatatgggcataggcagtacatccaaacactttcaagtgttcataggattgttttcttcctgtccaaatctcttggggagctttaagtctaaggctactgaaggacatctattgattgagtaaccttctgtagtaacaacttttccccaaaatttcttcttaagcccaactcctttgagcatgcatcaaactctttcaatgagtggtgtattcattctctcagctaatccattttgttgaagtgttttccttaatttcttatgcctagcaatgctttcttgttgacagaatttggtgaactcattggaacaatactcaataccattatctgtcctaagatttttcactttcttccaaattttattttatatcaactttctccaattgatgaatatttctaatgcttgatcttttaatttcataagaagaacccagatctttcttgagtagctagtcatctacaatgctcaagaaatagtttgttccacctaggtttgggtgtatgtaggctagaggttctattgcggtatgcattcccttgccaaaatttaccctaaaactctctcccagaacacattcctcacagaagtctaatctcccacttaatttcctttgagtagaccttgctttatgaattcttcaattcctctctcacttacatgcctaagccttttgttccaaagttgagtcatatcatcattgttctaagcaactgaggtagtaccacttactgattttccagcaaagaagtaaagataacctttaaattctcctttcatcaccaataatgaaccattcataactttcattatgttgctctcaatcttgatgacacaaccatttttagctaggactccaacggataacaaatttcatcttagatcaggaatatacttgacattttgtattgtgttgatcgcaccactatgcatctttattgtga

SEQ ID NO: 4646 - DNA, 1291 bp, Cannabis sativa
  modified_base (157)..(163): a, c, t, g, unknown or other
aataaatgttatgatattgatttctagtttactaaattttggaaagcgagaaaatagtgagactcacacaaattagggagaaagcaaaaggaaatgttcttccccatttttatagggaatgcctttccctttcctaacttaatttattttaattttnnnnnnnttaattaaaaatgaaaaagacaaatataccttttaaaaatctataaatagaaaataattacatgttctaataatgacaattttgtcaaattaaagcatttagattatctttcctagttatgtaaacaaaataatatgattctggttttcaatccggaaaatttagtaaacaagataataaaatattatttccaattattatttattttaaaccgattcatgtctctcatcgattattatgattggaattacagtttagtaaacgcgttaatggattaatctaatcaacttttatttaatctcgaatcgattggatgactgaaattaattggattagataagatagtaaaatttaacttacaatatattattaaattagatctagatatataggtctaaaaatattaaatgtggaattaacacccctatttatcagtactttaaaaatcaaaattctaagaatagaaatatgtccactccttgcacttagtgcgacttttttttttagtaattttaacacgtgttcactttatttacttttcatttttcattttttttttgttttaaaaaaaattcatttctctctttttaaaatataatttcaaccacactctagatattttggttaaaaatagataccatttagttgtaatatgtgggaagctttgtttttgttattaaaaaaaaaggaaataaagtatcaatttagtgtttttcttatatttagttaaccagagagtaattttttcttaacttaatatccatagagaaattaaatgacttaaacaaaatttactataccaactagttttaaaatttatttaagtattttattattttaaatttaaaagataatataatattttaaatatatcgactttgtagatgttgaaccattttttttaattttattatataaaaaatatataataataaagaaaaaagaattggccatatgaaaacagaaaaaaaaaacaaaaaaaatattattaattaataatatattcctatcataactacccatcgctcaccaatccactatctgataacatatatcgtaaaaatgagtttataaagagaaaaaagaaatcagacaaaaaaggagagaaaggaaagaaaagaaaactct

SEQ ID NO: 4647 - DNA, 1695 bp, Cannabis sativa
cttgcaggtgtggtgcctccactactcgtacctccttggcattagaacttgtagaaggcgtggttgtattgcatgcatgccttgtccttgcaatcgtacccttgttgccttcgtcttcaacacttgggaaaattcatacttggcatggttgtgtcattgataagagcatggccgggtgatgtgcaagcttggcacatgacggagtgactttctcaagtgcatgatcgagtgactttctaggaagcatcaccaagtgacttgttgaaatcatggtcgagtggctcccaatctagtgtttggttgagtggccatcaaccctacttgggcgactcttaaattcgatttattttccttctcaagactaattgttgactaatctcaagaattttccttgctaatttttgtggttaacatgcttacctaagttagacagggtggatactatattggtagtggtggattgccttagtaaatacaaccactccattggtgtcaagcatccctcaactgctaaaatagtcgctgaagtgttcactaatcaattgctttttctcaagtggtgcctctcaccattgtttctaattgagatcggatttttctcaaccattttcggtctgagctctttaaacttcatggagctgagctccgctacaacacttcctatcaccctgatacagatgggtgatctaaagttgtcaatcgcttccttgaaacataccttcgttgtttttctttaagctaccccaaagcttaggctaagtggttggcgagggctgagtattggtacaacaccacttaccattattctttgggggtgtacttctttcaaagtgttgtatgaaagtgacccaccttccttggttcaatattcctcgggttccacttctatgttggctgtcgatcaatagctggaagagagggactcatttttgggtgatttaaagatgcgtttgttgcatgcccaacaaaagatgaaggccatatgtttctcgtcggccagtggagtttgatgttggagataagctttttgtcaaattgcgaccttaccgacaaaaatctttagctactcgtaagaacgagaaactagcaggaaggtactatgactctttttcgattgtgaaacacattggcaatgtggcttatcgtttagacctgccctccttccactgccattcaccctgttttccatgtctctcagctccgcactgctttcggtaatgctcactcttccacaacatttcccctcatattgacctctaacttagagcttattgtggacctcgtagaactacttaatgtgcgacaacaaccatcgtctttagactaagttgtggaagtaatgattcattggaaaggccttcttttgctcgaagctacttgagagaagtttgatatttctagccctcaaccttgagcagaaagtttttttttttgtgggagagggtaatgataggccttttacgccttacaccaaatttacttacgctagggaggtgtgagacacatgggacaagggtaggcttagccatttgaggggtgagttggctgtgggtttgttgggtgatattttgggtactgccagaccttttagtgccttgaggaagcttttgtttgttatgcaaggattgagattattctctcattttgtatgacaccttactcttcttttatcaattcaataaagcttccaggaat

SEQ ID NO: 4648 - DNA, 1054 bp, Cannabis sativa
atatatatatagatatattattcttactaggatcaagttcagcactggctagctcaataagaagtgaatgaccaaaaaagtcttgtgcatcatcaattccttttccaataccaacattagtcaaaaccccaccaagggttggtaaaacagtcacaacaagcctaacatttgaagttaacttgttaataatatttccaatcaaaatagcttttattggagcaacaaataaccctcttttgctatgattactactactactactaaccctagctctattaccagctgagactagtaacaatggattagggttactaatactacttagtgatcctatattgttattattctcaacaaggaataatgacttttgattgttgttaaacgacctcgaaaacgatgtcgtttggataggtcgtgtttgcaggttcatcacttggggcatcaacatggttttattctttttggatgaattggtttgaagattgtattgatatctctactctttatatagtaaaatgaagttgtgtattactatgtatagatagggacatgaaatataatatatatttgcaataatcgatcgagataatatatattattgtacaaacaatattatataaataatgtaattaattaattgttcaattttatgacatattgccaaaaaaatgaaaataaaataattaggatttgcccttgaacttttcaattttattgagattgttgaatttaagaatttttattcaatgttgttacgtgatcatgattataattatgcgctcttgaactttcatccacgtaaagtaactgttagtaaaatttgatataactctttaaattcaataattttagtatttagagaaaaaatttaacggtctaaaaagtttgggagcgaaaagagtagtattattgggcaccaacggtgtataggtggcgtctcatgattggttagcgcgatattttctaaaaaatatttttttaaattatatgagacttaatatttaattacaccaatagcaaattaatattgagacaagtgctaagcaccaataat

SEQ ID NO: 4649 - DNA, 673 bp, Cannabis sativa
aaaataatttccaacaattccatgtgagttggacaaaatttaagataatacttattaacatacaaaatttcgtattaatggattaacaaaaaatattgccttattaataaattttacatattttataattttatgaaattcgtagatattaataatctgttatttatcctacttgttacccattagggttaaaataatttcgtccaataatctatatattcatataaaggagaagtatgaggcggtgacatatcactctacaattaattgaaagtcatttttcttttttctccttaattctctcaatatttttaattttttatttcaaaatcttcatataaatatatatagttaattaaatttaatattcctaaaaaaaaaattcactctaaaatcattctaaatacctatttctatttttacccatgttctctgatatttttaattttttattttaaaatctttatataaatatatttaattaactaaatttaaatttccgaaaaaaaaattcaatcgttctcttaaatatggttcaaaaaatacttcctaaatttaaacttcaaaaaaaaaaaaaagaatcaattgcataattacatttttttcttaaaaaatatctacatatacatttaactttaaattatcctagttaaacctaacgataattatatta

SEQ ID NO: 4650 - DNA, 638 bp, Cannabis sativa
acagaactcccaagtaaaagggtatcccaaaagcactttatccttttacccttgctgatgttattattgatagtttgataccctttatccttttatggacaatggggtgcttttgggatacccttttttaccgtcaccgtggcactttatccttttacccttgctgatgttattattgattattttactgaaatctttacttcatcaagttctagttaccatggtgttgtgactggagttgggccgactgttactagctcccaaaataaagatttattacaacaggtaatatcggaagaggttagaaaagtattatttcaaatgtatcctgataaatccctgggtctcgatggtatcaccccaggtttttatcataaatattgggatgtggttggtatggatgttgtttctcaagttgttgatttctttaattcttgctctctacctgttggcttgaatcgaaccaacattgtgctaatacccaagaagaaacatgtgactactatgagtgatttaaggcctatatctttgtgcaatgttttgtacaaaattatttctaaagtgcttgcgaatcgtttaaaagtggtgttgcctagtgttatttctgagaaccaatctgctttcattcctgggcgtct

SEQ ID NO: 4651 - DNA, 731 bp, Cannabis sativa
taaactcacataggagtggtggtttagtgttctgcattgtctctgacattgaaatttttagaagtgtttaatagttcactatataccttttctttgttatgatatactggttttggaaatttaaatggcagtttggagcaggttcaggttgaattgttcgaaaaacaaatactcggtggttcaaaagtgagcatattccaatattctatggttctcttttggcatggcaaccatagaggtatgccttaagcagtcaaattattttaccagttttgtgatttgatgtctaaataattgtcttgagcatcgtttttcactgtgttgttagggttgtacataaccaatgacttgtgtctttaacttccaacgatattacaactatttagatagaattcacataaaactagcctatgagagaagggtgcataggaccctaagctcgagaaataccaaaccgagtaacatctagcagtatgaagatttctgcccaaaatctaagttccacctctactcacaattcttagagaattcatcttccgagctaagttgtccatgttgtccgttacctcgcaaatgacttcactcagatcacattaaatggtgttagctataatatcctattgttacttacaactacttaggtaaaactcatctcacaaaacaccaacccatgagagaagggtgctccatttttagtagaagcaggattcgaacacagtaaaaaaaaaaaa

SEQ ID NO: 4652 - DNA, 965 bp, Cannabis sativa
ttattattagttagagcttatagtctataaataggccttgtaatcattcttcaaagaaagtgttgtaatagctcaaacacagagtaatacaattcagattaaagcaaaagcttgtcactggtttctatcgagtgttgtttgaatgaacaagtgagtgagtgtgtgtgatcaagatcagcaaaggcattggcattataacaagccttagaaaaacaaaaactaatcatactgtcctacaaaactaaaattgaaggcaaaaactgaccatcttggccatacaaaaccaaaaacggatcatactggccaaacaaaacaaaaacagaccatactggccatccaaaatcagacatattctttaatcaaattattcaatcttcactatcataatcttaaaaaggctcttacaaaaattacatttatttattttaagtgaagaatttaagaagatgacattaaaattttgtactgtatatgtataagctcatgataaaaaaaaattgcattgcttagcttataccatctattagtgtagagaggaaaaaaaaatgatttaatataccaagagatatatgcaaatcaatgatttaaaatatatacataagcataaatataatttaaaaaaacaattattgtaatataatactgatctgaaatgatttaagaagagaaaaatggagcaaaataggacaatgttgcaattttcaaaattgatgaaaacatggcctttaacagcaaaatgattgagttcaagcacataaacctgacaattacatcatttaaacattatcctaatcaaatcatctcttcctttatgaagttccaggtccacaaagatggtgcttgcagggagtttagactcaatgaaatgtgttcctgagctcactaccactaaagggttcccaattctttcgaaagcttgtgcaagaacacaaatattttcatcaaagtttcctggtttcagattt

SEQ ID NO: 4653 - DNA, 3168 bp, Cannabis sativa
aaaacactttcgagcccttacaagatcttgtaattcattaagttattgtaattcctaaacgtatttacatgttggtccatcttccatggactatcatcaagaacaagtcttggagcatcctcctgctctagaatttcttcttcaacttcaacctcttctttctagatcctcttagacatagtttctgtaaaaagacagaagactaagcaatcaactacccaaactacctaatatagaatgggagtagggaagtccacctccataaactgcttggagaggtccctattagacatatcattaagaaacgaaaaacttcaggggtcattcgttccaaatggaaagtcaggaacattgaagaggaggaatggaatcaacaaaatacccaaaactagaaggcaatatagcttacaattcataaatctacaaacaatatcagtctctaggcaaagaaatcccgatttcatttaaaaacagaacatgcaatagtaaatccaaataacaccgttaaaagacgagaaaggaagccaatatgtacctagtaatgaaagcaaaggtagcaaactaattgttgctaggttttgttaaggaagttgagcacatcttttgcaagacgaggggcaacggtgattaacgaatcaatctttgtgtggaaatcaagagtcacaacttcttctatcatggaactctcgatcactaggggtggataatttggaaattcttgagccctaatccttaacagaagttgggtgcaaaactcgactcctaatccagatcgattaggttattttggctttctgttcagttctaactctcaaagattacagagaaaactagagctctgaaagataaaaatttgaaattgggtgaaaagtgataactagagtcttttaggggtatttatacccaagatggctatccacgtaagagggatggacgatccacgatcgtatctctaaaagcacaaaatacactcgacggttggggactccaatagtcaagcatgtcaacataattaatgcactttagaattgaggcacaaatcaatgataaagatgctattttttaattctcgcgccaaaaactaaaaagtcatcaaaacaaaagctttacctaaaagtaacccctcaatatatgtgctcctccgccactaggtaactgccacgttgacctaccaaaactgaagatggaagttaccttccatgatcaattaccatctggaaagtcatgaaagaatacgtttaaacctccacatgtcgacattgatagaatgcggcaagcttccaccgtacgcaacattcttgaagcttgggcggtaaatgttatctgtgtttccaacaagggacacatagaaccaaggtttgcataaaaaactcactagtgggtcccaaagatgataattttggccaagcccggatcatatagatccttccaagaatatcttagctccgtgaccaaatggactttcgccagtgacagcctctacccagaagcagtttcggtacttgagaccgaaaggtcagatagtgtgttcttggaagacaagtccaacttccctttttaatcaagcacacaaaataagggaataaatgttcctcggatctcgacaaaagattgtatcaagataaaagaggaaactacctaaaatggaaatcaagaaattaattcatgattaattgcccacaagtataggacacaattttgactaattaaactgtatctaatctgccaagtcagcaatcatctccttagttggctggacttcacaagacgacccaaattatgtaattcaatgtaaactctccattagagggaaaaaggaaaaataagtgcaattctctaaacactataaatatctaatgaattcttttgattaaggattgaattcacttgcaatacttgctcgagaaaaatggagaatttatgctcattgtattcccaaaggcttttctagctttaattacaaataatatcaacttgttgataaggctcattaacgctccaaccacgtaaaaattgtttgtattattcttactctttctctttgaattatttatttcttcattgctaattatttttaattcattttttgaaaatctcggtaattaaacaagaacaattatgcaattacagtgcaaaaggtctgaagaccacacaagttgcacaatgctcgactacctactcttaagtggtggccttctgagtagacctcgatcaaacgtttggaaaataactggtactaaggtcggatgaccattttcaaagtacatatttttcaaaatcattactcttgagtatgtcttttggctagaatatactgttgaattgctttatgttttaattagctaaagatcagttagatcatataatagcttttataattcaatatatgtacattaccacagtaacagtacatgtcgaccaataaatgaataaagatattaattatcattcaaattgtgtagattttatatcttttttgccaattatagaatattatttaattacctaaaatgcgtacaaaaagttttcttagacctaaaaacttgatggacacaataaaacttatgaaatgcaagtgaccaagagtcaaaagtctgctcggtcacttgaggggcaactacatctgtacaagcattggtaaaaaacaagctcgagcaaaaactaaaaactaaaatttcagacttaaaagaaaatattcatattaagataataaagaaagataagtccaagattaaaagatgtgtggacagccagttgtcttaaacaaaatcaaaatattttccaagtttaaaagttgcttggtcagctttattatactgaaaaataggccagtaagccaaacagatgaaaaaattcttaaaatatcaaacatcatgagtcccaggctcttggatggtagaagagttgttgtcatcaatcttagcttcctcctcagatttttgtgccttgcaaaagccaagataagcatccttgttgtccttgaggtagtcaaagttttctttgagattctccttccaaaactcataaaaatatccaaggcagctgattcaaagctcttaacttccttttgaattgcctcccattcaacctcaaaagtttcttgatcagaattaaaggttatatgtgaaaaatcaagagtctcatgtaaggttttcttctcttcaatca

SEQ ID NO: 4654 - DNA, 2591 bp, Cannabis sativa
tcttggcaacatcaagatctttggcagccttatccagatgaacttcttgagccattaacagtgcttcaatctcagcaacattgtaggcttcagttcttgtgttgacagaagtgatgaaaacattgtaatcagcaggaaaaccattgaaaatagcttcaatgtgatcctgagatgaagtagggtgaccaattgatgctagagtgtcgcttatattctttattttgagtagatagtcatttaagaatgcttgcatttttgtattgcaaagcagagtcttgtattgtccaatattggctcaattgaggaatgtgtaatattcatgaagattggtccagatctgagcagctgaattagatccaaccatcttggtgagtactttctcggacgtagacaaaaggagccaagaaacaagaatgttgtcctactgtacccagtcttcaagatatttttccaggctactacctttgattcactacaagaaatgtcacttttgtcagcacatttttgtgctgacaaaagtttggtgttgcgcgggtgaaatggaatttacttctgatgtgttggcaaaagggattggcaaatcaatgttggtattaaaacttttgccattacaaaatgaaaagcgctggtaaaacttgacttttcccagcgtgtaaatgcgctgataaaagttagattttagccactataaatgtgcactgtaaaactttgacttttttgccagcgtagtttacgaaatgcactggtaaaagtaacttttaccagcgctgtagtgaactgtgttggtaaaagtgacattgcttgtagtgattgctgtcaagacttgatgcttccatggaaggtagttgaactcgtccaatcgaacagagagagagtgagagaaagaaacgagattagttttgaataaagtaatttgttgagacgaacttaaggggatcgacaaaccaccattgttgacagctgaagaatgctccattgatgaacgattattgctctgatatcacgttattgttcaaagaaagaagcagaacgaagagaaaagaaagagagaaagaattgtttcattgattgatgaaaaacgaagaaaacaagcttcttatatacagtacaatatactatgtgcaaagaacaaaagtaacaaaaagttgttacaatcaactaaacctaccgctaacagaaataactaactccaactaattaattgtagcttaggttcccttaccaggcatgattcaagaatacattttacttaaattttacatcctagctaaaaagatgaaagtaaagaaactaatcaacacaaattattaatttatataaggtaaaacccattctcctcataaaaatatataatatgtaatgcaatttaataattcaattctccctgagaattaataaaaacaaaaagcactacagattataaagttggctccctccatccatgaattattataattttgttacgaatgttccattatgaaaaatattagtagatgtgacatgaattatattacaagagattcatattgtgagccatgagtcggcaaaataaagttcacttcacatgcaccaaggccttttatttccaatatttaaataactaaaaggaataaaatgaggagtgtacgtatatattgataaccacagtcaatcacttattttaaataaaataataaaaataatgaggcttcacacaacgatcataaatatatattgatttcctatccaagtccctatgtgcaagctttaagaatgtattttttgttgtaatgttttggtgtatatccatttaaattcccagttggaaagcttattcttttgtttgatagtgatggcctatatagagaaatctcctgaaaggaaaatgtttaacatgaggaaatataaatgttattaactgttgtctatttaaatagttataaattaaataaattgatgaatataatatgataatgtgtaaatccatggccaataaaaagatcgagagaatattggattccagtaacgctaagaatgaaatccaacgactgagatcaaacatttaaaaaagtatttgaaatcagccatccacgagtacaaaaaaaaaaacactaattattattaaataatttttaaaattcctcaaaatacatttggtctctgaaagttcgacaagggccactttagtaatataggcagtcatatacaattgttatatacacaaatgaaaatccaactataaaaacgactgttggagcaacaaaaagataaaacataaaaataatgaaatatataggttgggagatgagctggcggccacatcatccactccaaaataacaaacgtgttaaaattgtatggaaaaggcgacacgtggatagggtgggcccgacaagtatggatagctgggacacacttaaagctctgaagtagtagaagagtagtagagagtagagagtcaaaattaaaaaacaaaacaaaaaagtcaaaaacaattaacaaaacttactaattaaggatatatgatatcattggttgagggcttagtttgtctttttccaaaacaaaacaatcacaagtgggaaccgtgggatattcgagcataactggca

SEQ ID NO: 4655 - DNA, 773 bp, Cannabis sativa
agcagcagcagcaggagatattcccgaaccacaccgccctgacgaccatatggaacctgtacctaattgatgtagttccgagaccatataggtgggaagaggctgtctcaactcaaacaaaggtacctagttaagacaccttctctttcgatacttttgatgtataggtcctttttctactgtgacactctagatttagtagtccataaagaattattatccatgctataaaattttaacattgtattgtttgtaccatagagaagttggaactaggataaatgtcatatgatttttctttttagtaattttcatagaattttataagatgccaaattctggtttggaaagttggaattgactgttctgctatagatattcaagttgattcattagagagtaaaaaagaactgaaattgaaatcttttttattcaatggttaattgggttgtgttgttgatttagttaaaacacattgaacattgttatatttattcttgtattgtaacgtaattagtaggttaagcacaattagtaatagaaagccttaactaatgatatgatcatatatttcgatgtataaatttaaatgaatggataaattaatttgtgttctttactttacccatttcccattaattgcaaaacaatagaagaaaaaaggaaaaaaaaaatcctaatcttttattaattacatcctcatattacaacgtctttctcaatttttatgtctaaaaatctacggtggaaattttttttatagtagtattcgt

SEQ ID NO: 4656 - DNA, 680 bp, Cannabis sativa
ataaccccatccaaatccaatttgttttcataacgactaaactatctacatttattgcgtaacttattgaattttggcaatttgtttccataactgactaaactatctatacttattgtgtaacttactgaatttttgttcaacttgtttcattaagtaattttacttactttcgcactgtaaatccttaaaaaatttcttctataaatttgagctaaattgaccgtttatcatatttttgacttcatcaaccatcatatctagtcttttctatggttggtcccataaacaagcatcattaatctctacactttcatggccatatttcaaatctagctcaaaatcaaatgaacctctttattgcactcactaatgaccgtaacatgatataataattcaaatgacaataatgacccattcagaataatcgaaattacataatcaaatatatgattaaccaccatgataagtcaaccaaacaacaaaaacaactatcaagttatcaacaacattattgaagctgcaaaccaagaagaagaagataatcatatttcacaaaaacaaacttttgaaaaggattgaaattttacaggcactcaagcactagcagcatatcagaactcaaaagctcatatagcaacaaatgcataaaacacaagtacacaagaaaagtttatttg

SEQ ID NO: 4657 - DNA, 1910 bp, Cannabis sativa
agtaacaggttggcaaaacttggctttgttgagtgtgttcagctggatatttttatggcatgtgttgtggcctaggtggaatgtaagtatctgctactggctgttggtcggtgacttggtaggctctcctgaccagtacagcggctttcctagaatgattgtcaatcacttcttgttgggctttcatgattcctatctctcgatccctccatttttcgaattggcgtctttgttctacaaaagtaaaatttagagctatctagtatcttgttgatcataatgaagagtgttattgtggccttgtatttgccctagtgcatctcacaagttttgtagttcgatgtcatcaccgattagtcattgagaatttgtagtagatgggattctagtatcgggggcaatttgcttggttcaagtagtagtggtttcagtttcttgcatgcccggagtgaacccaactaaaggggtagtcactccttgacctactctttgtgggcctgttggtggctgaggattagtcagagcggggtccgtcctggctggatctttggggtttgcaggtgtctacatatttagatctgtagccattggattcgttgttttagtctaattttctatccgtgtttgtacagccatcttgtttcttaaaaaagacctacgacaaagacttgagtttctttgctctcaataaaagtactaaaatattaatatctcttttagccaatgacagtgagtcaaattaaattgatttaagaataattgaaataataagtatgaacaatataaagtaaagaatataccagaattatagaggttcgatcccttgatggtggtaatagcctactcccctttagttgtattgacttgtgagtagatgaacaagaaaatcttgatctctcgaaactcttaaatttagatttatctcgtgagctttctctgaatgaaatttgtatccttgaatattgagactagtccactattatagggattaattacataaaattagtttcccaaaatcaataaagaataaaatgggaaatctatttacttcctataattacaataatcagaattagaaacaaggtaggttttttttcttctcaattaccatgaaactatcccatgattttaggaatattaccgttacttgcaagcttgaggatatataggatatatctctaaaatattctaactcgcatttcatgatgggtgtatgcttgccacctgcatgatggaagctgatcgggtgtcttcgcatgctctactcggatattccaacttctgtttatgacgtcaagtatcaaatctccctgtacgactcattaagagtagaattttctatccaggtgatgaattctgacatgtgtcacccaagtggatgttatgtcaccttgtgtagaaatatggataacaacatgtaactttgtattcgcgtttggaaagccactatgtattggaattgagtgtaattctgagtaattagacttgacgtgtttgttcaactaggcaattacattataaccatgtaattagctagaagtggttgagagatttcaattacactctccaattcgcatgaccctcgtgagaattggatgagaattgtatgtaataaccatgtaagaggttttctggaacgaaaaaagttgctcctgatgataatttttgttgtagtgtaccattttttaaataattacttttattaaactatgtaattattaactcatttgccaaacataaaaatgagacttgatatacaagtaccacttaacatctaaacacgcattataatttaaaataaagtttaattagttgttaaaatttaaaaagtgtgtggtttaagatgcacgagatttcatctcaaaattaattgataatcattacaaaaaacttctgcttttagtgacaac

SEQ ID NO: 4658 - DNA, 1987 bp, Cannabis sativa
cgcgctcatcattcggcttaacaaattcatggagcgtagaaaacctagaaagcaaaagaaattgactctgagtttcactcattttaacagaactagtaaatgaagcaacaatttgcatttccattcatcatattgaggccaaaatgaaaacgttttctctaatcttttatcttcttatttgatagtaaagactcacctgtgaaaatgacagccgtcaattctgattacaatccaagttgatggtaacaactttgcttcccataggaaggacctaatataatctggttcaatttttctaatatcatccacaaaactgccaagttccttcagaagttttgggtacagattccaaaaacttttcccaactatattttttgagtggactgtactcgtcttcctccgaagtctcttgactggagccccactctcgttgtacttcactatgtcttctgtctaaacaatataagaatgagttctcaacatgacaaaattcacgggtacttgtggccagatagaataccagtcaagatattgtagcagattaagaccttttgtctttaaattataacaagttaaacaagatgggttacttttacacattttcaacaggccaaaaaaattcctttcaaccttaggtaacccatgtgaatacataagtagaacccaggataggaattcaacaaacatcaaaaagaagaaatcaagctaaagataatatacacatccagctgtatctaatcatcttatgtcaatgacaaacttcaagtgttttgacttcagattgacataaagtccaaatataaaagtcaagtcaattttactatgccctaattttaaggagtgaagtctctcttttaacagcaataattatgtttaggaaaatgtaactttaaatataagattaatatggcactttcattttaacaaggtagattattacctcagtttttaagatgcaggatccttgtcgtaccatgacgggcagcttttcatagttgataccaaattgttcaaataggaggtcatgcttctccttctttccactttcctgcacatattcacaattaacttcacataaggtaaataagaattggtatttcataaaaccattagtattgccaatttacataattaataattgttttttttttttttgagtaaaacataattaataattgttaagttaattagaaattggaaaaaaaaaattaacaataaggtttccctaaatatcctcaagtaattaaagtagagatattgacattgtcacaaaatataaagattccagaaacacaaattcttttactctaggatgacattgtcattattttaaatcgtccaacaagtcaaaagttagctcgtaaccatgtaattaatgctcacaccttcaaaaaaaaaatgcttacaccttcaaatactgctgtgcttccttttcagtctttccatgtttaaccagctcatgaaaacatgtggcatgttggttgtttatatgacctgtgaaagagaatccgtgaacggtaacgtcacatccataggctttctcacttaaaacctaatagtttacaaattctgagtgaaaactaaaataacaaaaataagaattcagcctatcttggtaattagagtttgtctttgttgcttatcttaaaagtactaggagacacaatcattttgtctccaagaaagatatgcttgaaggacttctattgatgcacaacatattactcgtgcacgaaaagatggcggatatcttaactccttatcatggaagaattccttccatttagtaacatataccgaggttaaaaaggaaacaacaagagactgtattttgctgcagattcaatttccactagttagcacttcacaataatgacgagagcaaaggaaaaagggatctcaaagcgaacacatatccaatgataatattactcaatgctatgcataaacactaaaactactctcttgagctgaccctaatatttac

SEQ ID NO: 4659 - DNA, 555 bp, Cannabis sativa
gctctaacaaatgaagaaaaaaaaaaaatatattgtccccaatatcctattcccattgtgtgtcaccaataaattttctaatatgacgtttagatcatactaaactgaaaattccctagagtttggctgcaattttttctttattttatttgtacaaagtaatcggattaaagagaaaagatcgaaaaatatttgtctatgaagttgtagactttatcatacatgacacatgacaagctttttcaattatgttttttattattttaatttttgttagttttttattatttcaattttgaaatatataatacagtattttaataaattgattttttttcatttgaacattttattatcattttattttttttccataattttagtttgaattatttaaattgtcaaatcgaatattaaaatatggattctttcacattaaaaaatatatattttttatttttaaaaattcaaataaaacatatcaattttaaaatcattaataaattattaaaatcctaccaaactaatcatagttcattactattttataattaa

SEQ ID NO: 4660 - DNA, 705 bp, Cannabis sativa
agagtactttaaggaattctttaattacctcagagttttcccttttcagttactttcgagttcttacagaatcctggcctatttaaaggtcttatatcaaattatggggtgggagtgtcccactcccctcaaattgtatatttttattctgtaaaatctgtccctacgaggaagcgaggatcatgaggtttttattacctcgagacccacacaaacgatcccatgatcattgtcaggttacctaataaaacagaattcaaggatgaattcttcaagacaaccggtctttcccccatcaacacaacatcattttgcattatacgtaagtatcaccttttctccaaagcttggttttaagtttttgataatattgaaggcatatatttatttttcttattgtgtcgatagcaatcacgagaaggcgaattcttactcccgagatggttgaacggcataaagctcttttagatcttccattttgactgcgatcaacagattttctactgaacgagaccaatttgaagaccgttaatcctctcggcaccgagcaatctaactataattataagaatccaaaaatttctaagtggcagcatgtcccaattccacctgacgaggaggatagaggttatgtggcttgcatccacttccaataaagtagcccctcaggaagcagaagaagaagcgtcccaaggtaataaatgt

SEQ ID NO: 4661 - DNA, 512 bp, Cannabis sativa
aacccagacccagacccaaactcccaccaagactcagaccccatcttagacctgaaatcgactttagacacagaatctgagtgtggatttgtgtctgagtctatgttctggtccggttacagttttgggtctgggtccaggtcctagtcgtggtcctaggtcccgatctgcttttggtttcagttccagttttaagtcacggggtacgggtcggttccaagcattgagtcccgaatcccaagtcccgaggtggatccaaggtataagtttgggtgtggggttgggtcacggatctcaatacgagttctctgggccaagttctggcctttttctagggcccaattcctgggttaggtcccccatctatgttcaagtcccaggtcctggtccatgtccaagttcgtgtttcggttctggtttgggtctcgagtcgtggtctgactccaggttccaatttgggttccggtctgagttcgggtcctcatcccagtttgggtctgggtttcaggtcc

SEQ ID NO: 4662 - DNA, 1071 bp, Cannabis sativa
ctaattattaacataatgatcaattttactcaaaatttagttgtgatatccttactactgttaagattttatttgtttttaggaaataaaaattaataagtaataaactaaaagggtttgatgaattttgtactatagtatatatgtatagggttaattattatttaatactagaatataatttgtccttaatttctttctcattggtacgcatgcttaagcttccactactcaatacatatataattattatatgcatatctctgcgttgaactaaaaaaccataattacaaatttttcaatacacttttatttcaccaaaaaataaatgaagaagaaaaataaataaaataattattagttttagcattaatcaaaacacactagcactactagactactagctagtactacaactcaaatatatttatatatttaaattaattaagctagctaggtcatgatgatgatactcttcttgataatcattaggaagagaattattaacgttatctaaagtaccaacttgacacactattaatttaaaccaaagggtgttgtacaaatatttatatatattttgtcaaactaggccttatatttcaattatatatatttataagaatttaaattgaaagcatgagacgttggacatatcttgctcaattttttatttattgtatatataaaaatgggattatattagtgttcgtggggaagtcgcaaaagttggtcattataacaaaaattgaaaataatggaagtagcactaattataaagtaagagattaaaatttaagaagaagaagaagaagaaaaacaagaggtatatgagaagattaaagacccttctttgattgtcttccatttcttattattatgaatattcaaagtcatctcgacacacaaagaactaatcatgctaaaataactttatcgaggtttgaaattatactttttaagaataacattcccattattaggtgcctccattatcacatattttaatatatatgtatatatagatatagatatatagcctgtacatatataattatatatgatcttatt

SEQ ID NO: 4663 - DNA, 1390 bp, Cannabis sativa
agagtcatcatgaacttctagaaatttgccaattatatttctgagtgcttcagcaagaaactttgattttcgtaagaaggggagtccatatatttgcacccaaaatagagtatatataagattttcctttgtgacattttgcagagtatctggcgccaaaagtatgattaagtgattttgaaagtgccatagttctttgctgagtacacatcatttatcaccttcacaaccaaagagaatatggaataagccatcctctcctttatactcggtgattatgacagggtatcgctcctaccaatggccagacatttggtcgatgaatcctgatttgtcgacatgctggttggtgaggacccttgccaagagtccaaaaataggttgaatttccgttgaatgcagcgtaacatcgtcagtgagtgtaaggacagagctttccccattagtgaggaaaagtgtggaattgatattattcataacaacgttcatggggatggagatagtggtagcattgtgtcaaaggtagagttgccgacggtagggaattgaggagaacgtaatggagggaacaattatcttcaaaggaaatttaaaaaagttgacgaaaaacagttggaataaaggaaaaaagagttaaaattacttaacttctacaattggaataaagattgttattcttattcttcttcttcttcttattattatttatataaatataattatatatatatatatataagtttatacgaacttgagttcacaattcaaatttatatattaatattattataattttaattaattaaataataattaataattaaaatcttttatatattatatttaaatccatactgaatttttaataattttaaattgaaactttaaatttaacaatttattaatttgatactaactttttataattaacaattaagcctatatgtgtcttatttcctcaatttgacccaacatagtgaaattcttgtaatttgacatagtcaatttttaaattctaattgagttattaaattaattaattgagtctacaagatgatattatccaagaaaatgtggggaccatgggcttatgtaaccaacctcctaataagaagatttgaaatttactaactaaatttcttagcttattaattcctcctaactccaatctagattcgaaattatactcttaattatacaaaatgctctatatactaaatttagatatgctatgaattattcattgtttcaatctgaacaatcattgatcctctatagatggtttacatcgagtaaggataaatttactattttacccttcaatgtatttcatccttaaaacacttagctactatatatgattttgagtaaactaatataattaccgaaa

SEQ ID NO: 4664 - DNA, 1424 bp, Cannabis sativa
tataaataaaaagtacacgtaactatagggatcaccactgatcaaggagaacccaaatcaagacaaagttgccattgtcaacagtcaaaattagctcagaaagcagagatgagttttctcgcgggaagattagccgggaaagaaggagcttactttttccaggaatccaaacaggcagtgagccgtatggtggctaacaagaaagcgtcaccatcgccgcctactcaatcttcttcttcttcttcttcttcttcagctccggtgactgagcgtgaagacctagccgacgcgcttcccgaggtgttgcgccactctctgccgtccaagctatttcatcaggagacgtctaattcaacgccttccttatactctgcctccaaatgggatattccctctgaccctaacgctcgcctttctatcaatgccgaggctttgaacccactcaggtcttacctttctctgcctcaggtcacctttggtcccaaaaggtaccttttcttcttcatttcatttttttttttttttggtgtgtttcgattataatgtaattgataatgaatgcaggtgggaattgcccgaatcaaattttggggtctcagcctcaacagctaatgaattgcgtcgagacaagcatgtccctattaatcctgagaaagtgaaagctgcagctgaagggcttcaacaaagtatgttcaatatgtatatttattttatcttttttggttaaaaagtaatcgaatcatattaagattgccaaagcgaaggccgctctattaaacttacgacctgggacagaattgcccccaacgaattcatttatatataaatatatatatattccgccttgtatgttcaataatttggctataattattttatgaaattatgatggtaaaccactgttttgtctgttgacactatccaaccaaaattgtatctttctcttttggcagttggaaaggcttttgctgctgctaccactctagtgtttggtggtgccactttgatgcttgggatggcagtgtccaaactagacttgcagaatgtaagtttctctctgtttacatcatgattttctgatcgtaagatttatgtgtattgggaaatgtgatcaagatgcttgtttcttcccaatgttgacttctgaagttgatttggccacagacacaaagtaactaaagaaaataaatatatatatttatttcatattgagttgtactaagtgtttataatttaagatctcttgcctatgctttgacataaataaatctcttgaagatgtgatatggtcagcagaagcttatttaaaatgaacagtgaagaagtatatggttttgtgctctttccgaattcttactgtgataacatttgtaagtaatattgttagtatgtaatgtgcattttcattcgctgctcaaaggaag

SEQ ID NO: 4665 - DNA, 813 bp, Cannabis sativa
agattcagcatcgggtttggatgtatagggtctttccaagcattacgaacaacccagtaacattttgggtcacgtccccacataagttcatacttaaaatgagtttttctacaattagctcccccttgcgtgtcgagaagaattgtcttgtggtctgaagtggatgttgtcataagtttgacaatagcatttggaaatagtaatcgccaatccactgtggctaacgctctgtcaagccttgcacgttttagtgtacaccctccgccagtggtagtggatttctggaaccaagtgaatttgcctccttgacacccgatatcaatcaaccctgtatgggccaccatgcgccgaagatcaaaggagtatttagcagagttatttggatgggtgtagttgatgctttcgtggtcttccaatgttccatttaagtcaccaaggagcatagatgggattgtctctccttgaataatctcccctactcttctccaaaaggcctccttttgggttaggcttggagggccgtaaatccccaggaggttccattttatccccggtgggtcggactcaataaccccaacaattaaattcttgtcttggtctttggcactacacttcacccctgttttccaacacataccaaacccccccgagaagccaatagagggaatgtagatgaaatcgaggaagtgaaacttatgagcaattttttgaaacttactctgatcaagccttgtttctgagattatgagaacttcaggatttgcttgacgaaccaatgccgtcaattgtcgaaccgtcgcggtgttcccgagc

SEQ ID NO: 4666 - DNA, 2118 bp, Cannabis sativa
gttgagctaccgtcacttacctgcacgtctcaagcaatgtttcgctaattgttcaatatttcccaaagattatcaatttgaaaggaaagaattgattttgttgtggatggcacaaggttttctgccgcttgataagaccagcaaaaagatggaggaacatggggaggaataccttgaagatcttttgtcaaggtcattgtttcaacattcaaataaagaaaaatcattgctccaaatgcacgacttggtacatgatttggccatatttgtatcaaataatttttgctttaggttggatttgagtaatgatttacttaatctttcaacaaagacacgttacttgtcatatatgaaatgggaatgcaagatggacaaaatcaagggcttgcgtgaagccacgagcttgcgtacctttctagcattgccattccaaaaaggtgtattgaactacatggagtatgatatgttgcttacaagtagaagttgtttaagagtactttctttaagtgattgtggagaagttgcctcactcaattgcaaatcacaagcatttgaggtatctggacttgtctttcacttcaattgaaaaattacctgattcagtttgcaatttgtacaatttacagactttattattaaatgggtgtaaagagctttgtgaattaccaaagaagatgggaaggttgatcaacttgcgatatcttaatattgagaacactgaagcactgaaagagcttccccaagaactcaatactatagaacacttgtatttcttatctgatgtgatattgagtagtggaggccttgatatgaaaaaggtaggacagcttgagaacttacttagaatttgtgggttggaaaatatcaaggatgcaagagaagcttcagaggctaatttgagggataagaggtgtctttccaaactgactttggagtgggatggtaatggtgtagaggctgatagttcactaaaagaaaaggaaatacttgatgcacttcaaccacatacaaacttggagcatcttgtgattcatggttacagaggcacaacattgtcagagtggattgtaagctctgcattttgtaagttagtatcaatgacaattatctgttgtaagaactgttgtatgctacccccacttgggcaactaccatttctcaaagatcttacaatccagggatgtgatagtgtgatctcaataggaaatgagattcttggtgacaagggtcctctattcagatgtctagaaaagctaagtattttaaatatgttggagtggaaagattggtcatttaatagtgaagctgtgcaacaaggtcaaatattattccctcttctcaaaagcctcttactgtttagatgtccaaagcttaaagttgggttaccaagttgttatcttccatccttggaagaactcactctatgggattgtgaacaaatagtgagtttggtagcgataacagaaactcaacagacagcccttcccaaactaaaggagattgagttatggaactccaaaagggtctttgatctgcatacactctcatctttagaatccttaaatgtctataattggaaagatgattgttttcccgaagacgaagggctgcttccgaccactctgaagacacttcgtattggggatgcttggaggcttgaaagcctaaacagcaaggcccttcaacaactcacatcccttcagacattgtatataaatgattgtgaaaggctgcggtgcttgccaaaaaaagggctgcctaaatctctcactcttttagatatcaaatattgtcctttggtaaagctacggtgtgagaaagaggaaggagaagattggcctaagattcaacacatctcaaaagtgaaattggatggaaaatgtatcaattaaatggtctgtctgcatctatttctctctctatgtctttagataggtaattaaggttacattattattattattattattatttaataataatattatttgttataattggccatggcaagttggtgagagagaaaaaagacaaaatgaaaggataatatgtttctaaagctgctgagctgagaactaagagagagagagacagagtctcatatcatatcaaagattg

SEQ ID NO: 4667 - DNA, 1181 bp, Cannabis sativa
ctcttctggagggtaacttgttctggttcctgactcttcttcaaggtggcggccctcataagactgtcgtggctaatgggtggagtaacaagaaaagtgaatcctagtgtaggagccttacctctcttattgggttaaggcagattagcagcggtcggcctgggctgagtctaagctgaaggtggaataaattgagaagccactttttacaagtggtgaggggatcgccgtcagtgttgcagggatgcttgtccagatggtgagagtgattgtggttgttgttcttgatgtgattgttgctacagttgtggctcttgtcgttggggttattgttgatgttgttataactgttgctgaggttgtgacaaaggcagattcgacgatagtgcatctttttccctaagttcctgaatagaggatcttgccctttttgtaatagggtcgagggaagaccccaacactctgtgtttcaatttagctggagtcctttttaagggaaagacatgaccatccaaactgtctttggaacccttacctccagtacagcctccgggattgatcctcctacagggggaactacttgggcaggttgttcaccccaagtagtaggaacttcacgagctctccgagaactgtcagacttccttcccccactacccgacgtagaatgaccgggtgtggcacacccagtcttggtaggaagcaggatttcccagacgtctgatgatgaggaagtcgatggaggaggtggtttaccagtccaggatgccctagtttgattcttccatttccgttttttgtaagacttcttagcctcatccaccgcaacctcaattcgagagttccacgacttcaacattttggattttagggtatctccacaataaagccacaaatgtaagtaaggaacaaatgtagtcaccagccacacgatcataataaacaatagtagtaacaagaaaagaaatctaaggtgctatagggttgcccccagacaaaagataaaatactcctatggcttgtgaagtttccatattcttcaaattcaggaaagaacatggttttaaaggatcaactctgacagtgcctgagggagtccccgaatactaggactcctaattattaaatctacttttctatatactccgccatgaggaatatttttcaaatcctccttggtt

SEQ ID NO: 4668 - DNA, 711 bp, Cannabis sativa
tgagcaatcactagtagtgaggcataatacccaaaacacccatgtaatattctacttaataacacgtttatttaagttctttttctttattagtgtacaacatggtacagaaaactacaaatactaaactacgaaatataatacatttctggagtagattgatcttttataggttagtttatagagactattctttataaaatttaagtgaataattagtttgttgactgaaagtttttactctttgagatttgtattgtagtcatttttttttaaaaaaaaaattctaagaaatacaaatgtagacagtttatattacactaattatgtgtgctggttcttttggatttataactacttgcacaatatttgagagtaaccttaaacaatgagagtttgaacatcacttccaccaaagagtatatattaccaccataaagaggggacaaacaagtggataaatgtatcatgtacaatttttttggctcaagtcaaggaagtggtatatatattctaatattcatatgcttgccaaaatatgaaatgtatgtgtttcaaaactcggtatacaataatatatgccattgtctcttctatcaaactttatgtataacatattttcaaacacatgaatatggcatatctatacgccaaaataatcctaaatttatttcatatctttcttttacggcaatgaaaatttatttcata

SEQ ID NO: 4669 - DNA, 965 bp, Cannabis sativa
ttcaattccatcttattaaaaggactggtacgacaattcattatgtgattgtgcattctaaattttgagtagtctcccgaatcaatcaattcattatggaaataaatatatccagcctagaaacttttaatcaactaaaataaagcacatatttagtttgtgttttcagagtcccttggtctgggaccaagtttaagtgtcatttgcgaagcaaatcagtctgatgaaaaacaggtaatatgcttctctcaaaattattttccatcattatttactaaaattttgtaagtgatttttaagtggagtgtacaatcatgctgcaacaaataaagtacttcttcatagcattggaataattttatgtcttctgtctttttcttaatattaaactttgctttgtcatgtgatttaagtgtcacaatgacaatgatgatattattgttttgattaaactagattaattataatttggattaggtgagaaactaatttctgttaattctttatcaaatgctaaccatttctatagtatagttattcatgttcatagcgattacattgcatttggacattattagaaagaaatgaggtatttcattggtctacctacatggtaattcgtttgttctataaaattattaatccgattatttgtgtcgcaactttctaatttatagtcttggcattttcaggcacataccagaaagtgaatattcttttattggtgtgtaaaatcttaacattaatttatcacctaaaattttgaatttttttctcttaagaaacatgttgtatgaattattgaaagagggagtcatatggtaggtgtagataacaagaaatgctaatagacactagatatatgcactgatacattgcaaacatttcctttcattagtaactttgaaaaaatattatatgtatctttctataatttttacaatctcagttttagatatgtatat

SEQ ID NO: 4670 - DNA, 969 bp, Cannabis sativa
tagctatcatgatgatatgtgtatatagtaattaccagtggatggggggtcatgagagtaatagttcttctggtcatcaaaggtaggggtggaggagatgacagtagtgatgaacaaactccacaacaaaagagaagggatcatcatcttgctcttgttctccatatctttgtatgaggaaagagacaagctagtagtatatagggtatatgatgatagtaatttgaagagaagaggttgaagaaagtggtaaatatatagaaggagagagtagctatagtgtgaagagtaaatagaagcaggtgaaggagtatgtggttagttgaactcttgcagacctcatttatgatcttattaatttactctcctgccttctctctacctcaataatgatcccttcaacattcaattctctctctctctctctctctctctcactatattttttttttcaaatcatcaattattaatgttgttaattaacatcatcatcatctttctctatctctagatctcttaatttaatcctctcatttgtataattaatgatattcatcttatcctaatttatgggcatatatatatgtatcatttattacaagtatatatcagtgtgtatcgctaatttaactatataattagtatcgacaacacatcacacatgcacatgcagctttctgctaactctttttttttttaaaaaaaaataaaaatcctagttatatatatatctatttatatatatatacacattacaaaaatttttacttttagtcccaacaaaatttataattaaaatacttaataatttaattatatcaataataatataacatctaattaagtgatacatgatagctaggtagtgaaatgcatctctcttagcatgacatgaaaactaaagtgtgagccattgattttaattggatttaatactttctaattactagatgtatttttgtttgataa

SEQ ID NO: 4671 - DNA, 1543 bp, Cannabis sativa
ttattattattattaatttattaaaattttaacagttagtatatctaattaataatttagtgtattgttgactatgatttaaatttataatgctttctaatgtgtatttaagtttttcatattttagtgcctcatatcaaaataaaattacacaaaaatttaattttgttttacttaaattatagttaaaaattaataatttgtgatattcagaatttcaactccacaaaatacactaaattaataatatatatatataatattataatatataataaaaaagggaggatgcacttgagctacaatgcacatacaatgtctagctctcaaagaataatttggtgtgttacattaaagttgctattaacattaaatttcttaaaaaaaaatacaccaaacaaatggtttccttcacaattcacatacccctcacattccatcactttcaactgtcccaaacataactataaatatgtgcccgatccatattttttgtgcttttaaaatacaaaccgtactgtatcgggccataaaaaatatgagtcatattatgctgtgcaaaaaaaaaaaaaaatatatatatatatatatatatatacgagtcatgccttactatacaacaattttatagagtaggcttgacatgacccgcaagtgtaataatttcgtaccatgcttagatttaggtagtgctttattcgggttgacctattgtttttaaatagaccaacctgtttttttatacaggctcaaaattgtgttctatatttttacatttttattacaatttatgagttaaatactaaaatatatgtgtattttatagttttagttatttttatatttttttttcaataataattacgcacaattatataaaaacaattataatattataatttgaatgtcattattattttaattgataaataaatatttactattattatcattattaaattattggatattttaatgttctatgtgttatgttttcgaacttgttgtattgtgttgtgtctaagtctatttttttttcgtgtcgtgcctaaatacatattttttggtatcagttcgtgcacaagtcatgtttctcatactcatgtcgatttcgttttgtgtcaaaaaaaccctacctatagagcaataatcctaaagagtaatactcagagacagacccaagggctaatctctcattaaaaaaaatattgttttaagaaattaaatggaaattttttaatttaataattatggattaaaataataaaaaatttccacaaagttaaataaatttgataacagtaattctaatataagtaaaaatattatttttttaccataaatactcgtggtaaagactaaagatgtcccaagtaacagccagatttgagttggcgcgggtcccttgtccaggccaatttatatacaagtattattgcgtcagccatgacttcagtttacaataaattaagccacacctacgaaataccagtttcatagttttaacccttttcatatttctatggtattatatttatttatt

SEQ ID NO: 4672 - DNA, 713 bp, Cannabis sativa
acacaaactacgaggcattggagtgttagagattcaatatgcacggtacgcatatgcataataacaccaatcaatattacttttacatatataggacaaggaacactataatttttgttcatacgggaaaggtacatttatgtttcttttttttttttttcatacattatagtttttggaggcatttcatttattttagaaaattttaaaaaatttacggtcgaaaatagaatttaaaaattaagttgtatatgtgtacctgaatgtttgaaacatgtttttgatattataaattattctattttttttcaaaagcatatgcaaaatctattataattacaatgtactcatataaggaaaaaataataacgctttgataagaacaaattaatatgatgtctctcgttgaatttttcaataattactatattacaaatttaataaattacacacgttcaaaaacatacatataataaaaatcctattttgaaatctgattttgatatgtcaatttaaagtttaaaaaaatggttaaaatatatattaagtatgtgatactttaaatttgctaacaatttttatagtttcgtaaattttttattgccaatttttttattggctggttatgtataacaaaacttaaggattaagaaattctgccccaaataaccctaattataaatatattgaaaaaagataattaacaacaccgg

SEQ ID NO: 4673 - DNA, 949 bp, Cannabis sativa
caatttttacgaactaattgcttagtgtataaaaatgttgaaagataatatggattgttatctagaataactttacttcagatgaaactatgatcacaaattgcgttcataaaaaacaaatgcaggctagtaactaaatccctctgcaatatcaatgaattcctagatataatatgataaagtaggacaaagaaaaattaatctcaaagtcaatggaataatctgaaattttttaaccttttaactccagctggtgcagcactatgaagaacaccgtgatgtgctgatcagaaaaagagtcgggcattattgatcccaaaataatacttgatcttctgcttctgtaaagagaaaatggaatagaaataaggctaactgatatttcttaatttctaagacaaaatcaactaaataaagagaattataacaagttgagcaatcaacaatcttcataaagttatcaacaacaagcatacagtgaaatagcaatgtttcacaacatagaatttctagtcacggttgtcacctctggcatatggcaaacccaagagagaacgcatgaactgaccctgaagaacctgtggccacaagaatatctggaagctctgcggaaggtccaaatgacaaggaaaatatagttgatggatatgtccctcttcgaaaactgtaagactgtacagaaaaatccattagactttagcaattaatcctattttcaacatcgagaagatgacagaccagaccagtcctcagtaaccattgtagaaaaatctggtttagaatttaaatttgaaacatgatttataaccttagttgcttcagaaaccatatgaactctgattatggttccctgctcagatgctgttgctatgtacatcccattggaagaaagggtcatcgcagccagcggagaacgatgagcatctatctgtacttgatcaaaacacaa

SEQ ID NO: 4674 - DNA, 781 bp, Cannabis sativa
ggtgcctggacgtatggctagcacagtttctggtgctagcagccattctaactcagctgtaaggctcggaggaagtggagttggctgctggtgcggaccgagagcagcacgaagtaaagacacatggaagaccggatgtatggtggcatcaggaggtagttgtaggcggtaggcagctgaaccaacacgggctaccactggataagggccaaaataccgtggagctaacttctcattgacgcgcttggccactgtacgctgtcggtaaggtcttagcttgacatagaccgaatctccaaccttaaactcaagtgtcctgcgtttcttgtctgcttgagtcttcattttctgctgagcgcgatgaaggttctctttgagcaacaccaaagtggcgtcacgagcttgcaactgttgttctaccccggagacttttgtgctagctggttcgaatcgtatcaggggcggtggatcacgattgtagagagccttaaagggtgtcattccagtcgacacatgatatgatgtattataccaatattctgcccaagcgagccatttaacccatttcttcgggttctcaccaacaaagcaacgtaggtaagtctctaagcatctgttgacaacttccgtttggccatcggattggggatggtaggctgtactgtgcttcaagttggtgccctgcaaacggaaaagttctttccaaaagagacttagaaagatcttgtcgcgatccgatacaatagaccgcgggaagccatgaagtttcaccacctcagaa

SEQ ID NO: 4675 - DNA, 848 bp, Cannabis sativa
gttttgtatatctaatacaactttcgtttcttatcaaaaaaccaaagtccgtttcattaaaaccactaacgatgaaacagagcacaatttctcaaacaaaaactaacaaccggaatattccctaaatcaatcagtcaatcattagctcaccttaccacaccaatcatgccccatcatacgaactattctgctgaattcttcttgggatttcctgttgcatttgtgaagtgaagtgtacaggaggtttttcactaacttgattactctacactatgtattacaaaatggctaacctatttaatcacaatatcacagtggactgattaagaattcaacaaaatctcacattcatctcacatacactagaaagaaagactaagaaatccctcagctagcccaatcatagtctaggtggtgtggcaacacttgagtgggttagttagttataaggatgatgaaaataggatgagtgaatgagaatgttttctggtatgtgtccccttcatgttttaacgtaataatagagggtaaaggattcattgtgtactgttgtaagaattgtggaagggtactgactactgaatactcttttcagaggtagggccccttgaagcacctatatcctgtttgtgcattctctctcaaaatatcaatccagtgagaacagatttctgggcatccctccaatttcttgtgttgttacatgtcaattactctgcacccatcaatcagtgtcaaagacactgccattcctcaaacagttccaaagaagaatgtccatttcagattcaagcagtggctgctcaagcagaggggctctctcaaataaaaaggaaatttggaagccc

SEQ ID NO: 4676 - DNA, 1037 bp, Cannabis sativa
ttattattattattatttcatttagttaatttggaaaacaacaacataattcttaatttcatatattaattattttattttttaaaaataaataaataaataaaaggcattatcttgggcattgtgtgcgcattgcggaccatgtcgtctcctccttccttcctgtggcgaatcgtttcgccagtgcaacaacacacatatttaaaataaaaataaaataataaaaaggtgaaaagtactcttaataccaccagaattgtagtaagagtatttctaaatgtgatattttcatggtgttaaaaaatttcatattatttgaaaatataatattttagaataatttacggtataaatatttaagtttaatttttgatactaataatgtataagttatatttttaaaatttttgtaagtatctagacctcaagtgtcaaattaatatgcatgtgtgattttctttttggtatgtttaaataaaaaaaatttaataatatggaccaattaagaacggtcatgtggccattttatgtaatcaagtaatggtattaccgttaaaaatatttttcttaatatttttttaacatatataccctctaattatttatgaatttagttttaaaataaagaaataaaaaataaatatttttagtgaaggtaatttagtctatctaaaccatttcgattacctttcctaattttgtaaataaaataataataacttttctagtcaatttagtaaataacataataaaatattaattttatttgtttaatacctttcatttcactcattctgttatttcaattctgattacacattagtaaacgtatcattagggtaaaaaagaaaaagtatagttttattttttcaaaaaaataagttaataatttggttttttctttacttactattcaaagagtattaatatttttttaaagtatacaagctaataaaactaagctagtttttgcacaataatttaatgtttttgataaggattttgtgctttttacgactgttgtgccattttttata

SEQ ID NO: 4677 - DNA, 1507 bp, Cannabis sativa
ttttttttgtcgaatataatatatacatataactagatgcatatatgtaatctgaattgataccaacctttgatcattccaaaaggaggttttatccaattctggtactattagcgttgcattcatgtattttgcaatcgctaccatatcgcaaatctacagcgcgcacaacagttttatatcaatataattcaatctatatatacgaccaacatatagaattacaaaaaaaaaaaaagaaaaaaaaaactccaactccactagtttcttataattaatcactaatacttacaccagatcgcatttgattcaatcccccattagctgaaaccatcaaaaacccattgctatcataaactcctgcacataattaatcaaaagagaactagataagcaaaatattataataattcattaaaaacgatgataacacatcaattaaaagtgatgaaatggttcacaaattaatcatttgaagctatatatttgaccaattaaatttgaaaaaaaaatgatactcccttaaatggcggttccgcccaaagtttagtaacttatttcatttagaagtaagaaaatatacatgcaaacattatttcattgaagcaatattaaatattatttatttactgactttggggaggaggagcgatgtgttgttgaggagaggaaggaaagatggaagtgggctgtctcatgaactcagtgagggtagtgagctgcagcagacaagcacagacgaagaaggcggcggtggccgatcccaccgcccacagcttcagccggtgcaagctccttaccctctcagcctttacatatcttatcacaaagctcgtaataagcttctccactttgatggtggctcctgatccgctgtgaatcccatctttattggcttctgatccaaatactaatttagtgtactcttcatcatcatgatgatggtaatcaccaaaaccaaccttgcatttctccattatcatatatataactattgtgtatacacttgctcttttattatgtaaaatatataattattaattacggaataaaacaatttcatgcatgcacgtatatatatatataatttaattggaaggaattaatagatatctttctttgattttgatttttgggatatttatagaggtggaatttccaaataagctatagcagcagcaacctatattttgtgaaattgaagaacaggcttagatcgattgattccacagaagggaaatgcatgagaattttgttgtatttaaaaagaaaggggtatagtacacattaatttggttaatgatcgacagaccctacataccatttttttttatgttctaattgacaatttgacaatcgaccatactcttaccatctaattattaatggattattatcataataaataataataaatgcatttaaattgcatatatattggtcgcttgttattgttagtcatgtatcataggagggtgtcatacattcaagttattatgtggttttt

SEQ ID NO: 4678 - DNA, 811 bp, Cannabis sativa
ataatatacaaataaaaacagctagaagattagctgttataattttctagctacgtatatgtaaaacaaggttcatattttgactttttttcaaaaaaaaaaaaaaaacaaacaaacaaacaaagataaaagtcacaatgtttatgtcatgtggaaaagaaaagagatgacttagtaattaggatgatctcatttgacattcactagcttttatttatttattttatcaacaattttgtacaatatgtgtatggaaggtttgttttttaggagtatgcttttgtctcaattggtaagggcctttttgtttttagtactaatataatttttataatccatatcaatatcatcaatatatataactatgtggcgcgcagcttatttaagtttttttattattattatttttgcttctttatttttcaagttaatccttacatgaaaaaaatcaaatttaattaatattatattctattcaacacattcatgattaacattatatatagttttttatttatttcgatttcatttttcatttttataccttttaatatagaggttttatttttcagatggaaatgatgcttgcacgaaatctttgtcataactcaataattcacataaaaattgaatttttgatttttagagggcttaaccatggatttcgaggattcccaactaatctgggaattcattaatcgtttttgtcgaggaggatgaaagaaaaaactttgctacctgatgatctaaaatctttaagtagcaagaagaaaaactatcaaagctctcctagctactatataggtgtatg

SEQ ID NO: 4679 - DNA, 1296 bp, Cannabis sativa
attataaaataaattacatttatttaaatattaaacaacaatgtagatgataatgtgatttacatgttaatcaagagaaaaatggtgccataataatgtttactatacattaattttttttacaataatattacaaaattatatttatttaattatattattatttaaatttatccaaagagttggaaacccacgttttaattataagaaatctttccttttaaggccaaacattattggaaaaaagctagctttaatttgtctcatattgtcttttaaatgaagcctaaatatagggtaggttttctttggagccaagatggaaaataaaataaaattaattgaaaataataataagtgaagtgaagtgatcatcctttatatactatcttataagtcaatcaaaatatcatttttatttaaaatgatcatattttgtaaccttatttgaataaaatgtgttattgtatgctattttgcttcatatttatatgcttttttttatgtatgtttatttatacaaaataatcctttatgaatttaatattagtaattacatacgaaaataatatttttttaacaattattatttaaaatggaaaagttttaataatttatggaatcgaaattgaatcactcaattacttttaattacataattacaatacaataaacaaattcagttacagcgtaacttttcaaacacagttttaatcacaatgtaactaatttttatatatttattcaaaaattaaaatttatatttttgtaaccaaaattattaaaagaaatatttaaaatcaatgaagtgaatggacaacattaattaattatattttattaagaaatataccataaccataataagataaaacaaaatgtaggattaaaaaattaattagtgtatgttgatcaatgataaaatgagcactagagactaatctaatataaattttcaaatataatttatgttatgtgatagaatacaacaaaaacaaaaataaagtacaatacataaacaactcccaaggataataatgataattacaaaaataacactaatatgtcataatatttatatttatatatatagagatatcaacatcaaaataaaggtaagaagataaatgaaatatcatacgtgtggggaactcttaattggtgtgaggtgcatcatcaaagtcaaaaataccctatcttgtaagtactttctaattccaattatcttattaattcattacccccaacaagaatattcttatatgaatacaatatactaacttatgttgaaatagt

SEQ ID NO: 4680 - DNA, 2894 bp, Cannabis sativa
tatggatatacagacgaaggtgtaatgatcgcagcagcaagcgatgtgatttggaacaacagagaagcatgtgggaagcaatataggattgaatgcactggacccacaaatgatggtgtcactcaaccatgcactggccaaagtgttgtggttaagatcgttgattactgtccttctggctgtgctgcaaccattgatctttctcaggaggctttctctgttattgccaatactgatgctggaaaaatccaaattacctatactcagtaagtacatatatataaattaataaaaaaatataattttttatgaagaaaatatataaattttatagggataaaaataaaaatatatgattgtaaggtttgagataagaatagaaagagaaattgaaaagtaagagtgttctttattagattaatgaagaaggctacaaacagtttatataggtattagagaagagaacaaccttctaactgtacaaccaaagaatactcaactaacagagttagttaattaatagtaacaactaactaactaactacaaactaactaaccagctttcttaatagcccccttcaaactgagtgtggttttgaaaatcacacacattttgtctcgaaattcagaaaacctggtgctggagattgacttagtgagacaatcaacaatctgagcagtagctggaacatgcttaacattgatgtgttgttgtaggactttgtctcaaacaaaatagagatcaatctttatgtgtttggtacgagcatgaaggacgagatttgcagcaaggaggattgtgctctcgttgtcacaccacacagagggaacaacaacttgaggaatctgaagtttgtgaagcagagattggacccaggtgattttagcaacaacattggcaaggctttgaaattatgctttagaggaggacttgcttaagatttccaccaaaatagatgcagtagccagaagtagaatgtttgtcatttagatcagatgcccaatctacatcacagaagacatcaagagagaagtctgtaacaagtttgaggagcagaccataatctaaggtgcctgcaatgtacctcagaattcgtttcacagtagtcaagtgtgtatgcaagggattttgcataaattaacacactttattgacacaaaaggcaagctctggtatggttatggtagcatactgtagacaacaattgacctatacattgtagcatctttgacaggttcactgccatagttagaaagcttaaggccactggtcataggagtatttttgtgtgtttacattttgcatatcagttttggtaagaagatcttgaaggtactttgtttgagtaagcaatacaccagctggatttctgataacttgaatgcccaaaacatagtcaacaaggcaaagatctttgtgtgagaaagtagaacttagttcatggatgagctgttcaacaagggtgtcatcattgcccataataagaatatcatctacatagacaagaatgtaaatgcatgattgagatgttacccttatgaagagagattgatcaacctttgaaaactaaaatacatgttgaaccaaaggtgtggacaacttctcaaaccaggccgttggtgcctgtttgagaccacataaagccttgttgagcttgcacacatagtttgaatggtatggatcaataaaccctggtggttgttgcatataaatgtcttcctttaggtctccattaaggaaagcattattggcatctaactaccttattatccagcctttagtaacagctatggtgagcacaatcctgatggtgattggcttaaccacaggactgaatgtctcaaaaaaaaaatcaaacccaacttgttgatggaagtctttggccactaaccttgctttgcatttgttaaatgaaccatttgcattttgttttattctaagaacacacttgcagcctatacaggtttaatttctagtaaaggaacaagcacgcatgtcctatttttcattaaagcaaacatttatgtggacattgcttcaaaccaatgagtttcttctaaggctgctttaacagatttgggttcataaacagctaacaaagcctttagtttctttatccctgccttaagtcttgttgtcatgtgatgtttggaagtagatgacactgttgcatctgcaggtaaatttttagtaacaataggcacatttgtgttaacagtgttggtagtaggtattgtggactgttgaattggtatgcccccaagattctgatccatgatgttgggagagactgagatggatggatttactactgacagaggaacaaagactgcgtcatttgttgctattatgagaagaggaatagaagtctgtctcaatggagcaacaacatgagcaacagcatgtgctagtggtgtaggaatagtaggagggtcaaggcgaatgacagtgggaggagttggtggattgttgacattgaggaatgacactagaggaggaatagcagagatagaagtgggatgagattcaatgtgactgaactgagtcacttgactgttagcataggggaatgtgttttcatcaaagacaacatctttagatatatatatagcctatgatctttagacaaacatttgaaccctttatgtgccatgctataacctagaaaaatataaggtatagacctgtactgcagtttatttttgttgtatggcctaagatttgaatagcaaaggcacccaaacactctgagacgtgtgtagtcagggacagttttgaacaatacctcaagaggaaatgtgttcattagcacaggggttggcattctgtcaatgagataagctgttgttcgaaaagattaatcctaatttttgagagaaagatgagcctgtgc

SEQ ID NO: 4681 - DNA, 1149 bp, Cannabis sativa
aaaaaaaaaatatttcaaatattatcataaaataggatctttttcataaattaattttgtgttagatttatttttttcgaaggattaaatactatatgttacatatttgttgcagtttttaattttaattttaatttcgataaattttattaaatttgactaaataataattactaaattataaaaagctatatataaataaaaatttataattttgttgaggatatttcaacttctattatcatttattttaagattatttaataatttttaaaaataaaatattaacatgtgatgatattttatttaatcaaattaatacttcattatattaacgaagtttattgtaaccgctacaagaaaaacacaacatatggtatttacaccgcaaatattcatatgtatataaatagatgaattattattgatagagtatttcagtctaagttacttccatgagaataaatggaagatgaagtagggctagttacaggatttctttctacattaccaaagttggctttaccacttaacatttttattgctatttggcccacttctgcaaaccactcatcctctggcaatacactgccaccaaaaataaataaataaataaataatgttagatttacaatcacaaattaaaaattcttaattgtactttaaatctgatttagaacgattagagtatcaacaatatatgacattgcttaatgtgttttttgtcaaataagtgagattagatagagtaaacaaaaatgttacttaaaacaaatatactattcttgatgctcttatttgcaatttgtctttaataaaaattgagaaatattaatatgacatttgttgtgtacaccattagaggacccttataatactttttaaattagtacttatattttttttaaaaaaatattgacaattattgaaaaacatcatatatctggagtggcaaaatatgttcgtattgggttcgtatcaaatttgatgtgatctgcttatatattttgtgtcaggcgacctgttttttgatttgtgtctaattttttcaaccctaacgtgatccataaaaacttgtgtatgttcgtgttgacccactttcacatatttttctattattaaagctggaagttttagagaaaaatgata

SEQ ID NO: 4682 - DNA, 1084 bp, Cannabis sativa
gaagtcaagaaaatgattgctaatttagaagtgggtttggttgggctcctagaaactcgggtgaaagctcaaagtttgggaaaggtttatatggtgtttttcttcaaataattcatggaatcaaggaggaagaattataataagcttaaattggcaatatattcagtggacatactgaattgttctaatcaactcatgcatttgaaaatttggagagtgggtaacaaggagtacttttatgttcctttcgtctacgctttcaatgatgaggtgggaagaggggatttatgggaagatttaaagttgttggtagataatattagggatccatggattatcttatgggatttcaatgacattttgaatcttaaaaaaagagtgggaagaacagtaagaataagcaagtctactgcttttaaggattgtgtggaatgttgtaaattagaagatgttaagttctcaaattcatttttcacttggagcaaaaaacaaggagcatccactcggatattctctaaaattgatagaattttggcgaatcaagaatggatgtgtaagtttgaaaatgtggaagtagctttttttggtagagggcctctttgatcatagtccagctgtactaacaatctaccccgagattaaaattgggagtagacctttagattcttcagaatgtggcaacatatggaatggttccctgaattgataaaaaagttggcagcaacatcagcatgaagacacacttgtgtaccaactggtttttaagttaaaggtttgaaaaagaacttcaagattagaataagaagtgagtgggagatatagcaacaaccgattcttaagcatacaatgttatgctagatagtcaggttgcttctcaaaaagatctgttgaatgaagaattatgaagggaagaaatagaagccaatttaaattacatgaccactcacaaagcctacctttcctttcttcatcagaaaacaaaggtttaatggttgaaagaaggagacaataacacgatagtttttcatgctagtttaagagcaagaagggtgaaaaataaaatcttctctatttgcacaatgga

SEQ ID NO: 4683 - DNA, 2647 bp, Cannabis sativa
tgagataatatcatacaattagaaaacttatttgaatgactttctcgaaaatctaaaaaaatgaacatgagagatcaagatgataaataggcattcaaaaaaatgatgaatatagggagtagagagtatcaataaatgaaaattatatcagagaacacataaataaaattaacatgatgcgtgcatgacctaagttgtagccaaaaataaaattttacacttttttgcaagtattctatactcaattgtagttgtcataatttttaaattttgtagatggtttaaagaaccttcactcaataggttcttaaatttaaaaagttaatttttttcttattgttgcatgcattaaattatcatgtaagataaataatagacacattaagtatttaataattgataaaaaaataataaagcaaataatatgaataaaaataataatcatcttctcatcaataaaaatcaatatcgatacttatcaattctctattcttcttcgtattaagagactttaacattctacaaactctaattttagtgttccaactatctatatcagtggtttcaaaagaaaactatttgtatcaatatttaagaaaataatatactccatcataagaaaaggagtgagaaataaaattaagaaaagttaagtagtaaattaaattatgaagttaaagaaaaatattctttttaagataaattttttaaaagtatgaataagtattccaataaatttttattttcttaataagagaagagaattagattaatattttagatcttaatttttttctaattattttgaatttaaaaaataatagttaattaatttattataaatgtatatattattataaaatcagttttcaaaatatatattccttgcataaattaaattggaacccgaaaaataaaattgaacaacagataaatctatatataaaaaaaaaaaaaaaaactcatcaattttaaaatcgttgtcgtcactgtatttctcttataattgtcattatcataaaaaaaaaatacaatatttgataaatctatttaaaacttatcaattttaaaattgttatcattattgtatttcactcgtcagaacattcaaagtcgttgtcattattgtatctcacttgtaattgtcaccatcttaaaaatatcaaacatgacaattaataaacttatagaaaaaatgacgatgtcgaatagagagacgaagagtatcaataaataagaatgcaataagaaaaattaataaaaatttgtgagataatatgatacaattagaacactcttttgaatgacctcttgaaaacctaaatatgtataacaatttataagtctattaaaactcgttaattttaaaatcattgtcattaccgtatttcacttgcaatcattagcattctaaaaaaacaaaataacaataacaaatctgtagagaaaaaaaatgataacatcaaaaagagagagaattgatgataacaattagaacactcttttgaatgaccttctcgaaaacataaaaaaaaaaaataaacatgacaaatcaagatgataaatatgcaattaaaaaaataataatgaatatacagaataaattgtatcaataaaatagaattagattgataacacataaacaaaattaatcatgcatgcatgacctaagttgtaaccgaaaataaatttttatagttatttaaaagtattttatacttatttgtagttgtcacaattttgaaattttacaaatggtataaagaaccttcattcaataggttcttaaacttaaaactattttttttttttcttattgttgcatgcattagatttttctgtaggataaatgatagacgcattgagaaaaaaatatgaaaaaaataataataatcttctcaccgataaaatccatatcgagacttatcaattttcaaattttttttagtattaagagaccttcatattctacaaacattaatttttatgctccaactacatgtattagtatttaatttagtaacaaaagaatatgaggaaagaattgagaaataaaattaagaaaaattaaatagtaaaatatatagagcttagaaattgattgaaaaaaaaaaaagtgtatggcatggaaaatttaatttaaaaaatatatattttataaacatgagatatgaaccaagtgtatatatttttaaagtattatagaataataatattcaaaaattagaaaataaatatgggaaaattgataaatatttatgaacttaataaaaaattaaaagaatgtatttacacaaaaagtaatcctggtaacgtggacatcaatgtttgacatgtggccagaaggataatgtctcggagtgaatgaactcaagtcatagcagtcaacttgggaaagagtctcaagccttgcgcctaagttgactatgaggcattggaataggtattttgatcccacaatttgtttccaagtctcatcctttagtattatgagtcatgaagacatgaagaatccaagttcaaggcttgaaagctgaaaatacacaaaacaacaccccgaaagtcaacttagatgcttaggatttcacctagcgcctaggttgacaatccaactaggactttgattttcgagaccgtcttagtacaa

SEQ ID NO: 4684 - DNA, 1222 bp, Cannabis sativa
taaactaaataaataaaatttacaaactaaataacaatgttcagcttattaatactattaaaatgtcttaaattaaattaaattattaaaaaaaaatgtaaatcaattattccataaaattctcattaagatctcaggttacaaaggcttgatacacattattatcattgggaggttccgacggctgtagcgaagaaagaacatatggttgatctgatgataaaccaagtgttaggttccctaactgagcttggttgagtataggggttcaaaaaaaaattattgctcttgtgatgaacttccaaatatcccaaaattagcaaaatttgagccgagcggaggagactccgatggggttctatataagaactgattaccatattgcggactaaactggtgttgctgctgctgcagagaatgttggtgttgctactgcgaagaaggctggaattgttgttgcggagaaggctagaattgttaatgcgaagaaggttggtgttgatgttgtggaggagcaacataactctgagaagacgaaccactaggagattgtgattgaccgtacatttgaataaagttttcaaatcgtgggttatataaattgacacgttgatgagggattagactactccctaatatgtcacgtatagttgtaatacatctgccacagtgttaaaaatttcagtagagggtggaggaggcgcagttgactgactttgactgtatgttatttttcctttgcctttgaccctctaacccacgcctctttgatagtcagatctttcgccaaaaactttttttaagtacgttgaattgataactagtatcagattcagtaccagatgtatctctctgtgattgtctttcgagcgtttcctatcaagctccttacacaattcatcttatttaaataaatattattagaacatataattaatataatatctaaattttaataatacaatattttttttacttacaaaattttttgcagtgacttcattgacaaaaccaccagatagttgtttcgtatgagtcactctccatgcatcgaccacatgctcttcaggtggaccaccctatacgaatataaacatataaaatagtttataatgcattttaagataaatatattttaaaaataaagaataaatattattgctgacaaagttgtgacgtatagaaagctaatgatctcgtgccttgcgtcgttggatatttc

SEQ ID NO: 4685 - DNA, 840 bp, Cannabis sativa
tgttacaaaaagcccaagtgaagttactaaaaacttaattttagtatgaactctaacgtgccacctccaagtttttagagttaggtagctgtcaagaagcttaattttagtatgaagatttctaagctcttctttttatcatggctcacaggaacatggaaatcaacctgcacttactcgagctttttggccaacaaaacaccaatgtgttgtgtttcactttctacattttacaatcctaccatcacagcatgtccaacttgtagctgtggatgtagggaggctgacaaaagtactgattcttgtatgagcatgaggttggttggttggttgattggtctcttttaataactctatgaatagctttttttttaaatctcaatcaagcttaagtgccactgcagccccttagtttagttatgttagaacactcatcctattggtattggttatctatgtttactcatttgattcattcaagtttaataaaagtttcttttgtctcataaagaatttttctaatgtcatatgatatataacagagaaggaagccatctatcaagctcaaattcagtaaataacttagacatagtgaaatgtagtgatcatatgtgcccagttagagttcattggcatgttaaaacaaattacatgaaccattggaaggtaaagcttacagtttcaaactacaactatcaaagaaactacacagattggaatgtactagttcagcatccaagtctcagacaattggaaaaagcttatagtttcaatagtactttgcttccagctgttggattgggaggtacttcttagttcctacaaatattgaaatattag

SEQ ID NO: 4686 - DNA, 818 bp, Cannabis sativa
cctaatacagcttccattgacttgattttctttccatcttccgaggatgatggaccacgctttttagcaggtttggttggtttcgacacagataccttcttccccaaattcctagatctcgttttttccatggcgccagctcgagctgagcgagagagaaatcagggaaaaaaaaaattagatcaatttttggtagactattggaaaatactttttacaatgagttatattttagtaataaatcataaatgtacatctccaatatattatcggttgtgttaaaacgagattttaccagttgcaattaagataggtggcgttttgtgactttttattttctaattttttaatcataaaaatgaaagtaattttttaaaaaaaaaaaatagttttaaaaaacaaaaatgtattctataaccacttttgtttttaattctaaaaacagaaaataaaagtgtattttgtaaatttcattttcatttgttattttttcataacatttaagacgggtatgggtctggggttgggtctagggcctgggttcggggtctggggtcgggatccaagtctaggtttggggttgggattcgagtcctgtgttcgaggtttgggtccgagtttggggttggggtccgaatccaagtctcaaggtccagattagggtcgaggtccaaaatatcttttttttttttttgaaaaaggggaaactttattcaaaaagataaacaaaacacacaaaggctaaaagccaaacagagaacctgaagctaccgaaccagaaaagaggcagcaggcacccaaactaccaacttttaatt

SEQ ID NO: 4687 - DNA, 1143 bp, Cannabis sativa
cagtttattcagatgacaaacactatccagaagaagttcaaagtttcttcaacgcaacttctgtatcagtcttgcccctatcaagctatgactctgttcattattggtccatttctagatgggcttttgaccaatcaaaatgtgttcgctttcaattacaccccgcaagtgttggtgagagaattgaacaaaaactagtcttccgcttcttaatccttctaaattgtatctgatttccctggtttctttctgaaattaacttttttatcctgtgttgcagttcttcattgttttgtcctgcctgatatcggtttccgtaaacttcagtacatttttggttattggaaagacgtctcctgttacctatcaggtccttggacatctaaaaacatgcctagttttgacattcggctatgttctacttcgtgacccatttagctggcgcaacattctggggatcttagttgcggtagttggaatggtactctattcttactattgcaatcgtgagagccagcagaaggccagtgaagccccagtgcagctgtcccaggtaattgcaattcttttcctgactctcattcatgcatttcatgctgccatagggatatgtggttttcactttattcatcatttaatttgaaaaaatagcccccactcgaacttattaagaaccctcacttgtggtggaggaaaaccgtggttacacataaaattagaaaaaaaaaaaaaaaaacacataatgcagttacagcagtgctttccattccctactcagtggttattcatcctttattttggctcgagatgttaacatgtattaatttttatggtgttgctcacagccaaaagaagttgaatccgatccgttgttaagtgttgaaaatggaaacgggattcatggcgatggtggtccaaagtctcctgtgtggagttcaaataaagacctgcacgcataaaaacgtagtctttcatatgccttgagttgaggtgaaatttagctgacagagctgatcccgacaatgaagatgttgcgggcaactagcaagggtttttgatgcggttcgtttcgatagttatatgcaattggaggttacactttgtactgtagaactagtcttgataattgaagaatctcctctc

SEQ ID NO: 4688 - DNA, 1502 bp, Cannabis sativa
aagaaagtcaattaatgtataaattttagtagcaacactatagttatgtaataatttaaatataaataacaagattaatgaaattaatactttactccaaaaaaatggagcatattattcttcactatataataagttgctacacaaatcccttagcaacacaagcattaatttaagaagactttgactagactactgtggggtttccctcacagaatcacaaatcaccaatcacaaaatgacccaaatacaaacaagttcaaagaaaacacaagaagaaagcaatgggctgtgtgggcccactaaaagcccattaaagtaatatataatctaaatagccacactgtgaaggaccacagtttcaacagtgaggccaggcccaaatccaaacaagacaccccattcaagtccttcaccagtggtgttaagcccatcttcaacacacttccttctcatctcatccaaaatgaacaaaacacaagcacttgacatattaccatactcactaagcacatgtctagtggcacgtaatttctcagtcttaagagccaatttggactcaacttggtccaaaatagctgggccaccaggatgagcaatccaaaaaagtgagttccaatcagaaatacccaaaggcttaaaagcctcatttaaactcttctcaatattcttagaaataagcccaggaacatctttaagcaaatgaaaagtaagcccaacttcacgtaaatgaccatcaatagcaccatcactatcaggaagtatagtttgggccgcagagaccaattcaaaaatgggcttttcaacttcaggaattgggtcagacccaacaatcaaagcagccgaaccatcaccaaatagggcctggcccacaagactatcgagatgggtatcattaggcccacgaaaagtaacagcagtaatttcagaacaaacaaccaatacacgagcacctttgttattttcagccaaatctttggctaaacgaagaacagttccaccagcaaaacaaccttgttgatacatcatcaaacgtttgactgatggtctaaggcccaataacttagtgagctggtaatcagcaccaggcatgtccacaccactagtggtacaaaataccaaatgggttatctttgatttgggctggccccattctttgatggcctttgtagcagcctctttacccaatttaggtacttcaacaacaaccatatcttgtcttgcatccaatgatggtgcctcataagcacaaagatttggattttctttgagaatctcctcagttaaatgcatgtaacgttttctaatcatggatttgtcacctacacaaaaaaaaaaaaaaaattaccaaatttagaaaaataccaaaagtccaccaatccataaaagcacaagtactaaatcactaataaaaccgtcccaattatttagctggaatttttaacacaataataaatgttatttatgaccatagtaaataaaaattaaagcatagtttaata

SEQ ID NO: 4689 - DNA, 831 bp, Cannabis sativa
ccaaccgctggctgcagtggctactcaacctcaaaatcaaccccaaattatgcttccgcagcaagggcaacatgcagtcctaccacaatctcaaactcaaccacagacttatccactggcccatggaaatcctcagcctcagccatattcccaaaaccagctacatccacatcctcattctcaacatgtgcaaatgccgcagtatatgcagcctccttctcagctgcaaagtaagcaacagacccaatcacaggtccagcctctgtatcatcccccttctcagcctcatttgctttcacaaagtcagcaacctgggcagcttcagcataatcctcagcagaaccagcctcttaatactaatttgcagtctcagacacagcttgcatcaacccatgcagtgacaagtcatcaatcatatcttcagcctaacattgaccctcaagtgcagagtggaacatcacaacaatatgcagtgcatgggcagtcacaaaatcctgctcagatgcagagtcagtaccctcaacaacttccagtgatgcgtcctctactttcacatgctacaattccaggccagcagcagccagctttggtaccttcaccaggtcaagtccagaacatcccttccgcagaacaacagttaatccaatcacattttcaacaaccagggcaaccagtccaccaacgtcctgttatgcagccagctcaaccaactttttctcagcaacattatcaacaacaactacctatgtcatcccagttgcgtcctcagggacaatctcatctttttcccactcaaacttatccttattcacagctatcacaaaatgttgc

SEQ ID NO: 4690 - DNA, 2091 bp, Cannabis sativa
ttttttttttttttttaagaagatctcaaatactctattatgcacaaaagaaatggaaaaagaacaaaatatataaatagttgataatcataagtcggatcgaaagttgtaattatcttttttttttcctattataacatcggaataataaattaaacaattatcccaagtttttcgagaagatttagctaatccccttatcatcctaaatcgaccggcctacgtattctcttctaaggaatattgagtgatttttaatcttgataaaaaaaaattcatgacaccattattcaaactatagacctttcaataaaattaaaatcattatagggaaaatgacaataaaaaagttattatgagtgaaaaaaaaaaaaaaaatcaaacaaaaaattaattattatttaaatatccactagaattttcttcttctttctagttatttttcagtggaacagtctttttaccattttagtaaaaaatcacttaaatacttcaacttatttaaaaaaaaaaaaaaaaatcaatttatttccatttcatttcatatatattccatcccatcccatgacaaaatcttatcaaactattttttaaaaaatctaaattatcatcaacttctaaatatacttgaaattttattattaaagttatttttaaaaatatttatataaataaaaaagaatataaaattttaaaaaataataaattaaaacaaaaaatagggcaaattaatttagatcatattttaaaattattttctaaaccctaaatttggcaaaaaaaatcaaattattataattttaagtttatatttccaaactatattattattattattattattattttgtaagaagctttttttaaataaataaaaaaaaacgtaattgcttaaattctataatttgacattgatctaagtcattttaaatttgtgagaaatctcctatataactagaatatgatatatatacgtattgtcatgtgaaaataactatatttagaattaataatctatgtcccaaaaatattaaaagtatttttaattagtagtgtttaaagataattgccaagttttgtttttaggtgctgattgtcattgttttgttaagttaataattttgaggaatatataatatcacagctgattcattaaaaaattcactctaccaagcaatttttagtattgttagaattattgttaagaaaaatgaggttattgcaagtaggcatatataaagtggatgacctctagatctataaatttcattgctttgcaagagtgacaaatacattatttatttatttattttcattatatagaattgatatttttataataaatttggtgacccatgctctttattgaaatgctgttggtgagctgcccaacatggcagtcgatggaaaaataattaattaataaataataaatatacctaatcggctaattaataactggagccatatgggcactcctagtacccgcacggtgggtcatctatatcataatacaatatatagaaatacaattttttcctgtgatgtactttcacggaatgtatttcgtaggacattagataggtctcagggtacattagatggatctcaaggtacattagataggtctcagggtacgttaccattttttaatcctaattatccctagatcaaccacagccctcagatcaaataactctcccatctaacggtagtcgtacatcacgaaataattccgtgaaagtacatcacaagataaaatcgtgtccctatatatatagacatattttttttttataatgagcatattacaatatttaacttataaagttagtaggtatttttgtaattatctagcattctttaatttttttttctttctttttttctcttcgattcttctttatttatttttattttgaaaggaagattttttttttttattttttgaggagatataacgctgatccacatagtcagaatcaaactcaagattttccttaacgctggcctttcctcttagcctctgaaggatatggtcttgagattgacacctactatgtagattttgctattatatatcttctgggt

SEQ ID NO: 4691 - DNA, 1318 bp, Cannabis sativa
aaagatctcacataatccccatataaaaattattaaaaattccaataaaagaggaacacgtttccttccttcatccattgacttcactaaaaagtatataggaaattttgttaggtatgatccttatccagtaagagcttttttaatttttattttttttaaataaaatgaacttctcattataaggcatctagatctagatgttttttttttaaggcttattgggttcccttctcaccaaaaaattgtgtttgttattgaactagttttgggaacaaaatcagtatctaaagcaccataccgaatgactcttacaaaattgaaagaattgaagattcagttgcaagaattacttgatataggattcagttgtagaacatcaaaagtcaggaggatttttatagccttcaagtctttttgaattgaaatgggaagatattactatgaattttgtaattggattatccaatactatggggcaatatgattctatgtgggtaatagttgataggtatacaaagtcaactcacttcttacctgtccgaatgaacttttccattgatcagtatgcttagttatacgttagaaaaatagtttgtattcatagtgctctaaagtttattgtatctgatagagatccgaaattcacatcaagattttaggagtgtcttcagcgagcactgggtacaaagtaaagttcagcacaacattccatcctcagacagatggacaatccgaaaggactattcaaattctagaagacatgttacggacatgtgtgttggattttgaaggatcttgggtgaagtaccttccattgattgagttttcttataacaacaactatcaatcaactattgggatgcccctttatgaattgttatatggaggaaaatatagatcacttatccattgagatgaaatgggtgaaaagaagttcttaggtcacgaagttgttcagagaacaagtgagacaattgatagaattagagctagaatgctcgttgaccagagtaggcgaaaaagttatgtagatccaaagcgttgaaatgttgactttcaagtcggagatatggtatttctctagatatcacctatgaaaggtgtgaagtgctttggaaagaaaaagaaagttaagcccaaggttcgtaggaccttttcgatttcttagaaaagatagggcaagtggtgtataggttggctatgcccccagcacatgcacctgtacacaatgtgtttcatggttcaatgtgtgatagttaatagtcccatgatccgtaaggggaaagactagataagctgtgcaatcccacactgt

SEQ ID NO: 4692 - DNA, 1522 bp, Cannabis sativa
attgatgattgatgatctgagtgagaggaagactctaattaagataagataattgctaaaaagcacccattcggtgtcataacattattagtgtgtaattaagtatcgagtctcataataactaataattttaaaaaatattgctgaccaatgctctagaaaacaataaggtgattgatgaatagagtaattatgtaaatgagttagttttattttgagtacgttgaacaactttaaggcagagcaagagacttattactatataacaattattacttttaatcaaaataatagatactaaattatttcttctttttcgataaagaagttgtcataaagtaaaaatgataaaaaaaaaaaagaacaaccatttttataaaaaaaatatatatataaaacagcaacaactaatagatcgaacatcaaaacaacattatgaactaaatttaacaatcaacaacaagattaaacaaaaaaaaattattacccattgagagtcgaaaattaataagctgattgatgaatggagtaattaagttaagtaaatgagttagttttaaatacattgaacaacttcaaggcagagcaagagactcattgcataactaattattacttttaatcaaattgataaattctaatttcttttaatttttcttttttcgatggatgaagtcatcaattcggttgttatgcattttattaaaaaataagtagacttggcatgagaaataatgatatgcacatcaatggagaaatgctaaaagatatcagttgtattagtgttatattgtaattaagtaacgaatcctatgtaatttaaaaaaataacttttaataattattgctaaccaatcgtaaaaattcacctacaaaaagtattagacaccactaatactaaatagcaatgttctatatgaatttgaaggcataggaagagacgtattaataataatactagtgcaattacttcaaaaaataagttatcataaaaatgaaaaaaataataaatatcaactaacggtataataataattaaaataaatgaagaaatatagagagaggagtgcaatttataaatttacaagatttcgatgttgacaacaattcaccatgaattatagagacttgggtggctgttatttatattttgctccatcccaacaaaaaggattactatttacaactgcaattcattttaataaaaaaaataacgttattgatttatttatttattttgaaaataagtaaaagtagtttattaagatttaagaaggtgaatgaggtagttattaatattaattagataatttaatatttatgtttatggtgctccatcccaacaaaaagacagagggaagagactagaacagaaaacattgaacatcaagattggaagtgaaaagacaatattattattattacatgtaaaaagatgctaaaaattccatggagtcagacaatttcatctcaattaattgtttgtgcatggagataaaataaatatttggtgttgttttta

SEQ ID NO: 4693 - DNA, 3158 bp, Cannabis sativa
caatgaggtgcttatcttggaactaccggggtctccgaagacccacgacagaaaggtccctccggggacttattcgagagaatgatgcggatttcttatttctctcgaaaactaaggtgagcacggaatttatggttcaactactgaataggttgggttttgtaaactcctgttgtatccctgcggagggcactgcaggtggtttttgtgtagcttggcgagttgtggtgcaagtggacatcctggaggtgtatgatatgggttttaaggtgaaaatagaagcttctcttgactaccctcaatgggtgttgttctgtattaatggtcctgcatatgctgttttgaagaaaaatttctgggattggttgatccaaattgttcaacagtgcaaagatgcttgggctataatgggagacctgaatgttatcatggatgaaaatgagaaaattaggggacgtaagtaccagttacgggaagggaatattctaaagaactttatgttcaactcaggaggtgtcgatctgggttttgaaggtgccccgtgcacttggcaaaatgcaagatccttctctcatcatatccgtaaacgcctggacagagttatcgcggatgaccaatggtgtgtctcctttcccagagcctcggtagtacatctgccgatttatggatcagaccatgccccaatattactaaaagcttggggagaatatgaaaaactcttgtatccatttcgtttcttagaagtatggactacgtcatcagagtgtggcaatattatctcaaacgcttggcagtcagtagcgtcaggaaatgagggcactatcctatgcagcaagctgaaatacacaaagaaagaattaaaaaagtggaatgccatgagatttggccactgtgaaaaacggctgcaacatcttaaacgcgatcttggagttatccaagaagctacggtatcacaggaaaaccttgaaaaagaagccactatccaattagaaattctaaacttggaggagaaaattgaacgaatatggaggcaaaaatcaagggagtgctggctgaaatttggagataacaacacgaaattctttcatgcttcaacgttgatcagacgaagacgaaatcgtatcagttgtatcgaagcttctccgggtttatggctaaaacagcgacagcagattggagattacttcctctcaaatttcaaaaatctgtatcagactacagacccgagccttggtgatgagtttgagtccttattctcagaccaggttactatggaggaaaatgaagcaatttgtagcatcccgagcgaagaagagatcaagaatgtggtgttcaaaatgcatccactaaagttccctggacccgatggtttcccaggaattttctttcgaaaatactggcacacggttggtgaccaagtctgtaaaatggttcaagaattcttctctagtggcatactccctctgactctaaaccacactttcatttgcttgattcctaagcacgataacgcaaactccttcgaccgattctgtctgataagtctgtgcaattttgggtacaagattatctcccgcattctcactgatagattgaagaaaatcctggacaggctgatatccccacatcaatcggcctttatcccaggccggtggatagcagaatgttcattcttggctcaagaggtgatacacgctatgaagaacaagaagggtaaaagaggtgttatggcaattaagatggatttgagcaaagcttacaatagactcgaatggaaatttatcctcaaagttttgcaagccaacggattcaataacaaggtgatatcactaatcatgtcttgtgtgagttctgtaagcttctcaattctccttaatggtgctccccttgctcccttcaatcctaagcgagggctgagacaaggggatccactatcaccctttttattcatcctttgtagtgaggtgttatcgaaaatgatttctaaggccgagaaagatcggaatattcacgggatcaaaatctcgagaaatgccactccgatatcccatttgttttacgcagatgatgctatttacttctgccaagcaacagaggaaaatgctacatccctgatgagtattctgaagcaatatgaagattggtcaggtcagaagattaacaaggaaaaaagttgtgtggttttctctccaaacactaaggcaaacacaaaggatcgtttgatggagattctaggcatgccaaagctgaagagaaatgaaaagtatttgggaaatccttttttctttactgccaatagaagaaatgatttccagttcttgagacagaaagtgttgaatagaattgaaggttggaaagcaaaatgcctatcgcaggctggaagaccaactctggttagttcagtgctacagagtattccaacctattttatggcaaccactttggttccccagtccctctgcgaagagttagacaaacttttggcaaagttctgatggataggtcctcgatcaaacaaagaaagatactgtgctttaaggagttggggaaacttatgtcaaccgaaaagttgtggtggccttgggtttagaagatttcaagacatgaatcatgcattactggcaaagctgttttgggagattctccaaaagaaggacaagctatgggttagagcccttagcacaaaatactgctctatcctggatgcgtggtcggtggataaacaagattcagactcgaaactttggaagaatttactgcaaacgagggaactttgtgtgactggtgctggtttcgtagttgcaaatggggagattgatctttggacgaagccttggatcccttggaaaacaatacgacaactgaaagacggatttcattgtagccgagtacatgccttcgccaaggtgaaagatctgttcaaggatggaactcgaacatggaatgagtccctcgtgtgggcctgtttcgataaagaaattgctgaatcaatcctttgtatcaagctgctttcagaaggagaagacatttttttctggaaaccggcaaaattaggaaagttttctgtctgtgaaaagtgcgtactggcttcatcagcaggatagattctcggcccctactcctatctgggaagacctctggaaacagaaaatgcaccc

SEQ ID NO: 4694 - DNA, 873 bp, Cannabis sativa
aaatttgatatgtaatagttaggcctccatccacaagtttcgttatatgttttgcgtatttatctccctactttatatgtattaaaaggtatatatatatttttgtggagatatattgttctagggatgttataaattgaatgtaatatattagtaattttgatttaataaatttgtatgatacttgaagaaatcttcataatctaaattgtgcaacccgattattcattaattggatatatgtacaaataatttcaaaataataactaataatattttttctttaattatttattgtattatttttaaatcaagtagaaagtacttagcataaaactaagtatacatgtctcgcacgtaactttcttctagtaaatatatatatataaatatatatatatatattgttggatacttttggaatgaaccctctctaaaaggggtccatcgagtgtcactgactatttaactcttattttaaatatgttaaatttttatgaatttcttaaaattttacaggatgtcattaactacaacgtagatgaccataaaaaaattaaactaaaaaattttcatagggagtgcatagatagactttttttaaaggggtgcattgaaaactttcttgttactttatgtgaatgatgtaataaaaaagttgaaaaaatatgaaaaaaaaaattagaataaagtagctagttactctaaggaggtaactggttaccttaaattatttttatcatattttgtaattttttgaaggaaaaaaaaaacatgtttataaaaatcatataatattatgatttttatcatgtcgggcctaaagtttacatgaccaacttattattttttatgggttggcaggacaaatcc

SEQ ID NO: 4695 - DNA, 582 bp, Cannabis sativa
ccgggttccttcctcgacgcgtgtcttgcttttccggcgttgctaccaccgccgttcaatcctccaatccgtcggttagggttccggatcatcgagtttctggagtttcgttcggactcagaagcactccctcggttttaaagagtgggttttgcgatttgggtcatttggagtattattccaaagctacaattaggtgtggtggtggtgagaagaagaagaagaagaaggataagaaggacaaggttaaggaaaagggctatggtgtacgaaccattgagaagaaattgaacttgcttgaggcgttgtccatctccaacaacttcaacgcttcttctgatatggatcatcaagttcagaacaacttgatttcggtatgactatctatgttattgatttttaatcttctcttgaaattgtcctgttttattgatttattgtatatattaatgacttaattaggaattgaacactttatttgggtttagattgaagtaaattgcttagttaattaagacaatttattggtgattcatataattcagatatagaatgatgtatgtttgattatactacttcaga

SEQ ID NO: 4696 - DNA, 607 bp, Cannabis sativa
actcaagcaagaatgatgatggagctaatagcagataatataacatttgtcatcgtgataattgtcctacccacgacgagaattaggaacatcctccaaacaatgctaatcctcctaggttggctcggtttatcatctaacgaagcaaaagagctctgggcaacttagtttttcaaaggatgggccccaaggctgatcttcgggacaatttgaatcataggagaggaaacaaggatagatactttatccctcacccaacaattagccatttaatgtggatgattatattccacataatgttgacaacttcttaccctttgacactctaggggtttagtaggtgacacaggccagtcaataggcatgtcaagttgatccaggggtgcaggactaattagatcagctaaagagcctcatttaaaatttgaccgactcaaaactcactgactggagctcgattcaacaagagggtcaccattctcccaatgagtcaattcctttaatcttttggcaaagttcaaaattcttacttgggaaagaagattcgttatctcatattaaatacttttagatacagatggacctgaaggtagtaaagggtgatgta

SEQ ID NO: 4697 - DNA, 956 bp, Cannabis sativa
ctgttgtagttttattttttcgcaaagttaatcactcttaatccgacacttcccataaaacaaaaagaaaagtacagaataagaattggtatgaccaataagactttattccgttgagcaccatatcttgagcaatggaataagaaataacaatggcttcttctactaaccactctcacaaacactaaccaccctctttctaaccaatcctagaaaccattttaagatcacaatcaaaagctctcaaatgatcatttctcatcaaaaagttttaaatttgctaatcttaactaagagaatgtgctaagttagattttatagataacctcttaataaaagaagtaagtccttagttttaacagtaaataatttttaaagggaagcaactgtaatcttgccaacagaaaaagttttagagaattactttttatgtaataggttttaaagtttgatttgtttgattttataatttagtgaaaatgttagtctgcaatatatatttgtatacttatatgttagttgataaatattttcttttgaaaacaattctctaacttggtagtatatattttgtagactgatatatcatgtcagtatatattgatcctaacatatttccatcctaagtagtctcataagaagctctaatgttttcctaaccatttctagaatctcacagttgctctcgttgagatagtgtgttgtttattgataaactaggaaataaaacttccatcttgtattttgtttagtgttaattaagtcataaaattatattaaataattaactttaattttaattttttaataaatcatttattgaatagaatgttatagtgatgaaaagatttgagattgaaaaatcatcacaaaaaatagagatttgaaaaaagacaattgataaatttgtaaaaaagttatattttaaaatcgttattatcaacatatcttatttg

SEQ ID NO: 4698 - DNA, 622 bp, Cannabis sativa
atgcttggccctaggtcactcgacaatggctaagagagaaagtcactctaccatgcttggtcctaggtcacttggccatggctaagagagaaattcactgggccatacaatcatgaagtcactcggccaagctaaggaagaaagtcactcagccatcgacaagatagaaaatcactcagccatatagccttgaagtcactcagcgaagctaaggaacagggtaaatcaaccatgcttggccctaggtaactcgacgatgaccaagaagaatttcactcagccatagtggccttaaagtcactcaacgatacaaggtgtgcatgcaaggtgggtaaaacaacgcctcctacaagcttagatgccaaggaggtacgagtaattgaggcaccacacctgcaagtgctaacatgctaaccaagagtgcccacaaccactaccactacaactcacgaccacttgacaccagataggggtacaaggtgcaagaccaccacctgcaccatgcaacctgcaactcatggatgtcaccttgtctattgggaccataagtgtaaactaggccattacagcctataaatacctcattttcaaatgtgaactaccccaattggaagttatttta

SEQ ID NO: 4699 - DNA, 1504 bp, Cannabis sativa
aatattgtgatacctaacctttagcaaaaccaaagcctctcctagctccttccatccaagaaaaattttcttcatagactcagtagtttcttccattaacatatcttcaagaatactgctgttatatttaggtgttgcttgtgaaattccccctttaattatgttccaaaatttgatcagcatatttatactacattaataaaattctcactaattaaaaacgttcttgaattaagaatatgtactaaccttgattcaaagcacgaacattgttacgctcagggttgagctttgaagtgctgaagagtgaagttgctgtaggaattaatctgacaacaaacccaggaacttcaacgtgctttgtagctgtaacacatattcagtcaaattaaaatttagcaagtaactgaccactaagtttagcaatgatatataaatttcattatatagtttcacgaagaagcacacctggatgaacaatcaatatcggtttccgtgcctcattttgcagagtggaccattcaaccttatgaactaatggagaagatgtcaaatactttttcacaacacagagataaagacatcttttgccatggtaccggtgattcagatagtctttctcatgaaaacactcctagaaaagagaaagtttgttaagaacagaactacttttctacaagaaaacaatctcatttcttaaaattccatagaagttgggttcaaaccgattcccatctagcgtcggacacctataattgcattcaaattctacaacttgacaactaagatacttaaattgatatgttcttactgaaatattttcgtatggaaggagtagcggtttaattatatatcataataaaataaaaataaaaaatggcaggatcaagttaaagaataccttgggcaagcgaagaaagagatcgacgttgatatcaggctttgcaatgcattttatggaataactcccaccaatttcaaaagcttttggcttcttgaatatgaaatccactttgtctgcaccaatgtctttgacaaaccctggagcaacatctgctgtaacctgaaggtcatgtgggattttatcaatggagtctttgatagctgaaacagtgtcgtcaacgagctttgagaaggcagacaaatagggaagctggacctctttcaagagctcagtggcttttaggtccatagttagggtttaggaacagagagtatagaaggaaggcaaaccagtaattagggattatgggttctgagatatgagaggagtggagaacaaggagccaagaaggtcagtgaagttcagggtttagggtttaacatgaactgggttgggaagtagctacgacaccgcagagtagtttttttaactaagccaaaaacgacagtataaccctagccctcgcacgtttggcatggcatggattgagaaactaggattaggtaaggactaatcctatatttggtgaccaaaaacaattcctcattttctagaatataa

SEQ ID NO: 4700 - DNA, 1443 bp, Cannabis sativa
gaaaggaaatagataaaaggaggaataaatgtgtacttagatagcgactcatctatccattttttcaagaacccaatttatcattaaaagagcaaaattatagacataagactctattggattagagaaaggtagaagaatgactggttgaattaaagaaggtcagataagaagataatccatcgatgttgggacagaggtcctaacagttaacaagtttcggcattgcctgaacttgatcaatctcataaattagcatagtaagatacctggaacaccaaccatgatggatgcatacttttttcatcaccatggcttttaatttaaaggaactaggtggaatttatggtatagttcctccaaataaaaaggtctcaagtcgagtcttcaggaaagctagtcattgtctgaaaaggagtttcgaaaggatagcttgtccatccggatgaagtcttgtggaaagttagttatcatccagagaggatttctagaaggctagatgttccctccagttggggttctggatatatagttttttccttttagattgcacttcatcagtttaggatgtctgtcaaggaagcgtgatacttgtttggagagagcttgatgccaagagttgacttggagatcttattgtaaggagccatttaagtcgattaagtcttaaacaaattaactatttagttatttgaagccaccgccttttggaattcatatcctcgatctataaatacagctatccttttcctttgaaagaaaacacgaaacactggaagtagagtaaacaagttctttgagagagtttttatatagaggtagagagagagagagaagtacatagctagaaaagaaagtattgagttttggtgtttggtgtttggggtttgtaaagggaaagcttttgtagatgaagaagcttctcacagaagagtgttaaagagaaacaccttgagagaatttaaatagataatcgctctcaactttaatgcacctgtgttcttgctcaatcaataaatgatgtttcggtggtgttctttaattaaagtaaaaccatagatcacatcaatctattaaacttgaactagtataatttttggtattatttttttttaatggttttcttgcattgcttatttttagttttatcgtctctgttatactctattattcttccgattcttgaattgtatttagttgattttttcattgcaaattgtttgttgattcattttaagttagtttgattatgcataatagttgcaattaattttccacaataatgattaagttataatatataataattaattacttaccaagatgattgctgtgatgtttaaaggctctagtggaattgttagctcattactaccttgaagatccaaaagaacatccaacaaacacttgttattttcggtcaaatgattaatattctcttgt

SEQ ID NO: 4701 - DNA, 1259 bp, Cannabis sativa
tttttttttttttgagagagtgatgatctaaatcacactgataattatcggtgcagaagaatttcttgtcaacaaactaattgtttaaccaaaaatatacagagtcaaaatatgaatcactacaaacaaaacgacttatatctaatcaaagtctagccaaagatataaagtgacttatttaagtgacttatttaaatcatattccaattgtagattttctatttgaaaaaaatcatattccaatcagaggctgctagcatggccgccggccccaataataattaataagataatatccaacatttgaagagacagaaattcaaaatttaatatttttctaaacaaaatcttaaatataatcttaccaatatttcctcctagatattttggtggatacatcatacatgaacgaagggccattatgttctgtctcccaagattcattgtcttgatggttaccctttgtctcagcaaacaaattaaaaaaaaaaaaataatctagtttcaaattattaaattagttataccactgacattaataatgtagtctgaatatattctcatctctatgtactacactttcttaatttatcaaagttgtctctcttcttgtcatatatgaaagatacattattaatttttaattgaacatttatcaattaagttctacataagtactttatatggttgtctccaacaaaaaaggtacatattcacattttaatttttttcaagcagtatattttcctttttataaaaaatcaattttattattattatttggaattaatcttaataatttaatatattataaaagttaaagatagattggatatatattacgtgatttaaaacatatggctacacaaccaagtgtacctttaatttaaccaaaaaaaaataataatcgtgaatcataaaaagtaaagcaggtatgagtgcggacccttttttaaaagcaagggaagaataaatagaaaatctagttaaaaaatatattttatttagaataataaagacttttttaagccactttaatttttaatttggttagttacctagtgctaattaatctgggacaccaccccataagatatatatgaccatgaccgtaagcttatctagtgaagtcttgtatttttttttttttttttatatatatatgtaatctttgttacatgcatgtattgtataatataagctaactgtttcaatagattcaaaaacttaaattttagtagaacacattaaaattggat

SEQ ID NO: 4702 - DNA, 929 bp, Cannabis sativa
gttgtaattagcatttctcataatttatatatttgatttttgaatacttattattattttttctatcaattaataaattaaattttattcgtatacatattagatcgatattaaataaaataaatataggacgataattttttattaattctaccactgtcggaattttttaatgagttatttcaaaaatttgactaaccatagagtatcgcataccattttataaataattatcaaaattgaaccatattacaaaaaatctatattttttttttaaaacaatttttttttaaatactaattttgccaattattttatagaataatgtatgttatatataggatcagcaaagacttttgccgccatacgtgcacaaacctacccattatttttttttaatatatattatatgatcacatttgaatgatttattaataaataagacaaatatgcaacatataataattatataaaaataaaatgctatatatatatcctgaaaaatatgccagaaattatcgaggcaattaagttggtccccatcattaatttgtttaatattttttgtaacaagaatcatttatttaatattatgtgttttataattcttaattattgtaatacgtaaaattgaggatcaaaattggtcatgttagaaagttctttctagtgagaaagcgctattgagaatttcataacgacaaacaggttttgttgggctatgtcgcgcaaaaataaatgtgcttatcaaggccggccttgagttaaaatagctaatagaataaaaaaatattttgggctcttaatataaaaataaatggtatttttaaaatttattaaaaaaatatatatatttttttaatttggacctttaaaatgagtgaaccctaggcacggacctaacctgccagtacctatgtttagagcca

SEQ ID NO: 4703 - DNA, 1661 bp, Cannabis sativa
tccagtcattaataatttatttacagatttataatatgagtgtgttatgttatacaggtacgttggtgtaggaaacgaacccttcttaacaagttacaatggaacattcataaaactagtattaccagcactaaaaaacatacaaaaggcactaaacgaagccggcttaggagacaaaattaaagccacaatacctcaaaacgccgacgtttatgagtcttcatccaacactccctcagatggaaactttcgcaacgacataaaagatctcatgcacgatatagtcagtttcttaaatgacaacaaatcacctttcatggtcaacatctaccctttcctcagcctctacgacaacccaaacttcccacgagactttgccttcttcgatggtggttccaagtccataaacgacaagaacaaccttaattatgacaatgtttttgatgccaaccatgacaccttagtttggtccttaaagaaagcaggcttccccaacatgaaaatcatagttggggaagttggttggccaaccgacggtgacaaagatgccacagtcgatttggccaagaagttctacagcgggttattaaaaaggttggctaaaaataaaggaacccctcttcgacccggccacatagaaacttatcttttcagtctttttgatgaggacataaagagtgtggcgccgggatttttcgaacgacattggggtatctttcgttacgatggacaacccaaatttagtatggatttttctggagaaggtcatgaaaaaatgccaattggggctaaaggggttcagtatttggagaagaagtggtgtgtattggatagtagtgtgaagaacatgagtgcagtgggaagtgaagtgaactatgcttgttcaatgtcggattgtactagcttgggaccagggacttcgtgtgagaagttgaatcagagagactctgcttcttatgcttttaatatttactttcaaatgaatgatcagagtgttgaggcttgtgattttagtggtttggcaaagattgtgacacaaaatgcttctagggatggttgtttgtttcctattcaaattgagagttctgctgttgttattggtttgggttctcatatgtttcgcactttggttgcagcaactttggtcatgacattgctagtgattttgtaaatgaattaataaatgcatccataattcttcttattcttaatattgaatatctttctttccattatattaccattaaataacattgtcatcttgtgagttatataaatatattagttaatgtacatatcattagttataattttaatttttattttaattaagtgtatttttagttgtacttttttctttaaaagagttagaatttttttaactacaataattaaggaagtcacatattataaacacttgttctattttattgtttaaaacaaaacattaataaaaaaatatatttttagatatgtacaataatttaaaaaataataatagaaaaatattttttaaaatatgttcatgagttttaaaagaaataataatagaaaaatatattttttaaatatatttatcgaatttaaatttaaattgtaatgtttaaaaaatgaacaacattttctattttatagtggctatatgggtgcactacatttgg

SEQ ID NO: 4704 - DNA, 939 bp, Cannabis sativa
gccattgaagcatatttttatgataagtgagttatattttaactttccattacttatttagattagagatgctctaagaaaatacaaatagacactaagtacaaaaaaaaaaaattgtttatataaattttgaaagtaattttttttcaaaatgttgaatgaaaacaggttaaggaaagatactgttttgaaaatatgttcactagtctaaaaagaaaaagaattggttaaataattattacaaaacacaccctttgaattttaaattttgaaatggttactctatttgactatgacgaattgcattgaaaattttcaaagtgataccattctcttttgttacattattcccaatttgatgcaatacagaaggaaaattagattttgatattgatactatgtttgtgaaaatatgtgttttgagcatttactttatttaaagcttgagaaacatttatttatttttatttttttttgaaagaagcttgagaaacatttattactattagtgtgatgggataattagagaaacatgagaatttgcttatcaatttattctacatgacagagtagcccgggccaccacctccttcaggcactgtccactcaatgttttgctttgggtcttttatatcacacgcctgagacaaacatattataacaatgtcagaccaaaacatatattactcactgcaaacaatagtacataatgaatcacatagtatcatttctaggtgaactaattttatcatcccattactaaatgacagtagttttgcatatctaatgttagcatacaacgtatttgaaagatttatccgtactctctaactcaccttgcagtgcaggcaattttgagcgttgatctgtaactttacttgaccattttcatctgggttgtacctgcatttggaatgacaacaaagaagaggcaattaa

SEQ ID NO: 4705 - DNA, 1029 bp, Cannabis sativa
atatttgtcccaccatgcatataatatatgttaaaaactaaaatgctattttgtctatagcatttctcatcttttaaacaactcatacctaactacctatgaaataatttgggaaaatataatttttttcccaacttaaaacaaaaataaaaaattatataaaaagccatagattagtgaaaaaatatattgctttttagtataaatttaatcaccatgtcatgtgtccaagtttttggtttttatttgggttttcggtggtgttggggggtgtggctcccttttgcaagcttcgttagtgttcattctaaacaaatctacaacgaagcttcctcaaccatggttcttgtgtttatgttttgttattttgataataaccaattattgatatgagggtaattaattaccactatcaaaatgttattgttcttttatttacaagtttggtttgaaagatgctagtagtagcatgttatataatcaataactggtaattggttatcagtgttttgtttaagttttcagcagtactagtaaccagttactagtccatcaaatctaaaaatacaattaatagagtaaaatgtaaaaatattttaatgttgtgctaactagttaccactatagaaatattattattctttttattcataaaggtagtaccatgttagctaatcaataactagtggtaatcggctattaatttctttttaagttttgaattgcaactggttagttactagtttacattttgtgtattgttggagcataaatgtaaaccgtgggtaaatataacacaaatttactttttgcgtcaaatataatacaattttacatcttacattagagataatgccaccctaatactcataagcataactaaattggtcataaaaaaatataaattaattaaaaaaaaaagacaaataaaaaaataaaaagggtaaataaattaaaaggaaaaggacaaataaaaaaatattaaaaataaggggcttttttatgtttactttttaaaacagttttttt

SEQ ID NO: 4706 - DNA, 840 bp, Cannabis sativa
ttagtttccaattctatgataaactaagtcttccgaactagctttatgttattggttattgatttaaagttagcaaatgggcaatgtaacctatggaaagttggtggaaatttatgtggaaacacaaaataccacctaaggtaaaatactttgtttggaaaatatgtcatggttggcttcctactaattatgttttatctaaacagggtatgaatgtggatccaaattgtgagaattactcgggcagtcaaaccgaaaatatccaacatgctttacggaactgtccaaaacataaagaagtttggaagaagtgtgggctttgggctgatattcaggctcatttacaaagagatattcaagcctttctccaacagatagcaagaagatggaaatcgggagagtttgagttgtttctgatcattacatggcatttatggtcgattagaaactacacaaaatatggaggaaaaaggccatgggttgataatttacttggctggtgtgggaaattttaggtagactttcaaaccgagaatggaaaaagaaaacaatctaatgagccacgacatgcagcacattgacagccaccgagacaacatgaatgtaaaatcaatgttgatgtcggggttgttaaaggcaggggacgatctggcataggaattgcggtgagagatgagcatggttttgtacagtatgcaacaaccactatcgaagagcaagagttgcgaccggttactgggaaattatatgctattcgttctggcttagagattgggattcagaaagggcatccaaagttcactgtggaatcaaattgtcaacaagccattaaccttatca

SEQ ID NO: 4707 - DNA, 731 bp, Cannabis sativa
tatatatatattttaaatatatgaatattgtttacaatactaaaaataacgtttatatattttattgtatgcaaaattatttttttatatgtttagtaagtaattatttaaactttattttaatattattattcaaaaaatttaaaaatttataaataatcttaaattttttttttttgaacataaaataatcttaaatttataatatatgcaattgtaaaaaaaaatttaaactaaaacatttttatgaataccaagtctacacacaattttgatatgtatataatggttttaataataatgtatacattcatttatgagtgaatttttgttgtcttctttagtcggtgcaaagacttatggtcctctttcttaccaaacatatatccaattggtctcatcatattcatgcacaattatattattattattattattagatcttatatatattatatatgtatacttctaaattcttattaattaatattaatttgactggttggatttagagccatattcaaattatataccttttcttaataaaatatacatatatagctagtgagatttcaactcttaatttttattttagatgtaatttaatttaataattataatatggagaaatattacatataatatataagtggggaaaaattctaccatatatccaaattcattggttaattacatgcattatttgattttaagaaaaaaaataagaatta

SEQ ID NO: 4708 - DNA, 1545 bp, Cannabis sativa
cttgttcagctgatctaataggcaaaaccaactttaaaagttgtgatgggataagaatttagtaacacccccatctgccaaaataaatatgaaccatctaacaaagtataagtacatacatgcaatacaagtatagaacatgcagtcataagctaaaacggtcatgtgggcatctatctccctaataaagaaaacaaccatcactgccatataaattttgcacttttacaccaagacctaaagagagatagagaagggtaccgagaaaagaatccatgctttctctttcgccggattgtgctaggttggaatgtccgcttgggaaataagagcattggctcttttgacaaagaatcatctcctgaaaaacaaaaacaaaacagaacaaaaattctaagtgaaaattgggttaaagaatcacaaaagctactatttggacaccatagcatcaattttttcagtgacgcaacagcaaccccaaattctcatgttaactccatctatggaagcatagaatagatttcggggtccctagtttttgcttatattttgaaataatggaaacaatttgtcactctcaagagaaagaactaatcatagtcttcatgtctacataaaataagttttgtatctaatgctgttgaataccatctttaattctagttaatcttacagaatatacaatcttgttgccaataaaacgacagtaacagggccttaatccctggtgcctaatccaatctattaaccacatgaataattattgtttgtaaaataaacagattctaaagataatgacaacgaatcccacaagcatgtattgaaaactgattattttcctatgaatattatgcgttggttctttttgggtcaaaatttgcttacgaataacatatacccaaaatgtagcataattgaaagtgtttatctaaaacttgtaaataaataaaaaatcacattttcccgagaaccaaacaagtacgaaacagagagaagagagaaagtaccgtcgggtagaaagaattcgagagaaggaaggccagaagggtacagaaaaccctcattataaacattccttatcgattcggcgtcattttgctgcagatggaggggtgagtagaaattagatagcgacgggaacaccttgggagtgatatcaaggccatgagtagaaataggagaattcgaatgcgtcttttgggccagtggaacgaatggcttgttcaacaatcggttcaccagaaaagatcccgtccgaattaaggttttggacgccatttttgaagctaattgagctaatcactaaaaccctagtaggagactcaagagttttctcttccgagggaggggtggtcagatgggtcgggtaagagtccccaaagtattggttattgtcacaactgtccccagatctttaattgttttacattttagcccctaattttcatttgttatgcaaccatgcattaaacataagtaaaagaaaaattctaatgatcaacacatcacaaaaattttagcccctgatttttacgctttccctaa

SEQ ID NO: 4709 - DNA, 1001 bp, Cannabis sativa
ttttttttttttttttcaaggaaacgtactatagattaaaataaaattagaccaaaagacacattaattacacaataaataatctcgtagggaagatttcttcccatatagcgagaatattaattttgacctagtgcccatttagccacatgagccacaatgttaaaatctcttctttaacaaaattacatcccaaagagcacatagacaaatttttacaagctccaaacataattatggagctcccatgagaatccctcagcaaataacaatcttaaaatcactctcaacaatgacaaattgatgctgcatatgtctgtcatattcaacatgccaacttgcatgccttagcttccccatgtattgggttatggatgggaatccttgggttcagatccaaaggatttctttttaagtgatttttctccactattgccactatcatgctctcccaacccactgccatatcgctgttaatcttgactcacactacaaaaataactatttttagtgataaatttttagtcatcataatataaattttttatgactaaatatgatttttagtcataacaaaaagttatttgtgactaaaacatgcactactacaaaaaaaaccatttaatgtctcttttttatgtccaacaaaattattgttggacatgaaaaagttttgggaaattttctagtccagcattgttggactagaaaaaaaattcctccatctccaacaatgttggactaaaaaacggatagtggacgtgatatacatattttttaattttttaaaattagtctatttttacatccaactttactgaactagaaaaatattttgagaagttttctagtaaagatgtggtccaatttttttaaaataaaaaataaaaaactatctttatttatttaatttttccagcttatttattattactctttaaagaatgtattaaaaaacatattgaagccctagctaacacatcctctctctctctctctct

SEQ ID NO: 4710 - DNA, 898 bp, Cannabis sativa
tttaggttctattagaaaatttatgtatatatagtttgttagatatataataataattaaaaaatttaaaatatttttaattttatgttaaaaaagttaaatttaaaattttaacttaattttgaatcactaaatatatattttactataattatattattattaataatttttattttattatatttaaataaatcgtgtcaaattcgtgttaagtgagttatgtcgtatttgacctgtttttatttcatgtcaaatcgtgtcgactagcgtttaattttcttgaccttaacccgtaaaattcgtatcgtgttcgtgtgccgtgctgaaacccgttttgctactcttaaatatgatttgagtgttgggcatcataaattatcccttggcaattctcggttgtataatagctaatgtgttttcactttaaactaaaatgattaaagactaacaatgcataataaatctatactattccatagagtgaacatgaccaataacaggatgagggcaacacatgatgagtaacactaggaaaatacctaaagaaaatgcttgtcttgacagagaaagctttaactaaagtgaatgatccttgtccacatacttttataccaagtctaatgtaacacttttttgttgaagcaaacatgcacacacacaccttcaatagtgcaataataggagaatcacaataatgacttccaaaaccttaatgtatcatcattttgcccccttttttgttgaaagtagaatttgttatcacaattatgttttttcccctttctcccttcaatacttaaatggcaaatatctcttttgaagacaccattacaaaactaaaagaaacttattgttttggggtgtccacaattagttaagagcatcgttttaagat

SEQ ID NO: 4711 - DNA, 1439 bp, Cannabis sativa
ttttttttttttcttttagtagtttgcatgcaatgtaatttatttatttattttcaagcaaggaactttcttaacctcatgatctaatattgtagtttcatggacttagttgctcttcaaaaaaaaaaatggtgctaattctagtcctctgcccacctaactccatgttttgcccacaaatagtatgccccaattgggcctctgccccctaattcatacagctctggtactatattgttcttgtctatctcctggaggactggacttaaaatattccatgcagcttcaacctcgtcgcttctcataaacagatggctatcaccgtctatggcatcgagaagaagatgctcgtatgagtcgggcacctcaacattgtacctgcatagttgatgaagtaagcacctaaatgaggctaagtagaaagaaagaaaaaacaaaatgcattggcattgttgtgtagacatcattttttatggatgagcttacttgtccttgtatagcaaattcaactctggagaatccaagtgcaaccccagtcctgggatcttattattgaccctgatgaggatggcttcatctggagcaactcttaatatcagctcgttggtaacaaggtcgatgttatgccccattcgctctcgataaatgtttcctgggacatgatgaaactgcatacgtatctccaccctacatagtatatagacaaagttatgagaagatttggtattgttttcaatgaaatactgaatgaatccttaagtcctttggcctaatggcttgtaactagtacacatattgactagtgaaagaagtaattcaagctaagcattgtcaattcaatttgatccaagttccaatcctcgaattcatatgagcccatttgggatccaatttcttatgtagactacctagcaaattcattctatatttgttgagccactaggaacgttccaaaacaaaggcagcataaaattgaagctcaattcctacaaaattaaaattctacagcagttcaaactacccgaaaagtactagtgtgttcatccgaaaaatatgtcgccacaaaaggacaatagaacatatccaacctgtgttcaatgagtcctactccagttttaaccaaaaaaggcacaccatcccagcgcgcattgtcaatatacattgcagcagcaaaatatgtgggtgtcagattgtctgtatacacatcaactttctcttctgtgcctgctttgtattgcccaagtataacatcacttggtttcaatttacggattgacctcagaaccttgacctggaaaagagccattaagcagagtaactatagttctaaaatttcttttgttatactttaacattttgaaaaactttgatcattgtagtcgaaagggaggggccccctcctgtcgttcccatcttttcttcctagtctaatgaacaag

SEQ ID NO: 4712 - DNA, 774 bp, Cannabis sativa
ttggagattgaggcataggctgagattgaggagtttgaggtgtgggctgagattgaggaggcttgggttgtggttgaggtgtttgttttggaggcttgggttgaggtgtgggttgtggttgtggaatttgaggtgtgggctttggttgagaaggttgcggttgaggttgcggttgtgttggtttcggttgaggtgtgggccgaggttgaggttcaggcttaggctgagggtgagtttgaggtggttgaggttgaggcttaggctgagtgtttggttcagtctttggttgagtacaacttggaacaacattttcaaagtgagcaaattgaacattttgacaccaagctctagtatgaccatattttttattgaagtattgtaagtgaacattgtctaatgtaattccttgacaagaacgtctttcattacaatccaattttatagccatttttgctacacttgttcctataatattttccaaaaccacatctctaatctcaacatctgatgacgacgatgacgactcctgttaagatttttcacacgttatatataaaaataattaaaaaaaaacatattaaattagatttttttaaaagaatatatattttaccagtttacaaagcttatcattttggtcacaatagctttgttcgattacaatgggattttgaacataattcatttcaatgttctgaaattttatattacttgcactacctgaaccaccctgcatattaattaaacaacataaaaataataataattagtaca

SEQ ID NO: 4713 - DNA, 1691 bp, Cannabis sativa
cctaaatttcctctctaattttacatttataaccaaagacgtacaattatttttctcttctatcatttttctctccatagtcgtcattcataagtatgtttaggttttggatcatatagtaaacaatcatggttttgatcagctagcaagaaagagtcgggtcaccattataattgcttctttcaacaatatatcaaaatatttatctatatatattatatatacacattagatattacctccctatattatttccactatattgttctctttcagccactctgtgacttagtaagttttttaattatttatttattttgtaagtggatctcaaaaattgagaaggtggcagaagttcttcatgcacaatattcaatagtaatattgtaatatcttatacttcttcttcattttatattttctttttaggttttttattaatctttaattttatatcatctttccaattcttatacgaagagccacatacaatataatataagtaaatttttattaattgtaagtttttatattattttattttaatttacgtaactatctttttgtattatgaactatttttttcatgttgtttaattatgataacatcaactctatttttcattacactcctatgattaattattaaaaggttctaattatccactttcttttttttaaaaaaaataaaataaaattttagtgaacaggttttaaatatttatacatgcattcagttacttaaaatcatatttacttaaaattattttaactaacaacaatctattatttattcattatacatatatttattataattaattacatatttataaaattttcacactataatataattattaattaaactattttttctagataagttgagacttaaagcagtaacataggtctaaaaattgctagaaagtactttttcttttttctcattttattattattattttttataatctttgattataataataataacaattaactacaccaataaatatttttaaatactactgtattttttttgaaaaaaaaaaaattaactatcaaactaataataagaaatagaaataataagtaaaatattccaaaactataaatctataaatatatatatatacacactaaaatttttatactctaaaattacaattatcatataattattaaataaaatatcttcaaaaaaaatgtctctcatattttcaaaaaattaaaataaataataactaaaatatcttctgaactttttttttttataatattctttacatatatattactatttttttaatatataaaatactttcattttaaaaaattattggttgaatgagctttaacctaatgaataaaatattggtttacaatttatttattatattagttatatttttccgtagtatgagtatgtatatacgaattcaagctgtaaattatttagtatatattaaaaaaaaatatgatatagagtaacaaaatgatatgtatatgtactaaatatttttttattcattcaagtttctaattctaggagaagtatttaagtgataagtttgaatttttattcttgatgatgtatgattaaggtactattatagcaatttttagatcttaaaaatgtgttaataaaaatatttaaaattcgggatggaatctaagattaaaattga

SEQ ID NO: 4714 - DNA, 2231 bp, Cannabis sativa
tatcttggagttcaatatgcaaatccaaatttaaaggaggacttggttttcgaaagattaaaaatattaagaccgctcttcttctgaagtggggatggaaacttatcagtgatccccataatctttggagttccatagtgcaggagaagtacctaaaaagggggtatttttttgatgctgaactgaaagggacaaagacaatgctttggaaagcaattttaaagtctaggcccttattgaaagaaggtctttgccgaaaaataggagatggtagagctacatcaatatggtttgatgcttgggtgcctaacggagatcacatgccacaacctttgattgatgcaacccaaggagcaaatctagtaagccattttattaatgagaacttgacatggaatgaagatagagtgagacagtggttccatgaaagggatgcaagaaacatcctcaacattggtctccctttacaaccccaaccggactcctggaggtggctcggagaaccgaggggcaccttttcggttaaatctgcttataagctagtcatgaaccaaagctctcaagctcaacccaattgggattggaagtctctctggaactctccgatccatgggaggttaaaaatgttatggtggcaattgatgagagatgcccttccaactagaggcaagcttggaatggtcatatctcttcaaactcgagaatgtcccatctgtggagagggagaggaaacaactctacatctattttgggagtgttattttgcaaaggctgtttggtttggcagtctttggggaataaggactgatcacctgcactgcctcaattggttagattggatgctatggtttcgtgaccgggtgcatagaccacagagcttgtcctttgatgaatttatgacgggggctctctgcattttctaaaaaatttgggaagctcgaaatgaagtgatacatgggaaaagtctcagccctcttagggagatcatcaactcagtcaaccggctgcacaaagatcacctgtccaaatggagaattcgcactgaagtgagagaaaacacgcggattcctgaagcaggctggtggaattgctgcacggatgtatcaatccagtcaaaccaagcttacggggtggccgtgtttcgagatcatatggatcgaattgaggccatctattcagagaggatctctgctacaaatcctacactagtggaagccacaatgctggctttagcagcagagtttgcaagagcaaatcacatggagaaagttactttctattgcgacaatgaagtggcgatctcaaattgctcagccaactgcaccacaaacagggatatcgacatctctggagtagctgatcgtttcaagcaggcggctcaatctctgcaggattgtaaactgggaaaaattgataggaaattcaatttcatgacgcacaattcagctaaatgggcggccatgaatggtgcaactggagttctcgaactaggaaccatggacgtgaacatcttctctgacttcatggaatggtcccctgactaatggtgggaacgagttttctttagatgtaaagctgtgtttttttctatttgttactggtagtttgtctttctttttttgttaagtttgttgtctgtttggggcagttgggatgctttgccccgtttcgtttgtactcttggctttgccttttttaatgaatgggtggaatacaccccctctttcaccaaaaaaaaaaaatatagagagatatagggagatatgtcgcaacgtacaaaattaaacaaacaaaaaaaaaaaaagtattatttttgagtgatttccaacaatatccgttccttctttttcttataaattacattgtaagttttaagacatccgattacaattaagcagagaatagttaataattttctttctatcaagttttgtttcattattttgtttaaatattgatatgtctttgtaaattagtaattttgactcctaaattttgacaattatcaaatcgtactcctccatataaaaataaaaaagatttaatattttttagtaaaccttaagaaattaatttagatcttaaataaaaactattttggacgattaagaaaattaaaaaagaaatcaaagttttaaaactaattaaatgatttaaaaaattaattattttttattaaaaaatctatttagatataaaaataattcaaaatttaattttggtaaaaacta

SEQ ID NO: 4715 - DNA, 2167 bp, Cannabis sativa
ggataatggtggttctcccatagttaatggaagttaaattgtgcctaagcttgcaacactgtcgcatgtgaatccacataagttaaccgtacatggttttagttttgcttcccctaaagcccaacttttttaaggtctctttgtaaagaatattgatggaactcctgttattcacgagaaccctctttatcatcttattaacgagctacactattattacaagaggatctatgtgagggaactgtacatgtgttgcaatttcatcagtaaagataataggaggttcattagatttggctatttttagtggttccggagtgaaagctgatttctcgtttttcacttcatttatatacctcttttgtgcattatttttgtttcctgcgaggtgtggcgctctagaaataactaggatatcatcaccctcaatagggggagttgtaaccttggattatttgggttattgggaagattttgcttatttccttgtggcctcacatattgtctcaaataatcacgcgagataagattttcaatttcatctttcaactgatggcattcttcagtggtatgcccgatatctccatggaaatggaattattttttaggatctcgtttgtttcttgcatgtcttattggatcgggtctgtggaatgtgacctggttttcattggcgagatagatattttcacgagtttcattcaattcagtatatactaaatatcttggaacatatttctcatgtttcttttatttctttttctcttttgatgagtctctcgactcatcttttctcttagtattcgagctagtaggatttgaatttctaggtttagtggtcacaatgctcgctattgcgatacttgtgttgggtttatctcccaagccagaatttaacaacttaatttaatttcacgcctcttccttttgcatgaaaaattgtgctctttcattgaactcgctgatgtttctaaaagaacaaccttacaagtcatcccataattctcctcttgtagttgacaagtcaattataattctagcttgaagagctattaactggatactatcattcaagtttttgactttagttgtggtcatgctaaaatgacttaagtacgcctgtagggattcttctggttgttgcttgacaattgtaagcaaagatgcttctggtctctgttctcttccaactttgaattgctttttgaaatccttcaataattgttccaaagaagttatggaataatatgcatcgcaagctgtttgaaatactgcttgcttgcattatggaattaaagttattcaagtgcactataggatcagtcgtacaatcatattgtgtgacatgtggggttttgattccttaaggaaattgcaaattcaaaatatcaagatggaatggttctgtctctttgtctaagtcataccccggtagtttcccatattctccatcttggtacatcttgaacttatcttccaattgtataactcacacttgtattagatccataggctattgctccatgggttgtatgctagaattttgattttgttgattatgtaaatctagtgcattacggtttaaatgctcgcgtaggttaggttgtcttgttttaattgttcgcaaagatcagggtcgcaatgtctttgatcataattactcaaagatcttgtccttgagtaactctcagattggtaattgcaagagttacttatactttcttggtatgataataatgttgtgatcaaccttcgtctcacgtttgcctatcacgggcatgagctctggttgacctacctgtcttgcgtgttcttgatcttaactcactttgatctgtacttgaaccaaactcatgtgactcttctcgcatcggcctcctccttcaaaagagatttgacacatggcccctactctgataagtgtgtgcactttctctatcattgtgagtaggcctttacggatgtcttgggggttgacctgtccctagtttatttctagaatttctcatgtcatgtcatgaaatttcttagtttctaggtcgcatttttctagcattttcattcatgcgagatgactccgatatatcaggttgttcattcacttagtttgcaagtctatgggaagttcctagattgtgacgttgagcctcttgatttcctgtatttc

SEQ ID NO: 4716 - DNA, 1021 bp, Cannabis sativa
gaaatgaaaaagttgcagatgtcactggaactgttgatacacactatcttagagaattatcagaagatgagtgttgggcactatttgcgaagcatgcttctagtgggaactctagaaagtttactgccaaccccgaattacagagtatcggcaaagaaatcgctaagaaatgtaatggcttgcctttagctgccaaagttctaggaggcctcttgagatcgacgttggatgctgagagatggaaacaaattgcaaaaaatactatttgggagctctccgataaaaggagcaaggttcttcctgctgctttagaagtgagctatcactatcttcctccacacttaaaaaggtgttttgcttattgttcaatattcccaaaaggctatcgatttcaaagacaagagttggtattaatatggatggctgaaaatcttgtagagcattctgagagcaataggcgaatggaagaagttggatgtgagtattttgatgatttagtatctttgtcatttttgcaaccgattgagtgggacaagtcttattgtgtcatgcatgatcttatcgttgatttggcgagaactatttctggaaaatacatttgtttgttagaacaaaatgacaacactgataggcttgagaagaaaacacgtcacgttggatgtgttagggaactttatgctgaaaacaaggtttccaggtatgtttttgaagctattcgtttgcgaacttttttaacattcccaggttcaagatattgtagaatcagtaattctaacgaagaagtgcagaatcttctatcgatgttgaaatgcttgagagttctatcttttcgtggtcttcatatgagtgagatctctgattcaattagtgaattgaaacatcttcgctatttagatctttctggcagtttaataagtattttgcctgaatttgtaactgtgttatacaatttacaaacgctgaaattagaaaattgttacgaacttgaagctttgcccaaggatatgcatcatctcattaa

SEQ ID NO: 4717 - DNA, 669 bp, Cannabis sativa
ggcagaagcggaggaatagctctcctatggaaaatcgaggctgaagttcaggtattagagttttcttcttcctacattgatgttagtgttcacgacgatgataacatggtgtggagattaacaggctgttatggtgaacctaatcgaagtcttcgttcaaagacttgggatcttttgagaactctagctgacagaaataacctgccatggtgtgtaataggcgacttaaacaacgtctgctgcaatgaagataagagaggcgacaatgattatccttcatggttaattaatggattcaatcaagcaatggtggactgtaatttgagagacttggagcttattggttatccttttacctgggaaaaaggtagaggaacagataattggattgaagttcgtttggatagagctatggctacacaaaattggttagaccatttcacttcagctaaactaatcaatattgatgtttctagttctgaccatacaccaattctccttatgccttgtacctacgatgcaactacagtcaaaaaaagatttcgcttcgaaaattgttggctccgcgaaccaatgtgtgcacaagtaattaaagagagctggtctaattgtccatctaatgctattacggaaaagatagcttactgtggtaacattttacaagtctgg

SEQ ID NO: 4718 - DNA, 702 bp, Cannabis sativa
ctctagagaattctgggaacaaatttagggggatgatgttggtttgtcctatatccctaaaaatggtgtcgataacgggattcgcacccaaagttccactgctattgggtagagcagtggtctcattgacattgatattgttattttagattgtagccatcatcttcctccaaaatcacagaatactattagaaatcccctccttctagcactaaatgttgtcaaaggaaaatatacaaaacctgaaattgtgagtattcgagataaacaagagtacccttgtatagaattgcgagtattcaactagggtagcgaatactcagagaataatatgcaagtatgcaaataaaaacattataaatgtaaatgaaacaataaattatagtggttcagtcagagctttgtttaattagttctttttttgcaagagttttattggtccctctatttagtttggatagcccctttatatagaaagtatgtgtccttttagattacataaccagtcaaatagaacagtcattacattagttatattcaattaagaaagaaaaaataaatgaaagatcagtttcgactattcttgattaattatctaaacttatgcgacttgggaagtcacaaatcggtcgttcatcttctaaacatatgagctcataggttcttcggtttttatttgtgtataaggtctttagaccaaag

SEQ ID NO: 4719 - DNA, 1122 bp, Cannabis sativa
aataataataaacatgttttttttgtgtttacttttgaaagacaatacttgacagagttgtaatcttgagaacgaaaaatctgacaaatgaaaatacattatattttcttcataatcttcccaaaaaattatttatgatactaaattatacagctttttgtggtaatgagaagtgaataccttagtaacaaaagtacccttaggagcaagcaaatgagtggacaacttaactgcatcaatgaccaaagcattctgaacagtggcttccatagcccaagcaccgcccatattgggggcaccatcatgaagaaccaaatcaaagacaaagcactcatacttcctcatcacccttttgatctccgacttgcattggggtttagtgatgtcttgctgaataaaaatggcgccagggattggttcaacccaatgcaaatccacacacacaaccaggcttccacgtggcaccctccgagtggctatttgagtccaaccacttcgagaagcacaaagatcgagatcagccccagtctagcgaaacaatccatacttgtcatcaagttctattatcttccacaccgaccaatacttcacaaagtttttaacgtcaattaagagagataagatattaagaatttgaacaattgataacaaaagaaagaaaaaaaaaaagtgaaaaattaaattagccaactttaatccaaggcaacattagcagacaaatggagcgaatccaaactggggattttaagcaacacaagcttataggaacccatctttaaacccaaaactcatttggattcaaacaaaatcccaaaatataaactgtgatagtgaaaaatacctctcaaactgagaaaaaaaaaagaaaaccaccaacatgattacgattagattaggccaaaaaccatcaatgtttgattacacaatgattatacaaatcgtaacctcaaagggcataaataacagaaaatgaaagaagattcacagggatattgaactaagagaaatgaaaggaaataaagaaagggagtaaagcaaaagttagttgtgaacatttttggtgaaaggaaaaatagtaataaactcagcgatgtaaccaaaatttatgaagtgtaagaacaa

SEQ ID NO: 4720 - DNA, 1241 bp, Cannabis sativa
ttttttttcagttgatgggaaagaggtgggaagtatccagagcaaactcctgtgtaagtcgattctggatctttatattggtgaagatccatttgataaacaagccaaagaagatgtcaagcacaatgtagcctcactccttcaggaatagggggaagttattataaatttaatgaaattttaatgaaatttgtagattacagaataaggtttcaagaattctttttagaagttttggaagaagaaatttattttctttattgatattgaactctgaatatacactggtataaaatatatggtatatatagaatacaaaggagactaacagctaggagaaaaatatacaaggaaataataatacaatctatttctagaaagttgcatgtaagtaacgagtaatttcatgaaacttaatgaaaaaaatatagggttaatattattttgactattttataaaagttattgatttaatattcatttttcgatattgagttaaatttttaataattttttttttagtataatcaactgaagacaatttatagcacaaacaaatttatatttttttttttataaaactttcatattaggttattattaagtattgtttatatagtatcagttagaaaatatagggtttgatttatcatttaataaaataaaaagttcaataaataatttttgtaaaatacaaaattcaagatagtatttatttaaaaaaaatatatatattttcctaattaattctaaattaaatttgtattttactacactcccactcaagttggatggaagatatcaatcaatcccaatttgctaacacaagattcaaagattgttttgaacaatccctttgtaaaaatgtataccgcttgtaaagatgttggtacaaaaggcaaacaaacaaaatttccccgagctttatgaggatcaatctcaagatgctttctttagttatgttggactagattattagtgatattgatggcaaccttattatcacaatatagtctcattggaagctccaaagatagctttaattcctccataatttgttgtagccaaattagctcacatagtccatttattactctaaattcatccttagcattactcctagcaacaacattttatttcttgcttcgttgttgaagtactcgactatcaactaattcaaattttctctcttcaatttcttgttctataggcctcagtaacaagatcaatctcgctactaa

SEQ ID NO: 4721 - DNA, 1281 bp, Cannabis sativa
ttagtaataatagccatattattttctttcttaattgatcttaagcatatgattatgttctattagtaagtagtgtctttttatagatagaattgagattgtttggtgtttggttggtgagaaagaataagcacaatttttgtacaatttctcacctatcttaattataatttgatgatagtgatcatctatgctagcctatgttgtagtttagaaaaacttcaagatattaaaaaaaattgaaatattatcaaaatttgtgaaactagcctttattcttctaattatttatattcatactccataaaataattacacatcaccttatactataatactatagatacatatataagttgtaaaatttggtgttcttttagttggtttgagactctttgattcttatatattctttgaaatgactttcaatggattaggtgtatagagtttttaattggttcatctactttcaagctattaaagctgaaattactttgtacaaaacaacctaaaccataacatggtagctcagaaatataactacaagtattttttgttactaaattacaaaaatatgagaggtgtagtcagaaagaaaacagaagaaaaagtggggaagactatatttacactcacgtatgataatgtcaattaaaaattaaaaatttacactaatttgtttatcaaaatcactacatgttacataaaatgtgttacatacatatatggacaattgtgtgttgagtttggattgaatcgttattctttagttacaaagctaaagggacaaagtgagtggtggtattcctaaaactttattattgcagcatgttcattttttccttatatactattccttgacaaaattacacttgatatatatgagatttttatacaacttgtaaaaaaatagaattttctttttaaattatgaaaaaaaaaaaaactcaaaaaaaattattaagaaacatgaacaaaatagtataattgtggagagttcgagactagctatcaatacgctcaatgggaaggtgctctattgggctattgagaactatgtctctttttgtattaagtcatctccttcttttattagttgtaatttttctaatgttagcaggacttgtaactatattgcccataatgtggtcaagtgggctttcacccaccaattgttctattccaatctcttctttaccgaagaatcaattttgtaatgactgcgaaatctaactgcttatttgattaatgtatgaataggcttttttttttaaaaaaaaa

SEQ ID NO: 4722 - DNA, 606 bp, Cannabis sativa
ttttttttttttttttaaattaacccttaatgatagcatttggggtccaaggatgaaaccagatgaattaagagccattctgttagccctacagtttgctaaggctctcgacctccctaatgtcatcatcgaattagattctgaagtggcagttaagggccttcatcttggttccctgccttttggttgggggtcataccctgtgtttgttgagtgtattaatctgtgtagggaatttaagtttgtggatgttgttttcatctctcgttgtgtgaatgttgcagctgatttgtttgcccgctgggctcagattagtaagatcaggtcccgtggcagtttaagggaagtagccccctttatggtcactattcttgctaattagtttgctttcaataaaattgcttaattatatatatatataaaaaaaaaattatgtttgaaatccaccccaagaaattccaatcccttttatgtatttttgcccaacatcagatgaagtgatgctattagcaaaagtaaactttgtggattggtataatgctcaaaaacaagacatggatactcctaatgactccaataacgctccgacttagcacaccccccccc

SEQ ID NO: 4723 - DNA, 655 bp, Cannabis sativa
ttacatgtggtttgtaaggattcttacttagactaatgccttaactattattattattacattttttctagttacttaattgactcttgaagtgatttgacacttgtctacccgtagaagtagagtttattaatgatatttaatgtcttggtgaccggtggcttcacctttccaccttgccttctttcttgaacttatttaaacgtgcattctttcataacttgtatcacttgcaaaaaaaaaaaaatctctctttctttcttgtttgttgtttttatttaaaaaactcaccttccttgtcaatatttctgtcctttctctatgagatgtcgaaccatccaagctcccctcttccccaatccttgagtggagatgaattccattctactattggagattgttcccccacttgtctcgaaacattctcatatagcaatcagcctagtggtgaggccatagttgggaggatgatgcgggcctatcaagctaggcccaatgacgcatcctcatcctctgatgaggaatggctccagaacttctttaaaaacgaaaggcgaaatgtcccttctactgccaatgttccggcttaattccacgctcttcgtttgcgctctgagcgtcgacgcaatctttgtcaaatgcgagctaggactca

SEQ ID NO: 4724 - DNA, 1012 bp, Cannabis sativa
attctggctcaaaattatttactaattattaattttcatttttaaagtaaaagttgagatatctctcctttaactaagtgttagattttgttaattataaaaattattttatttatatgtttatttaacctgtaatttgattacaagtgtattagttttttcaatttaaaaatagaatatattttctaaaaattttaacattttttaggaaatttttgacatacaaaagaaattattctaaatttttatattaaatataaatttaataattatgtgctataaatttttatttaatactaaattttaaaatttagccccttgcaatgaagtcatagttccgtatctgattagtaatattctttaaaagttaacatattaaattatttatgagatttgatacttattaatagcaatataacaacgatgagaaagtgttagataccactcacgacttttaattttgcacactatctaattattcatttcattgtgcctatccgaaacccatttaatttagtttttagaacaatttattattagtagtcaatgtcataagtgcatatttagaatatttgatttagataattctaattaatcatatccataactatatatatacatacatttacaatccttcactaaatatatccttcactaaatatatctttatatagttaaatatagacataataagtacctataaatattccactaaattgcaaaaattctattcatcaaataattttcttatgagcctttcatcaaggtacacacatacaaattcaatccccctttttctttttcctctaattttttgatcaatattataaatatatattattgaatattatattattttaattattttttaatattgtgattgttttggcttatgcagaaacccaaaatctcattcatccatggcgattagggcaattatcctaattagtatattatgttatatttcatattatgctaatgctgaagaaacattatcatcatcaatatcaaa

SEQ ID NO: 4725 - DNA, 1933 bp, Cannabis sativa
ttgtgtttgtagatttgctgttttgagttatttgttgagctcaattccttacaaaagttacattggttatgtgagagtaaatcttgatttgtgcatgattattggatgtatgttggtgtatgaaatgcttagaaaatacctcatttttatttggaagcttgttgtcaagttatggtattttagtgttgagtttggtgcatttttggatactcaaatatgagtttttctgggtttttaacccaagagccgcgactcgattcttgagtgtcgcgacccgctatgtgtttagtagggcataatgtttttaaaacttgttttggccataatttttaactccgaactctattttggacattcttggtattattggaaagctcattttgcgctctttctgttagtctatgattagagttcatattttgtatttgtatgaaaataaattttggattaaccctatttgtgaaatatcgagaatgtgtgacttggattactggtgctggcctaggagcacccgaggatttagaatctccacacacttggattatcaaataagacagtgagttagcacatagagattagcgcagtggcactcatgtatgttattttgtatattatgcagaaaactgagactagggttactaccctaagtttagctattttttcttctagggttattaatcttgaatgtatgtgaatatgaatgtaataatataatatatatgttgatacaagggattatgcggttaaggcataattaggttagactcggtacttagactcgagataaactattctaaggtcttattgtaaatagacgtgtgagtgcaagaggtaggtctatgtcaaatagactataaatgcagtggcatcaacacttaagtgattataattgttgttcatagtgtcttgttgggccttggctcacgggtgctctattgtctaggaaacgataagtcagctgttgagcagctatgaggtcgagggcttttgtggtgtattgtaaatgttcgggtcaagctaaaccacgagggttgggtctgccagggggaaaattgtttgctgcataggtcggcgtgtactaatgacttgtaatattttgaaaacattttatgggatcccgaaataaattgtactctttttggatatattttaaagtttaattattacaagttattattttattctatattttaaagtataatttccgctcttagctctagcatatccttgattagcgggattagtgtatatttagtctcaccacatcgcgtttcttattttaggacgttacaaagcatgtgtcaaatttaacacaccttttagaacactattagaatagtagtttttcttaaatgtgctaaaatataataatacactatatttttaacactccattagagatgctcttaaggaaggtaagaccatttctaatattttaatattgcactaaatttaacaagacaagttaataatactcagcacaaaaaatagagaagttgaaattttcaaaaaaaaaataaaaataaaggctaattaggattttattcccttaaattttgatatgtactaaattatgccccttgaactttgctgactattgaaaattcttcctgaactattaagattattggattcaaggacttttgtcaaatttcattcaatttcactaatttggtgatcgtttataaactaaatcatgtacctcaaactttgacatgtatcaaatcatgcccattaaacatttatccatattaactattcttatcaaaattaaacaaaagttcttaaatataacaatctcacagttcatgagaaatttttaacggccttaaaagttaaaaaacataatttagtatatgtcaaaattcaagggacaaaattcataattagcctattaaataagatatatagtaaattgttgggttttatgccc

SEQ ID NO: 4726 - DNA, 709 bp, Cannabis sativa
taataataataataataatccaacagctgtaaaagaaaaggaaaaaatctataatgttgtgggttatcctaatggtatatataaagggtaaatgccacagaagaaacaacatggattttgttggactcccagctggcatacagtgatattatataggtgtcatatgtatcttattaattttgtgaatcacaaaaacaatcacccattagtaaatttccaattttgggttcttacattatgattttttttgtttaaattttttcttaattttacatatacattacatatatggatggccatgtattattattttaaataaatttaaaataccatttctatcatctaattaatcatatgacaaatatatatactttttattttgttaaaatttgcaaggtttctcccaaaataaaaaataataataataataaaaaaaaatcaattatgacatcatcagcacaaattaattgggtttgtgttcaacaatatattataaataaatatagcacaagctcagtgttcatgtaattgttcttctttcatttaataatatataatgtacccattttatttcattgttcaatagtactgatgatgatgccttcatcatcaccgttaatcatgatgggagactacattgggatggagagttgcgtggacgttttgaaagaaggagatgaggaataccatgatttccttgggtgtaata

SEQ ID NO: 4727 - DNA, 955 bp, Cannabis sativa
ccgcattccatgacctttctcagtgttgggagcaggagccaagcgccttgcagaggctaggagttttctcgaaatgcgcttatgtaggtcaaaaaataatttagaatgagttgtatgcctaattagtgtcacgtgagtgctccgtttgtacatgtctaattatagaggtcacagtcatgctttttttggtacgatgccaggttttatcccccatgttaagccatagtacaggacatgcgtgccattatacttgcctaaatgatccaacgaccatttataagggaaattcaaaaagggaaggccctagagcgacacgtatgagatgttcagacagtacgagctgacacttctatacacaatgtgatggatcagccacctaccaaatcaaaagtcgaatctgttctagtaagatcagtccaacaagcccgtgaaagaagatatcgcatataagtacccctatatttcatgagataggggaaactcttggaagtctaaaaacacaattgctcacttactaaaactctactaaaattcctattgagcttctttttctttaagttaaacgagaggaatacagagttcaagtccataatgtaactacttgtaatattcattacttgccaataagaataataaattagacttgtggatttaggatagttaatgcctgaacgatgtaaaaatccttaagtttattattcattatcttacttctttctttagctctaaatattttgttttcgaaaatcttgataatcattttggtgctttcactgaaatttgaggaaagacttaaacatgcactgtgtttgccaccacgaaatcaagtcgtaaaggagaaaagtcagagcttgactaaccatcgagattcggccagaagtcgaaggctcacacaccaagagcatcgtcaaaaatgaagacctatgtccctgccttggcggggagagtggagaag

SEQ ID NO: 4728 - DNA, 1106 bp, Cannabis sativa
gttattgaggaattttatttatatttctgaatttgataagtgtgattaattaatgtttggatttttctgaatttaagtgaggctttgtgtgagcttgaacgatctatcaataatgacaacgtatgacactatatattattgggctagctcccatgctctgcagccatgcacgttgataattttatttttttggtgataatattgttgatctaagcgaattctaaataaagaaatattttgttgatataatgctgtaaatatagctatctttgaatatttagagaatgatgaaaaaaaaaaagctctatcagctctcctctatagctcaattttttacattagccacgtgcatatagtaatcttaatgtcaccaaccattttattattctttttattcctttttctttatttcaattttctctccatttacttctttgttaataaataaaaatatattttgttgggatttatggcaagacgttttatgtcgaaagggaccttcattgaagaaatgagagatgttgaggaactggacatggacatggatgagcgtattgggtctttaaaaaattatgaaatgatatccgagctggatctcagatcccaaagttacaatgggattcagtgaatttgctaagttaaataggcggtgtgttttggattgatgagttggcctgagaaagagcatgtactttggggcgcattactagtgtggagagttaactgatgcaggatcctttgagggaagccaaagtacgtagttatttgtttgaggagaagattgtttagtgtacaactaaggttccatattaattaaaaatgaaaatgttcatttttagttttaggaagagagaaaatacagagaagaaaagaagagaaaatgaattcaatttttattgataacccaaaacagagtacagtaagaagctttatatacaagctcgaagaagaagaagactaactaacaaacaaacttgtaacaaactcaccaactaaccattacaccttacaaatctaatactcccccttaaggtggagtgtatatgttacaaagccccattttatcttttaagccttgaaaatgactaggtaatagagctttagta

SEQ ID NO: 4729 - DNA, 3215 bp, Cannabis sativa
aaaaaactcatcaatgcttagtctacaagattctatatatattaatttccacataaccattaatatatatacaaccaaaaatattacaaaggaaaaatcaacacacgtttccaactagctagattctctcaacacttatattaattctacttagtttctctctatataaacaaacccctcaaaccccataacaactcaaaatatttccttacacactaccctataattccaaacttttctcctccaaatttcccctatgggtaatttttatacccatatattaacaacttctctactactctttatttttactcacgtactactagtagtgcatggcacaattatttcaccatgcaacaaaaccccatatcctcatgtttgccaccattacataaaacccacccaaaaaatgaccaacaccaacaattatagcttggaccacttttggttccgtgacttggccctaaaagtgaccatggaccaagccatggaagcacatcgtgtggttacaaccactgacacaaactcattcgacccacgagccaagtcagcttggcaagactgtgttgacctctacaaagacaccgttgacctactcaaccgaaccataacagtaaaaaacactcattacgatgatactcacacgtggctttccgcttctttcgctaaccaccaaacatgtcaaaacggtttcaacgaattcggtttaatccaccacttccaaaccataacagataataattccttaacaaacttttccaaattgcttagcaattctcttttcattcacaagtctagttttgtcgtttcgcctaaaacgacgtcgtttggcggtaacggacgaagacggttattaacgtggcccaaatggcttaatagaaggcttcttcaatcttcgttgaaaacggcggctgatgttgtggtggctcaagacggctccggtaactataagactgtatcggagggtgttgccgcggcggctaagctcggcggcggtggtaagagagttgtggtgtatgtgaaagctggtgtttataaagaaaatgtggaaattggaaaagatgtgaagaatttaatggttattggagatggtatggatgtttctgttgttactgggaatcgaaatcaggttgatggttccactacttttagatcagccacttttggtgagtatatatatattatatacatatatataaatgatttattgtgatgaacatgcatgatatgaatggttataaacttttataatatgatccatatttaaagttagtataagaatgagacttttatatatttgatactagctagaaaaaagaaatggtggggaatgatgttattgatatttaaaatttatatatattaaaaaaaattattacagtgtttatatcaaattaacaataaaattatgacagtgaaatgaatcggtgaatttttaaaaattgatagtatttatttaattatgaataaaacagtttgtaatatgcactttttgatacacgtaaaaatataactatttttagtgtcacgttgtgtagaattaataatatcttttcaaaatttattactagagaacctcataaaatataatacattaagtactttgggtttctaatattacttatttaattaaaatatatatagattcaataataaattacaccattatgtacactttcgtgtatataatgttataaaatcaattttatgacattcatctacctatgtagctttgatatcagtttttcttttataaggaataagggaataataaagggtttaagtttgcatgatataattaaaagttgaacaaatcaaacataaattatagccatgacaaattactattgaaaagaataaatcttattacattatatattattatatataacgtgtattatacgtatcttaaatatatgtgtggctatcaaacaaacaaagcatgcaagtgtgttagcaattgtcattttttttttggtgcttttcattttatgataaacaattaagttttaataccaacatgaattttctaactttttttctaacgtaaaaatatatatacctaacaaaagtaaattttattttactagcacatactcaacttttactaatacgtactactacttaatcatgcatgcatgcatgttgtccttctttctagtcatatatatatacaaatatacaatattattatatatacatatattctacataaaaaagtgattttgtattattgatcccttcctactatgtgtctaggagacttatatgtccttttagaacttaagaaagtgttcatattttaattatccataataattattaaaaattactaactaaagtgtcccctatatataattcaatcataactatgaatataatttcatgttattattattggtataaatatatataactatagtatatatcaactttctttactatttctctaaaaaaaattacaaataaactaattataattaaattattaatttgtaatatatttttttcttcaaattctcatgcaaaatttaaacttcacagcggtttccggcgacggtttcatagcacaagacatgacattcgtaaacaccgccggaccggcaaaacatcaagcggtggcgctccgctccggcagcgatcactccgtcttctaccgatgcagtttcaaaggctaccaagacaccttatacgtctactctcagcgccaattctaccgcgattgcaacatctacggcaccgtcgatttcatcttcggcgacgccgtcgccgtaatccaaaactcaaacatttacgccattaaaccgatgtccggacagaaaaacaccgtcacggcccaagcccgaaccgacccaaatgagaacaccggaatagttatccataattctcgaatcacggcgtcgtcggaaacttatttgggtcggccgtggcagaagtattctagaacggttgtgatgaaaaccggtcttgatgggaatattaatcccgccggttggttaccgtggagtgggaattttgctctgagtacttgttactacgccgagtatatgaacaccggcgccggcgccggtaccggagggagggttaattggcctggttatcgtgttttatcgagtgcggcggaagccgggaagtttactgttgggagttttttggccggaggttcttggattccggccaccggagttcctttctcatctgctctgtgatgacgt

SEQ ID NO: 4730 - DNA, 644 bp, Cannabis sativa
ccgctgctcatactctttcaactgtctagatgcataagcgatcactttcccagactgtatgagaaaacaacctaatctttatttagatccattgcaataaatcacaaacctttaatcactgatcgataaagttagcgcaggagcggtaattaatctttgcttcagttcctggaaactattctcacacttatccgtccacacaaacttgtagttctttcgaatcaattctgttaagggcatagaaatcttagtaaagcccttaaaaaatcttctataataccttactaatcccaagaaacttctaacctcagttgaagacttaggttgaggccagtcccgtaccgcctcaatttttaccgggtccaccaagatgccatctttgctccccagataccctaagaaattcacctgaggtaaccagaatccacatttattgaacatagcatacaacttattctctctgacgtgttgcaacaccatccaaagatggctttcgtgtgtctcttttgtatctgaataaattagaatatcatcaataaagatgataacaaaatcatctacaaagttcttaaacactcggtttaataaatccatgaaggttgctgggacatttattaattcaaaggacattactagaaattcat

SEQ ID NO: 4731 - DNA, 2098 bp, Cannabis sativa
ttcccagcaagcgccatatacttgtctttcctagttaaatttgtgcacttgaacgacaatgtcgatgcaatcaacctctgtacataattagccacctcaacactcgtcttcccacctcgccgagtcaactcataaggcaacttatcaagaaaattcaactcgtaacacggactcggattcatcatgaagtaaaatgggtccatccatttcgaacctctcgcagtggtaccatgaaacatgcccattttaacagatatagccacggggaccaactcatcagataaatccgcaaacaaagctgaaaacctaagcaaaaaaggctcacgacaagttgtaccttcagggcaaatgatcaagtcaccttcctctagagtctttttaatcagagcagcatctttgattcggtctctgcttagtggtgtggtctttattggtgaaatgatctctgataatcgcgaaatggaataggaaacagttgtgatccgacggtgaagaacccctgcaacgaaagttgcatcgaggaccgttcgatgagaacaaacgaagagaagcccagattggcctttagtaaaaggaaataaatttccttttactttgatacgaacccccaaaatccatatcacgtaagtgagaatggaccaaggaattgttattgaagctaggattcgcaaacatgctaagattaacccaattggggtccaaataataacaattaaagccatgaaaggtgttagtttttggacaattctaccatcgtgaaatatcactactttaggtagcttttcgcaattgagtggttgaactttggttttggcatcaaccttgtaactttctttacaaatcttcataaataggtaatcattttcactatcacccacacctatattaggtgttgggtcaggaaactcgcggcaaagcgcgtcagctttgctctttccactaagaaccccgggcttcttaacaaagcccgtggcgaaacctttaatggaagatatttctgtaccaataactaaattagctcctaaatattctttcaagaaaggttccaccatgattcttggggttgttgtcaaaacgcaccgtttgtcacatgacgagaagactcgccatgtgtcggggtgcacatcggcagagtaaaatttgggaagaacagctttggctacccatttaatatcagaaattttcatacctacaaaggtggaaaaaataatgactcgaataccagctgattctgagacgaagtgatagaaaaatttggcaagtgggtaagtcaatagcaagaagagaagccttaaaattccaccaatttcatatgccactagtgcaaagtaggggaaagggctttgttgggtaagcaaagtaccgttcatatcgactgcgataatgttgttttcacgatcggttgattggcatttgtcgatggttttgagagaagagaagctatcttctttggccattataacacaatgttacgtactaattaaactttgttattacgtaagtattgccaatttgagatttagaggatttagattgaagtggaagtactgggtgtggtcgtgtgtgttcacatattataatgtaagaaagactttggaagtatcaccattagaatatagatcgaatcgagtacagactatatacgtactgattactgatgatcattatcatctatgtcaacttattttaattggacgtagttagtactgatgaaagtcttatgttaaaattaaatgttaagatgcgaaacacgacaacatgtggcataacgttaggggcagagttaaatttagatagatgatgaaatagtaattgttagttaaatcaagtaataatataataataaaatagggaatcgttcttatgaaaattaattactaattaccaattaattaattaactttttatttttatttgatcaattaaaatattgaagacaattagataaaataaaataaacaattaaaatttagtgaaataacaatgaaaaaaataagaattattatgatccccaattagtattttttttacttcttaatgcaattacacaatttctttttctttctatattgctatgataaagtttaataaactcata

SEQ ID NO: 4732 - DNA, 859 bp, Cannabis sativa
cgtcctttttgtctaatatacataagctaatgatatatattatctgtaatcttaacaaacagtgcgatgtgggtatgggttcagagtgcggtgggggagtagacggggtagatcggcgtgcaaggagcttcgggatatcttcgaccaatgatgtaaactagaagaatcgatcgagattatatttagagttaataccattttgtaataccattttgtaaatgtgctttggccgcctatatggatgcattttatcaaagctctggtggatgtcgactttcttaagccactgttttcagggtgttattttgatttggttttggagcgaagaggtggatacaatttatatttgaaaaagtgggcattcttttgttatatctgtggtgttctgggccacaagcgatggggatgttccctgtcacagtggtgaactgtgagagccccactttacctcgtttcggtccttggctatctccggcctctcttttccaagacatgttctctggagctcgatcgatggttcgtcgtggtgactcgcctgggtttccagcggtaaaccattctttaccccgctcttcgccggcggtcgtggatgccaacggagctggtgtaaagtttcgtgtccccaaaccagctcgtggtccgaggcgtgagcagatggtgacctctcgtgatcctgctggtctgggtttttgtcagaaacgtgagctggccgtttcctctcctggtaatattgctgcgattggtgtctcggaggagagaaagactcctgaaaattttccttatttgaaggaaacggcttttgaccgtgctttgattatccctaggatatgtgatttgggtcaagttgtgtcaaaagtga

SEQ ID NO: 4733 - DNA, 1157 bp, Cannabis sativa
tttttttttcaatcattttctttaatttttgtttgacagtagctggtttcatttgatcatgatctgatgtacagttgttcttgttaagagattttgtcttcgtagttccagttaccatattgttttattaatgtagtagtaatcgataattatgaaattagtttttatgttcttagtaatatggtagctagtaactaataacaaaaaaaataaaaataaattataaccttataaagaaatcgtgatggtaactacttaactaaatatgtgaaaagaaatcaatcatgatggtaactgattacttaaataaattgagagaaaaaaaaaatatcaattataaggataactagttacttagaataaactagacattagataaaaagaaaccaaattcaaaactaatgtaaaaagaaaaactaatatagtgataactgtttatcatcgtataattaatagcttgttactagtatctaattagttattttactttgataatagtaaaaaattaaaatatggggaaaaaatataaattttttagaaaagacatattttggtatttttattaatatttatatatatgtaaattagatttacatatttttgtaaattttcttttaattaattcttcaaactacaaatataagtatataaatataagatagatgtaaaatgacatgatattaccataaagacaaacatttggcacacaaacaacattatattaattaatcagaagaaagaaagagagattacatacaatcattatataaatcattgcttgctcactctcaccagtcaccacactacactaactcttattttttttcacaactgaaccaccaagattataattacccaaaaaaacaacattataaaaattatatatgaatataatatgcatagctcaataatcttccttatatgcatcttgaatagcatagaaggtttgtaaaaaggtaagaacaagtgcaacaaaggcaccaatgaccgaaacaagtgcccaagggtggttgaaatagtcacgcttaagtattcttcgatacttatgccgacgttgtttacagtaatcatttactttactcgtaagacaatagtaatagttttccttaacataagtatcaatgtagagtctgttgaagaatttggtagcatcatca

SEQ ID NO: 4734 - DNA, 569 bp, Cannabis sativa
tgtgtttatatttattgaaagtaaaaccatactcaaatctttatcaatcaattttctccaagttgtctatatgctaatatatgaaaccacaaaaaactaaatatgctaatatattgcacctgatcgatgttcttcctcggaaattgtttcacactatatgatattaatactgattcataagttttaacatattagaaatgtaatcattcatacttgtataacttctattatatacgtgtgtgtcatacatgatacaagaattgaagcagctcaagtgatcattaataagccttaacacaccatgtattagttaaaagaaaataataattaattattatatgcgaagtgtacgttaatgcaaagatcagatggtattgtattagaaaaatactttacacaaaagtgggtcagttacttgaagtaaaacatattatatacaggaactagactgatcatcattattatgaaaacatttataagaaacttctaattattaatgacgttaatcctgatgttaaccctagctagctttgtagcttgaggctagagcctttctctctctctctctc

SEQ ID NO: 4735 - DNA, 849 bp, Cannabis sativa
gaaggcagcaggcgcgcaaattacacaatcccagtacggggatgtagtgacgaaaaataacaatacgggactctattgaggccccgtaattggaatgagtacaatttaaatcctttaacgaggatccattggagggcaagtctggtgccagcagccgcggtaattccagctccaatagcgtatattaaagttgctgcggttaaaaagctcgtagttggatttcagtcgaacctatggggtccactgattaaagggttagatggtgatgttaggtttcttgcttgtgtctacggatgcttgcttgaaccttcattcctctttcctggtggttacattcatagtgtttagacagaaaattgctcgatatttgctatcaatgctctttaccgagtgttgattcaagcgatcgagacttttaccttgaaaaaatcagagtgctcaaagcaggcgtccaaaacctcgaaagaggtgcctaaaaacggtatggtcaaccatctatatgatgcgtaccactaccttaacttgaatgatcttgcatggaataatggaataggaccttggttctattttgttggtcttaagaatccaaggtaatgattaagagggacagacgggggcatttgtattgcggcgctagaggtgaaattcttggaccgtcgcaagacaaactacagcgaaagcatttgccaaggatgttttcattaatcaagaacgaaagttagaggttcgaaggcgatcagataccgccctagttctaaccataaacgatgccaaccagcgatcattctgagtaactaatttcatgactcgaatggaagcttccgggaaaccaaagtttttgggttccgg

SEQ ID NO: 4736 - DNA, 1235 bp, Cannabis sativa
gtagctaacagtttcatctttaggcttagacgatccttcttcaaaggtaccctcatattgcatgttatgacgtattgctttcccatggaggcatcttgtggatgcttcacagtacttctgcattttctctgccacagaagctacagttaatcagttcacaatgcatgggaagataacggaagtcagcgatcacaagcgtatcaataataataataataataacacattacaccatgttttaataaaacaaaatcaatatggactcttatttcatgtgaaaaactgcaatggaaatgtgtattcatcaagaccttggatataatattatacaatactcaggttgcctagttttatatctaaattctaaaccatgccaatcacgtaaatgttatgccagctacctctaggtatactatacatattaaagcaaccaatagttatctagctagttctagtttgtcacttcagccaatcaaattgcacggtgcaaattacaaaccaaaaccctatctgttgcttatagaattccacccaaattcatttaaaccaaaactctctgttgctcaagggaggggaggtggggcaagctgtagagagacctattttctactaatatttataatttcaatgtatatatgctataaatatagttgattgttccacaacatcaacactacgtggatataaggtgaaaataaatctgcaaagcgtaggaccaactaccataatcttctctattcaaaacccaatgtcttaaaacttcatttttagatactaaaagcacattgtggcaggaaatacatggtttgcggaagaaaaacagagcatcgctcaagaaaacaaaaacttgactcaacttgtacgttgtatctaagtattctgtataataaaggctttgtgtcaagcattacaagcaacaggaagaccttgcaactgaacagactcttcaatgagactcaatcaccaagttgttctgtttgttgagctagcatatattattttacatgtaccttctgtatttcaaaccaaacactgaatctttattttttactgccctatgtttcatctgaaacttaaagtttcaaggattcgatttatttctacatcactaaatatggatctaagaaaataacaattcataatttcaacattaaaatttcaatacaaatctactcctgaattttatttatagctctgtgcctgagtataactatgtttcagcatagtttcagctt

SEQ ID NO: 4737 - DNA, 1554 bp, Cannabis sativa
  modified_base (1336)..(1339): a, c, t, g, unknown or other
gttttttatttattatttatttttgggttcttttagtatttttctaaagtaaaatttcgttctacatttgctcttatgataagatggtgaatgtaattaaattgaggatggtaattcagtaaatttgtatctaaaaatgagtagaaacttaattaaattagtgcttgggtaattatgattaattatgcttgggtaactcaattttccctaaaattatttatgatggtatatgtttagatctaatcttagtcgaattttgaatatcaatagtatgggcttgggcttgggctgctacattgatctatttaaaaccaatgggagagaactccatcataagaactatttaagaaaattatataaattttatttacatttatgttgggcacaaaatgctaaaataatttactatgaaaatagttctcttcatgctaaaataatagagcatgcctatagcatttatagtacctagcaccacgatgaagtatcactcaataattaattagcaatttttataatatttattaaagtgaaataagtgagacccattattgagttttactattaacgatattgtaccttataagagtgctaaccaccataagtgccttttagtatttctcaaaataatatgagaaagaagaagtaaaataattgaaaaatttataaagaaaaaccataaaagcattaacaattaaaaatttccgttaaaaacataaatgtgagaaaaagccatataagcatgcagaaaatttgggacgtgaatggtttaaagtttgctagacatgccccttcagtctcgcatttgttatttgctgacgatagtcttttgttctgtcaagcaaattcaaattcggccttggctataaaacatgttcttgatgtttatcaccgagcgtcaggacagttgttaaatacgcagaagtcaatcatgtccttttctcccaatacgaaggatgaggcaaagacttttttcaaccaaacattaggtatgccaatacgtgattgccatgaatcttaccttggtctccctgcttattcaaaccacaataaaaaagaattattcagcaatgtcaaggaaaagatttggaaactacttcatgcttggaatgaatttttttttttagttggtgggaaagaggtgttactaaaggcggtggttcaatctatccccacatatgccatgagttattttcgattgccgattggtttttgtaattaacttgaatcaatgatagcaaacttttggtggggaactaacaaagatggatctaaaatccattagaaaatgtggaaattactatgcaagtcaaaatttgaaggaggaatgggttttcgnnnntttgttgatttcaaccaagcaatgttagcaaaacaagcatggagaatattcgagatgctggactccttgttaagtcgacttttaaagcataagtacttttcaaggaactcatttttagaagctcatttaggacactctccttctttaatttggcaaggaatcaattgaggaagagaattgcttctaaaaggtctaagatacaagattggtcgtgg

SEQ ID NO: 4738 - DNA, 620 bp, Cannabis sativa
ctattattttgaatgaatttttttaataaaattcaaaaaatatatatgcatatatatatactaggtagatgttacgtgccaagccacgtaaatgttagttttatttaagatttttttattaaattatgatagctaaagtagtatgattatttgaatgatttattttacaatgcttgttgagaagaaatcgaacagctattattgcaccagcctgaagacacatatgtgtacttgaaaggttggcaccgcggaatcgtccatcttcgttgttggttattgcagtgcatctactcaatctacaaagaaaagacagtaattcttatacacacaaacaaacaaaaagaagataaattacatataaaaaagtttgatgattctcctagtaaattacatatgcacagtaaacatgtgtccactaaattatagatgataactatttttctattttgataagatataatagggccttgatccctgtaaccttgtagcccaagtggtcttatagaattatgaaaaaaaacactactgacagtgtttaggtaaaaaataaaagatttctttttaattgttaaaactttttataaaagataggatttctaccttataaaaaataaaaatta

SEQ ID NO: 4739 - DNA, 757 bp, Cannabis sativa
agtggatgtatcccaagcggtcaatgtctgtttatagccaagaataatggccttcaagaatgatacaaagtcagcctgcacttcctgctccaaagcaatttctctaaatgtcgcacgaggagaaagcacctttgcaacatcttcaagtgtttgagctcttgaaaaaccacaaccaccgtcgagtgatggacctctcagaaaactactagcattattgaatatttgagctctcgaaccaccaacatcttcgaatgtttgatatattagaaaaccatcaatgtcattccgtttgttccaccgtattgtccttggaatcctcttcagacactgacaaagcttgattccttggacctccgccattaattcggtctttagaacagaaatgagagaagttggcccattcttcttagaaatcacaccattcctcttcccttgcctaatagaccctttccctgagattcctccaccctgagtagctttttcgtgggaacgaccttgactcgccattgcactagttgtgatgatgattaagatcgagccctagcagtactgctctagataatcatttttaataattctcttaaattttagttttacttttagttattattttactacttaatttactaatcaaaatattgcttttcaaatagtattaagaaattaattgagttggtaataagtagcgatttatgtgggacaattctctaaaacgatatacatatttgcgtataaaaatttaacaacattaaattct

SEQ ID NO: 4740 - DNA, 863 bp, Cannabis sativa
cgagtttggggtcggtgtctgaggtcggggtcggggtctgggttagggttcggatctgagtctaggtctgagttagaggtccaggtccaggtccatgttctgggatctgggtttgggtttgggtcagggtccgtgttctaggtttggggctaggtctaggtccgagtttgggttcagggtttggggtttggcgtttgagttctatggtccgattctagggttcgggtatgtgagctaaaatgtaaaatataatatgttagacaatgtttaaaaattgaaaactacatttttatgttttatgttttctagtattttaaaactctttttaaaaaatttagccaaacgaaccctatttgtttttagcattaaaccccaacccataacctttgctgtcgaacctagatccacaaccccagtcataagcccctgccatcgtcttctcccatgatctctctcgttttccacaatattttgtgatatttagcgatgtatttgcaatgatagacaaaatctgaggctagagttaaagtttaccgatgtttagcaatgttttgcgtatttagtaatgttttgcatatttagcgatgtttagaaatgtatttgcaatatgagactaaaaattgcaaatcacatcgctaaaaattgctaatcatcacgaaaacttgagtgtgatgtagcgaaatttagcaatttagcgacatttattgatatttagcgacatcgtgaaaacaagaaaaaaactcagaaaacaagtaatgggatgagaagtctgacgatgggtggtgattttgtggtggttgagctcatggatttttcggttttagggtggagacaatgagacttagttatatatatatatatat

SEQ ID NO: 4741 - DNA, 923 bp, Cannabis sativa
cttcttgagccagccacttcttctgcgcattcagtatccgaaccaacgtccccgtcttatgcgccggcaactccttacacagccacgccagcttcgaccttcgccactgctccggcagttcatcgagctccttcatctccagaacgggcgccgaaaggtgcttcatatcaaccgatgagaacttttcttcggagtcaaatgggtcactttcagggaaactaccgaaacccccaccatcctcttcctccgttggttcgttctccaagtgttcgacataagtactggaagaagaaaccgaggggaattgacggggcatggtgacgcagaagagtggggaagtggagattggtcgaacaaagcggtggctgaagcaggaagcatggcggcggtgggtgagggcaagagagcggaggaagaggagagaggagaaatgggaggcgcgcataggaagagatgggaggagagttttagggttagaggaagggagggtgagagggagaagggaggaagagaagtctggttcaggaggagctctgctgctcagcagaagcatgtctttgagtgaggccacttcgtctttgctttgctactcaaaaacaaagctttaagattgaggctgtcgttttgtttatgccttattcacatttctttctattacgtgtcgttttacagcacaggctacagttagagatagaggtcaataagaacgggccaggacccgactgtagtgttgtaccaaatcgacactagcacgaccgtttaaaaaatacatataagtttgggcacaattataacaaaatgatgaaccatataaacttattagataatattatattattaatgtgtgaaaagattagaacatatataaaatttatgagttactccaatatgttaaaaattttataatttgataatagtaaaaa

SEQ ID NO: 4742 - DNA, 756 bp, Cannabis sativa
tttgagatctctttgtcgttctcgttcaagtatgtggtgattatactaaaggcggccaccgtccaaccaaaacccaataaaagccattacaatcgagagttagtataattatttattaagtacgtatcattgtaaaggattacattagtccacctaaaattggaattaaaatttattttggcagtatttatatttactatattatatgtccctctatcaaatctttataagcaatcattgttggatgttcatgtatattttttttaaaaatatattaaaaggtactagttttagataattaggcaactaagcgcgatagtcttataatatttttattttattattattgtaattataaaatattagtattgaacgagtggtatattatacaatatattattttctcaaaatcatatagtttttgaaaaaaaaaatattttacaatatgaagatcatattaatatataaatattttctcatgtctataggttaaatattagttttgtagtttttatatagtaatatcttttcgttcctctttgtatctatttgcaaaagtaaatttaaatagatagtaaaaatttaaaaagtaagttcttcactatcttagaattatcataaatctatatttttcaaattataataaattattaattaaagtagaatatgtaaatagataataaatttaacaatagtagaaaaaaaaatacatataaatttactacttattaattatacaaattagaaatatatata

SEQ ID NO: 4743 - DNA, 764 bp, Cannabis sativa
ttgttgtgtgtaggcttttgagcatagttagcagatagtgctccaagagtgtttttcatcttgtttgagtttgacagacctgtgagcctctccaatctggtgtcaaagctatgtagagtattctacaattcttgccaggaaatatgagatttggctttgatctgaactacaataaagagatattctacatctaaaccaccaagaacatgatactaagtgtttttcaggcaaaggttctcctacaagagcaagagaatcagcgcacatccttttttgtttcaagtaatcagccatagatgccgatcctttcctcacagtttgaagtttagttctgagctcatccatgtgatctctacaatgagctccataaagcttctcaagtgttgaccaaaggccagatgcagattggcaacccatgacctctgaggctataccctcggtcatggatccatagagccaccccatcaacaattggtcatgaacaaacaaattttcatattctgagttatcagatatttgagactccgtagagttgggaatacctgtggttataaactattatggacatggtcgttggccattgatgaagccttctagcttgtgtccccttattatatgaagactatcgtctttcatagaggaaagttgttcctgtttagtctcaaagaaaacgactgactcagaatactgttgaagggtgcataaatggaagttgtcactgtcgtctgagctgtagcagcaagagaagtacttggtgcggctgg

SEQ ID NO: 4744 - DNA, 975 bp, Cannabis sativa
agcctactgtcgagttgaagatctaaccgttgaccctcagatctacgcactaccctcgattggagatggactaccgacactaaaaagaaggtccctatagcactatagccaaaatcccgaacctcccctcggccaagagtgccactcgcacggctagggtcggcattggtaagtcgagagaaggtgagaaagaaaagatagaaaccctaactttcttgaaagaaaaaggagagaaagtctctaaattttactagttggacaactccattgtattaatttcaacacgtgtaaaattagtttctatagagtattcagcaagcattattgtttatttgtaaaaaaaataaaaacatcattgtttattgttttatcaaatgagaaaattaagctgttgaatagtcaagttatgaagttttaacgtgggaactataagctagtggtagagaatcaatagtcttaagtataatgttggaacatagtacatttttatttctccatttgaataaatacattaattagttttgtcttgcagtttacatattctagaaataattgaataatttgtttttcttcttagaaataaatctcttttaatttgttaatttattgaatacattttgtcgttttattattatttgtatacaaattggaattcacttttgaattgttgtatgtatacaaattggaatttcatctttcatgatactatgatatagtcttataaatgttggggtatatttattttaaattttatttacaaaatattttaaataattttttcatattaaaataaaaatttattttcatcattttttaaaaaatttaattatttgagtgtggtctctaaatttatatcgatgatacgtgcacacataataatttatatacaaatttaatacatttatgtgacaaagtaaaactcatcttaaataaaaacaattagttgcaatcaattgtcacataaatgtgcgtcga

SEQ ID NO: 4745 - DNA, 614 bp, Cannabis sativa
ggggcaccaccttgcataatagattcttttcagatgaaggaagagatgagtggcaacgaatgaatgtgcttgttagtcttaggagtaggagggtctagaagcatatgtagctattgatatcattacccatgaagggagtaaaatagtccgtagtggttttccaggtccctcaaagtaccttgcagtttaatacttactattgatatcaatagcacatgctatcaaatttcctacactactctctattgtgatatggaaaatcaaaattgttgtatgtttagcttttcttttttttttcctttttatgttttgattggtgtgcttgatgaacacttcaagctttgttttgaatggttgtaaattgtagataatacaaattgcattttttatataaaaatatcctaggtaatagcaacatgtttgtttagttttatttagaaattgttttattttgattttactaaaaaaaattaattattatataaatttcaaataataaacagcttaatatataataaaatatatatattattattaaattaaaaatagaaataatacttatatttattacctaaactctttatgaaatatagaactctttacaatttcaataa

SEQ ID NO: 4746 - DNA, 1028 bp, Cannabis sativa
cttgaaggcaaattaattttttttgatcaatatctataaacgctttaatttttttaaaaaatacttatatatttatttatttatttatttttgggcttataggtaatgttgtttggtatcgtttttagtattttaattatgttttgtgaattttagatttttagcagtcatagtctcacatgtcactttaggggagttatatatggtagttccacttaccataactcttaacaacaatgcatttctttagggggccattataaacctacaatcactttcaattagagtcatcatgaaatcccttacaagtattttaagtagtaacttttataattaattcaaagatcggaaataaaactagtattatcgttaatctaaacccttatcttttggtaggagtcgtcacacttgtaatatatctttaaatttaattttcatagtttaagtaaataattttttgagcaaaagtcttaagaaatgaagagttttctgtcatactactaaaacacaagactttctatacaaattattaatcaaaatgcttttgttctgtgaacaatcgtgaatcgatatgtgagtagacataattttgaattttgtgacttttctaaattagaaagattaaaatctctaaagttgaatatatgtgagattgattttttttattattatttttaaggaaactatcaaaagctcaagtgaaagcctcgagcaaaaagatacaatggaatttttttttatgttgcttaattacatgatttttggtgttaaacatgaatcaacacaatttatatatttagtggagatatttaggatttcaaaataagaaaatttggtattgttagctgagaatagagagagactaataaaattgtgatatatattaatatttcaagaagaaaacaaaagcttatggatctataaaaagttttttttttcatagttgcccagatatggctataacatatcgaacatcatctattatatatatcctaatattttatccatacatacatatataatatata

SEQ ID NO: 4747 - DNA, 3399 bp, Cannabis sativa
ttttctctgggttgtttgcatcaaattttgcctgtaaattcttgtaaagaagaggaagaaggaagggggtagggtagtacactgtactacactacactaatgatcaggattcagggttagggttagaaggtggtggttcgaattaggggaagggactgaaatgaaaaaatacatggaatattagtgccactactggtactaccaggctaccagttgtattggattcgggtttgttgtgttttcaaatccgaaaatggtttgtaccttagtggaaactagagaaaattatactctatatcttttttatattattatttttttatttttactttctttttgaaagtttatcatttttacttttcttcttacatgttgtagtgttgcactaattttgctcttagaaagttatatttttcaacttaaaaccacatgtatatgtattaatttgaaaactgtttttgagttcacaaattaatacatctcgttcagcgagagctcttatggcccagcccagttggtaagactaggcctgctaatagcccatcatgagtaccttctgtttttatgggtcatcaataatgacaggtccaatcttccaagaggactaagtatatataattttgagaaaattaaactctacatttttcttttattcttttttttttttttttaaagtttatcatttctatttctttttttaatattgtatcaattttgtctctatcacttcaagataattctcttatgttagggtattttgagtacaatacatatacaaagaaagaaagtatatttgaattaaatataaaattaaagataaatttgattaattaattaataaaagtagtattttttaacttactctatatattttagaaaatttataaaaatattaaattttaatttaatttttattttccccatttttagatagaaccactatatgaatactataataaaattgagaaaaaaataaaagtgaaatcgacgtgaaagtaatttttatttatatacaagtagatgtataaattttatttatgtttttataaacaatactattaaacatttgattagtataatgttattattaatatattatatttattatgatgataaatataatttgtttactaaaatattataataattttaaaaatagaatatttaagttttggaatttttttttttacattttaaaataatttattttgtatttttataaaattttacatagaaattctcatttacaattagtgttgcaattaaaattgtaataaaaaatcgtacagaaatttctattgtaactagcactgcaatcattttagaaatctcaaaccgtaaatttgaaaaaaaaattaaaaaaaatagtatataaagtaattccctaaatttatttatttatttaaataaacactttaaataatatttatgtttattaattattaaaaaatatttttaaaaaaataaacgaaattgtaattaaatgtagtcttatgtataaatactatgtttatattattattgataatatttattaattattaatctaaaatatttgttatgataatatgtgtgatgatatattttttttaccaatatgtgatgatatgttaatataatgtgtttattaaaatttaaatacaaatttttaaataaaacatgtatatttataatttatttttatcatatatagtttgtacataaaaattaagaatatatttctcatagttaataaaatgtatgataaattataaataatttttttttacacatataatgtaattaagtattatgatatatgtaaaaatataaattccccaataaataatcatggtaaaacaagtgtaaaactacactaaaacaaatcaaacaaaagaaaaaaaaacatgattaaaaaaactaaaaaaatattctgcacagcctcaatatccaatgcaatagcagttatatttgcaagctcaatcttaaaaaattagtacaaaaaaactactaaaacaacacaaaaataaaataaaacaataagcagatatatatatattgggcaagactatggtaggacttaggaaaagttccctattggtagagtatttttttttaaccattaattttagatcgtgtggttattatagtgtaagataaatactcttatgatacatctaaatgtatacaactttttactttctataatactatttattttaaaaataaaaaaaatattaatatttagaaaaagaactttcaattttctctctctattataatattgttcatcaatttttacagcaaacccacaccctctctccatcagactatttctctgcagccagcccaggaaatcagacggcgaccacacaacaaccccacgacaaaccaacggagactccacagctaacccattgtgaacccacgaacctgatgtatagttttgatgcgtcttcagctaattttcgtcctgtaatcactctatttgcccttatgaaatacttatgagtgacttctgcaaatgaatgtgagtgggtaggattgaaatatctctgcaaacatatttctctgttactttatttaaaaaaaactcgaaaccaccatttgcacctgatccttatttctgccttggccactctcattctatgctgatcgtgtaccctcgtcaaaacataaccacttttttttcgtgagttgcgccatctgagtttgcctgcaatgccattttcttaaatcaaatccaactgtgttagaatataaagtaatgaattctgcagccaaagaatttatgaagataccaaactttgaaaaaagggagctcaaatttttcaaaaatgcaagtgcatctcacgccaattccttggccaaatgtgtgcctcacctacctttgtgcgtcagaaagattgaaaagaaattgtggtccccagttactacatgaggataatctgctacctatgttccataaaaatatatatactattaaaatttcttgacttgtgattggataattttcttccgtataccatggggtaaaaactactggtcctacagtagagtttccctatatatatatatatattatactctcacttagaaaaacataaaagaaccacacaccttaaaaaataaattatggaaaataaccgtaaaataacacaaaaacaaactaaaaaaaaaactaaaaaataaacacagtatactgcagtatgaaacttataaaatacacagtaaaaaagtaaaaaataatgcctgcagcatttttgtaaaaaaatagcaaaagtcagtataccatgtaaattttccattagaatttaagtttatgtagcatatcaaatggcttttttacacgtttttttttttgagctttttacataaaatactatttttttcttctctttttaaatatttatacggtta

SEQ ID NO: 4748 - DNA, 1205 bp, Cannabis sativa
aaaacattctgttgttcataaacctttctttctttctaattcaactcctccatttagatatagtactacttcaatagaaatgatcttcaaaagttgcaatcttgtagaattagaaataatcttcataactagcatctgataatttctgcttatttcctaatatttcactgcagtgatgccattgatatggttagctatgcacctctctttgttaacacaaatgacagacggtattcctctgattctgttctttctcctttctagcatttgattatatttagaagagtaatttgtggcataaatacctaagttaacttccagttgcaaataaatattaatggtttaatatttaacggttaggtacttacagagttccagaaatataatttaagtattattaccgtaaaaaattaaacttagttatttatttgcaactggcagttaagcttaggtatttatgccgtaaattattctttttagaacatcacaagtaatatgttcttttctaatggtttagatggaacccggatgcaatcgtcttcaactcctccaatgcatatggaactcctagctattgggtgcaaaggtttttcacagaatcaagtggagcaactcttcacaaaacaaccctacaaatgaattcctataattcgattaccgagtctgctatatcttggaaatcttcagaggatgacaaaacttatctcagaataaaggtattagttaactcacccatgtatcttaatgcttaaaaaatgcatcaaatatagttacttatattactggttggtgtacagattgtaaactacggagctgagacggtcaatatcataatttccgtcgatggattggatccaaactctgtaaaactttcgggatcaacaaagactgttttgacgtcgaaaaatttgatggacgagaattctttcaaggagccgaataaggtacttgaacaagcttctctgtttccctatatgtaatgctgcagatcttaatgaaatgttaatattcagttgtaatcatcctttggctgattgcagattgtaccgacacaaagtctgctggaaactgacggaggtgatatggaggtggtactgccgccgcattctataacatcatttgatttgttgaaagaaacaagcagcatcaagattgctggagcagactccattgcaagatcttctatgtaaataaattaatcaaat

SEQ ID NO: 4749 - DNA, 586 bp, Cannabis sativa
  modified_base (146)..(147): a, c, t, g, unknown or other
ggtggagtcttgaggtagagaatattaactattatataaatatggtaagtaataataatataaataataataatacgatgaatatagtttagtctccatcgccagctataaatatatataacctataattattattattattattnntattattattattattattcatcacgtttctcacatttcattttttcatgcatttgattttgcactatacttaataaatattccttgatcagttcattgatccatctcatctcaatttttattctaccaaactttacatttgtacaaatatatatatatatacactatgcatgtgtgcatctactaattaattctataatcagtcaatttaacacaccaatatattacagattacttaattcatttgtatgcatacataataattaatagtctatatagaatatgtttatacgtaagtaacaaaacgtacatgcacgtgtgaataatattatagaaatatatatgtatagtaattaacattaaaaacttctacagagttctacagtcttttgatctcttatttggatcttttcgattaatgtgtgtaatttttagtgtt

SEQ ID NO: 4750 - DNA, 2042 bp, Cannabis sativa
aaaaaaaaaaaaaaaagataatgctgaagaacaaagagtttcaaatgaagacattttaaattcaatgttgcttctacttggcaggttattgcccatattaatatgataacataactattacagtaatttttcaaaagccaaaaagatatagagttacaatgatggtcatcaaaaggcaaaactcatggttgatctatgcccatccttgttcaaatcaataatatatacctacaaccttacccgaagaggactttgaactgaaagtctttccagcacaaaattttgaacaaatgggtctaattgagcatcatcacttccaaaggatatttgctcctttccagacaacattaatgaaaattttgaattccaagctcgaccagaattgacacatgcaacaaatgaggaaatatcaagttgataacataacgaatcacagagatgttccacacaagatatctgttaaaaaatcaaaaacacataaatcataatctcatagttcttagctagtaacaatttaacacctgaaaacatcaaactaacgattgaaaattagaagtacctcatctgattggtttccataaagagaagactcttccagtcggagtacttgagacttactagtccagaaaagttgcattaattctctccgttctgttgtcttgccagataatatatcccaacccatagaagctaccaggggctggagacgtggaaacagtgaaaagatctaccacaggaaaacaagcaaggttttccaataaaaactattagtaattcagaattgtacaattaaataactgactaacaaaattaaagaaattatactcacatattcaattaaacataaaattggggacatacattgctagtttcttcaagttgatttctcttcacagcagacaacgcggtatccatgacacactcaagaacatgttgtctagagactcgagcatattggtacatgtctctcaagcaagaactgaccacagagtttacggacagagttttattacgtaaatcagaatcaaggtctaattctttaacatatctttggaaacactccaaaggaggtggaatttggttattatcaagagattgatacagctcaatctcttttagaagcaatccatcatggagaacctgcggaaatcaattatcgattcaatatagcccttatattgtaataagtaaacttccatgtagtctttggcaatgcatttgttttataaaataccactcttttttcctggaattattgggtaggtatttgcagcatttaccaacccagaccaagaattctaccactctgacttatagtgaataaatgaaaacaaatatacctgtaacatttgaatgagaaatctacaattagatgcaagagctgcaccataaattatcaacaatttttccttattaatatgccaagagtctccatattcctcccatcctagagaaaccaccttcagtaaatcctgcaatacaatgctgtagaacatcgaaaatgaatgccaaggagaacaacaaaagcaaagtgagtgatgtataaatatgttctgacagtgacattttatcaaatcagaggcagaatgaaataacaaacttttgttctaacgtaaaaccaaaattttcaccacaataactatgagactcattcagattgtcaaatatgaagagaaagaaatatataaactgacttgtatatcaccaaccatgggaaagtttgacagtcaaaggggacttatacctcagagcttaatttcttattgaacaaaatatacaattctaagaccaaaaaaaaaaacagataaagcagaaggcaaaaacaggaccacatgtccatcccccaggccccagatcaactaaaacaaaatacaaaatgtttttgcaatacataataatcaaagaaaacataaaattcccagaacaaaactctatcccaaacaaaaatataaactttataacagcatgtttcaaatgcagaagttaaaaaggggggaaaaataaaggaacccaagaacttgaaggtttcagtggaaattcat

SEQ ID NO: 4751 - DNA, 1086 bp, Cannabis sativa
cacatatatataacaaaaaataaaacaataaaaattcacaaaatatagacaatattagaatattaaaattggtaaaatacataaataatcaggtaggaatatttttgaatatatataattaataaaagaagagctcgaagcatagttggagttttgtgtgtactctgtgaacgtcaatgcgttgtctatcaacgattgatagttgatgccaccgaaagttgataaattctctggaaaaaaccaattagtgaagttcatggagtttcaattagttttagaataatatataaatgacaaaatatatacatttataaacactaataatgattatatataataataaaaaatataaaaacgagattgtatttgtacagtacactataatttatgtaacttatctatagtctatacacaaaaaaaataaataagtaaaacaatttgtacatgttgtaagaaattaagaatattgatagagagatagagacaagacagtgagaatggttggtagtaaatgtgaatttgatagattagaggctttgagtttgataaattagagagaatgggtggtagtatatatttgtattataaaatattattgttttcttttcccactgttataatcacctagagacataggacaatcactgttacagtagtagggcttaggaaattgattttaatagattattaatttagtaggcataagtccttgattgatgataataaaatcatatatatcgatatgcatagttaactaaatgcatatatatatatattaaaattaattatcaatttttttaggtaactactatagatatatgcatatatatattaataaataaaattagaattattgattaatgatattgataattgatgatttggcgttagctaataatagctgccactggcagcctgcaagctaaaaaaagtaactttattaatttatttgaagtttgaccgagattaatgaagaatggagctgtcaaataatatatatacatacattgagacataaatattgtaattaacggtcttgtccggacaaaccaaaaataatatattagaaaccatgaccggaccata

SEQ ID NO: 4752 - DNA, 2121 bp, Cannabis sativa
tgagaatagaataaaaggcttcttagacagccgtctttttgtgtttaattaattaatatacacaatctcgtgaacttttttctttttttcctcttgtgaactccatttaaattatatatgatttagtgttccattccttctacgccattattaatcaaataagagaaaatgtttcactacttaagaggattattgaattatctttattgataattatgaggttccatctcaaaattaattggtgatgagtggagtatctcattgctcaatacttttacatgtgggacaatgttctccaatattcccctcaagatggtggttatttttgctcaccaatcttcaatcaacttatcacaagccatgtcatttgcttgcttatttttgttcggatatcaagcgcgtctttgcaccatctggatctcgtgcgcgcggctggctaaccatctagataggtatggatcgaaagcccggaagagatatgactttgataccatattgagaatcatggagttccatcttaaaacaaattagtaataagtggagtagctcatgtctcaatacttttacatttaatttatgtgggacaatgttctccaataatctccacatttctaaagtgtagaaagacaagaaatgcaaagaaagaatgaaagacaaagatggaaataattggagaagaagcttatactcttattccaacaatctgagtatttatacaagcttaccatcaagaggggatctaacatgtaaatagagttagtgaaattagttaaatcagttagctttctttaactgtttctacttgtcactgtaactttttattggtttgctttcttgattatggttcagtgtattggtttaaacaccggacctctttcatttaataaagttaggctttgttttagctaaatatttttcttttttttctttccctgttctgaaattcttacatgatattagatgcctttgattgacgttgcccatgaaatcttcttccacaaatctggccaaagctccatccactcaagcggtccttactcaaaccaccgctgcaacatcaaaccaattctaattggaatccattctccagctccctcacctccacgcgttaacgaccaaacttgatcacactaatttcttgtccttgaaattgtaggtggttctcaccatgataggtcatgatcttaatgacatttttctcatcaaaattcctccgtcgtccaccttggttaatggagaacctaaccctaaatatagccaatggaagcacaaggatcaactattgctgtcttggcttcgatcttccatggctgaaggtgtttttgcctcagtttccaacttctccacctcccactctgtctagcgccctcttgaacaaaaaatctccagccactcttctctaattgaaaagctagttctccatgattcgcaaaggtggactttccatctcggactatgttgacaaagcccaatcgatcgcaaactctcttattgacgcagggtcttcagtttcaaatcaagatatcattcttaagcttctgaatattaagggtcttgagttagattcggtggtctcaggcatcactacactcagtgatcttctatctttaaaagaagttcaagctcttttgcttttccatgagagtcatcttgaacatcacagtgtcgtgaccaatcttagcatgaagttacaggataatgtgactttctaaagtccaaaaaaatacctctacaaaccaccacaaggctccaagaaagcaggtcgaagattctttcatggatctaaccccaataatcgatccttatgccaactgtgtcttcgatatggtcacaccaccccagtgtgtcattaaagatttgataaatcttgggtcactcccaagcttagtaccactgtaactaatgggaacaccactaattaatgcttcgaatccctcccctcgtgcctacatcactgaacaagaatttgactatgacccacaagccttttccacctctttcctacatgattttggagatgattcatggtggtttgcagacacggacgccacaaatcacgtgactcttagcaccgaaaaacatagagtcttccactgcttacaatgatttagaaggtttaac

SEQ ID NO: 4753 - DNA, 1912 bp, Cannabis sativa
  modified_base (1434)..(1436): a, c, t, g, unknown or other
tctttcttggttataatgcagttggagaagatgattggaaaagtgaaaacagagaagtatggtagtagaattcttgaacaaataagcaaatattcagatatggatgaaaattatgagaagaaagaagaagcaagtgaagagagagcaacaaagagattgaagaccaagaaagccatagttgttaaaatagatagtagtagtgatgatgattttcaagatccataaattaaaaaacttctattgtttccttccattggtaccctttggcttcttgttacattttttcttttaattattattattattattatatataattttttaaaagaacttttgtcttaccattgacaaaagtcaaaggagataatgagaggaaaggaaaaaaattaaggtcgcgtttggattttttttttaattttttttatagtagtatttattatagttacaatatttatgttgtagagttttgaaagatttcgaataattaacactaccgaaaacatagtttttggtattttagcttagcaggcgtattcaaaaaattttaaatttatttttgacattgtaaaatattcaaaaaaaaatttaaactctaactataacgaatattgttataaaaaaatatttctgtatatatttttaagcaacatgttgagtaggaatttgtaatataatactcaaatatattattgatgctgtagcatgctaaaatgagaagactctattttgtgttaattacaattaagcaaagcaaataatttctgtttagttgttaattacagtttttagtgtgcttagcatgtaaagagcttattttttgtaatatttatgccaattctcctagctttttattttatccaaaacaaaagcatatcataaatgacatgaatttagctataattaaattaatccttttcataattaacaaaaaaaaaaaacaatattattacaaaattatggatatgtcgttaccacaaaaatctttatattacaatagatattgtttttacattatttttatgttatttttataaaattacataaaaaaatgcaattaaaaacaaaatttgttaaaaaattaattattatccgtaagtatatttaaaattctatttgtcagtaaaaattaaaaatgtgatattttgagtgtgtaaaaattccaataaattttataaaaatcgtatttatttagaataggacctgttatatattgacttgtcatttaaatttttgtggtgaatacatgtgcacattaattaatatattatttacaactcttatttcatttatatatttatttatttgaaaaggaataataattaacaaatactactaaaaaaaaaactattttgataacaattttttagtcacaacaaaaacttaatagtgactaaaacaaaatatttagataaagttgtcactaatttagttttnnncacaacaaatattgtgactaaaatcacatttaatcacaataaaatataatttttgtgactaatatatttagtcacaaatttttttaatcacaatataagaacttttttcacgagtaaaagtaaaatttttttacagtaaatctaccaaaagagattgttgataactcttatattaacacaacacccttttgcatttagagcattcaattaattatcccaaccgttagcattattagagataggtaaaaaacaagaacacaagtagtggttaaaaaaaagtacaacactagtaaaaaaacaaaaattgctcattaaagtcaatttacctaccgacatttacacagatttctcttctccaacacacacacgacacgtgtccattcatttaccacactcaaaacttttcctttcctatataaacaccacaaaaacccaagtctcttaccacaaataactcaaaaccttttacccaaaaa

SEQ ID NO: 4754 - DNA, 2399 bp, Cannabis sativa
  modified_base (1365)..(1370): a, c, t, g, unknown or other
gcctgttgtgtcagaccagtaggtgtgattgttgatgctgaagcatatgttcctgtacttacatagcagcacttgccataggaggcatagaattattagtgttaacaggggtagtattcatgcaagaactagtgaatgtgcttgtgagtggaatttgagtaggtgtagaaaacttagaataagtgaaagaatcagcgaccaatttgggaatggtagtaaaaggaaaagatgtttcatcaaaaatgacatctcttgagatgtacaatcggtcagatgagtctaagcacctgtacctcttgtgagactataccctaggaaagtacatggggaagacctgaattgtaacttgtgttttttgtagggtcttatattgggaaaacatttgcagtcaaatgtttttagggtagtgtagtcaggtgagatattgaataacttctctatgggggatttgtgttgaagggtaggggtaggtagtctagaaagaggttctaaaggcttcatcccaatatttgagaggcatagaagcatgtgcaagaagagtgagaccattttcaacaacatgtctatgctttctctcaactaagccagtttgctcatgtgtagtgggacatgggtgcctatgagtgatgccaaattgtttaagataattagtgaaggacataaactcccctccccaatctgtttgaaggcatttaatctttttaccaagttgtaatttagcttctgttttgaattgcaggaaggtttataaaacctcaaatttgttcttaagcatgtagatccatgtgaatctagaataggcatcaatgaaatggatgtagtatttgtatccatttacagaagtggtttttgcaggaccccacaagtcagcaacaatcaattgtaatggctcattataaactgtgagtgaggattttggaaatggtaacttgtgaattttacctaaacaacatgaggaacaaacaaaaaaggaatttttattattgatagtgatattacaagattgaaggacagatttaacaatcttttctgatggatggccaagtctattatgtcatatatcatactcagaaagtgtggatctgttacaatgagtacaagtggaagagtttgacgcagtgttggttgacacagtggctgttaaggcagatggggcagtagctagtgtggttggttgcacatgaaattaagatggcttaaaaatatagaggccattctggtgtatcccagtgagaaggatggcttgtgtttcctggtccttaacaaaatacttgtcagcatgaaactcatagaagacatgattgtcataagcaaatttagaaacactaaggaagttcttggtaatttcaggaacatgtaaaagannnnnnaatgtgtttgatggacagacctgaaccatctccaacataatgttgatatgctccttcatactcagtgttgagattttgcacatcaggggtgcaatgattggatgcactagaatccggataccagttgctattatcaacctgagttgtagcagcaacatttgcttgagcattgggagggttgggagggagaaaactcctgtaaaactcttgtcaaatttgttaaaacaatcgagaaccgtgtgcccaagcttgtggcaaagctggcactgaactcgacttgaggagatggagaatctgccacctttggtgaaaccataaacaccacggccattagaattagggaaagaggaaggattaggatagttacctccattattagcaccacgattattgaattctcgactgtttcctcgagccaaaccagaagaggatgaaggaggaatttgattttgattggggaatctgctggtgcaattttgataattctgataggctatattagcttctaaatattgatccatcttagttgtagtaagattaacactcagatcattttcttgatcagaatcgatcttctcaattcaagattcggatgctaacaagagaacttcaatctcagcaaccgagtattccttaattctagtgttggttgatatgattaaagtatcatatttaggtggtaatcctttgaatatagcagctatgtgatcccttagacttagaacttctccaactgaggtgaggagatccacatgttgcttgacttttagtagatagtcattcaaagacatagcttcttttcgaagtttctataattttgttcgaaattccaagatcttggaggagacttgcaaggtgaagtgtttttccagagcactctagatttgtctcgctgtattgcaaccaaccatgcgtgtaaggacactctctgtcattgatgaggagtgaaaccaagaaaccaatagttgatcttgaacctcccattcaagaaaggttggattgaagttattcgaagcttgatcaacatca

SEQ ID NO: 4755 - DNA, 1173 bp, Cannabis sativa
gcagacccagataccgatttcagcgacgagtcgtaccagcgggtatggtgttcgaaaaccgccggcatttggtatttggccattctgataatgtaagttgattttgggttctcttccacgttagccatggaaacttgggttaaacccagaagaataaaaaacaccaaataaggattaaacatcatcgtttcttctttcttctttctaatttggatttaggaagaagaagaaggaaaataactatggcagaaattataatactctctcaaagagaaggagagtgacagaggttgtaggagtgaaatcattcacaacttataataaagtcatttttgaataattgcgttatgacaaaaagagtgagacccatattcataaataaataattaaaaaaaaaactaaaattaataataataaaaacaaacattgagattagctttcctcacgtgctttcaggcttttatgttaactttcatttttctttttacgttcagattctttcaatgaccaaaactttctctctctacctctcttttatcaaaactaaaagataacaatgtttttttacgtcttttttttcctttttctttttcagaatatattgaatttttaaaaaataacattatttctacactcaatttttctaaggggacctactcgaccaagagactccatcaccatgggcccatccatggcaccaaattctttgaatatatcaccttgggaaggagatagcttataaattttatcactagtatatatatgagcttgattttgggagagggtaaaacatataattaaaaagaggcttgaatttgtagttttatttatcgttattagtcacgggtgtagtttgcctttgagtgattatttttattaattatgattaaaattaaatgttggttgctgagtttttgaatgataatagaagggggttctacctgccaactaacttctctttataatttttatatatattttctcccaccgtaataaacggagctaagcttaggcaatctaatctcacggggatatttattgaattttacagatctaccccagttatgatgattgatgactataaatttcaaaatgtaatctttcttactttcttttttgagggtctttatgagcttttagattggttgttttgccttttaaaattttctatta

SEQ ID NO: 4756 - DNA, 879 bp, Cannabis sativa
ttgtaaagcttaatattacctagcacctgcctcacatcaaaagggcttggttgatttggacaatggcagaaccctatgttcttttctattggtgtatcatattgatttaaattatgtttcactggtcaacttttattctctcttttctcttaatgtgtatgataggcccctactgaaatacttacttgttagatggaagaataagacgtacacagggtagtgtgtgatttctatatcgtatctttggtggtggcagtagtggctgtctgaattgtagtgtagtggctggctgaatgaatttgatgtgaaatgaactcctgcagaaggttaataatcaatataagttatataacagtaacaacaagcaatgtaacagtggcaatggaggaaatggtataaaattcagaggaagaagggagttattattgaaaagaaaatagctaaacagtcaccattgcacatgtttctagagcctgagtctctccaatgatgctaagagcaatttactagctcaagcataaccttctactattcctcttgacactatgtcaagactctcaaagcaaaactcaacaattacaagaatacccctgccacaacagaaactgaccaaactacccgtgcttctcctagcttaggtgaagcgcaccacgcgtctaacacccccactccccaatttctttaaccttgtcctcaaggtcaaaggcagaaattgagcacagatcgtgtcaaatttctcctaaggggcttcaagtaaaggcaaacttttccactaaataatcactttgatgatagatcttgatccagcctcatgatggcgcacatctaggacagcaccaggctcaacaattaattccaagttagcagtgtcgagggcag

SEQ ID NO: 4757 - DNA, 1944 bp, Cannabis sativa
tagaagggagaacactcgagcaaactgtatgattaagctggatctaaggaaaacatatgatacaagtgagtggaatttcatagaagaaatgcttaaagggttgcaatttccagaaccaattatccaacttattatggtatgtgtcacttctcctaaatcctcattaatgctgaatggttcaatgtatgggtatttcgaagcaagaagaagtcttagacagggggacctcctatcaccactaatttttattctgggtatagaatatctattcaaaataatgaaaaaagcgggccaaaagtcaaatttcaaatttcatgatagatgcacgtgtattatggagctaaaccatctgagttttgtggatgatgtattactcttttgccattgagactttagatccttttattacttgctacagttcctaaagcttttctcccaaatctctagactttttccaaatgagaccaaatcgttagctattgctgtggtatggaaactcaagaaatgtagaaagtcttagatgtgtcgaggtatagcagatgtgaccttcctttcaaatacttgtgacttccaatttttgcaaggagaatttcaaaagcagactgtgatatatcgatagaaaagatggttatgagagtcagaacttggagttcaagaaatatatcttttggagggagagcaacgattattaactttgttctcatgtctttacattcctattggatccagattatgctgctacccaaaagcttgctgagaaaagttaattccatttgtcgggcctttctctggaaaggtacagctgaacacacaagtccgagaaaagttgcttggtccaagtttgcacttcaaaaaaggaaggggttcttggatttagagatgtaatgacatggaacacagctgcaattaggaaatacgggccatctccacaaagcaaaacaatctgtggattagatagattcataatgtatatataaaagatcggaactggtgggaatatacagctccaaattcacccaggtggtactggaaacaaataattgtggtcaaggaaaaatttaaaggggtagtggaggaccaaaggttcctcactaccgattatagcataaatcatggctacaacatgattaaaccagtggctgtaacagtaacttggcagagagaagtgtggggaagaaccaatattcctaagcacagatttatcttatggttagtcatgttacataagcttcaaacaaagaaactactgtttaaatataacatatcaagtgactcttgctaactggaatgtggattagaagatcaattgatcatctattttttcggtgctctaaaagttcagcttgtttagaagaagtaaaaagttggctgcattggaagacctcaacccaaacaattgggaaactcatcaaatggattcagtgaagcaggattagcaaagtgaggaagaaggtttatatattggtaattgctgcccttatatatagaatatggtatactagaaatgatacgtattggaatcaatcaagtcattctgttgaatcaattttacaccatacaaagataaatgttaaagaaaggcttgcaggaattagcgtaagaaagctacttaaatagatagggagtggatgaaaaagttgtaaatgttacaagtctattctcaagccttttgtggcactgaacaattgtaaacttttaagttgttgacatatatatctaaatgctgaatcattaaaataaataaataaaacattgggtcttgtacaatttaaaataataatttttaaagatcactaacctaaccaatcacaaaacgtcacctctaaaaaagagtaggcaccagtggcattctaatacccaaacaatgctcttaagtcttaactaactaatatccaaagcgttgtatcttcctagggaacttaaaagagttggtgttaatgttag

SEQ ID NO: 4758 - DNA, 607 bp, Cannabis sativa
aatggcttgataaattttacatattatgtctccaaccttctggtcttcctcagttaaaatatcacagagtacagggtggctcaagaactgcacaaagcaataaatcaaaagtcacaaagatgaaaaacattcattgtatatatcaacctacctactcacaaacaaacagttatgagctacaaagaaacactaacagcagtcaaccaaaagtctggaatggtcttgataacatcattccgttttaagtacataggtcttcgtatctcattaaacttttgctcaacttccaacattttgtcactggcttcttcattaacctgtcacaaagaatgtccattattccaatcctcatcactacaatttttttagtttctaaaagaattcacaaattgcaaaagttattgactttttctacaacaattcataaatgaccaacattctaaaactaagtcaaaatgttaatttgtgctcaacccataatttcttttcaaattagatgttaatattcaacaattgaaacaacaaaacagaaatcattaacaaaacccatagccacaatcatatttcaaaacccaaaataacccataacaataatgacaaaaacagt

SEQ ID NO: 4759 - DNA, 726 bp, Cannabis sativa
ttcccaaatattttagagttatgcggggatcctactttctaaaaagaatattgtgttgtactcaaggcccagctctgggttaaggtgggctaggctcgtatttttgtataaaaaaagttaaaatcagtaaaaatgtaaaaattttgtgatttttgaatatttatgaaataatccttatatattgtgtgtgttttatttgcaggcgtttggttgggcatatgtgaataactggcacaacacatgggatcaattctatgtgtattggatatgtcctttcattggagcattatgtgctgcttggttcttccgtgctctctatccaccacaaatcaaacaaaagaagccaaagagtaagaaggcttgagaggaacctctcttctcaccatgctcggtttcggtcaataaacccaataagtagccttctcccttttttcttttatttttgtctaatttattttctccttttcaagtaaaaaatgtcatcttgcttgtcaaggatttatatagtccatttaaattagtgtgtgccatttagactttcttttttttttcttgtgtttggtttagaagaacagtgtttatatctgggttaaggtgcaggtagttctttctggctcctctttaatctattctcgattcgccattctttttattgtctctatgaatcgtaaggccaatctcgttacgtttgtagcacacttaagtacttaagttatttttttcgct

SEQ ID NO: 4760 - DNA, 1469 bp, Cannabis sativa
atgtggtgtattcaagagaatccaagtgttagacctaacatgaggaaggttgttcaaatgcttgaaggagttgttgaagtagactatccaccttgtccattgccttattccatgaccactgcataaataaacaagctctttttcagtctttgaacaattaaatatgtcctatttttcttttaatgttgaatgtaatatacaattaaatataaaatattctaacatttcatttcatttcattcatgttagttagtcctttcatctgtagaaaaatacatgtagcattagtgacaatccagtagtatgtatttgtaagagtataaataatgttccattacttaaatcataactcattttgtgcattttcaatggatttaattcagactcaaaagatgatgatgaagaaaggaagaaagaactagcatagattcacgagctcacctttcagacagcagaattcgccatgtaaaacctggcccgtgaaagaaagcatgaaaatcgtaggagatgctacaatggcataaagaaaaaaaaaacagagaatatacactagaaaggacagaatctccaacaattatatacttacatggtccattggatgtctgtccatggagatcttaatcttcaaccccttgttaaaaatgcaattagaggagataagaatgtacatagatgagtgtcattataatacgctaagaacgaataattcaagttcaagtcgttaatgtttcacttcctcggttgattaaccgatgaattggcttggcttgctcgttattccaacaacatcgcaatactcatcccaacccaaaatttactccaccgatggccatttcagaacctcaaatgaatcaatatactgagaccttctatattgatcatggtgttgaaagaaatttctctagaactgtctgtgtctaagttagacatgtatttggctatgctcaagaacattcatagcaacttttaacatctgtctagccttcctatcaggagtacatccagcagactccatttccatgaatatctctggtacctgccaaaccaaatcaatatatgaattaatggttttcatgaaaaatcataataaaataaaggtaaataacattttggaccatgtttttgcaaaagttacaaattaaattatctattttgttaaatgacaatttggatcctgtgtttttcaaaatagtacaaaataaaccctgaactcaattgacgaaaattaagttcagaatctattttgtaccattttgaaaagcacagggactgaattgttatttagcaaaataaaagatccaatcaataacttttgtaaaacacgggatccaaaattgtatttaccgataaaataaagaaagtaaagctaccgaggcacgtggaagtaccttatcgtacttctttgcccgactaaaagctttcatgagtgtagtataagtaacaacatccgggctcaaacccttcacaaa

SEQ ID NO: 4761 - DNA, 673 bp, Cannabis sativa
acatataattatgggttcttattataataaaagtaagtgcttgataacaaaagaaatattcattactcaattatgatatcctattacattctaagaaaaaacaccattgtccaacaaagttattgtaagataaattttgacaatactaaaaaggcaaatatttaaatttagacaagaacaatcaacgcattatgtaagtattcatataaaattgcgattattcaaaatttaggttacgaaatagacaaaatacaaacaaaaataccaaggagactacaaaaatgaaagtagttcagttaaagttgagtttgcttaattcacttttggtaataattttcagcttagtctatttgtttcagatcaccattttatatataaagcaagtgtctattaggattacacaattaattaattagaatcattacttcaataatgacatcattaaataagaaaaacgtttagatattaaatatatgaacggttttgtctgttcgactattccttgattgcagcaatgtatgtaatttatcagtttgccgtttgagcattcgtatcccacgcgggagctcttaggaatctatggtgttgcactcgcacaatagggcttaggactttgaatgtcagcgaccacacttgatcgtactttttggacattccgtgttgacaattaaga

SEQ ID NO: 4762 - DNA, 2209 bp, Cannabis sativa
tatatatatttatatatacctgaagcctcattagaagatcagaactatgtttggtgtgaaagcgattgagatgaaagttttggcgaagatgttggagttgagatgttgaggagtcatcatcatcattctcatcaaactcccagtattgccttcctatgttctcattcacactcttcaaccatggatcctcctctcccactgaaacccttagcttccacatcaatatataatatatatgtgtatattaatacatatacaaatttaacttctactcaaatgaagaagatatacatatatataagacgcgcgctacatatatatagtagaacaagtagtattagtagtattacccctgtcacgcacattgcgagattaccatactacccccacattatttgttcttattatattagcatgtatatatataatatacatacatggcattcgtcatcttcattattactataattgagagttgaaaagtcttaacattttgtgacgtacgatatgcatgaattggggaaccaaagcctccaaattgataaagtacattgttctctattaaacaaaaaatttacatttagagtattaaaaaaaaaaaatgtaaaacttaatttcgctaaatttgcagcataaaaatttattaatttaagtttgatccatccaaaattataatccttttgtttaaaggatatactctttgattctaattacgatgatattaaatgacttaaaataatttagggaaatttgtggtaaatttgaaattgcagcgggactcagtcaatttaattaatcgagctgcctacatatcttctttgtgaaggatcaagccacttgtagttctttacagtatttttgaatttgaatataagaattccggtaaatgactactttcagaaatttttttgctatttgaaaatttggaaaaatttctaggtatatatgaccttttataaaattttgagatgtgttttatactattttgcggtattagtaactgcacttagtcttagcaactaagttgtctacatatccttttataggaatcaagtcaaacgtagttccaaaaaagtattttcataattaagagatgaatgacttctttttagaatgccattttttttatggccttaatattgaattttagtgctcatttaaatttttaagtaaacttactctttttgagatttttgtgaggttaatgacctctttgaattaattttgtgaggtggatgacttttttaatatttcaaaattaattttgataagctcatttagaattttgtaccattttgtatggatttagaattttatcactttttgtgacaaattaagttttaaaattcttttattatatttttttataaagaaaaggattatttggttagcattttaattatttattccaaaatttagggaataataatttatcttttatcacatactatttcaattttaaatttattaattaaaatttaagatagtatttaagatatttattttaaattcaaatttggattcctatttgaattatatattaatatattatataatgccatatatatcatactagcaacacattatgtgcgaggcacgtatactaaattatatgctaaattttttctacgttatttaaaagtgatacaattaaaaagaaaaaatataattatttatttggtgaaattattattatgtgtatccactacaagaaaatctacttttaccggcgcaattgacctattgcgccagtcaaagttatcagaataaataaattcctaaatttttttattgattcagcatttacttttgacagtgcagtaatgcgtcagcaaaaggttgacaataccagcgtactattaaatatgcgccggtgaaagatctaaaatgaaccgtcaaaaggcgcgaggacgtttccacgtatgtacggtttttgccggcgcataaagtaactaaatttttggtgggaatccaaaatgaaacgccaaatggggtgcggacgttcccccgtatgtaaggtgtttaccggcgcacttttgcactggtaaaagtgagtaaatttttggtgggaatcttgaccgcctacaaagaattgggggaaaaaattctcgcgtgaaaactggttgtaggtgagaatactgcgccggaaaaagtattaatggaaacggtgcgttcaattttacgttttttttactacttttaccggcgc

SEQ ID NO: 4763 - DNA, 738 bp, Cannabis sativa
tttcttttctcattaattagtgactatagaagaatagatcttatcttggtaccataaaactcccaaacaatcttttgtaagattcttaatggatattttcaaatcttagtgggagagcatcccttatatatattatacatcactatatgtaagtttcctctcttcacttattagtttggaatctctttaagaatatttttaatttatttttcaccaaaaacattgagggtagctgcagttccacattgtgttgttttttcttaatgtctgccatattgtgaaatcattataacaacataggaggcaatagttagtggaattgaaagatcattctcttcttaatttagggataacacttttataactctatatatcatcaattaagtaaaaccagacaggtcctgactatatataatataaattttggtgcccttaataaataaataaatatatttaattaaaaacaaattaaatttttttatatgctacatatataaagacataaagggaaaaaaaatatatagataaatttaaaataatttcaaagtattttgctgggatattccttaattaaatttatataatcaagtcatcataattttttttataataaataacatagctaaattattaacaatctttattgtgacatatatattgatcgaattagataagatttgatgggcgagttttgaaaagcttttttagactcgctctatatattacgttatattaatg

SEQ ID NO: 4764 - DNA, 1199 bp, Cannabis sativa
atctaaatgagaggggaataatggtagggacaaaataggtacagtgtttcaaaataaaaagtagaaataaaagactaaaaaagagggtatagagtctaatttccaagcatcaactcctcgcaacgcatataactatgtcgcaaaaaatggtacagatagtctttgtgaaaattcttacaaaacaacactaccacctaaaacacacatgaaacctcatgcatcaaaagaattccaaacaacgtacccatgaaataaaatagattgaagcccaccatcatcacacaaaacgtagtttagcagaaactactatgacatagaaagtgaaccaaccaaaataatccctacttgaaacttcatcaaaatgttcacttaaaaattgtcaccactcctaaccaaaaacagagccgactagtatcaatatcaatgaaatcctagactttagccacaaagaatacagcgatctaaagttgacgaaacacaattaaaccaaatgaaacataacaataaagctaaaaacagcatgatatgataactattgaaaagaaaacagactcgtgattaacaactcaaaataagtcttcctaccgattaaaccagttaaatcaaaagaaccacactaaatcaaaatagaatgtaaaaaactagatgtaaaattcttaaaatgcagaaacaaattcatgaagaaccacatcatgaatcaaaacagaaagtagaaactaatctttaaattcactataaagcaaacacaaaacaaatcatgaggtacctcatgaagaacatctctattcaactaaacaggcaacaattaaaccccaccaaaatcccaacaacacagttatccaacaaaccccaaaaaatgctcacccacaaaattttgaatataaatctctgataaaacatcgaaaacaaaacattccaactaaaagacaatcacagaaaagccaataataaccccaaataatattgcagaaagccccataacttccagaaaaatataaacaacagcaattaccaaccaacaataagataaaaaaaaaccaccaataacaacctagagtatacttaataaaaccatgaaagggtgaaatttttgtaccttcaaaagatggttaatcctcttgaagaaactatatgttagatatatttttggctccgccaaaaagacaacccagatgcagtccttcacccagtacttcaaa

SEQ ID NO: 4765 - DNA, 1528 bp, Cannabis sativa
atactattttaaaattttaatcattttaaatgaatcaaatcaatgaatgacagaatgaaagtctcagcctattcgtattcttcttcaatcttcacagatagttaactaatattatattatcagtaagtattcagtgagtatatcactatcacacacacacatcacaatatatcactcacccacacaccatggccacacccactgtcccacacccacacgactcaccgtcccacacccaccgtccacacgagttgactgactcgactcgtccaactcacccacaccagtcgatcaccaccacgcagcttcttctccaagaccggcgacgacgagtcggcgactgattggttctcttcgccggcagagtcctatcccagagcagtggcatcgcctcgccagtcggcttagttgcatcccataccaagtaaatgtcggtgtgtgtagttgtgtatgtgtattgttactgtgtaagtaactgtgtgtttgtatatatattatacaaatgtaaaaaataaaaatgcttctcagttctcactcactatgtaagaatcctttattatttttattattaattaatcttttacatattatattatatataatatataaaatgcttctcactcaattgatgggcggtgacctaaaaaaaaaaactaattataatcaacattcaacaggacctcaaattatatgtgatattaattattaaaaaaaggtccaatgttaaaaataaaaaaatagtatttttaaaaattaaattttatttcagcccttaaattaaacattcggactcaacccaataggacccgaacccgattacactcaacccgaaaataaccgacccgaacccgactacacccgtacacccgaacaccgggtttggttgtacatttccaagacgtgaaacccaaatacctgaacccgaaaccccgaaaacccgacccgtgtgcacccctacatccggcgctccctgaatgtctactgggagaagaaagagttattctggaagcagagagcccgggtatcgtggctcaaggagggagacaaatattctaaattctttttcctatctactgctttaagagggaggaggaatgcgattgaaagtatcttaagcaaggataatatctggttaactaggagagacttgattgggcaagagttcttgaatttctttggtgagatctttgctgggtcaagtatcagacgggacattaactgcaataatctcattcgtgaaagaatctcgtctttagaaagtgaggaattattaaggataccatcgcatgacgatatccgaaagacgttattcagtatggggagcggtaaggcccttggccctgatggtatgtcggctcttttctacaaacactattaggagatagtgggaaatgacttctgtgaggctattcaggatttctttgtttcaggtcgtatgcataagggatttaatgatacaaatatagttcttatccctaagactcgaaaagaacaaaccattatagacccatatccctctgtaatgtta

SEQ ID NO: 4766 - DNA, 2144 bp, Cannabis sativa
gagagagagaggcacctgcaacttgttctttgtatgcaattagaagatcaagggttgccttaaaaactcgctccaacgcatccactgataattgatccaccggaagtgccaatagtgatgtcaatcctaagcagcaaactttcttatcgtgttccctaaaacaggaaaatttatacacacttaatatattttaaacaaagcataatgaggtgcagataaaggaaatgaatgtagtgcatatagccaaatacctcctaaagttagctcgcacaccactttttttaacttgttgaagcatttgcaaccaaagaccaaagatttctgtagcaatgccaaacttctgcaatatgctgagggtcaatgccgcattgtagtaaagagcatcagcaatctggatcaaaagaacaagattattacaatcaccactgcatgtcaagcaattgtaagaaagcaaaaaaagaaaagcaccagccacaaatgccacaggaggatgtcaccacatacttatagcgttgataagctatagcctgacaactatttcaaattctatggatgggtggatgactgatcagtattttaagtctattaagtacagaaaaaagaaacacacattgatcatagcacatcagtcaccacccatactattgcttttgtttccatttttattactttggaatttgatgagcgggcatcattaatataggtatccattaacatcaaaacataattaccacttgaattaagagacacttcaagtaggacttttcagatcgacgcaaacgctcgactgtgattctcagatatggctcaacccattgatcaacctgccccctacaattctgaaaaactacttgaatgagctttggagctggctcaatgtcactatcttccatgtttgtatctgccatgagctgtaaacatagaaagagacaaaattatctttgagggatttttagcatacaacaaaagttggacagtgtttatcacggtacaacagaataggataccaaggtatgactaagtgaactcacatatgaaatcattttccatagactttgctggtagtctggctctttacaagcgaggaaatgtgcagttcccctggatatgtagttgtccaaaggaaccaaaatgtctgcacaaatataacacacaaacattgtcatgactcatgaaggagaaatataacaaataaaacttcaggtcgctaccatcagctgcattacttacttcccctaatttgactttgcatctaacaaacatcttaagcatgacatttcatccttacatatacaagttcataacagatggtttgataagagaaagaaggggagaatattatacatatcataaaacataaagctggatacaagttattgaacaagctaaagcctgtgaaccacaaatttcagatgtgcattgccaagataatattttaatccactaccatttttctacaagaaatctaggatatattagaagggaaaaactgaaaggtttacagcagatgataagatatcatactacaacgaaaatgataataaaatctaaaattataccaaaggttctaatcggaaaaagagaacacaatgaaatccttagttctaaaaattcccacggacagccaaaataaaacacactcaatccaagtaagtatcctgaaagatactattgtttatatctaaacgaagagccaaacctattgttttcttcctaaacaaagtgccaaacaagtctcttgttactaaaaagtatgaataacaatcctacggacggaaactaaaaagttatcctaaataggtggtagatatgacataaaagttgtagatatgaaatataacactcttcaaatgggcatcacctaaaacatagttgcatgaaaggaagaaggaaaagtgtccctacaagcaatataatagataaaacacaaatacttactagggaagaaatcaatagcccaatcattcaatgcttccatcatcaatggccaaagactccacatatcaagagatattgtaggagagaaaaatgtcatgtatgacacaatctccaaaacttcttcaaaaacctctgcagtaattgatcaggacaactatattagtcaaaaaaaagaacaaaaaaagaagtcaataaagtgagcactg

SEQ ID NO: 4767 - DNA, 930 bp, Cannabis sativa
ccatacttttcatccaaaagaaagaaaagagaaagaacacttggccatactagctttttccttccatatacataacattccacaatcattttcttacttatgaacaattactttcacattcttttctttcttataaaaaaaaaaacaatttcaattttctttttatattagtatactgctcagctcacgaatctcatcccaccactattttcctctctctcatcatttgattgtgaaactttcttcatcaaactacgatttccttccatagtgctgatcagtgtggaccctttttctcacaatcgtgggtataattatataatttccgaaacaaactgaaaaagaaaaggtacagcagaagcttatatataatttaaggctataagccaaattgaacaccacagaaaacacacccaaagtcaaacgctcattcttctgttctagtctgttcttacccaaaatggcacaaaaatttagcttcccaagtttcactgccacagtagcattgcttctaattttcttctcagaaatgggaataagcagtgtaatgagtgatccagccaaagatagagaggactgtatggatcagttgactgggctggccacttgtttgtcttacgttagtgggcaagccaagtccccaactcctgactgctgcagtggtctaaaacaggttctgaagatcaagaagaagtgcttgtgtgtcatcattagagatcgtaatgacccaaacttgggccttgagatcaatgttacacttgctttgactttgccatcagtttgtaatgcccctgctaatgtctccaaatgccccggtacctattctccagcctatttaacattattttttattcttactttacttttgtactatatactgccttgtttagtattctttagcgagatgaattgtttgaaaaatctattgag

SEQ ID NO: 4768 - DNA, 551 bp, Cannabis sativa
agatcaaattttgatctctaacatcagccctagataagcaccaagaaagaatgatgtgaaagtcccctcataagcaagttcacacaacaaaatcaccaacatcaagcaccatttactactcatgcaatcaagaacattcaacgcttaaaaaacataaatctcaatttccatttaagctacaaattacaaattaaggctatgaaaagctacctcaaattcaatccaaagccaatcacaaagatcctccaatatcaagcttcaatccaagcaaattctcacaaaactcacaaatttttgaaataggtttagggggagagagaaaggggttggttgggcggagcaaaaaccagaaaaataaaccttatttacttagaatttcctttttgataaatcataatcaaaaatgcacaattaccaaattacccttaaggccataaatcacatatttaaactttcaagggcaatcatgacattccatacacaaataaattcaaataaatttcatatttctcatatataaataaaatgccaataatttatcccagaattgt

SEQ ID NO: 4769 - DNA, 2396 bp, Cannabis sativa
atttcaaataatttacaatatagatgataagatttagatattttgctgcacgtgcgattttttttatacgcgtagtaagtaattgtttgaaccttattttcagtactgtaaactatttaaaattttttaaaaatttatatgtagttattacatcgtatacaattataaataaattagattaatttttttttctttaatgctgaaattgataaaaaatttacaataacacctatttaaggaggggtgtaatagaaatttcctataatatctcaggaatgagtgaaagaatttgaaatagaagacaaaatgacaatactatcatcaaatagaagacaaaatgacaatactatcatcaaagttgaaatgagccacatggataacagcaattttgacagatcaccaagatcataaaaaataatgatttttttatgagtacatgaagctaggctgaagtggacaattattaatcatataattacacaaattcatacaacattgtttaaatgagtaattattcatgagtccttaaccaaatattaatacttgttttattttactccattataaaaggaatctataccttctcaattggagcattcaaagtccagacaaaacgtttcttaagtaagaatttatgcattttgatgcccaaaagcatggaatttatgtactctaaattcattattataataaatcaacttgcatgtatttttttcattgatgttgattgagacctccattatttcacttttttttttcttttatctaaaatcattttttaaataaataaattgtaatatctttctatgagatcgggtatagtactattttgtcatttaggtacaatgtcatgtcttatactctatatatgtaaatgtattatgtatatataaaaatcaaagtttgctctaaatatattatcaaatgatatttaatctcttaccctcattagataggagaatgtgtcagcaatgcaaatagtaactctgtctaatttatagtaataatatcaacaccattaacttgcaaaacaaaaagagaaattatatatagcaaggaaatagagtgaaaaagttgagcttgttttgtttaatatttgtttgtaaaggtctttttggtgtcctcaaaacctatgagctaattttagatatgagaaaaagaaagcaataatttgcagtttggataacaattgtgataaaagttagttccttttctctaaaaaaatatcatgacaccaataattgacacaacaaagccagcaaacaaaagttaggaaaagaagggtccaaaacaccataaccaaaaaacaatattttaaaaagaaaagaagaaaggaatagaaggggctaaaaatgaaagagatgggtctttggactctgtttcacacttggaaaaattcaaaaaccacaatatatatatgcaaatgaagtgaagtacgtgtacgtccattgtttaggtttggatttggattgtgacctctaaagtcacattgttcatttaattatctcacatgatcccaagcaagtgactcataaaataatcttttttttggtagaagacataaaataatctcatttcagattatttaatttaatttaaatgtaaacacactgcatttcaacaaaagttttggtctatatataatgtaagaattctccctctttattttgtcttttttattttagttttattttttctcctagaacagatattagtaaactcaccctgcaaagaagtaaataagcacaaacgtacaaaccagtttatccctccctctctctctctctctcttcaatttcatgggtacggttgagcattgattataatacggctatctctctctccactttctctccgtttgtggtaaattctgtctgtttgcctagtcttttttcttccaagaaaaaagttggtttttgggtcggccatatctttgagcttctcttcctggttagtatttctttaacacacacatatatttattgggttatacacatcagggtagtatgttcatgaattagatttttaaattatttgttaacgaaaaaagaaatttttaaagggcgattaatctttagctgagtgttcttatttttgttgaatgtggaatctaagttcaacttgccttttttttttggccttctacgatattttattatttttagaaaggtttgtgataaattgtttgctggaaaggaaaaaaaaggattttttttatataattatagttgttagtatttaattcctaaaaaagtagagctaaattttttttgacggtgaggttttgattgggttgatagtgattgttgagttatcaatggagaagaatagtttcatttaattttatacacttattatctggatgtatgacccaaaatggacagccacctttgact

SEQ ID NO: 4770 - DNA, 1221 bp, Cannabis sativa
tttttttctttcaataatgcaacacaatggttttgcaaatcggtacttcaacacaaatgatttctatctttttttttacccattaattatacttgcttgtattgtacttacaaacaaaagccttttcatttttcaaacgaaagggaaacatgtacttactttggtttgattgcacactctaaccacttgtgaccacccttaaacatagacctatcagccaagccaagtggcaacaaacaagatcccaacttcttaagcttcagatattattgctaaagactcggggccaaaatcactagtctagccacattataggattaattacaacttaaaattcagctgtattagtgttagtttgttacggtaattaggtgtacatatatttgaatttgatgagtatgggttgttagtcttttctcctttttttgtatataagaagattctgtaagcttattctaatgataaatcattttcttaagatgtattacattatttatgtcgaatcaccaaatagttacatcttaactcccaattaacaagtctcaatagaatgatacattatgcttcttcgtttataaaaagaaggaaaaatcggagtaatcttccaaattatcaagacacaacttatgtacttttatcccataaaaataataataatgaaaaaaaacttttgtacttttagatgatttatttcaaacataaatgatgatatatagtctaagatatgtaaagatgacaaaatgggacactttttcaagttacaagggttcttgatatagttaaggcgacttctaagatagatgtgatctgtattgccttatcattaaaagaatcgaatcaaatcacaattcgaccttgattatataataaagacttctaagatagatcgtgatctttaccgccattaaaagaatcgcatcaaattacaactcgaccccgattagtttttttctttctcattaaccctttgaaaaaaaaaaaaaaaaaacttagattaatttaataagttttgaagctaggtgggaaaacatatacaaatattcattctagcgttttggtatgtaattaaaaaaaattgaatatcttcttgtaaatatatattggcaagtagtaattaaagtataaattcaaaatcttctctttaacaaagttatgctaaattttacttgtatgaaattattagttaggttaaaaaataaaaagaaactattgtattttcct

SEQ ID NO: 4771 - DNA, 771 bp, Cannabis sativa
aagcacaacatttatttatttttattttgctcatctttttgtagatatgcaggctttttctgtccatcacgcttacctgttccctatcacaccaaattattaaattattattaattcatttttaattataattttctcacttttctatctataaattattattattattttttttttaatgtgtgggactaaccaattttggcactttttactcattattcatgaagatctatcctgccaatacaagaaaaaaaaagtaattaatttgatattaattataagtggattataatacaagcaaactagggcaattaattaattaacccacttttgtatgatttatgaataaaccctagctagctatttataaaattcccatttttgggatgagataaattatctatggaattttttctctaaaacccaattatatagaattgtttaattaatttatatatatatatatataaattgaaggttactctccttgtttattactcctcctaattaataattaaaacaaaagcagcccatccatgaaggttgatttgtgctttattattttgtaaaggtgtgaagatcataataatatatataaataaataaataaaagctaggttaataattaattaaagacatccaccaaaaaaacttttttgaaagaagaagaagaagaaatgaattaaaagtggtattatttgggttgagctttttaggaaaggaaaggagacaagagctaaaagggtgtttatatatgcacatctttcaacc

SEQ ID NO: 4772 - DNA, 914 bp, Cannabis sativa
tgctaaagtggagagtagcagccacttccgccccgtaggcgagagctgcaatttcacctgcaagagagtcacagtaattgagtttgattgtaaacaaaccaatgatttcatcttcctcattccagaaaattgcagcaccagcggaagagttgttgtcgatggctacatctgtgctgcatttcacccatcctggcggtggggaaagccattgtggctgaggaattgagtatgtttcatggtgcgccaaagcttcctgcaaccttttatcgattggcctaatcactgcagagattggagaggggtgagcgtcgtggataatgttattcctttccttccatatgcgctcgaaaattattgctgccccttctaagaacatgctgaagcttaatcccaatggacggttatgctcctccttgaagagcaataaccaagagttccaattagtgggagagtagttctctgttctgaggtgccaaagacttccaaaccaaactgctcttgcgaattgacatgaccaaaatagatggattgtgtcttccaccttgatgccgcacaggggacaatttgaatcatccactttgaacagagagcttagtttactacgggtgagtaggtagttagctaatatcttccaccaaaacatctttagtctattgtggattttggccccccagattatcctccatttggaatcatccagactcatcacccccatgttcttaactactctgtaggctgacttgatactgaatttcccattagcttcaggactccaaatccaagaatcctttgttggttccagaggcaacgttatgttgagtattcttttagcatcatcacagttgaaccaacgcctaaccatgttctcatcccagcggttggcggatatgaagttgctgacaagactgacgtta

SEQ ID NO: 4773 - DNA, 2739 bp, Cannabis sativa
gttggaatataaataggatttggtgatatatctttttaaaattgaattatatcatagttggaatataaataggatttggtaatcactcgagaatatatataaatagtaagcaatgcacagtgacttgtttacttatgctcgattcattttccttttaaatttacttacacagatcaatataattaatcaaactaaattaaattaagatatcataattattattaattaatatggaggatgtgttgcatcaaaggagaatgattggaaataagtacgaactgggttctcaacttggcgaagggacatacggtgttacatacttatgtcgagacttagtgacccacgaaaccctagcttgcaaggccatctccaaagctcatatggacacaaaggtaattaatattataattaaaaatatatactaatcaactagcaataataataataataataataataaaatgttattgtacatatatgtaggaggaaattgagaatatatataatgaggtgactatcatgatgaagttgccagatcacccaaacattgtgaagttaaaggcattttgtgaggacagaaacaacttttacctaattatggagctttgtaaaggaggcgagttggtggatctaattaaggctaaaaactacttgagtgaggcagaggcagctcctgtggctaagatgatagtcaaggcaatcatgacatgtcatactaatgggatcatgcatagagatttgaagcctgaaaacttgttgttccttaacaacaaacaagactcgcctctcaaactcattgattttggattttctgccttttttaagcctaatcaaaggttttcaaatatagtggggactctgtattatgcagccccagagattttgagcaaatggaagtgtcatgggccagaagtggatatttggagtgctggagttatcatttacattatgttgtgtggtaatttcccattttatcctgaattctcagatgattcaagttttgatcatagcattactcagatgagttgtgctattttaaaaggggacatagattttcaaacacagccgtggcctcgaatttctgagagtgcaaagagtcttataagacaaatgctagagcgtgatccaaaaaagcgtttgactgctcaacaagtgcttggtaattaactattactaattaatctatgaatatatattttttattttctaattaattttatttttttaataactttattaatattggttattatgtttattattgcagaacacccttggattcaaaatgcataacattaccaaatgatactgattcagtctattctaatatatgcttttcttttcggtctcaattgttgtaacaaagagttcaattcaagacggtcgatgaagaagaaaatactcttgtcttaattgtaataatcatttacttttatgtatttaactctttgttttgtttggattaatattgattatttcacaacattctatttcatttgtatcatttatttcaactccaactctttatttattcatacatacatgtatgtgtgctattctacttaattaattaatttctgtacaattataacaaacaaatgtcttaagttctcttgttcaaaataattaaattaataaataaataaataaattgttagttctcaacctagctagctatataagtaccaataacccaactaataattaagactctttattcattcttcaaagaatataaaacatcatattagtagaactaaaaaagaccgagtaaatttggttttcgaagatttatcttttagattagagctacaaaaacatttcgaacttttgacaaggcatgaaccaattgcaaacatgagtttggaggcacaaacacgcgacacaacaaaatatatatagatttgtgtcaaaacagtgatgtaaattggaaagacatgatatatggacttgagcaccaacgataaattcaatactacagtaagaaagcacaatcatattagtatgagggcacaataaacgaatatataaagcctaagaccatgacacataaaatgtccaaattaaatccataaatggttcgtttggtaagcaggattagacatgctaatttgtctaattcagcgtttggacatgttgaaagtctggataactaatccagctaatcacatctgtgtgggataatttatcccatccaacagggtggcataaataaacccacatacaggtaagatttttttatcatttcctaattttgattttgttaatatatttaattttaaatttaattaataagaatataaatgaaaggattattacaatttttttatcaaaaacttattagcatgatccaaaaaagtgtttgactccgcaacaagtgcttggtaattactaatctatgcatatatataatttttgttttgtaatgtgtctttctaattaattttatttttttaattaactttattgattgattatctatatatatataattgtgttgtttttttttttttttgaaaagaagaagaaacttcattaacataagtcatccaatagcaaggatgaaatttcagatggcaaagtagccacactgaatgtacaatcagctgtatgaacagaattacgagccaaagcatgcgcaactttgttcgcggatcgcttaacaaaaacaattgaaacggacaataaatctaccaaaagtgccttacaatcataaatcacaaaaccatatggagaaat

SEQ ID NO: 4774 - DNA, 755 bp, Cannabis sativa
cccaccaaagaaagaattaaacatgtttaataaatgtacaacacactaatcttacctaagacacaagtattaatattttagaattttcaattatgaaaataacccttttccaaaaatcattcatatacaacaacaacaacaaactcattgaaataatctccatatcttttctatttttcttataataataaacaaaaaatttgaccaaccaacaaattcacctacccacttgtttattgttccttttcctataatgtaatttaatagtgaaagggttaggtgactctcatttccctgatgtgtacataacgtggactccagcacatcttatgagcaatgagaatcacccattatcttatatacaatataaatataaatatgtatatatatatatatatacgcacacacttaaatcaagatacagtatcattcatgtcgtttgtgatattcaacgtttgttttaattgattcttaagcaactagtatatgtcacatccacaccaaaacaaaattgtctcataaaaaattaaaccttattattgtgaaactgaatatgcaatctactagttttttttatacatgaaagtacaaacaggagtattactattaatactaatgcagagaaaattgtatgaaatcattttgaggggttttttcccctttatggacatgggaatcaatgcaatataatggtgccaattatttgtgtcactttttaatgccaatcccaatatgacatgggcatttttgaaagg

SEQ ID NO: 4775 - DNA, 1185 bp, Cannabis sativa
ggcgctatgcaaatagtaaaaaatcatgcaataggtgatacttaattccttttagcatttctacattaacttaggaatttgcacaaaacccataaaatatataatttgttatgattagcacaagcaaatagtatgccatcatagtgagttttattaacaaatagtacgaccaataagcaggacaaggtagggcctttctgtagagatgcagcagattgtgctataatattggatgttattagaggaaaagatccaaacgacatgtcgtctagagacatgccttttaaggatcctttctcagtggacattacaaagttgagagtgggatatgttgaggatgctgaaatggaggttgtgaaggtgctggagtccaagggagtaaagatggttccttttaaactaaattacacagtggacagtgttcaaggtatccttaacttcaccatggatgttgatatgttggctcactttgacgagtggcaacgctctggatctgatcgagcttatgaagctcaagagcaatggcctactgagcttcgccgggcacgcctaattccagctgttgactatgtacaggtaacaaaatcttatatgtctagaaaaatgtttgctatttaagtggcttcacaagttttaatttaagtcccaatgcaatttattagtacaaaactaatgaagtttgctttggggtaatgaaacaatttttattctatttttggatttggtttcattttaaattattagaatgtgattttaatggaataacttttttattattttagtagaattagtaatgcaagataaaaaaaacattaataatttttttatacattttaaatttgattaaattacatttttattcctattctcattcttatttctattcttatatttttatttatctcaaccaaacatcactttagaaaaaaaaaacaaagaaaatagctagtatagatcaatgaataagcaaatagttataaagatacttaagtggcgttttattagaggtaatgaaatacaatgcaatagaaataaaataattgttattttatttttttgtttggttatattttgaagtattgaaatatcattccaataaaataaatattccatcattttaccgaaatgattattttattttaaattagaaagaaaaaaaaaattccaatagaaaaactttaataa

SEQ ID NO: 4776 - DNA, 1481 bp, Cannabis sativa
tttttttattatcaaatttttaatcaagaattaaaatttgaaaaataatcactttctaaatttttttaaatatttttttctcaattaatattttagactctgacacgaacttagaccttagaatttgacaaccctagccgcgaccctggaccccgacccagccccgataccagttttgcattcaaacctaacttaaataaaatcaacaaattaatgaaaatgaaaataaaatttacagaacatatttttgttttctgtttttaattaaattgaaaaataaaaatcgttataaaacacatttttgtttttaaaaatcaaaattttataaataaaaaatttacttttatttttgtaattaaaaatttaaaaataaaaatattaccaatcgccacctaaatatagaaatattataaaataacacatgtatacagtataccgataaaacaagtaataataatttgattaattggcggtaaaattctttctatgttttaacttttatacattttagttatattttttttcttgtggacacttaggtgtcgtttcaatagggaagaatgaatacataagaaaaagaatgagaattgaaatagaaacatgaatggaataaaatttaaaatacataaacaaattgatattttttttcattatgtattagaatgattttttcttttatcttaaaataaaatagtcattccaccaaaatgatagaaaggtcattccaatattaaaatgacattctaatactttaatatgcaagcaaataaagaaatagaaggaaaattatttcatttgcatttccactctatttcattacctaacgccaccttaattttacttttttttttttaaagaaaaaaaaaagaatgagatgctatttaaattttactatcaaatgttaactttgattgtcattgtgtatagatgtgtaccttgaagctaataaatgtatgcagcctatatataaatgtatacatggcagtcttagttgttatttaatggtgagattttattagcacctcaaatttataaagaaaaataaaattaggagattttattaaaaaaaaaatataataaattaaatgtataaaattaaaatataaaaagatttcaccctcaatttaattatactgcagataataattattggggagtgcatgatgagtacacttctacttcaatcattcatgtactttattttaaaagaaaatattaatagttaagaaataaaaattgctatgataataagagtaaaaacgaatatataatatatacaaggccagaattgtaggatgaactctttgattaattttgactggaccaaaaatataataataattagtgataaagttaaaatgattaaacgttcaattttttattgattgaagttagcgtgtacggattttctttgcatggctgaattagaaaccaaacacgatcagctaccctctgaggcttatgccgatcgagtactacta

SEQ ID NO: 4777 - DNA, 918 bp, Cannabis sativa
ggaggttaaatgccgattgggtttctaaaaggtaggtgggggttggggaagacgaagtggagagagagagggtgcggggaaagagagacaaacagtgagagagtgaaattttaattaaagggcaatttgggtatcttggaaaattataaacatcatttggtacaaattagtttagggtataaactttgataagaggtattttattaagtattgatagtgaaatttcccttttgaaatggataaaaattattatttagagtttgacaataacaagaaaaaaaaaaagttaataggacttaagtttgtcccataagaatacaaatctagtactagagagtgctttggttaggaagtctgcgagttggccatatgttggagtgtgttttctaagcaattgcttgttaaggattcgtttttgaacaaaatataaatccagctcaatgtatttggttgatgagacatgaaaaccatgatttggttgtcataccatatggttgaaggttgttggattttgataccaacctaaaaaaaaaagtgactaaatccacttatttcaattgtgtattgactaaggctgagttactccgcttttgtactaaaactggaaattgttcttgcttctttcaagaccaggagataatgtttgggcctagaaaaaacacaaaacccagatgttaacttcctattattagggtcgaatgcccaattagatcagcataataaaaactagttattgtgaggttagaactaattttaaggtgtaaaccaatgtctgtgcttattatgcatggaaagtacttaaattgccaacataaattttatttggatatttttttttttcgaattattaaacgagagctaaaatgaattgaaaattacataactaaactatcccaaatttttgggtagagcttttag

SEQ ID NO: 4778 - DNA, 910 bp, Cannabis sativa
ctttcttttcagcaaccagagcttttgaagttgaaagaggaaatgtcacgcataaactcaaaaatgaagagaagcaagaaggagcttgataaaaaaagggaagaaaaaaagaaacatgcggctgaaataaagcagctccagaagggtgtacaagatttgactgcaaagctagatgataatgaaaaagggcgggatagtggtgaaaaacttaagttagatgacactgcgttaagggaatattttcgaatgtaagtgtttttaattttgctctttctagaaaggtgtttttaactttggctttgccaatttgtttcccaacctgttttgcggggttagaatgcatatgttttttttttcattcttatttttgattttgtatagtactcgagttttcagagttcttaatccatacttagccataatagctcagatataagtatgtgcttgataaccttttttatttttattatgatttgaaatgttgatttacagtaaggaggatgctggcatgaaaactgcgaagctaaaagatgaaaaagaggtcttggacaggcaacatcatgtcaatattgaagctctaaagaatttagaagaaaatcttcagcagttgaaaaatcgtagtagtgaacttgatactcaggaggaacaaatgaaaaaaaggctgaaaaaaattgatgattcgtcctcaaaacataagagtgatctcactgcacagaagaaggaactgcgttcgatgcatgataaacatcaggatgccaggttggtattttatttatttttttacttgagagaaaggtcgtcaacattaatttgtatctgtttaagtttcagtttttttgcatctagctatcagagttatacatgtgggctggtgtatttcagtttctttatggaccggacatttacatat

SEQ ID NO: 4779 - DNA, 1694 bp, Cannabis sativa
aaatcaaaatattaccaatcgtaatcggatttatcattttctgagtttaaaaattcctcaactcggctctttcgctgcggtggcatagacgagacactctttgaaattggcgatttcggactgttattcgattctgcagaatatcattcacaatcacattcaatgccaaaaacaagaacaaacaagaacaaacatatatatatatatatgtatatgaggaaaaaacgacaccgtaccaagaagaagatcatcgagctcatcagagttactattatcgtttggaagctgaagaagaagaccattatttgcttcgttctctttctccaatcttctcatctcgaagaataacgcaagctcttcatctttctcactcatcaccttccccattttttctctccttctctctctctctctcaaaataacaaaagacacttccttcactgttcaaacctctcaaaacacgaaaatggaaacaatcccagatctgaaactgagaaaactataatgcccaaaaaggaatagagtgaaaataatgtaaaaaaaagctagctattattaatgatagaaaaagagaagtgagattttaatgttacgaaagagaaaaagaaccctttttttttcaaacgaaaacaacaaatctaattaacgctctttaccaccttcttttagctccaatgatgactatctttttcaaaaatggcgttcaaacaaattttataccaagaagagttgcagagagagagaagaagaagaggaaataaaaatggtatttttgtaatttttatttaattttcgtctaatgtttttagaagactcgaagagcggaatacttcatttaattactcttttattttaataataataataattaaaaaataggaaactgaaaaagacccagatagaaaggatttgaaagaacgtgacttgaaattccgaaaatacccttacgtatttatggtccaagtgtgacgtggcgtattcattattctcttctatacacattattattattattattattattattgtatgtattgagaattgtatgtcaaaccaagccacgttaccagaaaatataaatatcaaaggttatggtttcaaattttcttttttattataataaacaattcttctttcaaataataataataataaataattctctttacaaaataaaaaggacattgatgattcaccaaccacatggttatgactttctcaagcaattaaaatgtctgaaaaatcatcatctaatttattactcaatgctagggttatttaaatggtttttaacattgttgttcttccaattcatggtgaattgatcaagtagttttgagtttttgtttttagccaattttttaagttataaatttctaattgtgtaacatcaaatcgttgcatcaactagtggggtggataaacaataaacttaacatattaataaatttaaattacttttttaaaatttttgtaatataactatctaattaaatattctaatacacaactaaatatagttataaaatttcaaataattctattttttttttttttttttgctagatattaattaaattattttgattaccaagtgcttggcctttaccattactgagtggtgctacaatgcacatagagatacagtgtgctcggcctagaaaagctctctcttttgcagtgtggcgtaagct

SEQ ID NO: 4780 - DNA, 749 bp, Cannabis sativa
tttggggctgtgaagattaaaaccttgaagtaataagaaaacagtccttgtacaaacaatgtcaaaatctatctctttaccatgttcacaatcaatatgtagttttagtattttcaatacatgaattagttgtaacaatattcttatttaaatgacagtgtataatataattacaagaatatccaacaattttgtaagaaatttcggataattgatgatgtcaaaatcatgattcaaacaatatattgcgcgtttgtataatattgaaacaagtaggagtgcaatacactattttgtatatcaaaaatgcagaacaaattttatataaaagaagatagaaaacatggaaggaacaattataagcaaactcattaatctgcatttatcctattattaactaacataaccatccttaacgacagggccgacccaatgtatagataggttaggtccgtacctagggcccatatttttctggggcccaaaattaacaattaaaaatctctattaagcttttatttaagtaaaattaaatgtattgtaaacaacaaatattcatagcttagttagttagggtgtatgacatattatacaatgtcacgggttcgaatctcatgacccttaggcttatatattttcagggccgaccctacttaacagtcagttatagttaatgacaaaaatgaagtaaagggttgagactgttaccgttaatgtatctccttctgcaaatgtaatagccaatcaaa

SEQ ID NO: 4781 - DNA, 869 bp, Cannabis sativa
tgagatttaaactggggtttaattgatatatacatataactcaaaggatgttggaagatcataagacatcattctaagaacattttagtaattttccaggaccccgactacaaattcaagtttgaaatatctataaacagaatgcactaatcagaatcaattatatggaaacttgtacagagtcactcatgaaaagttagtttgctcatgactaattccattatagtcaattttacaaaatacccttcatctcatccaaccaaattcagaaaaacagaaagaaaattcatagtttatcgaattaattaccacaattcggtcttagaatgggaaacatcggtttgaatagaaacatgcggaatcagaaccagttgactttcatctatactgtaaattgcatgaccgcatacacatccaatttgccgacgcttggtgaccagaatcaggtaataagattccagaaattttatgcaacctaggagaaacaaaaggaaataaaattcagattcaaccagcatataaatatgtatatgatatcgaaatttaccaaagaacactgacctgcgataccataaaccttggtaacgaagtttaaaccaccggtggcacgattgccttcggcaatccgctgaaggaggttcttaatctcctgcgaggagtacacaactgggtcttcactgagattgagatcggacggctccgaacgatcaatcttcagaacccggaagcaactcaaaaatatggaattggatgggttttctcttttcttaaagaaggagattagtgtgtatgctgaaaaatagactataagaatagcgtaccgctctggtttcgtatagacgaaatttctcgagggagtaggaggtgag

SEQ ID NO: 4782 - DNA, 3653 bp, Cannabis sativa
tttcttttatcatagattcgtgaaattcggttccagtaagtgtggtccagagtgtgaatttttctcttgtaaacctcattctatttgtgttgaacatgaatatcttgtattaatcaaatctaaataaaatggtgaacattctagcctgagctggtaattatttccaggtttggcaccgtagaacttttcaaccctcaggactttttgcagctcgaattgatctgcaaggctctactccggtatgtttgcacattgatgttgaacttattaattattaaaattgttgtatctgatacattaattttctttggacatgcacttttagggactacatgcactttttcttggagaagatgatacttgggaggcttggataaattttgatgtttctggcttttctagcattattccattaggtggaaatggagtcaaattaagacgtggatactctaaatctgactcactaaaaccaacgcaggtcatttctaatgctctaatagcaacaaatatttatcaccttcattattctgtatacttgttatgaatcacaccttttctttcacttgtaatcttcctctgttttggaattatcagaaatatataaggttgagaatgtaggtataaaattctggatatagtatactatttcactaatttccattatgtgtggacttgactttaactgttctttcttgtcctgtttctttacaatatctgtttatctaaacaatttattatggacatttttgtgaacattaatgtgattcaagtcaaatttcttccatcatctgtagataggaaaaatgaaaaaaaaaacaacgtagctgccttctaaatatattctcttttgtgttcttcttacataggatgatttgcgtcagcaaaaagaagaggaaatggatgattactgctcacaggtatatgcatacgtttaaattatgagtatgttactttagtttgttgatattatatctgcacacgatgacggcacttattttattttatgttttatcctaaccaatgttgtactgttgtttgcatgaactttttaagtttgctcaatgtataaaacatcactgtatgcagatagctactaatgtagatgagtgatgatttagggtgcatgtaatttatacttaaaaacttacacttaattatgtagcatatgtttaatcacttattgcaaacggccaccacaccatgtacaattgatggttaaaagcttgtttggtgtgatttttttgttatgctgtttggttgcaagttggatctgatattgcattccatatactgtatcaccaatcactattactgttataatcctatactgtattataaataaacagatcatgtcaagaattggatgctttgtgaagcgaatttgtcatgggctctacagcctcaatgaaattgtggggacgaagttaaacatgctgagtgttttcacattgcttcttgtgatatttctttgcaatcctctaagaaagcagaggagtgtgaaataatgaaataaactcattcaagtatctaaaccagaaagttttagtaattagtcaaattctaattttaagatttgtgctactgtgaagtgttccatatagtttgaatctcatcaaactataaatatggtgggttattacagagttgggagtataaaggctatttcttgacattggaaacatttttctttcatgcgatttaagtaattcgaatttttagctatcagtagtgatatttgattgtaggaatcggaatttaaaatttctactggtgtagcagtttatttgtcctttatggtttaggtcacagtgatatttgattgttttccaagagattaaagttacatgttttggtcaggttcccgttcgacacctggtgtttatggttcatggtattggccagagactggagaaatctaatttggttgatgatgttggtaatgtcagacaaattactgcaactcttgctaagcaacaccttacttcccaccaacgtggcactcaaagagttctttatataccatgccaggcaagtgaataattatttcagtcagtttgattcctgaaattggtagaaaatagataaatttgacaaatgtcactctattgatatcaagaaacaatctttcccaaggtttcgagtaatttggtgattcccaagtccgtcccaaccagagattaaatctctaatctctcaataaaccactcagctatatatacatttaggagccttaaacttagtgacataaccttctaattagtttgtccagtcagcattaataaaatctctcattaatttagtcagcaataccaataacatagaactaaaccagtcctaaatacaactaggatgctaaattaatgaaactaaataagtggtgtgtggtgtagctcttctcctagaatacgtgtatcgaataggaggtctaacagaaattgccgtatctatcactaaatgatgatttagtaattacctgacagaaacaatacttatgcctgcttcatgaagatcttattagtaagtacaaaatctgattcaaacatgtcctgaaaaaaaacaagggattgagtggttatgatgacatgttagttatgaaatttgaatatttgctagatcactaataatttagtatgaaagatcaggttaaagtttcttttttgtatgtgtggggttggtttgagattttcctcttctatttatttatttaagttgctgaaaacagttatgtttatcttgatacttaggtgattgaataactctgctttgtgttatgtttgattcatgagtagctgatttatgtatcagtttatgtattacatttatgactttgactcactcagctgtcatctttttcacgtttcagtggagaaaaggtttgaaacttagcggcgaaagtgcagttgacaatattacattagatggtgtaaggggattacgcgtgatgctgagtgcaactgtgcatgatgtattgtactacatgagccctgtctactgtcaggacattatcaactcggtactgtattcttaatttataagttactgcttcattattaagtgttaaaaggtgtcctttaacgtatttgctatgttcgatttcctggtccatcattgtgatgtctttattgttgggttcttattgactaatgtgttaaaggattatgtatatcgtagcactcgttattttatgtttttttcttcctcacttctcacatttcaaccaaaaaataggcgtacagaattaagaaaataaaagatggtatgatatcatctatgggggcatcctgctcagattcttcttaaaaagagcaaaaactaacctagctgtattagatgaactatctgtcaagctcttgcccaattggatttatttaattactatgcctatagaaccagttgataattcccaaatgcgatttaataactatatttcaccacctcagaggccagctacttaatttttcttttattactgataatccattggcacttttcatccagccattattaggttttctctcagagctgttttagctatctttttttgctgattgcttagttgggctttttgcttgttgatatggcatataatgcgctttgtcagagttagtaagaggaagacttatcatgaactgatgaatagtttctttttccct

SEQ ID NO: 4783 - DNA, 1171 bp, Cannabis sativa
tttttttttttttgacggaaaacctgtatccattaacaaataaccaagagagtacaggatacaattacaaatgtagagaggaacacttccataaagcttcctgatctaagcctaaagccttcctagctaaacaatgggcaacttcatttgcctctcttgggatatagctaataaaggctctaggaaagtaagatagtaagcttttgattgcattaacaaaaccattgatatgcaggtttgtgagtactattattacaaatataatccactagaactttacaattcgaaacaatgctatccgggtagatagagtgagcatgacaccaagatatggcaaagaacaatgcatgagcttccattaaaagaggttgttgaattcctttccaaggcatggcaatatttaagagaacctcaccgttgtgtgatttgatggagagaccaaatcccattttgcaatgttgagcatcttgagcagcgtccaccgaaagctgaagagaaaaggtggaaagagcaggatcatgggcataaggtgttgaagtaaggtccggcgaaataccagcagcaaggtaatgagtgttgcaatctttgtaatgagcaagatagctctctgcttcatgaagcacctgtacaggagggaaggacataccagcatggagccaactatttctgcagttccagagcttccacaatagacagacaaaaatgtgaaagttttcagtagtaaaagtattggcagccatatataatacatcaaagcaagtaaaagatatatgtttatcaataaaaccaataaaagtagttagatcccatacctcctggacagcagtacacttgaaaagagcatgctctagagtttcatcatgatagttacaccgtacacagcgtggagaaggaatagttttccgcttaaaaaggttatggctagtaggcagaatatcatgacaaacacgccaaagaaaatgtttcagcttgggtggcaaggtaagggtccaaagagatttccaccaagcttgagaggtgtgggtgtcggaagggctaggttcattatgggaaagttgacgatgggcttgatgataaccagagttaacaggtgccatgaggagtaaaagaccaataataagcgtcaatggcagggaggtttgtaaggggaatagataggatagcttgggag

SEQ ID NO: 4784 - DNA, 1169 bp, Cannabis sativa
aagagagaaggagaggaacaagacgaagatggaaattgtgggtctttctgcttttgtaattggtcaaaagagaacaaaccaataccgatgtaatcaaggcaggcatggttggacaatgaaaggtggtagtattcttgatctcttatatcatcaacttgatgagtttcatagtattgagggtaggctttaatgaactcaaggaatgactcttctaaagaaggaagagtctcatggttggtgaagcgggtatttgggaagatggaagctgctgtggtttgcacaaaatctcggcgccaatcggaggaagtgctgccggacttggagactgtcttttgtgactctgtcacgttgaacaagggtgttgggcagcagctgtagaggaatacttgtgaggcctctttcagccttggagagggcattttttcttcttctttatttcaccctttacctcaaaaaaacaaatgttttattatctttgttatgtattcactgtatagtttctcgaccaatcagctttgtagtcaatcatttcgtcggccactgtgctttacaggattgaagaggctcccttttcttttcttctctttttcttttgttgttgtttaattgggttttagaacataaaagtatgtatatttgtagaattcttactatactttagatgtgtgtggaaggtggattgggcaatgtgaatttcccttcatataaagttgactttgtctttcgtttcgcttggttgactctacccacttcgaatggctctttggatttagccggtttggaattgttttcaatcaacaaaggtccttgatccactactgataatccaatgccaagtgtgacattagaagcctcgtttgtcttgcaacactcttttggactgtgctaaaatattagataagattattttactgtttttgaactgtattattcttggagttggtgcaggtaatactaaatttatatataaaataattaaaaaaaataaaaaaaattaaattagtaaaataatacacttaactttagaaatttaaccgaacgaaaagtggtttaatcaccaatattcttttttactatatatatatatatttaatgaatacgtatatctaaattaaaaaaaaaaacagagtaaaataaaatcgtcaggactataatttctgactagaaag

SEQ ID NO: 4785 - DNA, 5222 bp, Cannabis sativa
cttgggccggggtccgggtcagggttcaaggtccacgtcctggaccggggcaggctaaggtccgattttggggtccgagtcaggattcaggtgtggggtccgggtcaagcctgggttcgtgtccgtgttctgacgtccgggtccaggtctaggtaatggggtccaaggtccgagatccaggctccaggttccatggtccgggtcaaagttttggcatgtgagcgaaaatgtaaaatataatatgttagacaaaaaaattatttttgaaaattgaaaattacattatgatattttctgttttttaattttttaaaactgagttttaaaaaactgtttttaaaaaatttggccaaacgacccctattagtttttaaaagttgtttataattttaaaaactgaaaacagttttaaagttatgaagctaaacagcccctaatattccctacttggttcttataatctccatgcccagaaagtatcttatctgacaaagatctttcacatcaaattcttggtctagcagtcttttaagctccttattaaggtcatttctagttagaatcatatcattaacaaagataataaaaaacacaatcttactatcttgtgagtgtttgaagaattatgatttgactgactttatttgtacccatgcttcttaatcacttgattaaactcctcaaaaccatgctcgtgatgactgtttcaagccatagaaagatttatttaagtacatcttgtctctattccatattttccttcgaggccaggaggaatcttcatatagaccttttcttctaaaattcagtttagaaagacattcttaatatcaaattgttccaatggccaatcaagattagcaactattgataagagaattcctattgtgttaagttttgccactagtgcaaatgtctatgtgtagtccaccttgtaagtttgagtgaacccctttgcaaccattcttctcttgtatctttctaagtaccatcaactttgtacttcactgtaaatactcacttgcatcctaccacatggttgtctttcagctgagtaactattttccagagtgtatttttctccaaggcccatgaacataggttgtgcaaccaaacgttttagtggaatatcgaagagtatgtgagtacaagaataaatcttgagaagagaagatattggagtttgatatagtaaaacacaaggcattccattgattaaagaagttgcaatcgaaacagcttttccccaaaaaatcttacgaacagaagtagtaatcataagagccctagcaacttctaacaaatgtcaattttttctttcaacaatcccattttgtcaggagtgctaacataggaactctgatgggcaatgccattagagacaagataatcacctaagattgaattaagatattctgtaacattatcaatgtgcagatcttgaagatcagcttgaaattcattttttatcatggaatgaaatttttcgaatgtgagagcagtatcagatttgtcttttaaaagaaatacccaagttaaatgagaatgatcatctataaatgataaactaataagtattagagatatttttactgtgggatggcccccacatgtctataagaatgagagtgaaatgatgagatgccctatacgaacgagatgaaaaacacttcgagtatgttttggaaattgacacacttcaaatttaaataaacatgctcaagtgttcattttgaaacagactagaaaacaaatgttttagatagggaaaactaggatgtcctaatcggtaatgccatctcataatatcaatatcataagcagtataactagaatagaaccttttattacccggagtagatgatggatcaacatcaaagtaatacagcccgctacattctgtcgtacttccaatcatcttccccaaggacatttccttcaaatcacaacataattctgagaaccacgtgttctgtggtgtagtggtagagatgcctttactggcatctttccttgcgtgagtcaagagttcgaaacccaccacaactcctcttgaaaaggattaaaggcttggccttctgaaggctagcttgctgtgggtggtgtcatctatgatgggaaccctctcgaggtgactaccaatgactcaattaaggcatactgaggtataagacccttatagctgacacgtggtccctgggattgtctaaatgacagaagggaaggggtgggaagggatctgcaccacatgatcctctttttttttttttagatcaaaaaaagaaaaacataattgtgagaactttgcaatacaaccttgatcaagggtaagttcactaattgagaggcgattacaagatagatttggcacatggaggacatttttaagagtaaggaaagtagaaaggtacattgaacctttaccaaccacaattgatagagagccatcaacaatttttgttttactagaacttggacaagaactataagtaatgaacagttgagattgaccaatcatgtggtcaaatgcgccaaagtcgattatccatgatggggtttaagcaataaatgcagcataagtgcttggagtggaggaagatcataaagagttcaatctggtgcagaagtcgaatcgagcagcttatgaagttgtgcaatttgtggtgaaagggaatgcctcaagttgggtagtgatcatagcatgcccttcaaaattttaataaatgttatatcatagcatgccaaattttacactacatttagatcttatattgtagatggacttatagaagagtaaaaccctacctttgactaatttatggaaaaaaaatgtcaataccttctatcttccatatccttctattgagaacaagcatacagagagtaaaagaattttaaaatggatagagcgagttttgccaaatatcaacatttaggacgctctttgaatctttcataaaagatttcaaagtcttttcattttctaagcttgttagagtttggcagtttggtagtagtatgtgctaagcgttattattataagcttataagggtgttttaggctttttcttccccttattttcatgttattttattatctctttccgtttataaaggcttgcttgttattattctggtaataaaaccttttgcaatagactctagcctgcctctacttttctctcttcatattttgcactttgtcttttggttctatggatgagcatgctttgcataattattccagtatccagacaaggtttatggaattgattttgttcagcgtaaccataactttggtacgggtggagcaccatggcagccatgagtatgtgaactttgtgtttaatttggaattttaaggtttcattagattgtgaaatatgcagtctattgtttgagttagcatttgaaggtttattttgtttctgcaatgggtagtaatatagatgatttccttcagtccattagcattaggttagatggaaagaattgttcgtactggaaggcaaaaagatgcacagttatatctctcgaactatggttaaacccacaagtgatattatgcaacttttttacaaaattgagaagtgaataattcgaaaattatcatttgggtaactttgtaaagataggtacgcaactagccaagtatgagacaacaaatgaagtttgggaacatcttgcaagattgtatacacaatctaactttgcaaagcaatatcagttggaatccgatattacagctcttgtatcgaaaaacatgaatattcaagagttttactcaattatgacatatttttggatcaattggctattaccaagtctatggagctacgagctttcgcaccttatattgcttgtagggaaaaacaatgattcgtcaatttttaatggcactttgtgatgactttgaagaactctgtgactcttatttttcatcaaattccatttccttcaatggtcagtgagttgttagtagatgagattcgtctaaagtctcaagagtagtaggaaaaggcattcttccaagttccaacacctaatccctttgttttggcaattcccctagacttttttcccaccaagagaataaacttaggttggggtcaatgaatgcagtttttgcaaacaaaatggtcgctacaaggcccaatgtccaaagtcattgaatcatgcaccgcagcaataaagttagcagtagtttagacctcctcatcatggaaaccaacgaaagttcaataatccatcgcctgcgccctccacagtttaatgttgttgcaaccatacctccattcaatatctaatatctggtgtgatgatagagtctttcttttcagatactatttatctatcatccttattttctagaaaaaaaactaggtcaagctaaatcttcaaaaaaaaattctagttttttcttctacacattctgaactcctcctttctctcttgtttttgcatcgataccccccaacttatgctactgataaaccaacattaatgaaaattgagtaaaaaaattgtagagacttaaccctaaacttcagttaaaattattcatgaacattattgtagtccactaaattagcttcagcaaaggcacaatacatgatgaaaatgaagttacataccaaataacacaatttctttctcaccacaaatgataaaaaagacacttacaatctttccatccctttttgcttcttccagcttctggtcccaactttcttttgtattgatgatgatcacattgctatcagcaaactcagcattatgatcagagtcatctccatcagttttaggctgcaagaatattgaatagaattaatcaggtaagtgctgcatactcaggggcagtagaaagggaaattcatttaaactacagcagaaaagaataagcttagtgcacacattttttttttttcgaaaaaagcttagtgcacacatgactgaagttataatcagaaaacacaggtgcagaacagaatgtcagagagaatttgttgaaatacactcataaaattatgtcatgataagaaaaaaaagaaagaaagtccttcagaaaagatcctttatgaaaatttgataattccaattaaaagagaaggggcagttaaaaataaaagtacagcactttcttcttgtaaaaatgaaattaatttctttacccgtcctcaatcaaaatttatatagcccagaataactgactgattcaattt

SEQ ID NO: 4786 - DNA, 1055 bp, Cannabis sativa
taatctttttctttctaggtatgctgcaccagagcagtacatcatgagcacacaaactccatctgcaccctcagctccagtggcaacagcactttccccagtcctatggcaggtgaaactttgaaccatctcagcttttttttttgcttcacttttttatttctttctctaaagaaaaccgagtcggctcatgattttgaataaattattattttcagatgaatttgccggatagatttgatatctacagtactggtctcatattcctccaaatggtgagtgtcgaatgttactgaattaaagctgttagttctacacttatttactttgatagtttttatattaaagaaaaatatgatagtacgtatttcctactatcatttgttatttgttaacgctttcaagctggaagaaaactgtgggattttaaaatgattaaatcagaagagcctaaactgtttaattcatgtccacgtgcatgtccttatgtacagactgcatccatatgtaacttctactgctaccactcattatgtaggatctcctctgcaacaaaatgacaaacaaatcttcttctttttcttcttcttgtaggcatttccaggactacgaacagacaacggcctcatacagttcaaccgtcagctcaaaaggtgtgactacgacttggttacatggaggaaaactgtggagcctcgggcctctgctgacctcaggaaagggtttgaacttttggacttggatgggggaatcgggtgggaacttctcacatcgatggttcgatacaaagcccgacaaagaaccagcgcaaaagcagctttagctcatccttacttcaaaagtgaaggccttttagctctgtctttcaggcaaaacctcaggctgcaactcttccgagcaacagaacaggactatgaagaagctgccaattggattattcgactaatggcaaaatcaggaactgagcaggatggtggcttcacagaagctcagctacaagaactcaaagtatgaaaatctgttatatcatatgatttatgtttgagtatgtaata

SEQ ID NO: 4787 - DNA, 549 bp, Cannabis sativa
atttttgatgagttctcctttccatatgagcaatcttctaattctactacttctaaagtctcaacagaaatcccatcttttatttctgccttaattcctgtgttttctcactttaaacaccaatataccatgagagatctcactgaaccaagtgttcagacccctgctgcttctgcgccttttattgatcccacttcacatgccttaagtaatccttgtaacattgaccaacatgctttatgtgacactgtatcaatacctaatatttccattgatccttgtcctactaacattcagtgttcagtataggagcaaccaaatgcaggtcttattcctctctgtgttgcagatgatacttcagggaatgcagacaatgtccacgaggaggttcctggtatagcaacttctcagggtactgaatctgttgaagctttaagaatgcagatgccaacttcagggaatgcagatgtcaccacacattctgcaacaccagtctcttcaccaggttgtccaacacccgattcaagacctcctccaatttgttcttct

SEQ ID NO: 4788 - DNA, 701 bp, Cannabis sativa
ggttggtaatagtatagcgtacctctaaaacttcactaatcatgcctttagaatgtgatggtacacccatctgtagctgttccattcgggaaactgcctggtcatcaaatgtaaatgcaacaataccctacaaggacacaactcattaaaataaaactacatgagatgattaacaacatattcagatattttgaagaggaagatataccttgtgtgcggcttggctgaattgagtagcagcatcacttatagcgtagacagtgttacttagaaggctagtggtgccttgagccatgccagttatcaatccagtagggctctatcaataaaataataaattttcagtaatgccggaagagggaaggtctcaaccaattcgataaagtttacctggaaaatagtcctggctggaacagataagaaatctctgaagccaaggcccagagtccttgcaaatcccatggggttacctataacaccagctgaaccaaatacctacagttcaacgaattagagatatggttgcttgttttccttcattgaaaacaaaatgtgactgcattcttatcaggtacaagcttttcctcgagaaatcaacaaaacagcagagcagcattttacaaccaagtgggccaagtaataatgagtatttgatatatgaacatgtaatttagaccaaaacattacaaacacctatgtga

SEQ ID NO: 4789 - DNA, 1475 bp, Cannabis sativa
tgcctagatcctggtcggcaatacaagctcacccttgccagcctatcggcttctcttggccagccaaacattttagtacaactccttgttggctcctttcactcctttcagttgctgcctgacggtttcaccataccctgtatagagaccctaccttgctattggcaaggttgtactccacatgtactatgtctcggattacgtggacatgccacgtcaggttgaaaaaatttgggataacacagtgcaagcagtaaagcaaaactaccacactaacaacgagaaactctttacaagctagtatggtagcttatacaaagaagttatatgtgggactgagagcgtacaagaagcacataaatttctaaatgagtatttagaaagctattagggttgctattaaatcgagagagtgattataagattgacgtaatgtcgagggtgaagttagtttctaagactcatattgaatggagttgctaagataaaattgatgattcaatcgcagatatgttggatttacagtatactagactgtgtaattcatttcgagtacgtcggattatttgttaagagaaaggaagagtcactgagaatagtattgattaactaaaggatgaataaatactcttttaaggataaacatcctttaataaagataggggatttaactaatcaattttagggaaagaccattttccttaaggtcgatcctcgatctgattattattagttgtgggattgggaaatgaatatttcccaggtctacttttagtactcaatatacgcaattttacccttgaagtgtaccttaggttgattaactccatagtgatagttatggatctgatgattttggaattcaaagacttcctcaacttggaggatttggttcaaattgaagtattttgaaatttggcgaggtttgaattaactatccaagccacaacttctaaaggttagttggatattatagaaggagattcgtaaaagggttttgtgagtaaagtcttctaaagtggaagtagaggttgattattgtgcccatactgggtttactaaccactaatcagtaatttgaaggttactgtaatgtttcaaaacaagttcagactaagtttttacagtaattcaaaaaattcactgtgtgtcaaggcaattaaaaagctaagggctggagcaaattttttatcatttgcgaagagtatgtctagtatggcaataaagtttagaattagaaagaataatcagtattactagaaaatcatacgtattagaagggattaatacagtgcatcaaagagaaagatcattgaggaacaaagattgactttaggtttcatctgatgaaaagattaaagcgagaaatacttgatgagttttacgttacaccatacttgctacacttggtaacaaaaagatacattatctttcaggtagcccaccatgatcttactcagaagttaagcgtagtt

SEQ ID NO: 4790 - DNA, 1025 bp, Cannabis sativa
caatattaaataattttttttttatagttgtatcataattatcataaagtttttttagttatatttttgttattttttagcttatttataattatggttgatttattaattctttcccttattatcatgaactaattactaattacatacaatttcaaaacagatttgagtgtttttggaaattaaattattagatttgagtggtattaaataattattattttatttgatgtatttgtcttatcataattggatggtaattaaccatttaatcggtaataatataggggccggtgatgtaattacattctccttcaattctaatgactacttcaaaaaataattacttataattttttttttaatgtttagttatcaaaaaaatatatttttttatgcaattactaactatttcagtgaagcaagatgatagaatgtatactgtaattttcatatatattacatccaaatacactttatattttaaaatatattaatataattactacatactctaataattatgctattgtatagtgacttctaaacacataccaaatattaaagggatttttttattattatttttacactttaaaataatttttttttacgaaattttacataaaaatctctatagtagtctaataaatcgtagctgaaatcaatgtagcaacccacataaaaattaccgaaaaaactactggaacaaacccaaactataaattaaaaaaaaatatatagattaattttccataactaaattttatattatttttttgaatattgattaatctcaatgtaatatgaatggcataatatatatttatatacatatatattaacaatacttttggtaaattttatttgatttatttatattattatatgtattatatatagctagggtgatagtgcatgcaactattattagcatgcactaattgatttgcaaatatatataaatctagaacaaagtaatgtgatgaggtgaatctaattaatctagtctagttttttcataa

SEQ ID NO: 4791 - DNA, 1856 bp, Cannabis sativa
atcaagagaatcagataaaaacatggatctcacatactcattaatcacattacttgctcctgtaggatccaattaagtacagatattgcttttgctttgggttttctaatttttctattatcatttggcagccctatgatattttctttctagccagttccatcaatttgtccaagagagagaatgtgtgccatgtattgctgcaaaaagataaatagaaaagaacaagaaggtcatgcaaacagtaaagacatcttaaatggtcagcttaattaaaaagaaaagccaggcaatttagtcattaaattattctcacacatatggtgaacattttctaatgaaatgacttgggaaatgttttggaaatgaatgacagtgactaatttaaagatgcattttttcttttcaatttcacaaattatgttaggtccatcatattttatttcctttccaataagaaaatgaaatagtaacatcttgtatgaagactgttttaaaaattttaacctacacatgttaaaatattacaatctacacaaaagtgacaaaaataaataaataaaagaagaatttggttggtggggttgtttgtaatgttgggttatcttgtttccttgtctcagaggcttggtctggtccttgaagttttttctatcctaatgctttttcaatgcttcaaaagaaaaaggcctagaagagttactacatcatgtagcataccaagaaattgcttagtaaaccactcaaaaccaaaccttgagactaaaaaatatgcttagagttagacaaccagagctatctgattttcatgttcttacagatatgctgacaacctatattcaccgaactcctattccacaatcatgtacagaaactctctcaaaaaaagggccatggaatggatttccctgtaaagaatttgctttataaaaacgtcttattacctaccatctttatatgatgcattcatctcacaagagatagttactttactaagatatccaaggttcaaactttggtctcatccaattcccagcccctcaccactagtccaaacctagtgccttcacaggagagagttacttaatttcctatgaatgccttgcaattagtaaggtgaagggaatgtcaattttgataaaccaaactactttaattaattttcttataccctaaaagccttccaacttcattttaagaattcaagttcacaattgactttctttgttgaacctctatgaaccctccaaaaaagtgccctgaacttgttggtataccagcaaacctacctctagtacctaatccattttataaacaaatgaaggttcaccattctcatgaaagtaacagaaatttccagtattgaaataccgcttaattacagttcacagctatgaacgaccacatgtaagttcaaatgtcatcttttgtggttctaaatcttctggataactctagtagtcacaacaaatcaactactattaagaaagtacaactttttcatgaaaatatatgcatgagaaaatggcttatgtagccaaagtggaattgagtaacttacagaatgatactcatatgccgaattgccctgacgattaaagtgttttgccatgatggagtactcaataggtccccattcttctatctcaaagcaattaccaagcgcagccttatacaactaaagaaaaacaaaatgcagcaaaaataaataatgaatcaaaatacccaattcccagaaaatatatgaattaatcaaatgcaagaagattcgatcgattttctcaaacctttgtggtatccactaaaagctcagttcccgctgggtaagacgcatagaattgatcaccgcgagaata

SEQ ID NO: 4792 - DNA, 866 bp, Cannabis sativa
ctgccacagtcggagccgtggcgtctggggcgcactcgtgtcaggtccagggccaaggtcacggtcagtcagtgggtcacgtgactgatcagctcggaagggtgatgagcggtcgccatcacgtgacaacgaacgagttcatccttggacgtgggttgacgtccgatgaccttgccacgtggcgtaaaagcgaccgattgactagggattttcttggtttgactgctgacaccaacaataataataataataatactggtggtggtgacgttaaggacatgctaacgtacaccgggggcgtagagttcccgccgttggatcaacgagttcacagctcgttgttaaagccacaagttttcgggttcgcggaggctgcagcctcgcaaagctgggctgattgttgagtttttgaacgagggtaaaagagtaaatcactacatgtcttctttgcttaaacgacaacgacatttgggtcctataatatatgaatgctttttttttttttttcttcttaactatgaattaatgctttttttttcatttgaaagcaatgatataatataagaatattcgttacaataattattgttaagttttgctggaccgattacgtacgttattaatttgcaccattttttaaaaaataaaaaatcaaactgtattctgaatcgggtacattttaaatatcacatccattatttttttttttaaaatgtagtacttgccttttcaagttttttatattaatcttttttatttatttattcgaagtaggtggggttaaaaatgtgatcacgtgcaaaaaataataaccatttttgtccgcttaacttaagtagtacaaaacttgtttttttttttttttt

SEQ ID NO: 4793 - DNA, 1575 bp, Cannabis sativa
gatttgttcaatgctactacaagcttgatgtcaggtgcatgtttccgtagccactttccaacctccagatcaagggggtgcagtccaattctagtagcataagataacaccaaggaaagaattaaagatcatgctgaaaaagaagagcatgaaacaaacaatttttttctagtattttcctcgctacagcaatgaactcattgttagagaatagcattagcagataaatctctctagtgtaaaataaaataattcctacactattttacactgaaaagaaaaagaaaaataaaatctatcagccaatatccgtcgtgaaatattatgatttttcctttcaaaatgtactgtcatcatatattttcttcaacttgtatattttacatgaggaaaacatttaacacacattaaataaccttgcatcgactaagaatattgcaaactgtgatcttccaagcacatttgccgtcatgcctgcagttctgtcaagaatggagcctgaagtcgctgcagtttctaaaccagctgagtcgagtactctaaatcgtaaatcacccaactttgcaatgccttctctgaagtccctggtaacatgatcttcaggagtgttgaagactagagcctccctcctccgaattaaactatattgatagaaataaatgaaaggtacaatttaaacttataaataataatgataacttgagtcaaattaactacagataataaaaatacaaaccgattaaatagcgctgacttgcccacatttgggcgtccaacaagaacaacagttggaagaagattcttgttcaccgtggtaaaatctataggcttttggtactttacctcaaccttcccagctgtgaaatcatcaaccttaacatgggatcctgaggaagatacaaaatcaccacttgtagatgtaccattggaggaatcagaatctaacggttcattactgggtagcgagcaaaattgtctagaacccttaacaaaacaatgaggaaggccagaaatggaactacagcagtccaactcccaaccccgagatgggattccaacgccgtgtaaacaggctctattaagcaataatcctgaaacaggcatttcatcaaacacgttctacgcaaaaccattctagcaaacattacatagcacacagaccaaaaccaaacacactacgttacatataatacaatacaaaatacgcagagacaggaggtttgcctgagttgattatttaccaaaactagcagtagaagaatcacagctgtgaagagttgaaattgaacaaaaagagtttctgggtgcctctttgcaggtgttaggaactaagctagtgaaattatgagatattcgagtggttttccaattgaacaaagcgaaagttgcatttttcttccgagctgacagagctcgaacccaggaacgagagatacccatgaaagagtttctgtatcactatcacaacggagttcgtacactaataaagttcaattcagacgttagggagaagcagagaatgcgcgcgtacaatgcatttcagtattatttccctaatgtcaccactgcgaatag

SEQ ID NO: 4794 - DNA, 561 bp, Cannabis sativa
aaaatccaatttttttttttttttttgctaagaatttagcaaaatccaattactttctctattataatattttttctgcctctacgttacatcaatatggcctatttgctgtacaacacaacaaattcaaactatataatacacaaatatcaatacaaaatatgttccagagaagtaggtcaacatttttgtgtttaaaaatatatatacgaacatatgaatatgatagggattataaatacatttgacgttaagtgtttaattttcttattaaattcttggattatgaggtgtcgtttacgtaaacttgctggaagccgcaagaaatcattgtataataagtatagttatacttttttttttcttcaaaaaaaaaaaaaaaaaaagaatttaaggtaatgggatgagttttcaaaacttgggacccctcatcttactttcttatgaaattcaaaattttcagctcaaaaaattggagtgtgtacttcttcttcttgtcttttaagtcctctttcaccaaacttactcacccaggttcgaattttagttaaccctgtttcc

SEQ ID NO: 4795 - DNA, 1791 bp, Cannabis sativa
aatgaaaaatataacaaagttggttgaaagatactttctattttataaccaagttatataattaaaatatctttaatagaattttgaataaattacttagatattatataagaaataaaatctaataccaacctaatatatcaaattctatttatatttcaaaatatcacaaatatctagttactgatcgtcatttaaaaactattaaactatttaaagggaaaatagatattaatattttaagtaagtgatataaattcaaataatcaaaatatatcataaaaattcattattctgattttataattttataatataaagataaataaggtatctataattttaattttgaattataatgattttagcacaaaagtttcttttttagactaaagatatcgaaaaatatctcaaaaataataaaaatattaattttattaatttttagtttataatatttaatttttgatccaaaatataaaaattttagaaacttcaaaattattttaatgaagattgaattttaaaaggggaaatttaaaaaatatcgtaatgtttaacaaataaatctaggatatagtaactaacttattaaagtttcctaggaagcctccatcatgcacgcacgcatgcatggagtttggagccgagaaacttggttggagcatcatgctctacacgcgttaagcaaaattctagtcccacgaagctcgacatttggccttcaatctgcgcgcacaatatgggacatcagctgagaaatgttggtccatgcccagggatgcatgtgcgcgtccctaagttgtgcgcgcataatgtctagcatccccaaaattgtcaaaatttgaccccaaaacctgatttttcatctcaaaaaattttctaaacttaatttgatcaattttcaaccaaaatatgttccaaaaatatttttaaacacaaaatgtgactaataaaaatattttatcatagaaacatacataaattttttttttaaaaaaaatcataatgcataaaattactatgaaaatcatccaaatctcaaacaaaaatatataattccattttaacatgttaattcacaaaaaataaatattatcaaggctctaaggccattgttgggaataattaaacatacaaaatcttattatttatttaagcaaaggaagaaattttttatttcaataaccactgaacaatacaaactgcagagcagcaacccaacaactcaaaacttgtttatagtttatattacatcaatctctcttttactaagtttagaaaaattgtacaattaggatttagctataacaaccaatttcacgtgataattaataacaccagctaaatcacaagcatcatcaaaacacgtctattcttgcactcataatacacaggagcaacaagaaccacaaaaagttcagccaccaaacatttcaaaggcttctcacaactccctaactagctacccaaattagttggccaaaagaaccaaccaaaccagctcaagacttccttaattaccatcctggaaaagatgcaagtgaagaacacatgctcatgagactccacatcaaaatcacaaacagggcagcaaggagaaataattggcacaaatctcccaattaagtcatggttcaacaaatggccattagtggctttccatagaataaatctgtgtttcgggacattcaatttatgccaaacaaacttgtgaaactactttatctttgttgaggagagagagataaaaaaacttccgccttctacttcccttttcgaccagcctcc

SEQ ID NO: 4796 - DNA, 2007 bp, Cannabis sativa
tagtaatttatggtgtataaatatttaaattttatgtcgactagtaagtaattaaatcgtatttttaatggtaaaaatatatttcgttactagtataaatcttccgtaggtcggtatacctatatatacaggccagtggttattaggtttaaatattatttattatttattttttatttgaaaattatttttttaagaaaaatctaagaaaataaaatgaaaaacagtgttttgattaaataattatttttaattgttaattaacttccttaagtttgataactacatgattaattttttaaaaaatcattttaaaattaaataaaaaataatttaaattttttaatcaaaattaaaaaaaaaattaaaactcattttagtgaaataaaattaaatatctgcaattaaatcactaaaattaataatctgactaaaagaactttactataatttcatatcttcatcatcaaaaagaccaaattcagaaccagaaatttcaactccaaacgcaaagaagaaaaaaaaaaagtaacccaaaaaagatttaccctatctttatcaactcactcttttttccctattcattctcgattttcaagaatacagaaacaaatttatataaacaaataaaatctcaaatccaaataaacccataaattatcaacaagccaataaattttaaattcaaacttgttgaacttaaaccaattcacaactacacagacttgtgacagtctgtagtcttgtgatctgtaaggagaaacactggataagttgtacaatctcacattgtctgggaaaggtcaagtgtgctgattctgagattttgtaggtatacacagttgaagaagtcttaaatagattgattgatattacttttatcaacaaggtatatcttatttttcagtagcccatcatgaaagaactccacggttaagtatgcttaacctagggtaattttaggatgtgtgacctcctaggatattttcccaagaagtgtgcgagtgaggacaaagcatgttgtaaatactcgtgttggtttgtaggatcagtcgtcaatccatgaagcatccatagtgacgtacttgtgataagagccatcattttgtgagtgtaaggacctaatggatgcttgaagtgagaatattacaaatggtatcagaaccttgacccagctaaaagtgtggttggcgaggatgtcagaccttgaaagggggggttgattgtgacagtcagtaatcttgtgatatgtaaggaaaaatatcaagtaagttgtgcaatcctacaacacctggggatggtcaagtgtgatgattctgagactgtataagtatgggactataaagctgaagaggccttaaatggattgattggtactacacatattaacaatgtgcatcttattttttggtagcccatcatgaaataactctacagttaagcgtgtttgacctagggtgatttcaggatgggtggacctcctaagaagttttcttaagaaagttgtgagtgaggacaaagcacgctgtaaacacccgtgttagtttgtaaggtcagtcatcagtccgtgaaacatccataataacgtacttgtgtataagagtcattattctatgtgtgtaagaacctaatggagtcttgaagtagagatgttacaaggctatactcaaatttatacacaaataaatagcaacattccatcgtatgttcatcattattcaatattatatttatagaagaaaacatggccaaagaaaaaaaaaatcaagcactctatatatacgtacctctataatcttctctttctttattttaccaaacccatctaaatttagctttttatgtcatagatctcgtcttttcgcaagagaagcttggggacgtacggtgattctgcattgaatctggcgagaagacaagagagggagaagttgagcagagcgaactcgagctacgatatttgaatttttgaaccagctacaagacccatggttgacggtggagcaa

SEQ ID NO: 4797 - DNA, 1398 bp, Cannabis sativa
accctagagacaaccacaaaaacatttttccagctgtaaaagctttcttaaaaaaattcttgatcacgattaaactaagatcacgatttagacttcaaacctgccaaataaaatttatttgatctgttctaataaagacaaaactaaaattatcaattagaaaaagagaaagttaaatttttaaagttagacaactttccataagagaattttttctcttacaagaagtttcataaaccaaaaagaccaaaattaatgtaataaaaataatttaaatgctcaataaaaatacataataattaaaacatattttgacaattaaattgccaaaaaagaacctaacacaaacaaacaaacaaaaataaagaactttaggagaaagtactattataacatacattattgatctaaataaacatatataataaaaactaattaaataagtagtttagacttgtgtaataactagcaaatagtcagcctcctttgagttgtcttctttgaccaaaaccccagcactgcaaagaaggactttaagctcatcaacgtctagtgcatggaattgcatagagtacattataccagaaaccacctcttcttgaaacacaccaattatctttacaaaggccaaattcagagatgggtaattcttattctcgttatgaaattcgatggcaaaacgagcaagctccttcatctttggatcactctcagatccttccacttccctcagttttcccactatatcttccattatattatcaatatcttttatataaatatatttactttgtttttcttatttaggatcttgatctcctctctcaaagttctctatatgtgtgtgtttattttgcttaattatatcaatattggacatcatttatatactaattcatttatgcaagtttggtgttttattgttttgtgccttggttgaatgaagcacatacaaatagccttcattattattataatgaaagtgtatggtttttgactatgtagttttaagacctctgactttcatatcttttgatcaattgggtttatccaattgattgagttgtttaaacacatctacacatatataatatttggttgattttttcttttcttccatattatatatattgtttgtttataaaaatactaaacagggtaaagatggagcgtggcaggtactaagtattgaaactttctctttttgttgaattgagattatatatacatacacagccgcccatatgtgcttaaatacatgtacgtgtggcttgttaaactcgactagattttaatttgtatattttttgttatgataattgataaataacccaactggaattaaataaggcattgtttgaaagtaatgctgtaatggaagagaaatgaatacatata

SEQ ID NO: 4798 - DNA, 880 bp, Cannabis sativa
agctttcaggctacccatagagaagagggtccgtctaatctcctcagcattaggcactacaaccaggtctttttgctcctcgacagaaagggggtccgggaccaggccattcaggctctctagaggaccaaacaccgagtttttaaaaatatttcccaaataactcgataattcctttccaatgtccgccctgctagtcaaccactcattagttaagattttctcaattgcatttctcctatttcttatggtggccgaagtgaagaaaaatttcgagcatttatcaccatccttgatccaagacacccgggatctttgctgccagtacacagctctttgtctcaaagcctcgttaagagatgttcgggctttcatctcttcagtccaagccctagttcccgccgggcaaccctgaataaggttcagatgtcgttcaagctgagcaatgcgagtatccaatttcccaaactgattcttgctccaattacttagcgctagacgagtagctcccaccttcttgaaaattctagccgagggccgactatgggatagagagctccaggcactctccacaacaagcaaactacggggatccctcgtccaccaggcttcaaaacgaaaaagctttcgaggttttgaatcctggtccaccgtactgataaccaggggacggtgatccgaattacaagtgtggcgagaatgaacaactgccttcggaaagaggctcagccactgcgcattggataaagtcttgtcaagagccgatttgacatgagcatcaccatctcgatggttatcccaagttagaaaatcgcctttaacaggcaaatcaattaaacccgatctattgaccaattcagtaatgaccggcaaaaactga

SEQ ID NO: 4799 - DNA, 1274 bp, Cannabis sativa
acatagcatgaaatgtcagtataatccttcccatacgtagccagataataaaagaaataattcatatttgtagatttttctcaaaatgaaggtatatataatatcaaaacaaagaaacctggtaagctgcggttcgaagaactttatccagcataaactggaaaacattgttggagaaaacaatttcaagacaggaatgaagatacaccaaatcatttgatgaagcatttgaaacagaagtcgcagcactagcatcatgtattaacatcaaatgtacggcccaaccaagccgtacacaatcaacataatgctcaacatttggatcattcccaacagccataacctaaaaagggagtatcagcaaattccaattaccatcagaaatacataaacattgagtcaaaacaataattttctttcctccaaaaaacaacatcaattattattatgagaaaaataaaatgccatctttatcttacagtttcatgaaattcacgtctaaaggaagcgtcagaagaaaggacagatgctttatcgggtactgcactcaaagcatcggacacgaaagagatcactagggaaaaaagaagactaaatgtaatctgcacaaacaaaagaaaacgtgcattatgtaagaagtcagcaacaaagtcaaggcatgagaaaactacatcaaaagacatacacatggagagacccatggagagaaaagaacaaagcaagttatttcaactttcaagaattaacagaacaataaagaaaattgtttggtcaacaagtcaaacctgatgtttcaatacatctttgctctcactaagttcaccagcactatctttcaaagcacaaaaaatatcctttatatcctttggacctgtacataaaaggaacttttaatttaggcaaatattcttttgacagaaaactgtaaagtcaacatatggaatagctatgctgttaccttacgggttattttcaaaaacatgaaaaacattaatgaatattcttaatcttaagaaaaggccccataatacaaaagcaagggcaattcaatcttataaggtcaaggttggaaagaaatgcttgaatatttgaggattgtgaggaatcagaaaaggaattatgggagaaaatgaaattctggacagctacttgggtttataaatccaagcattttaaagattctccttcatggatctatgtagagaatggatttccctgacttagagagtatcctatgtttccttttatactcatataatttatgtaatttttat

SEQ ID NO: 4800 - DNA, 1017 bp, Cannabis sativa
tgtcctttactaataatcttcttcatcataagattctgaaccaaacaatgatcaggaaagaatgagatgcaacaatttagattacgagtgagttaactaacagaaagcaatttaaaggaaaaattaggtaaatgtaagactgatgacaaagtgagcataggtgtaggaacaatagtgccagatccaagaacagaagatgttgatccatcagctaaggtaacaataaaagttggactatgagactgaaaagtggaaaagagattggaataattacttgtcatatgatctgtggcaccagaatcaatgacccgtttgaggatttagaaagaaggcatgcattagagttacttgaatcagcaatcacagtgactgtagttttgtgatccataaggagctgtgcaatcccacaatgtttaggaatggtcaagtgtgatgattctataagactgtgtaggtataggactattcagttgaagaaggcttaaatagattgatgagtattgtttatattaataaggtgtatcttgttttcggtggtccaagtatgcttaacttgaaataatcttgagagtgaccttcttccagttttttcaaaaaacgttaaagtgggtgttggtttgatgagtcattcgtcattccagaaagcaattaaagtgatgtaactgtatataagagtcattaatcagtgagagaaaatgggtgtgttgcatctatgtatgatgtatatatatatttatataattaatatatgctaagcccatgagcatgcacaaaaacaatgggtcaaacatcttttcttcaagatggtgtttggttttggtgcttttaccaaaacttatcctcttatcaaaagttaaacttatatattcatttatatatatacatatatttatatgtagatcgagacatgtataaaagaggcataataacataagcaaaagaaactttggggttggtgctctctgctttgctagctagggtttagagatggtcccccaaaattaagattatatatat

SEQ ID NO: 4801 - DNA, 1228 bp, Cannabis sativa
acattttatttttttcgagttgtcctttttctctccactctctctatatatattatcattatctcacaataatatattaaattatattttatataatatttttttttgtaaaattatgaatatataaatatataatatattaatattaattaaaatttaacagaatatattatataaaaatataatatataatcaaatttaataaaatttattctaatacaatgtaccaaacaatgcatgacaagtctattttataaaattatgagttgatacttgatgtaaataataataataataataattgcttaaataaaattcatgattaggaggttttaagctttttttttctaatgtgaaaattgatatattgaaaaaatggttaatattattgtggaccttttgttttataaaatttattgattggatcttttattttgttaaatgataaaatagttcatatatttttcaaaacgatacaaataaaaactgagctcaattttcatcaatttttatcaatttttttttaatataactaacttgaagatattttctaacacgagtagatgtgaaaaaatataattaattttatcataacacctctagatcgaattattattaaattttattttgactaaaaatcagtttagggtactattttaaaaaatacaggtctaatttatcatttgacaatacaaatagtctaatcaataatattttctatgaacccttatcaaaattaatactctctcgtatcacataagcacaactagttattattagtttggatataattaattcacaaaaatgaaattttggacaaaagttataaggataggatccactaattaattaagtataataatatatatttatttatatatataggactagctttttggctaggtttgtaggcctaattcatgaagaaaaaaaaagttatcccctttaaaatatacttttattttattaatttcaaaaaatactataattttttttttaagtaatagttcaaaaatatttttttatattttattgtatatatatttatgtcgaccactaaaaatcaaataatgtatatatatatatatatatgtcattttgaggtggaaatgaaaaatgccattcatgcaatgcaatggatgaccaaatttgtggtttacattaattgatcgattgttctaaccaaactatatatccattactattcccctttttgttgatttgattt

SEQ ID NO: 4802 - DNA, 2330 bp, Cannabis sativa
gataacattatatgctaatatagatacaagcaaataaatgcagatttcacatataataatgataataaagaaagggtagcagcttctttgtggctggctcatatgattatgttcctctatttctacttagaaatcattcatgtgtcaatggggggttccaacaaaatcttcaaagtgaaaagatagactaaaggtgaatttatgttatgaatctatgatgatctttgggaattcagcttggaatgagttgagtcatttacagagttgataagacttagataagcatgtaggactaagtgcactaattggtacattttcaaaaaatacatatgattcagaaaaatatcagtttacaatacatcttacttttatcaacgattttgctctttctcttatactaatactttctaagatttgtctcgtgagatccaagttgagaataataaattgaacaattatagtcgcctattattagaatatactattaacattaattagggttatctgataagaattacaatagagcagtttataatgtcattaagaaattaaaactgtttatatgatgaatctttaagtcttttcttgcttgtatataatctgacagagttggttccatgttaagacggggtaggcccatgactaaggtctacccatcttaagaacccaaataaaaaaaatatttttaaaaaattatacatattttttaataatttttaaaaattctatttatttttataataagaactcattcttaaggcaaattttataatatatataatatattattttatgttaaaaacaacacaacaattttattattattatcatgttcaccttaatgttaatgcatgaatgaatggtttgcattgacatgatttacatatgactttaaaacattaataataattttacagtatcccacatagatgtattgctaataaatatataaaaatgagaatatatatattcatcctaatagagattttcaattaagttatataatcatgacataaataatctttaactatcaatcaatataaacaaatttttctactaatgttatggtatcatatataagaagaagataactcaaaaaccaatccaagccccaagaaaattctccttttaaacacattatttggttacgataattcgttatgatgggaaatcacctaatttaaacacccgacaacatttataaatttctaatgttagataacctcaacttctacaatcaatatcataatcatttttgaagaaataaccattgtcaaagagggctatttttattattatcaactaaactaaaaaatcattaacacaattgatataagtactaaatgttaaaaggttttaagtaaaaaaaacaactcatttataacaccgaaaattgatataagtattaaatattatgcccatgtgaaatatacaaacataagtagagggaaatatgtggtttagttgttagatcatttgtaagacataaagacttgttttcaaacagatcctgcctttcattattattaagacactgtggttagtgaataaaaccaacaagtaaaatctcgatactggtttcatattgagagaatgtaactccttaaattgaagtttgtccgaaaatgccatcaagaagtactaaatatttcttttgttttccaagattgtaaagctgtttgatatctttatcaaatccaaaaacataatctccacaaaatgagaattagctcataacaacatgaatctccatttgaggttaaatgaatgcacataccaagctctttaagattatcattgcccttttacaaacttgataaataaataaataagagcatcacaacaaattacacaatatcaaacataaagctctttaagcatttgggttttaaagtatcccaagagaagtttaggccttctctgaattgttatctattcttctgatctgtttaatgaagcttgaatcattaaaaaaaaaatattctaatgtatgcatgtcatttgggccttgactttagctctgattgagtgtgtgacccaatgggctcattgggctggagagcatctattcatttagaaaaataacaccattccaaatatggtctttaataacacatgaaacaaatgtggttgtttaacactactagacatgtttatattagtccacacagttatttccaacacaactctacaagccttaatcacaatagaaaacaataacattattgggtaggccttagacttgggcctaatccttcttatctcaagctcgaccctatgtgtgtatgtaagtaacactttaattatggataatttacatgtatacacct

SEQ ID NO: 4803 - DNA, 1361 bp, Cannabis sativa
ttattaataatgacttagcagatatggatatacgttaactgttaaacaacatgttcttccaagaatctcatgccaaattggacggttcatttaggctcgaagaataatgaaaattagcatcgcttaattactatgtcaatatatagtttcgattaattctgagacaaatcgaattctcgtaatctgatgctaacattgcctatattgatctaaactgaaaaaaataatgttttcttttacatgataaaaaaaaaaaccggccaagactggactgacatggtcaaattatattatagtttcatatatatcaccttaattatatagaagtcatattaataatctcaaattcagattttaaaaaagttcaaatatagaagaaatcatctgtttctcattgaatgaagaagtgtagaggctgtttccaagaccagttcctaatcttttattacattctaaggaaaacagagtaactaattctactagaaagccagaaactctaccaattaatctttatttaacactcttcgaaagatatggactgtctataactatacattgtaaagtcccaagcatattgcttatcaaaaattagaaatgaaataagaaataaggtcttgatgatgaattagtaagtgagttgattgtgtttatccctgtctcttcttatgagctactatatgttaagagtaaattaggaacttcctttttctgtaagatagttagtcattagagttagttaaacacaattgttaatgctgttatttaattgttgagttattttatactgctatttaagtgtatttatacctataaactatctcattaatcaatatacataattcattaatccgcaacatcatttcttaacatggtgttagagtaatgttgtgtctctattattttccatttatgtttttgaagctatttgttcttctcgatccatctcttgttttcttggtttgtcattaagtcctcttcgactccatcaacggttgaccctgctctggcgtctgctgcttcaattcctctcacttttttttttcataagctttctgtgaagctcgacaacaacaattttcttttttggcgtcctcaagtgttaactcatgcgatttggtttctcctttccagtcggcctttattcctgaaaggtggataaccgaatcatctatccttacgcaagaaatcattcacaagattcttcgtaaaagggtagtgggggtcttatagccttaaagttagacatgcacaaagcctacaacaagatggaatggaattttctagagaaggttcttagagcaaatgggtttagtgaaagaagttgcaagctcttgatggcgtgtgtgacaagtgtttcgtat

SEQ ID NO: 4804 - DNA, 556 bp, Cannabis sativa
taaaagtcacttttataagtacaactttttttgaaaataattttggaaaaaaagaaagaaaaataacaacctaatatatagtgtagtggtacaaatatctttgttagcatcttttcttgttttggtggaagattcaaatttctttttggtaagagattggagtattttcaactatgttctcaaaacatattaaaattattaaatactaattaaagaaatataattagaacaagaataataaaaatatttttttttattttaaatttttaataattttaattaactaaaatttagctaaaaagtaaaaagtaaccttagaaatgcttttatacttaactttgtgcattataaatattcctataaagagaagaagaggtatacttttaataggatatgatcatttttattattattaaaagagagaaagaaagaaagaaagaaagatgcttaataaagtgataatttttttttggttacaattctagatagccaaccaagttagtcaagttttgacactaacaaacgtgattacttagcaccaacactataagtcagg

SEQ ID NO: 4805 - DNA, 756 bp, Cannabis sativa
ttaaaattgtaagaaaaactttaaattattacagtaatttgcagtgaaattcttttatgttttaatttttatacacttaacttcgtgatcttttttcacttagccattgggattgtcactatgtatacttgtgtatacgaaatattttttcattgactttgaagttttagtgccagatatacataaacgtacacagtgataattccatttgacatttaataatggaatttaattgatgtttcaaatttgcaaacagaagttgagggaatagagtattatacccataaaaacaaaatcaagatgctaagtgtataaatgttaaaacataaagaaattttattgtcgattatcattattattatattattatattacattcatttgacaaattctgatatgttctatctatctatataattattttattcctgatgcagctgaatcagattattcatgagtcgctaagattatatccttcattaacttcattggcaagaaaaactagaaaggaagtaagattgggacatctcaatcttccagccaatgcaattatactcatatcaattctatcacttcatcatgatcctgaaatatggggacatgattctcatcttttcaagcctgagagattttctcaaggggttgctaaagctactaaggacaacatggttgcttttcttccctttggaatgggacctcgatcttgtgttgggattaactttgccatcaacgaagcaaaaattgttctgacaatga

SEQ ID NO: 4806 - DNA, 1510 bp, Cannabis sativa
acatatatatatgtaatttttttttgcccttactaaaaaatgtggctggctgattggccacagattttaatattaagaaaatagactctcacttatatagatagcattttgagaattttattgaaacaattttttgtctaaaactccattatttttggattttttgcctcattgaagaagccctaagccctaagtgttaggcaccatttagcaagccaaacttcactaacatttatttttttcctaaccgtttcactcttccaacttccaactattccatcatcaatcatttcctatattattattttaattatattatatatataatcaaattcagcatattaattttatattacattcaaaaagtaacaacaaacaaccacatcaaaaaaaaaaaaaaaaattggaaattacttgtaaatttagccatctttaaaatatgtaaacattatatatataactctaaatctatgtctttactttcactttgatacacaacctggtaaaaattacatccaattatataaaaagacaaaagacattattaaaaacaagttgtaagagagtatttttcttacatagaagaataatattacataataacaaatataataataagtacatacataatgatgatgatagtgtatccatttttttcctttggtatatatgtatccacttcatctatatataatatcacatacataacaacaaattagcccttaaaaaagaaaataaaaacattattattatatatatatatataataataaattagagtttgacgacgtcaggaatatgaacgggataacggtcaatgcaatcagtccaaggaccatccgacgtcgttttgatagttctattacatttccaaacggcactgttacacttaaatccacttccaaaagcaatttgccaaatcctatcaccttttttcattcttcctttggcttcaacataagccatttcataccaaagtgaagacgacgacgtattgccaaaacgatgcaaagtcattctagaagcctcacagtgctcagctgacagctgtagatttttctgaagctcatcgatcacagccctccctccagcgtggatacaaaaatgttcaaatgcttgtttgaaatcaggaatgtaaggtttccattttggattgaatatcttccgtccgattaaactcatcaaaaataataattgttctgatgcgggcagtaccagcggacctatcgtcgttatgtttgactttaatgcttctcctgctatagccattagatcctttgatagtgaaattccaactttaccctccttgtcttcctcttcgtaaacgcacctgatcattgttttgtaaaaatatactcattatccaaatactactttttaacaaaaatatgtaagaaaattctattattattatatatttttaaataatttataccaaaaataaaattccaacagtaattttactatacacataagaaaaaaaaattataaattttttggcaccaaatat

SEQ ID NO: 4807 - DNA, 1081 bp, Cannabis sativa
gacccttaagtgatcaattcttggagcatgtcctctccactgtttcttgatgggttttgaaatttagtgttgcagaggggcacctattgatgagatagcatgcagttttcatggcttctccccaaaactattttcctaaaccaacagccgtctgcatacacctcactctttcaatcaaagttttgttcattctctctgctatgccattttgttgaggtgtcttgataactgttgtgtgccttcttatcgctgtctcttggcaatatccgttaaactcatcggaacaaaactccaaaccattgtcagtgcacaacattttaattttcttatttttttggttttctatcaaagttttccaattgacaaatgtgtaaaaagagtcatttttgttgctgagtaagaaaacccaaacctttcttgtatagtcatcaactatacttagaaaatagcttgccccaccgattgttttattttggatgcaccccaaagatcacagtgaatgtaatccagctttgcctttgttatgtgcctagattttgtgaattttaaccttcaacttttaccataaatacaattttcacaaaattccaatttcttaccaagtttacctttgagtatgccttgtttcccaagctcatgtaagcccctctcactcacatgtccaaatctcatatacgataactttgtctggtccattccttcatttttgactactgttgcagccctaccaataattattttactagctaggcagtaaatcccatttctgagctttcctttcatcaccactatagagtctttcaaaactctaagtgaactatcaatcttgatgttgcagtctttaagtgttagtgcaccaatagataacaaatttctatttaggtcaaggacatacctcacatctctaatggttctttataatccattgctcattttgatcagcaaaccaattcttgcaatctcgcgggctttattatcacctaacggaaagttgcaaaagaaacgtctgttatgagtcatatgaaaagaacaacatcaagaatccactcatcaccagtcactacaagaaaaggtgtttttg

SEQ ID NO: 4808 - DNA, 870 bp, Cannabis sativa
catgttttcttccctttcctttaaaggtctattttttctttagaggaatgttttttagtgcactggtttggaacatctagggttcttgtctgtattgtccagtcagtgtttgggtttctcaaatcttgtgaatttgttctctagttggaattgtagttttgcatttggaggcgtatgactcgggggccattaggtcattagattagggctattaggttcagatctatggtcgtggggtgggaacatggggttgggccgtatttcaagagcttgagggtggctggtgtaactctttatgggttgagatggagtttgttggttttaggattgtgtgttcaagggttctctttgtggaacagagatactcacgagattatggttggttattggcttttgttgtcgttaataaggtgtttattggcttttgggtgtctctggccgtttttcagccgatggcactcatggagttctatttggtagcggtttaggtcttaggaggtgagttctctgggcgggggtttttgaactccagtggattttcaatagggattccttcatgtcgttggcagttttgggtttccctccccaacaatgaggcatttattctatagtttcaggacttcctcctcagtggtgcgatcttggctggatgatgatcctttcttcgttggggggttttaggcctcctagtcgtgcaattttgtaatgctcatgcctctagcctctattgggcatttacatcaacagatttatgactcttatacacgggtacgtcactttggctactttctggaatgacgactagccttgcaaaccaacacgagtttttccagtatacttttttcctctcacttgcacgcttcttgggaa

SEQ ID NO: 4809 - DNA, 717 bp, Cannabis sativa
agaaaccacataaaattccccatccatacaagtccaactccaagtccaccaattacatcaaaacaacaataacatgttcatgttcttttaatgtaaacaacaataatgtgaagagaattccactttatttctttccaaacaaataagaaaaacaaaaaaacatacactaaataaaattctcttcaatggtaaatggaccaccctagctttgttcgataaaggaagatattttcttaagcatagccacagcattttcacaagttggcttagtaagatggaatacatgctcatccccagcagcttccaccacctcaactctcccaacccaatcactcttctccaaaatctccttataatacaatcccctatcccttaacaaatcattctcagccacacaaatcaacactctctcacaacccaatttccccaaattactatccttacctggatttatgtacggatcatcaacaccagtagtggttggactcacaaaacgccaaatcccttctgcccatttccctttctctggaaatttcacctcattaccaatcggctctgctccccaaaagtaaggatgaatcagagcaatacccaaaagcttcgatccattgcttaacccaccttctaatcccactcgtatagccatgtgatgagcaatgttagctccagcactgtctcccgcgaagaaaactcgctcgtgatccgcacgtgagttca

SEQ ID NO: 4810 - DNA, 2176 bp, Cannabis sativa
cagaatcacacacaaagatcacatcaaagatcaatagagaaattagggtaaaagaaatacaacagagcagtgtagccacaatatttctctcaatattcaccctaaagttggtgcacgtccttgtcgaactcaccacataaatgatgctcaagtttcagtatcatcaacatgtaatgttacatcgtcttcttcataatttcaaatcataaaatgtttggttgataatctatccaattttctttaatattgtcctctcagattctcacttattttctatcttcctttctttgattttctctcggtatacttatctctctctccatatatatatatatatatatctaaatcttagctcacatggagaattatttttgaagtttgaatctttgacttgatgtgagtatttataggctttttataggtcaatacaagttgttagttgtaatatgccaatgttaccatattaggctttagcttcgaacattttcaatcataaaaaaaaagtgaagccataaccttctagtagcgtctctcatcacatttatttagttgctcacatatagcttcaagtatatatagaaaaccaaagctaaacagaaagaaaaaaatattatggaacactttaggcttcggttattggaaatagtagaagcctaagggtttttgaactcctaaatgggcttcaacgcataataaaaactcaaagacaccctataattctaacatatactcaaccgcttacctaaaatctctctctctctctctctctctagaagcttttttttttctttcttctttctatccctctatctttttttttctgtgtctcttagtctagccattgctagccctaacaccgatgacactgcaaccccaaagattcaaccaccgtcggcccttgaagctctctctcttattctgtgatctcatcattttttttcttgtttgcaggtggttcttttattttttttaataaaaaaattattttgacaaagaacccattctaggcaatttgtttatattagactctccctctctatattaatcattctatatcgaatagaaaacaaataaaaaattacctatggttttggttattttgctaataactgaagtcataggtgtaatgaccgtatagttaaatcatgggaattagcagataatttagaattgaaatattaatttataattatgtgattcttagtaggaattagagcttattgtcaaaaatagtccttagagaaatattttcacaattacgaaaatatattcgaattctagatgtattacatatactctgtatgaaattttatgatttttatgttttatgcccgatcacggtagaatgcaatggtttggccaatagagtcacttagatacgattaattatcttagaattagcgaggtatgaaggttaaacattaggaatgtcacgatttaattggggctatagtttttggaccattttacccctagagggtgaggttacttcttagtaaagtaaaaagtaaaattgtcttttggctttagtttattaatgggaaataagtgggtcttctagtaaaatttattttatttattattattttattagctaaataaaaaaagttaagctgtaattatccaaatacatcatcaacataacccttcaccctttatctctcttggggttcggctacaagaaaacacaaggaaaacctagtcttttttttttttttttcatttcagaccaatttaagagatttcagctaaggtttttacggattaattgttgagaaggttaaggtaagctaatccctcttttatctcttttaaattttaaggtttatatttggtttcatggaggagttagggattttggttctattttagttgttgtggaagttagtggtgttagaggttgttctattgagttgtttttaggttatatcagttgttttgttctggttttggatggttgtataaaaaattgaacaaggtttgagtttttaagctcaaacttggttatttaatggtaaaattaaattcaaggagttatagctactgtttttggttgaaatatgtttgttacaacttaatcaggtgttctggagagtttggtacgatttgggaaagttttgagcatatagtgaagcttttagggtttccacaaagaactggttaaccattttcccaa

SEQ ID NO: 4811 - DNA, 1931 bp, Cannabis sativa
tttttgtaagttttccttttataaaccatataaaaacctataaatcaattaattttggaaagttgttattattgtacataaattttaattttgatttctgggtccctcctgaacacagattttctgggcaaccaaacgtggaattaaccatttcagaaaaaaaaacaccgtggaattaacaattctcacaatttcacgatttgctcaaaaattcaagcctgcggaggttgaagaaatcaaatcctcacttttatttcgtcatatcttgtcaaccagtctcccgatgaattacagaaggtaaaacctacaacacatacatattacggtttcaatttcaatttcagtatttttttacaatgctttttcttggcatgatctgagttcaagatcacgggcttttgttcttaaatgtatgtatcgtttcttttcatgattgatagattaatgctttgtttgaaactgtctgattctgagaagctcataatcaaatctgtaataaaagcattgcttctttttagagtaatttagtattcacttggattcgcattgtataatcacaaacccaattgaaaattttcatgttttgaagaaggaaggaaaagttttggttttggcaggatttgcaatcaaacatttggggattttcagcatgagaaagtatagattttagttgtttatgtatgaaatcattttatatatggtggcaagtagttaacacacaactctgttttgaaattttgatgggttaagggtagaggcttatagttagttccaggttggtgggaatttgatctcttgaatttgtcttaatcattttgatctcagcttgacttattaccttcataaccttttgtatttttcttttttttttcttcgtcattgccaacagcctcaaagctagagtgtctcactagtcctagttatgctgtcctcagtggataacagtgctacctttttgcagggatcaccgttcctccagatcatctctctttaatgaccttgaggaaggtagtctcaggtcttcttcctcatattcacatgacattaacgagcatgacaatgacaaagctgttgagagtttgcaagatagagtgattttcttaaaacaagtacgtttgaactacaaagttcctcttactacttatacatgagttagcatttattcttgggaagtacagtacttacataaaattttagctgttccatactcccgttagattctatcggcaaactttatgttcccaacgtgctaaatactatggtcattattttgttagttattagaaatgatggattatttagacttgggagtgtcattagcagatccatcgttacatttaaatgtgtacagaaatcattttcttttctcaaagggaggcagcttgcctgatgcataagaaacattgtgctcttgatggtcatcatcttaagggttttagttttgagatttttattcatggttatttgccatgtacaaatgatacatctaatgaattgatcagtcatccattttgttaatcaatcctactatttgtatgtcacgtattaatttatgttcattgaatttctggtattctgccttcatttcctaagtagatagattgtttgtatgtgcaagaaccaagtaaggtataaatgggcttatggcaatttacatcaaaaggtgtcatagtaagggagtttgtaggtaaaagttcaaatcattaaccaaatcataagtcttgctataaatactgataaaccaaaaaaatatttgatatgtttttcaggtttcaatttggttggtttggtaatttttacttctcaaaagcaagaaccaatttaaatttgtatgaaacttttaagaaaatcaagctcttttaattgctgattattttttcatcagcataagaaaaagaacaattgcacatgtctgtgttgtctggtgcacc

SEQ ID NO: 4812 - DNA, 843 bp, Cannabis sativa
tatatatgaggaatctttggagaagcaatggcattgtattgaataactgaattaatgcgtatttttattatatccatgtaagaggatcaaatatttttatatatttatatataaattggatctgtaatgcctcatcatccatattattattccatatatatcatcagtttgttatattatctattaattaattaattaatttctgtctgttgttctgtgtgcgtgtacatatatacatatgtagtacttatttcaggtaattaatcagattccatgccagcaacatcaccttcttattctgtgatgatataattatttcaaacctaaatacagtatatcttattttttaaaataaataaacacaacacaatattatttaattattaataattaaacataattcagaattaaatagcaagtacacacattatatatattaattaattaggctacacaatttattagggtacatagtacaatgtaaatcattatgaatgtagatacacaaaaaattaatgatgcttttgaaaataactgtataattataacatagtaattgcactatatttaaaatataatgtatttttggaatttgtttggtaaaatatatagcttatatttacagaggaaaataataaattttaataaatatttaaaataaatttttttaacaattacattacaaagtgtaattaattatactcaatttttataagagtatgagaattagaaagttaattacatttaatgatacaattatagtataattatgtaattagacaaattaaacatgtaaaataaaattgtgtaattagctcgaattatactcaattctaattccgt

SEQ ID NO: 4813 - DNA, 1053 bp, Cannabis sativa
aaatcaagaaaatgattgctctaaatgaacattaaattgattttttttattaaaaaaattaatttatattttttttatctgtaaactttattcaactagatcaattcggtattaataatatcaataacattaaaataaaaattagactccgaaaaatacaatcatcgtataaacgaaacactttagccataaagtaagcaacacaacgattagtagattgttcgataaaatataaaaaaaaattgtaaatatataatttatatcaaaaagtgtttttaggttttttttttttttttgaaaggaatagtgtttttaggttaataaatataataatttttttttggaaatagatgatataattaagttcacttaatatatagttattcatttgttcaatatataaatagttattcatctttattattaatgaatataattaagaattgatataattttgtatcaatatttttgtatattgtagtgatgaatgactttaattactacttaaaaagtcaaaaataaatcaatacaaagtacaagctccattaatgttttaaaaatattatccaaaaactcattgaaaataatggaaattctttagatatctatttatttatcaaatttaattattaaaacgatttttcgaaaagaaatatgaaaagaaaaagtggaaccccaggactttttggctatcaataataaatgtttacaaagaaaaataatatatattaatttgagatatttatattaaaaaataatacatattacatgaaaaaaaaaacgtatgaactgtattaaatattagctagggagatataggaaaaaaaataattgaacaacaatattacaattaatatttatataaatatatatatttcctcaatttaaaataatatttatatatatttataaaactaattttattaataccattaaatttaataaaatttatatttaaaatattttattaaattaataaaaattttaaatcattatatatataaaaatatttatatttcctcaatatataaaatgaactaatatttgactacc

SEQ ID NO: 4814 - DNA, 504 bp, Cannabis sativa
  modified_base (127)..(128): a, c, t, g, unknown or other
aaataaaaataaaaaagagtttttggatttaaaaaattatttttattttctaatctaaaactcaaattgtaatgaccgcatagttaaattatgggaattagcagaaaattaagaggttcaataattnntatgtaattttgtgtttctgagtatgaattaggacttattatcagaaataattcttagaaaaatattctcctaattgcggagatatatttgaatactagatgcattaattatgttatatgtgaatttttatgaatttcatattttatgctcggtaatagtggaatgcgacgtgcggcctatagagtcacttggataactttaaattttatggggtatatagtagacattttgaatgtcgagagtgttcggggatatggttgtagaccataatacccttaggtttcatggttatctttattttaaagaaagggcatttaggtcatttcatgattagcttgtaattgtgttcttgtttgaattaagattatcaattcc

SEQ ID NO: 4815 - DNA, 1713 bp, Cannabis sativa
agtgccctcacacgtatgtaattgtaattttaagttaaggaaaaataagttattctagaaaaattacgagtcttcgtacagtttttcatgttttaagtggaaacctatatgtatgtacgagtatttgaagtgtcctagctaaaaacatgcgattatttaaagttcatacgaagaagatgcgagcattcaagaaataggaaaaaaattctagaaaaagtagcttttttagtctttattgcctaggattctattacccagaaactatcctatcatttctacatattttttaccctaaaaatcccaaaaagcatgtgattattcaaaaaaaataaaaatgaaaataaccaaggggagtcaaaggaacttaccttaaatctaaatgcacaaatttcttttagattttttaggcgtgatttcgagtagtgtagcagcaaaatcttttaaacaatcttcaagagattatcacgaatttgaattgaaaaattctctgattctttgagagaaagaagtttaagagaatttgagaatgagagagaaaagaaaaaattctcatttcatataaagagggtttttatagtcatcatagtcatctgttgagatcatgacatatgttgatcagaaaccaaaggtcatttaatccaatggtcttctcaagttgtgtctgcatataccccaaagggtttgatgacatgacatcttgggaagataaaagtcataattgcagtcgtcgtttcaaaaatcctcaataagacatccaaacatgatcactgcgatgtgacaacataactcgcttgtcactcgagatagtttcaccatttgacagacaactatcatcgtgaaactaggaacatgtattatggcacgaattttttaccttataatacgagtatagtctcataaacaactgacatgtagatccaattctcgatggaaaaagatagcatgtcaataaatagctcctgtagagttaacctcacatgatatgaacttgcgagaaggtgtgatcgagacatgatctagtcacacactgtgcacaacatagtgtcgagaaataagcaggaccgagagaagctagtattgattgcacatatatcaattatacacgatgagcaagtatatctctcctgcgacatgtaaagactgtttctttacacgtgtttggtccgaaagactaatgtgttcgacgactcgttaggaactcacaagctctaagttgtcaacacaggaatgttcgaatatgtgattaaggatgatcgcaaacattcacctaataggcctaaaggtccattatgcgagtaaaacacaacagagtccgcgagctcgcgtgcttggaatatagatagtcaatatgcgacttaacaagtcgctcacgttcagggaattaatcaaagaacgaacgaaattattcttacatttattctgttaatatttatcttaactaaagtgtgtaattaatgtataaacggtcttgtctgatcggttatgtaaaatcaaaggacacttgctttctatataaaggagtgatccaaatcaaatagagtaagttaaaagaattatctaaagtagactaagcataccaagctctaactgaattactatacttctatgtctcatttactttttactgtctgttttgtctatttcgtaatctaatttttaactattcgtcactttaggtgaatactcgcatatttgcaagtgtgtgttcttctt

SEQ ID NO: 4816 - DNA, 719 bp, Cannabis sativa
gttgtaaaatcaatcaaattttaggagaagaattaattacctgtctagactctgcacggtggtcaacaatggctgagtagcgatcctccattacagccctcctacctctcttacaataaacggaatacccatcggactcatcctccaccacatcagaagagcctttgggagaatcattagtaaaactcaaaggcgccatgggaatactaatcctggacggtctcttcctcttcaaaacctcacccgaacacgatccaagacccatatttgaagttgaagaaggtggtctgttcctctgaattctaccagctaaaggagaagatgttgtggattgagtagttgaggttgaaactgaattagaacattgaactttgatgagtcttggagaagaagaagaagaaggttgagacttgaaaaatattgaagagacattggttggagaaaagatgggtgaatttggtatggctacggcgcaaggcatttcttattatcttttctttttctttctcttttctgtgttttgagattgtgaaaatatttcaatgaacgtggatcgagaatgctatttaaggagatggccaaactagaaacgacgtagttgtgaagtctttgaccagccattgactatgttttggagacttatttgattttaagaatcactttattttttatttctaaatttttaactgtacgaaattattttctaactttttaagata

SEQ ID NO: 4817 - DNA, 1004 bp, Cannabis sativa
gaggctgtagaatgcatcctaatgctacttcttgacactggtattataacaacttcaaaaatttattgttctgttgaatttgatttcaccaacacctctttatgctaaaggattctgttttcactctgcaagcactgtgtttatagaatatgtttataagcacaccatatttcttatgctgttcactttgtcttttctcaggcatgcacattatcaaccgggtaatacaccattgacattagtttggaaggatgagggttgtagtcaatatgttatcgatacagataacaaaggacaggcccttagccaacaacaggtgcttgctttcttttgcattatttcaatgtctattgtgtgtgtatatttttctgttttttcaggttatcgttgagtagagattccataatgtcataatatttgattatttatttattttttcaatatcaggtggttttagagctccatgatgattgcaaagtgacaacatcagatgatcctcctgtagtacttggcttcttagatcaggagtttatacagaaggtaacaccaattaattatttatatttttgtactgtcactggctgtaagggaacttgtactcatgtcaccctagcccacaaagtatgttcaagctgttcaattttgtggaaatttaattatgatatttctgtacttctcagttaggattgcattctggaaatcttctccgttttgctattggtgatggaggattgagggttgtggatggaaagttcgagaaggctgatttacactatattggcaaggtcaatagagcacgtgcttttgcagatagttattccaaggtttgtggaaaagatatcataatgtacttttttcaatgattgttttttcttgatattccattatactagatgtcactaagtcaaacaaagggggaaggaacttataatgacatatataatttgggtgaaattgggcagtgtagtcgttagtacttctagtatgctatacctctcactgct

SEQ ID NO: 4818 - DNA, 631 bp, Cannabis sativa
aattatttttttattaaacccaaaagtactttctcataactcacttttcctgtctctctctttctctattctctttatctctctcgctctcttcttctcacacatacgaagaccctagcaacccacaactgccaactaccgtgcctacaatcgaagatcaccaacccaagactcaggatcttcgaaccacgactaccacaccatgaatataagttttctatttaattttattgtattctatgtgattgaggattaaaatgtgtaattttatttatatacttattgatttaggaataaattgtatgattaacgtctgttatttgtaagttaatgttagattggatcaaaaatggtcggatttgagttttggtaagacaactagtgtttttgtcgagcccgatgatggtcatatggtggtccgatgtcttcctattgttaaatgagtaaaggttgaagacgaaagtctgatagtagcccgatgctaccaataaatgtagaatatggtctaatggtagtcctcagctcgttcatctcctcattctgtagtcaggttcgtgagctataactcactgagtaggctcgcttttccttccccgactgatggtgtgaggttcttgggtctctcggcctc

SEQ ID NO: 4819 - DNA, 519 bp, Cannabis sativa
tcaacattcaagtgaataatctgaattgtgctgtctgtcatgctgaagccgagtcgcaccagcacttattttttcattgcaggctgtcgggtttggtgctggaaggtgtttttagatggcagggatttgttggcttgtcgtcgaacttcagcaggtggttctcttggctgtgctctgtcaagccgagcttgattgagagagtttgtgttatgagtttggctgccactatataccacatttggaggaatagaaacaattgtttgttttctaatttctctagcacgattacttgtttagtgaacaaagttaaaaaagatgtaaaatatagattgtatatgattaaagataggaaaggttccaaagtggaagtagagttattacaaagattgatttgtaactaatgtttgtgaggttgaggcttcttgttgtgagaagtggttgagtgtgtaatttggttgttcgattaataaagtttcttcttcttgataaaaaaaaaagattagaaattattttatgttg

SEQ ID NO: 4820 - DNA, 894 bp, Cannabis sativa
agaagaggaaacaaagaagaagaacagaagcggaagaagagctcaacaatcggttggctctgataccattttagtttcagaagagaaagaaaagaagaattgagaatgaatgaatgctcatttcattaactcgaaaacagaggaggtacagtgcattatatacacacaattcagtaataaccaataactcatctaataacagaattgtaaccaactcaacaccttacaagtaacactttagtagtgtgcatgttataaatggtgtccacataattaagtaaattttttttgggtaaatgtaaaatgatagaattttattcgtggaaattttacaaaagcaacttagaaattgccaaaaatcgatcgaaatatataattatgaatgttgtaaacttcctttctaaattctgaacaaataaacttttttttgttctcgaaaataaattttgtataatgtattgtagagaaagggatgaagacaccctatgggaaacaaaaaacaattttagttcacgcaaataatgatttaaattaagctttgaaacaatcaatggtataactgataattattaacttttttttttctgataaattttataattagatatcacgaattaatttgagagataatatcattgttaatccatgatagggaagtattcctaattaattgtacacgcactttaaaaatacatgggagatatagtagattatatggattgacagtatattactctaataattaattttgatgaaaacgtttcttgggaaaaaacaatatgaaaaagtacgtcacatgaaaaaagaaagataaaaagagttacgtaatatataacgcaaacataaactatatgcgtactgactaaatcaacacaatattatttgtaaatatat

SEQ ID NO: 4821 - DNA, 836 bp, Cannabis sativa
gttggaacttttaatgtttctgatttcatttggttttgtaagaacttggatttgcagggtcttaagaaaaagagtaaggttattcatgacaagtttgataacatggttgagaaaatcatcaaagaacatagagcagagaggaatattaatggagataatgatgatgttcatgttccaagggacttccttgatattttgcttcaaatttctgatgaagaaggcacagatatccaattaaccaaagaaaacattaaatcattcttcatggtacgttatatatattataatgtttacttaggtatatttattttaatcttgtgtttatattaaattttattgaggaatttgcaccgaaactcttttatgttttaatttttatacacttaactctcttatttttttagtagcaaaaccttttaagtttattttttttagtaaatttaaggtgtcagttagatattagtgttaaataccaattgaattattattgtatcgactaattcgagatttactgttaacaggtgtatacagtagtcacttagttgttatttaatggtaataattaactgaggtgtaaaattttcaaagaaaaccatacacaaaaaaaagatgtataaaaattaaaataaaaaagaatttagccgtaaattgctcaattttataaagtacatgcctgatgaattaattttatataaaatattaaatatcaaacatctccaaaggtaatatatattaagttaaaatgaaataaatgtgtacaagtacaaggggtcatgtgggagcgacatgattcaactaatttctttttttacataaaacgttttaaatattttaat

SEQ ID NO: 4822 - DNA, 1209 bp, Cannabis sativa
tctctctctaatgtgattttaccattttgcccttcttcgacacctagaaagagatccctcagatccattttcagggttttattatttccaaagcttttctcaaactccaaccctctcactccatttttctcaaaaaaaaaaaaaaaaattcatccaactctcattttcgccatttttgcacactcagatccttcaattcaatctcgcattcttcttttcagcttaaattattgtactcacagtttttgcatcttcttccggtttagccccaattttttattttttttttccgatcccgttgactctcatttctagggtttattggaggaggagaaaaccaaattagggttttcgttggccatgttgggaaccggtttacagtttgggggtcgtggacgtggtgaagatcggttttacaactctgctaaagcgcgtagagctcaacagaaccaacgcgccgaacaactacggcgagctcagagtgacgtcacgcctctcttcttcttcttcttcggtcaaggaaactacggttcaaagggagcccgataaccatgttgaccgggttagctttggggaaccgcagaagccgattgcgatgccggttattgaacctgtctcgccgttgagtaatcttgagcggttcgttcagtcgatcacgccgtccgtacctactcaatacccttctaaggtcttgttcgaattggattcgactcagtttttggctttttttgtttctgtatttcatattttggtcttgataatgtttcttttggatcttttgttttcaaactaatattttgtgggttttttttttttgatatcagacgacgatgaaagggtggagtggtgaagttgaatcccggccattttttgtgttgggtgatctgtgggagtctttcaaggagtggagcgcttatggtgcaggagttcctctagtattgaatgacagtgattgtgtgattcagtactatgttccttacttatccggtattcaaatatatggagactctgccaagttatccgtaaagcaaaggtattaaccttaccaccggtttagtttcaatttgagtttgctagtctttattgcagtcaatttaatcaattggaagcatttggtgtgtttttatttttagaaattggtccgtttgtggtgtatgtattggtgtaattttgtaactttggttctctggttttgtttgctaattggtt

SEQ ID NO: 4823 - DNA, 1445 bp, Cannabis sativa
tctctctctctctctcttctcggtggagatccaccgtcgtcgaccctaagaacctcgagacatgagaacccttatctctcacaatttcccctcactattctctctctctctctctctctcgctccctctctctctctccaagggtagagatctattgtcgttgatagcagcaggcagaggtccatcgtcgctcaggtgcaactctttttgctctcgattctgagttttgatttggtcatgtaatagatttagtattttttatggttttgaattttgattttgtttgtgatattattgggtttagattttatttgtggttttagattttgattttgtttgtgatgttggatttaggtttcatttgtgattttgattttgtttttggtagtggtggtggcagctgtggtgattttgtttttcttttcttattttagaattgaagtggagtgatggtagtggttggtgttgtgtgtgatattaaatgtggttatttaacggaaattgttagtttaataatttttttttctattaaagttaacagttaaaaataacacttttaaattaattaattaattatctttattttttttaagaaaaaaacaaaataaatatctacatttaatttatttatttattaaaatataatttaaataactatttgatcaacaaaatttaataattatttttacataaattttgatttaaatttaaattaaacgttaattcaattaattaattatactttataaaaaaaatatattagttatattgtttaaaatatttaaacttatttactatattttattgtttcataaaattaattaaatatatttttttacgaataaatataaaactaaataaaatcttatatatttaaaaaatataattgaattgtattacatttaaatgttattattattatttaaattaataattaggtaataacaactataatacaactgtaaaaaaacatacattgcatgttactaatactatatgaaatatctcaatttgtattatctattaataattacaaaatgaatttaactctaaatattaatttttaatatatataaatctatatatgtgaaatgaagacgaattgtttgttacaagcacatcattttgctataaatttacttttagtcacaataaaatttgtgactaaaattaaaacagttgtgactaattataaattattattctaatgttgtgactaagaggtctatggataataatattagtcacaaaaatcacaatttattatgacaaaatatatttttagtcaaaatatttgttgtgactaaaactaaattagtgacaacttctattgatatactatgttttagtcacgaataattttttgttcacaaaatcacttttagttacaaaaagtttatattctgattaaaaaattatcattaaggtagttttttttttttttt

SEQ ID NO: 4824 - DNA, 1667 bp, Cannabis sativa
tctaaatgataattgggaaattagaacactaaattttataatttacagtgatttcaatgaaaaaagggaaaagctaaaacatgatgagcaacattacagaattcccttattcctttgtaaaatcgaattttgtatagatgaatgttcaatttgatcatcaaatggtgaagactatataaggctgaagatgtttccaataagtggtataagttggatgagactgaacctgactgtaaaggaagttgtaatattgttgtatatttgattctcagggactgtgttttcactttctccttgactttcttgatctccagatgatggcagaaggacttgggcagattctgtaaggaattttcggcggaggaagatcaggcagcctgcaagtagctcatttacatgagtgggttggttaacaaacaacttaatccaaaacatatggtgaacactaatttcaaattagttatattaaatgtgactatataacaacgttacaatttaaatttaaatttactacaaatatctctcttattttttatcttatactaaatgtgtctatataataataaatttttcttaatattgctatttaaatttaaactctttacacatatttaaaataaaaaaaaaatctttctattattatttttttttactaaaaaaaatatttttattatattatttaaaagaaaaagtgtatgataattcaaaaacagtgaaagtattataaaattaaaaaatattacggtaattaaactaatattataattaataataaattttaaatattattatgttttgttgatataaataacacttgaattaaatattttttaataaaaaataattttgtttattcaataacatccacatacacaaaaaaaatctaattacataactaaaaatatacataaccagaatatatagtaagaatataattgagtatataactaaaaatacgtacaatactgtattgcatgtgatattaatctagtcctcggtattctattatagaaatagttatttaactttttttttttttttttttgtgtcttaacagaattgtttatgtttttttgactgaatatactaaattaatagttaaatttaacaaataaagaaggcaccaatttttaatggattcacaccatttgcacagagtctattgcatccctcccacaaaaaataaggcactcataaatagacacaatttgcacaaagtgtagctttatattttaggtgttattagacaccagtagtatttagcacttttggacaagttgctttagcaatactctttaaaaattattatattaaattataggaaacttaatacttagttaataacaatattgacacgtgctaaacactactaatatcttttagcatatctatatgtgtaccaaatatactcgatttccgactaattgaatgtgaataacttacctatttcaacataaaactgaacagattcatcttaccaaaaaaacacaactatttgcatacaacccaagtccgcacaaacttttaaatctacaaccagaatacgaatactaagaactaatcccctcccaatagaaaatcagaacagatgcatgtgaaacagaaccatttgcatattattagtcgtgaagtctcaccatgcctattagttaaagcaagatatattt

SEQ ID NO: 4825 - DNA, 702 bp, Cannabis sativa
tacgattaggacatttattcataattataagggaaaaaattatgaaaacgagcgtgcatatatatcactaatttgaacctatttgtttttctttcaagaccaaaatggtccaatgaatatgcttttggactatatataaataagaatctcatttttagttacttaaaataagctaaaaatgattggtttagtgagttttagctttttgtatatattcaatttgcaaatctccaccccttatcgctactttattttgagcaaatattttattttactttttgtatttgatttacttaatgaagtgacactttccaaacaaactcaaactagtcttcttcttctattttcttttttaaaaaattaaagaaatatatattttgaatataaaaattaaacttaaactcgcttagttattaaaagaatataaattttgaatttatatataatctttggtaattcaagaaaataaaattatataacctcatttgaaaaggaaaaaaaaaacataaagaaagagaggatataaatatggttggatgagttcattttttgaagacacacttcccattttagttaagatttgtaattaaatagtgtggtcgaagatgttctaattaggtgcgttattagatgcctgctacatggcaatcttggaagggtgccattttgaactatctgcaattagtatgtactttccacttg

SEQ ID NO: 4826 - DNA, 1133 bp, Cannabis sativa
ttgttccattggaatttatataacatatatttcaatcaaaccaataaaataaacaaaaaacaaatctttatgcatgccaaacacaccagataaagccaaggctgtaaggctttattattattatacaaacaaaatacatcggttatcatatatgcaaaggactatcaattatcagaaagaacaatcgaaatcaaacaattatcagcatgtacctgacaacggttcctgtattcctctggaagttcctcagcagccagcaaagcatcaagcatgccaaaatacacctgaagacatgggaagaaaaatgagaaattgactgcgtcgtcaactttcatgcagcagataaaatagttattagggttgctaacagaaattaagagatgaagggagataattctcttacagccatatctcctaaagatttactgcaaattggacaggtatagtgactgcaagtgtacgcctgacagatattgagaaaatatgagatcaaaatctcaatgtaaaagaggttataaagaacactgtatctttctttcatatattttcttaaaagtttagaaatttaaaaaggatgacaaaaaataaacagtacaaaagttgtatgaacctgaaagcaagcagaatgcatataatggccacaaggtagagctctaactgctgcacttgatgtgaaaagaaaatcacaacagatggggcagtttgtttccaaacttttctcaaggcatttgtgattcactaacttaatgccaaggcaacagttgcatgtcatgcaatgaaaataatcgatgccaagacccttccccacgcggcataaattgcaaaatgggcaatgatagacagtcctgaagcaaacaaaaaagaacaaacaacttactgagtgcaaaattgtaaggctgtagagaagaagtaaaccatatcatgcatcttagctctgttttctactacagctataattacgaagtaaaagaggttcgatgtgctaagtcacaataaatttaattttcctgtattacataaataatagtgtcactccttatttgtcttattcatatatattttcaagcctacatttatattaattttgaggcatggaaacaagttatttcgttggatgaggaataagagacctg

SEQ ID NO: 4827 - DNA, 610 bp, Cannabis sativa
taaaatttatgtataacacatatacatactattgtgaataatataaaaataactcaactaaaaaaaaccgcacaatcgcacactaaataatatcttatttttgttttcttacaataaattataatattaatactatttaaatttatatattaatttaaaaatattactcaaattaatataattgaagagaataattctacttagtaatatattttttgtcaatagttataccaggaccaatttattttttttaccaataaatattaaatatgtaaaaaaaaattatatatagttgtatatgttgttactaacccttaaataacaggaaactaaacttcgtatcgtagcaattttatttctcgctttaggtaatttttacattttaataacaagcttaaagtcccttaggttagtcttcaggggtggtttgatgctcttatagaatgacaatatcgaagtcactcttttatcatacaatacaaactactttgattgttacacgcttttgaaatggcctttcttttcattttactgtatttttatggaattcttgcagcatagaataaagcagacaattgaattctttttattaagttactgttatatatag

SEQ ID NO: 4828 - DNA, 2233 bp, Cannabis sativa
gaacctcggtgctagcccttcttgctccgctaactctggctacgttggcatttctttccacgagactgagaaccccttatcctcccagactcgctccaccgcctatgaaaggccatgttgcaaccatctctggtggaccccatcttgtcgggagcactcgtaacgcgcaaaagagatatttaagggaaattatagatggggaagtgtgtgctttggtgcaacctcccgctcaacgccccaaaatgttgaaccttcccgtcacatttacaaagaatgatgctaatgtgtgcttcccccacaatgatcctttggtgattgacgcacatatcacaaacaagcgggtctctaaggtagggctaagcatcagtgggtttgattagttttttttcatataaaaatccagattttgatttttgttctggattggtgcgatccaaaaaccgaatgaccaatttagaaacttatttaaaactgaccaatccagactgcggtttgatcggttcaaaccgcccaaaaccaaactctgttttttttttgggtaaaataaaatctaatttatcatattagcatattatcagtacaaccatacaaattaaaatatatagttaaatccaaaaactaacaaaaattgtagcaatcggatgatagaaaactcaaatattgaaatttgataatatttcaaattggcttcattcatattgaaaagtacactaacagtaataatctaatcattgtaagtaataaaagcaaaatgaaaagtgtcttggccatagagtataagatacccacaattgaagtgtccagatacaaaagtaggaacttttcttcattttgtcaattttttttgttgaatatcctctaatttaagttctgtaaaaaatagatgaaatttgtgaaagatgagattgacattaagagaaaaatgagtgaaaaaatgtataaagaaagagaataaatattgagaaaaaaatgattaccattaccaagattgagtcatggaagagagtaaatatctggggagaacacttgaaatttttgaaaggaatattattttgatttatttttatgagtagtgattgtaatttgtgagattaagataaagagagaaagaaaaagcccttgcatgtagcaggaggcgtggtgatggtggccctagtagatttgaggcttttattttttttttttattggagagaagagaagactcgcgatagattaaaagagaggttgggtagtcaagtaaaatttttatcaaaaagagataagagagataatagtttattaattattactttattttacatttatattattaaaaaaataatatatattaaaaaggttacataaataatatatacatataaagtaataatagtatatacatatatactaaatagtattttggtcggtttcatttttcttggtcagcttggtaccaaaaaaaaaccgactgcctagtggcagttttaaccattgggaatttttttaattttcgattttggtggtgtctgttttaacggtgttcagtaggtcagtttgagcggttcttttagtttttttgaatttcatgctcagccctactttaaggttcttgtggacaacaaaagttctgccaacaatctgttcaaatttgcatttcaggcaatcaaactcaccaaggtagatttagcccctttccccattcagctgcaaggttttaatggtgatgccttaatgccaatgggtaagatccagctacttgtcactcttaaagggaaaaatgaggcaagtgcttttaagcagtcaaattttgttgtggtagactgtccaactgcatataataccataataggatgaccaaccctagtggatttttgggcggtgacctctatcgggcgtttgtgcatgaaattcccatgtgataatggatgcattggcacgataaagggcgatcagcaaagtgcaagaaattgttataatgtttcgacgatgctgtgtttatggtccgagaagagacatttgatgctcctagaataaaagacttgatggatattgagactgttcggtaggagtttctatatgagctggacccaagagttgggattgaaagaaatctagaaccgatggaggaggcagaagaagtaagtatatatgaggaagacccaacgagaaccatcggagtgggaagaaatctacagtccatatgggaagtcgtcataaatacggtcaggaggaatcaggatgtgctagcttta

SEQ ID NO: 4829 - DNA, 877 bp, Cannabis sativa
gccattgatagctattttcatttattcatgattaataataataataataacatcgaatagaaagagactttttatgtcaaatgatatatgaagtttagttatagtattgaccaaagagacttgtatttttcatttaataaaacgcgttaaatattgaattgaacccttcaaagacgttttgatgaaaatgactccaaaaacactttctttggaatttggttattacctttagacaactaagcataacatgtcgatgtgttgaaaatgtggcattaattcatagatttaaactagctaggtgtgttaagtttgacatgtgaacgttattttttggtgattctaacctcattcattctatcaaaaaaaaaaaaaagaccattcatgtgaatggcaatttttgtgttagagctatattaatatacaaatatcataaccaggtagataattagaaacatgaattgtctcctatgaggaaaaagtacacaacctttgcaaattcaaagtgtgaagagcccacctatttataaatatcatgtcatgatatcattactaccttgaaatcctcattcaaaattaaaactctaaataaaggatttgaatctagttttttttaaggagaggtataaaatcactccactataccacctcttatatggtaattgattattatacttgtcataaacttattttaacagtatattcctattgaataagaaagtaaaagagtagaagaagtagttattcgggaaatttcttttatcctggttactataggaaaattttaggacaaccgcttctttatgttttctattccttattatatgacatttttggtatcttttgcatcttttccgccacatttttgtcggaattatgg

SEQ ID NO: 4830 - DNA, 1551 bp, Cannabis sativa
ctgactttgatgctttttgacttgggttgggtgcatgttttaagaagttttatttattatattagagttaattaattaatgacaatattggttaaataaaattgaatggtttggaagatttactgccgtgaatacagtgattagtacagctacgtgtcacatttgtaacgtaaaagagtagtgattcactagtgggtccgtcaccgccagtgtctttatcttattgtatgtctttctctatctctatatatatagttataatctctagatattgaaatgaaatatataactgcctacactagtttattaagacgtacattttagagtttgattcaactttgaccacaaatacatgtaaattaatcagatatgcaccatttttcattaaaataatgacccaaaaaaataaatcaatggtttattttttaattttgagatattttgagttaatcttaattatatggagaaattaatgagaatctatgtaagaaaaagttaaccagatcgatcatttgcttccatcaacttctttaaatatccatttcaaagaaaaaaaagactctaattaagtaaaatatacatatttatgtcaaactaatacaacctgctgatcaatgtatagtatctatcattgatgtatattaatgtaaaaatttaatgtatatatgaaaaatgatattagaaagatataaaaaaaaaactctgctgactgtggggtctaaatacatatactcaaagtcaaacttaaccctaattagattatcattatgttcaaatgtaattatgcaattgaatagaattagtacttaagtcagtttaaaaatattaaaatgtattagtagtgtctaacattctcttttttgttattatattttattgatataattaaatattaggttccatatataatttaatataataatatttaaaaaatattattaaccgattagaggcatcatctctaagaaaatattaatcacttctatatacaagaaagatggcaataaaagaagaagaatattaatgaattttagtttaagattttaataaacatttgaaattggaccataataaaatgtcattactaattaatttaaaacattgctattagatataatattgcttagtaccttctaaacatatcgtcttaataaaatttagtttaagattttaataaacatttgaaattggaccataataaaatgtcattacttaatttagagcattggtattagatatagtattgcttaataccttctaaacatatcgtcttgcgattggttagcgacattaattttctaaaaattattatatattaaattatataagacttgatattagttgaatcaataataatattaacacgtaagagaagactagacactactaatatattttaaaattaagtttaatataaaactcccactattaaaataaccattaataattgaggagtggcacctactcaatttcaactggcaattaattaatatgactatatctttcccctatgaaaaataatagaaaatgaccatatatgtacattctaaa

SEQ ID NO: 4831 - DNA, 2895 bp, Cannabis sativa
ttactgtttcaaaagttctgttctgcattagatcaagtctttttgtgtgtgggggggaatttgattctaaactgtgagaaatttacgttgttgactcttaagagagtttattgggtgaatgaaacagtctggaacaagttcattacctaccaagaaatatctttgtgatgtgataggtccatgggtataataagccagtaatttagggactttgagttagctctttctgggaaggaatatttgatgatacatggaagatccaactttatatctgatactatggattcaaattattaatgttgtctgggagaaaaaaaaattagaactgcattgttgagatcgattctctactcccatcattttctgttccgctcctctttcctgcgttttttctttccacccttattttccattgttagttccaccaagactcagttgctcctttcattttcaatgctaatgttttcttctgttaactttataattttcaggtaggcctatttaattgttgttttctttctttctagagtttcaaaagctatggtgagtgactattcagaaaagattgaagccattgcttcaaaattaagttccatgatggtatgtacacatgtatatgtaattttattctattatggggtcattagatttctttaggatcaacatagtttaactttcttgctttcaatctttttaagggatttttcaaattgatttaattcctttgctttgtctatgcattcaacttaaggatgaaacaaaataattattgctttgttggactattatattatgtccagcctgatttggaagttccccaagagtccttagcaagtacttctgttaaaggaagctccgttgaattagaagaagaaactcgcatttccccatctccaggactgagaaggagatctgtgtaagttgattttttgttgttgatactgtagattttgcttggctcctatagatgatcgttttcacgttgtttcgtgtttattaatttattgatttatgcaggcctggctcaaattttgaagataaagttgaggctaatgatgctaattcttcagcacctatcaaattggatgccatggcacaggcacatatcgaaaagcaaaggtatttactcttcttatatttgtactcatttcttgcattttgttctgctttctgatagaccccattattagtatggtgaggttgagtatagcaaataaaagagatgtgactaagtgtattgaggagagttgagtggtaaatagaaaagttatgcaatgaattgagtaaaactctttgcatcaaaggggcctaagggctcccatcaatttgtaatcagttttctcatatagtcaatataatactctacttactgtttggctactatttgctactgtttcattgttcttgatgctattgtgagtctgttttgctggttggttttcttgagtttggagtactcggttctcatcacttacactttttcttgactacagttgcattcggttcatagcgtggctgttctcatgaaactttttataataataactctgaagtaatctaataaagttatggttagttgagttcatttaatggaaaaaatactagctccattggctccaatgagaacaaaaaactttgttagaaccaagttaggggagtgcaggtcatgaatcgaaaccaattgcttcggctttgtttttggcttttgaacatgctattctttggtagtttgttcttgtagagttgtatagatgaaagaagacccgaggcaggtagctaagcaaacccaatagaacagtaactgaattatagaatagtaaagctatagagcagtaacagaagtattgaagagatattattgattggtagaaaatatcaagagttaagtttcacgggaattcgagagcctgggactctccatgacgctgtgaatcaattttgctaatctcagttagattaaccctcttctactaatatcctggggtctaaccgatcgctgcaggatcgaaaatttattgacacgaatagtgtttttggtcatgtaaacagttacataaccttattaattttgtgtaatggctatgcttaggttttgacattgttacttttgtatgagaaagtaaatctctatagaaaaatggctccatatcaatatatgttttggttacacttgtatctatttatttaagaaatcataattactggtttttcttgttctgctatgtataataggaaacttcaagaggacttaactgatgaaatggttgggttagctaggcaactcaaagagagtagcattttggtgagccagtcagtgcaaaacagtgaaaaggtcagattatcatatcatagttttcaattctttatgtaacagttcttaaattaaatgctgtattataatttggctttaagattattgagttaaggcctaacttaacgacggggcagcatggcttgaaatcgtgttttagaggttgaaaaaagaggaatatatttattgtaatacatcaagcaattatctttgataatcaataaaacaggaaatgcctgatgcatggctttgagtaataagttacagaaaccggttccctgagaattcgatgttatgtacaagttcttgcaatcgccacaaaccatctgtttttcactttgaagatatcattttaatttccaagcattgagttgctgatattctccagtttgtgtgtgagcgcagatactcgattcgacagaagaggccatcgaacgtagcttggcaagcaccggtcacgcgacttcccgggcatcggaaatatactcaaagagctctgcaacatcatgcttgacatggctattgatgtttgttatgatttgtatcttcattatggttgtgctcttgattcgtgtcacttgatt

SEQ ID NO: 4832 - DNA, 970 bp, Cannabis sativa
gtggcaattagatattgccaataaaccagtgggatgtgggattgaaaacccaaggctcgagccacgtttaagatatgtttgtgtttcctttcgacaaccaaagtttgttgaggtctctcaacacaagaatgatagtgtataacacctttggaagcataaaaggaagagagatttaactcctttgcgttatctgatcttacaactttaatgctgtgagcaaattgtgtatataccatgtgaaaaaaatctagtatgatggtttgtacatcagatttaagttttagcatatatgtccaagtgaagcgagatttatcatctacaatggttaagaagtatttaaagccttctatacttgttatttgaaaaggtacccatatatccatgtggattaaatcaaatatgtttgaagaaaaattattattagaaacgaatgttagcatatatccatgtggattaaatcaaatttgtttgctaaatgacatatgtgacaatgtgtagaattttttgcaatagaagaaccaatctttttaatgaaaaaattggaaatgtacatagatgggtgaccaaggcgattgtgccattggtgtacatttgttttattaaaagcaaaggtaggagtactagtagaagctataggagtatcttgatgtatgagaaacagcttcccatatcttttagtcgtcccaatcaccacactccgagaaggatcctgtataacacaagtagtggggttaaagaaaatgttgtatggtgtgtgatcaaccaattctatgagggagaaaaggttgataaggaatatcacattatgaatagtaagatttgtgttaatgcagacagtaccaattttggacagaggaatctgttgtccattaggcagcagaacatgtttagggaatgatgtgttctgaaatgaagtaaagcataaaaaattgaaacacatgtggtcagtggcaccactatcaataatcca

SEQ ID NO: 4833 - DNA, 1933 bp, Cannabis sativa
tctgttacctctagaatgtatataaaacagaattccagaaaagcaaaaaaaattactttcttaacaatcaccaattgcaataaaggtcaagcaatgtagttcataatgatcattgtgtgcaaagtcaatcgagtccagggcccacatccacttaatattctaaaataaaagtatcatctttaaatcttgtgctacttggacattgcaaatctagcaagcacttcaataccatccacaaatgtccagttaaataccaaacataagtgagttaaatttggtgcattcaaccattaaacatatggtctaacatgattgcttttcgtaataaatagtccaaagaaaggaaatataagacagataaacaaatttaagccacttccaaaaacatagaaagattccttaaaattaatatatatacaaaacattcactttaaagagtaggattaggatacttacatgaattaccagaactggacaattaacaaggggtattttgtctatattctgcacaaaatacatggaagaatcattactaacattataatttatctaagcattttgtgcaaaacatgcataaatttttagcattttaagaagaaagaccttgtaaatgtcaaaccagtaggttcgcttgacaggatacatgactcggagaccagacaagatgggactatgtagaatcacagctctcaaacttggcaaccgcgtagccaaatctagagtgggtccactaccaactgactgcccatataagataacatcttcctccttgaccccatacttctccacaaggcaccggtaagctgcttcaatatcagcataagtgttctgttcactcggctgttttcagaatccgaaaagttatacaacaatctcaaaatcccattatagttaagactaactgaacttgaaaggtagaaaagtttggaatctcagttttttagaatcatttcaggttctttggaaagcaaaaggcaaattccaaaatgggttattttcttactagtctcaactttttccagagaacaaaaccccaccagaatcaaaatctcaaagtccataaattggcagattctgatagagattttcgaaacgacatcaaaaacaacaattcaagtagatgtttgctaagcattcaaatccaaatcacgtaccttccctgtagatttgccgtagccagaataatcataactattgagaaaagaaaagaaaagaaattgaattaaattcaccaaataaggtaagatgggtattcaaatttcaaataaaaaacacaaaataaatgaagagagagagagagatgaactactaaccccaacaagttgactcggagaataacactgagttcagcaaacaactggtacatctgacccagatcagcggcgttaccatgagagtaaaggagggttagggaagcagaagggttcttaatataaaccgcaacgatgtcgtttcctctcttggtaggaagcttcaaaacgtcgacgttttccttcctagccgtcgacgcaacccctgtcatcctcagcttcccactactttcctccacctccaatccatacgacggcgggtttggcgggaagaacgcgaacttcgccgccatcgatgacgtcacagctcccatattacaccccagaataaaaattaacaaaagaaaaacaaaacaatcccccaaaaagcacacaactcaatcaatctgatcatatcaaaaccaaacccaattaaattctcaactcgatgagggaaaaaaaaaacgattttctcgaattagaaattacaatatttttttgtttctatatttgtgtgttttttgtttggacagtgagaaaacaatgagagaaagttgatcttgttaactattttttagggttgggattttgctgtctcagcttcccgagatgagattagcagttggcaaagcaaacggggtttt

SEQ ID NO: 4834 - DNA, 1099 bp, Cannabis sativa
aacattgttattctaatacaatttgttttagttttgttttggaatgtttaagattgtatttcaagtttacaggttgaaactctagttttttagttggacttaactgggctcatacgtgcggtatccttatttatacagttttttcaaattttctacctttggtgaccgttgttaataatggaaatgcgtatttcaatgagttatgcgtattgtttgacgacgttatagatttaattattatctaaatttttggagacaattttgtcttatgtaggtcgtaataagaattcatcagctgatggtttagcaaaatatactcttcaattaaatgatgagttattatgatttgaggaggttcttgcgccaaatgcaaatatatcgtaaatttatgaataattctaatcattagagcagaagaagagaaaaaaatacagcacaactcaattatatatgaaaaatctacaatttaattatatgaaattttatcatagctacttctattggtacttgtatatttttcttcctacaatgttttcagattactttctacaatctctttaaaaaaaaattacacatatatcatgctacttatttaacaaaaaagttatgtttctattcacaacactttaacacaaactaaataacctatatgaaataaattataaatgctaaaatttaattttatgtgcaatctacaaacattaaagtcaaagatattgtacttaggtaatattttatgaggtaattttttattaaattttttatcttggttcttattttgtgtttatgagatatgttatttctgccttttaaagaaaatttatatttatgattacatttacttttgttataacatattacttatatagatgtccaaattactaaattttttctattaattatcattaattatatttattattcatctcattaattttctaatgtatgtttcatatatttatataaataggaaatcactccattgaaaaagtactaagaaattctcattttgtttctctttttctcttcttcttccttttttcttatctattctatattattcaacattattttgtaacacgttatccgtacgagtctt

SEQ ID NO: 4835 - DNA, 575 bp, Cannabis sativa
aaatttattcactttttagtatctaatttttgtaatataaaatgcttaatattatactactgtggcgcattgtaagtaattaacagttttttatactatttattaaatgaaaatatgtatgaccaatattgaattacactaataacgatataccacttcttgtggtgattgacactttaaggtaccccttaacattttccataacagaagtcaaaatctcaccgtaaaggtctattttactttagtgctctaaattcatacatgtcgtgctagttcggctcatatgtttctatacttttagaaaatagaacctgctatagaaaaatatgaatcgtaccaagccgtgccaatatttttaaaggttaagcccataagctcggtatttttatgtcgtgttgtactaatttctagcatcatgttgtattatgtttatactacccaacctgtatttgctgcactactctactcaacccaaatacatgcaaattatagttagctcctttgttgctaccttagattgtgtttggtgaccaatgaagtttctatgtaattaataataaatacatgaaattata

SEQ ID NO: 4836 - DNA, 605 bp, Cannabis sativa
caaaacttgtaaaattccgttcaagaattaccaagatttcaatgcaaactttcataagccgtcggtgaatactcattttgctatcaagtatcaacaaatttccatagtgaatactaaaaattgtcaaacttttttcttttttgcttttacataattgtgaaattttaaaacaataaggataacaataatctctaattatggctcaggacaaattaatacactgagaataatcatcctcttacagatttttcacctaagtagaagaatcaagtcatcttgtcctattcatactataagaataatccccaattcaaacattagttccatacaaacttatttctacatatataaaaaccgtaattgtacttgccctaaaattctcctcctccactgaattcccctaatttatcaaacagggagagatattcacagctaaaaatcaaacaaaattgaatccttccggaaaagaaaaaagaaaccctaaaagataatttaagcaaagaagtacctacaatcgaaggtcgggacactgaaacccactcttggcaaggtaatgctccacaagctcgtcaggtatctacaaataaacgaagaaaatgaacaga

SEQ ID NO: 4837 - DNA, 1123 bp, Cannabis sativa
tctgttgagtgttgggtcaatagtcctcccagttctcgggctgaagttgtaaattcggtttgacattttactacaatgagagaaaccaatcgagtgggcacctatatatatatatataaaaaaaaacagtaataaaataaattatcacaaatatatattatttaaaataagataataatttagtaagaaacatgggtataattttcatgtgacgtataaaattgaattaccaactagagtagacttttgcgttacctgataatgcaatcatatctttttgggtaagaccatgagaggcaaacatggaattgagttggttcaagttaaagtttgggtgaggaagctgcctttgaacgctcgccttggttgaaatcctcccatctcgtcttcccaattctactgaataagattgccctccagtctgcaattacatattttgatgattaataatatacatacgcacacagttatttataattatctgttcgaagtttatacgtgactcgctactattttgttatctatatgttcataccaaacacatgatcgaatgaatataaataaattaattcatttgaccactataacatgacataaatcattatatatttagatcaaatacattgttaaggttctacatatataatcgatcacaatgcatcagagaaaataggtcaaatggatatatatttatttatttgatatatagaaataaaaatgattccacaagtatatatatgttacttattttttaattaatgcatctacatattactataattttatatatttgatacaatacaatcatacaatgattaattagggtgtgcttaattaactaaaaccatactaggctttgcgtcaaatatatattttgtagagtgatagtaatacgtcagattataaatatatttatatatatttaatgtcttggtttcttcaaaaggcctaattatattacatgtgtcgtgttataagtggtaaacaaattttaatgttatttaccaaatataaaaaacattagaaatccatgcaatattaaaatgcagacaccactttaacaactctaatttatttattaaaaataaaaaattaccaagacgacgacatctctggtggcaag

SEQ ID NO: 4838 - DNA, 1217 bp, Cannabis sativa
  modified_base (627)..(630): a, c, t, g, unknown or other
cagactcgaacccgggactcaaacttgaacatgggactcagacctagaccgagatcaggtgtgggacccagacccaaactaggactgagccctcaacctagactaggactcggacccgaatgggtaccatgacgcgggacctaagactcggacctgggacttgagaaccaaaccgtgacctagatgggggacttgggccccaaacccgagcctggaccaagaccaaaaccaaggatccaaacctagatgggggacttagacccaaaacttgggccctagaactagcactaagaccaaaaactcaacccctgactcgagacacaagacccgaccttggacacgaaacccagcacctgactaccgggacaaaaccctaagcccagacccaaacccaaacttaggactcaacctgatacccgcgacccaaactagaacaagaccgtgatcaaagaccgagatccaaatcttgacctgaggctttgacctgatccgtagtaagtgtttgaatctaggacccagaaccaaatacctaccaagacccagactcgaatcgggatccagccttgatcccagacccaaaatcataatcggaccaggactaggatgagaacccagacctgggactgnnnnaggacccaaacctaaacctaaactcaaaccagaacccataccgggacttggacccagaccgggagctgtgacttgggaccttaacaaggaccgagacctggagacagactgggactcggacccaaacccaaacctaataatccgggctgcactctggacccaagaaccaaactcggacctgggacccaaaaccgctacccaaactgggacttggactcgaacttggacctgaacccaaaccaggatctagactcagaccgggacacgagaccagaacccgaaccggaacacgaacattgacctggactaggacctaggaccgaaacatagatggaggacccagacttaggaattgggcccccaaaccgggaccagaacatgggcctcggaacttggatcggtttttgggacccgaccccagacccaaacctggacttaggacccacctcgggaattgggattcgagaatcgatgcttggactcgatccgtaccccgtgacttgatactagaaccgaaactagaaacagatgggcaaccaagaccacgacctggactgttaggctaattttagcctatgtatcgtgtc

SEQ ID NO: 4839 - DNA, 694 bp, Cannabis sativa
aattcaatcacacataagaaattcttgatcacaatagaattctccttatttttctcaacacttagaatttttatcatatccttgaaatcatcaacattcttcattatgttattcctatcaccaaaaatcacaaccaatgaaagaaattcaatcattataagagagatatgtataccaagatcaatcacaaccttgttcatttcctcaattgtactctttctttgagattgatcaaggttttttagccactcaatcaaactcttttcgcctttttctcttcctttctcggcttctttctcccaaatcttcataaactcttgtaaattttgtaagtaaatcttgaaagattgtacaccaattagagatggaatgttgtactttaagtgcttttcttcaaactcatcgactcggttgcttagattaagagctcgtttcttaaactcggcgtaattagctttgaattcttcgtcttgcgccttcccgtaaagtgctgatcttgcttccataataagagaacgtagttgaattcctagtttatttatcccttgaaagtcatctgtgtttttcatttcgtataactttttggaaattccttttgtgatatgagttaatgggaaatcatccatcttttccatcatagacagagaatccatttttcccaattcaagaagatgatctttctaccttttcttca

SEQ ID NO: 4840 - DNA, 1374 bp, Cannabis sativa
tatatatttttataattttttatttacattttattagataacatttttacatagattaaacgtaaaaatattaaatcatatataagaaaatgaactaatttaacgtgtgaatataataatttttagaacaatagataaataacaaagtgtaaaattattaaaagagaattaaaaattctgtaaaaacataatttttttagttatttttatagtaattctaaaataatttaaataaaaatgatcgtaataagtactcatctcaaacaaatttataactccgatctaatatgatataatatatatttcatatttttttaaatcaatgatatctatttaaggaatgattcattatgtgacagtataagaacttgttacatttggtccacataacattaatgaaatgaattaagtttgatgttcatggtattttggtggggtaggaaatctaccttcataacaagcaaatagtcaaataaaaacactcaacaatcatagtattattaattaagtagtatcatccactacatctctagagggcctaggcaacagtgaattttcctgaacacaaaacgacaatgatatttcaccgacgacgatgacctttgaatctcaaagcccaatcatataaatacacgtgtagcacacaatagagtaggacccaagaacaaggtaatagtgacagtactgagaaattggggaggcctgaccaaaccgaccattccataattcataatacatttcgttaccaccaccaccgccccataggaaaaatgggtcccacttttctcaaccactcagcggtcgccacgttggcatgattcctccaatcattgcttgtcgtttatataatttttattagtttttttgctgaatatttttattagttttgtttttggaataaaaatgcttatcaaccaaacaatattttttcattatcttataccgattttgagtataatacaatataagctattattagttttattatgagcttttagggttaaagtggggtggtcattattttaaaaaataaatatataaagcactggtgtggtgagtgagctaatgtaagacaaattgcttccctaaaaattaagaaaaaaagtttcgtggctactatattgcaacgtggcacaaagtttgtggtatgaaagttcttattgcgcacgtgaaaaataagaaaaaaataataaaataatattggtcatgggaagttcagtttcttcagctttccataaaagataggttcatctcggtcaatgtgcattttaatttccaagtttccagaaaaagacggatattggtgtaatttttttttttctttttgattaacttatcttggcgcgccagtgtttttgttttttgttttttttt

SEQ ID NO: 4841 - DNA, 1409 bp, Cannabis sativa
aacaactagtatgtatattacatatataagtttgatgagagaaagaggagtattatacatacatatatgttgaaacttatttttgaggttagtcatgtgttggcttttggtgacgttgaagtagtaatcgggataattagcttggctcacaaaattggccggattggccgtgccgacggcgaggatggcggccggagtatcagcacgctggctctttcgaatttggtccacagttatggaagccatattataattatgtatatgtataagtgaaattaattactaagtgagaacaatcttgtgtttcttatatcttaaaattatacatatttataatgtgaagaagtagagttagttagaatttagttgagtttaatataggtaagatatatggccattattaatcgagaggttgaataattttgcacaatgtggaaatatatacataggaacgaataaaaattaataccctacattcttaggtacatctccaatggagatctattgccaaaatattcatagttccataattgttatatagtaaaaattgatttaagtttggtttacaatatagtatcatggaaattttacattacaataaaattcttttgtatttatttttgtgtcatttttaatattttattaggatatattggtcgaaaaattaattgaattttatattttttaccacttaactataaaaattaaaattttgataacaaaatttattgaacccctattctgtattacttgctacaattctgtttaaaaatttcagttaagtgtcacagtagattgccacgtgtaaatgtgggtaggaccggtcttaagttgaaaattattaaaaaaaaatgtatattttttaaaatgtactatttttttatttgggcctctaaaatgagtggcccctaagcgcagggctagctcgcctatgcttagcatcgaccctgcacgtgggtattctaatgtgacacttaactgaattttttagaccgaagtgtaaagagtaaaacaaaataggaattcaataagttttgccgttaaaattttaatttttgtatttaagtgttaaaaacataaaattcacatatttttaccattaatatcattgttttattattaaaattacttatttaatttcttaaattataaactttttacatttattttttctatgataaaataataaaatgaataataaagttattaatttgttatatttttaaataaaaatattattttttttaaataaaatattatttttttttaaataaaatattaaattttacattaaattttacgaattgtgtatataggaacataatgtcagagacggccctagtttttaacttattttggctacttaattttagttttcacataacgtatattattgaaatttttaatat

SEQ ID NO: 4842 - DNA, 3378 bp, Cannabis sativa
aaaaaaaaactactattaaataattaagttcccaaaggcaacgttcctttattgctattgtgtatagtttcatcgatgatctaaaaacaacataaagtttttttcactttgtgtctatgctggctgctgaacagttatgaattggaatgttgtctccataagaaagatttagaaggcctttaaatggactataagtccaacttactggctgttataaacccaaaagaaagtgaagatgataagtagatagcttacatttgaaatatgacgagggcagttccattcttgtttttgtggcatgtaactccctcccaagcatcccaggtagtaggagcacaaggatccccattccaacccattctgtctggaattttaagagagtcctttaatgctttcatagcattcactacagaagaagcctcaattagtataactaataatgaaacaaacccattttgattcacatgttccgtaaataaaagatgcaataaacatttacatatgttatcccaccattctttacagtttgcagtacatttctggctccatcattgcttgttctatttcaattaattaccaaagagcaaagagaatgcaaggaaataatgaagacctttttcctttatttatttatttatttttttgtcacaaattcgattctactatcttagcaactataattcagaataattttcctacaatggtctgcaagtattaaacttagctagtgaatagattagttagtttgttaggagttaactgttagcagttagttaccagctgtaactggttttagtaacagatcggttactagtttgttaacacttcagtctagtatataaacactctgtaattcattctttggattaataacattcattctttactttgctttctaaagctacaatagtatcagaaccacatgattcatgaaaccatcttcttcaatttttttttttcttaattgcttgtgtccatggctcgtggaggtgtcaacactcaaagtcagaccactcaaggaaatacctctgaagaatccaacccattttccgttctcgagcctagttcttgaccttacattgatgcaacacaaggtccttattatctctcccatggcgatcaccctagagctaaattggtgccaaagattctaactggtagtgaaaattataatccttggagaagatcgttgatggtagcattgcttgcccgaaacaaaacgcagtttgttcatggaaagctcaagcaaccagatgaagaacacaaagattatgatatttggaatcgatgcaatagcttggtcatttcttggattttacatgttgtgattgtagacattgttgataatgtgatgtggaaaatgcatcagatatctgaaatgatcttcgagaaaggtttcatcaacgaaatgctccaagaatctttgaagccaagtgatctacgcaactgcttcattagggatctcattatgtaaagctttgtgggatagaccactacctgtttgtaaatgtaagcacaatgaagattattcaagaataaccgggtggaagacagagccttggagacttggtgggtttgaatgaatcatatagtaatactcgttcacaaattcttatacaagaacctctacctagtatcaacaaagcttatgcctcagtcattcaagacgaaaaacaaaaagggatatctaccattcaacttgagatgggcaaggtcagccctaatccttcttctgaccaatttgctggaagtactcagcaaaatcgtccaattaattttttatatttaaatactagttctgatctaataatgacaaataattcttatataaaatataatttaaatatatttattaatttgacaaaaaaggtcttaattaaaaaattacccttttatttctctttacttctatatttcaccaacttagtgaaaattcccaaaattgaaattattaactttgtttccaatttttgtgaagagatatgatttttttttgtgcacaatgtattcagagatatgatttggtattatatattccttttttaataaacactaatacagtatatatatatatatatgttaataaaagtcctatatttgggagttacaaaacctacaacaaataattaaaaaagaaaaataatgatagactgcaaaaataataaataatttctaaatttttaattaaaaaataattatgagcgaaaataaacaccgaccaccgaaaaaaaatattgcatcatatattaactaaattaaaatgacatatgatatagattttttgcatggccgagacaaatagtataatatttatgactgatttattataatataatgtccagggtgacctgtctccctatggtcttactgaccataccatggccaaatgttataagctacacagggaagtttcctagtcgaatccaaatccaccatcgggaaagcctgctacacttctaccttgtgtgtttctacttttctagaacaaaagtttcccaagatctacccatgtgtgtttcttggttaccctccactcctccaggtatgaaagcatctaaactcttagacatcagcactaatcgagcttttttgcagcagggatgttcactttcatgagcatatattccctttaataagctcagatattttacataatgcatatgatcagtttttatcatttacatcaaattctttgagttcagattcgcctaattccactgatgcttctcttgtacaaaattcttctcttcccatttgtcttacatgtttcaactacacatggtcgacctactaaggtaactcagaagctctcacatctgagggatcatcactgttttttagctaacgatcacccttctgctatgttagaggatcatgatctggttacctcacttcccttgtcccaagtgattgattattctcagctatttcctcatttttgagccacaaatctctcaatattcagtcactaagaacctgaattcttcagtcatgcacatggcattcctagtgagacttagctatggctcctgaacttacagctcagctctttcctcctttttgagccacaaatctctcaatatttagtcactaagaacctgaatttttcagtcatgcacatggcattcctagtgagacttagctatggctcctgaacttgcagcccttgaagctaatcaaacctggtctattgtatgtcttccccctcatcaccagtgcagatggtacgattgagagatacaaagctatgttagtaggcaaaagctataaccaacaagagggcattgactattttggtacatttactacagcaactaatcttgttactgttaaaatgatttttgctctacctgtcattcatggttggttgttgcatca

SEQ ID NO: 4843 - DNA, 587 bp, Cannabis sativa
gattactgtccaaatcaaaaataacttatcgatcaaacacatatttaattaccacttactaaattgaaatttgcagttcactagtgttccatcaaacataaaaaggtcactgattgaatactcactttattcagtacacagattgtcatacaaaataagcaaaaaagaattattcaattgaaaataaaaactaaatagaaaataaatataatgtctaaataaagtaaataaatacacggattgaataaaaaataattaggtataataaaatagttatttttttaaaacaagcgaggaaatatattattaaaagacctacatgcccgttacaaaagatataataaaatagttattaaaatttaaatattgtttgtttaatttattattattaaaatatgtaattaatcatttttttagatagtaaattggtcataatttaatgtataagagaccatcggtatagtagtggacctatttttctctgaaataataaataataataataatatcactaacctatgattaaaatgaaacttatatattgaggagccaagcagatttgaagtgaggcacaagttaaagtggaa

SEQ ID NO: 4844 - DNA, 1029 bp, Cannabis sativa
tgagaatgaaaagagagagtaaaattttgacaatacattatgaaaaattaagtaaaaaaactctcatgcaatgcaagtactcttcttaacataaaaaaaatattcataatgaatagtggcaaatctctcctctaaaagtctcttagaaaataataataaagatttaagaataaagaatactttgttcaaacaagaaaaccaattggtcttttattattattattattggtttaggggcaaaaagcttatcacatcacaatgttcaaagtcatagacttataaccatagagagacaaatatgcaacatatatatcttatgactaactgcatacacaagtgtacatgtaataatgttttttttcttttgatgtttttgttcctttttgcagcacaagtttacccaaaacaaacagctacctgccacaagtaaccagaaagtagatgtgacccatataccaaaatgcccttttgggacacgtggcaatgcactcttgtgaaaaaacatgtgaattatagaagggttcaaacttttgttaattcttttttaaaaaagaacaaaaaaagtttgtcttggggtttgatttgataggtctctctctcatactcaacaacaaatgtttcagaagaatagagataacaataaagagagacatgcttttatagtttatgctctcaaatgttatccattttcactactacaagtaccacattttttctatatatattgactattaatatttaatggctgtaatattataccatctagagtgttcattcgtgacaatgaataacataattcaaatttaacttcttacaattttgttcataggaaaattaggttaaatctcaaagtgatctcactaagtaaaaaagataaaattttctaacaagtaaataaatacaaatcaatataatctaacttattgaagatttataaatctgtacttagacatgaataagacatgtcacaaacatcctaaagagaggcaccagaatcagaatcgaaacacttctcgtttgagacacctg

SEQ ID NO: 4845 - DNA, 618 bp, Cannabis sativa
cattgcatgtacaaatatgtgtgttatggatcatgaatatatgtgtactatacacaactatatatcgtatggtgcaactattttaaataaattaatataggagaatcaattatatatatcaataaaagtatccctagttagcaataactttttccttttaagtctatataattaagttaccatatatattattactttatgatcaagtatgtatatagataatttataattattgtatgtatctgcattccattactagtcaaataatatgaaaagtgatcatgatatataaatattgaagtgtggtttgatatgcaatattattgtgtacaataatcgtgtaattaagagcatgcatgtgctcatcctcgatcgtttgataagctgctaactactcagtagtttccacagactagctttatgacgtatatttataacttcatgcatcaaagacctattcaacaactcttgcattgaaatatttatataaatatatatagacgtggataaagagtaaaattacataatctccaagctgattgaagtatattgtctcaaaatttggcaagaaaaataaccacaaaatttagaataatcaattttttattgaaatatata

SEQ ID NO: 4846 - DNA, 1131 bp, Cannabis sativa
tattttattttagttaacaaaaataaaggttattattgaatagcgtattcttaaatagaggttctactgtaactattttttgtcccaattgatgtgtctcacacctttaaagtgaggtattaaataagtccccatagtatattactccaaatttacacaacacaaatttatttatgtattttgatatacaaatgaatttaattttgattttggatctaatttagattactaagatttttttttttttttggaaaagtgtcttttgggggcgtgatttgtgaaaggaaggggcgcgtaattagcttattgggaaaagtgattccattaggattcgtgaggattgtttgatacctaaggatcacgtggatcgtgctttctcatttagtggaggtgttgaggtgcaaatggtcagtgatttaaagttggagtctgggggtgggtggaatattccttacatttcggatcattttgactcttcagaggaaaagtctattttatctattcttactcctactgttgataaaaaggatagacttttttggaacttctctacttttggtcgttatacagtgaagaaagggtattggagcactatttctcgattgagttaggggcatgaggtgtcttccactagttcctcccagtggtggaagtatttttgggctctcaatcttcctcctaaggtgaagaattttgtttggaaggcctctcttaattttatccctacttatgctagcttggttcaacatggtatgagttccccaatgtgtgtccaatttgcatgaaatttaatgaaacgactcttcatgctctttggttgtgcccctttcaaaggaattcggaaagggtggggagtttgagatttggataaggttggagtggctgcttctttctatgatcttgttgttggttgtatgacatttcttcgtaaacaggaagtaaaagaattacttataatttgttggaggatatggcatcgtcggaatactatagttcatgagcatcatcttctgaaggatgaaatggtagggccttgggctttagattatcttatgcggtatcaggaggccaaatttcatggtcttaatagtgatttgacatcagctattgtgccttcggggatggtgttac

SEQ ID NO: 4847 - DNA, 817 bp, Cannabis sativa
tcaatgattggctacaatagaaaaagggatcccatgcttttgggagagtctagaacaattctatgacagctcatgattgggtgaggtaaggtccattctcaattttgacattaagttataattcttgaacttttgtaggtacctaactattaagtgttaagtaaattaccacgtgacaattcttgattgggtcaatctcaacaagtcctccatcttttacagtaccaatacccaaacaactatgaagcaacaaatcaatactctcttacaaatgagacaagcagatgagaataatttgtacttagggctaccgagtactttggtgaggaataagtcaactgttttgggatatcttaaggatcaggttagaaagaagcttcaagggtgggaagcaaaaatcctttctcgtgctgggaaagaggtccttattaaaacagtggctcaatcattaccaaactttgccatgagtgttttccttctgcctcttgagattagtcgagacattgaaagccagatggtgcacttctggtggaagacttcacctagtgataaaaaaggcatacactggatgttatgggagcgtatgtgtcaacataaatcagtgggtggaatgggttttcgcaaccttcggggggtaagcaaggatggtgccttctcattaaacctttatctttgactggccatgcctacaaagctaggtattttccaaatgaaatttttttcactgctcaattggaaaataatccaagttttgggtggagaagtatttgggaggctcagtccattgtcaggaagggggtttgatggagggtaggag

SEQ ID NO: 4848 - DNA, 591 bp, Cannabis sativa
gcaaagtccaacctctatcatccctgtcgacctcagatcgaaacgagcgccagtcctagacaaacttcgtcgcaaagcactaatctgatcctgatcttcaaccatactgttaattttcgtctaaataccaagctgcaccgaaaaagaaaatcaagattctatcttgaatcttgaataggaggacaatgaaatcccaaaagggttgatcgaatcttcacagaaaagaagaagaaagtaaaaaagtaatagaaaggatcaatatctgggaaagcacaaccttgcacaagattctaatggaagatatcaattgataaaaaaaggaaaaggggctgagaaaattagcgagagtgattggcgatgcagtagttagaggacaaaggattgagaccaggaccgaagacacggaggttctgaagagaaatcatgacagaaatgaccaactgcgatgagatttcgaacataattgggagaaacctacgactctctttctggtgataaatttataatgcgaggagaaaccctttagaaaaacgcgaagatgggtttagagaaactctaattccattcggaaagggagagagattgggcgga

SEQ ID NO: 4849 - DNA, 668 bp, Cannabis sativa
aatcccttcatttattttaatagtttgttaatgcaacattaaaacagtgcttatttaatataattaaaaaatttaaacaaaaaataaatatataaataatagtctaatggtacagtctaatgataatttaagagtatatatttatatttttataccatcaaatttaattttgaatttttaatagactgaaattagttaaacaatctttcataatgtaatattacacattttacctataatcacatcaacaaattaaaaattaatggtatttaaagaatatatttacaataattattataattggagaaaaaataattcacaaaaaaatgtttagtagaaaactctacaccaattatatttcgaggacaaaaaaaaaatccaatttatataaaaggaaaatcctaattaccaaagcacaactaagtcctacgtcattactactgttaaaaaattaaaaaaagtttaccttaaaaattaaaataaataaatattattaaaggaaaaaaaatgaaagaaagagagcgaaagtcaaaaaaaatccaagttgaagccgaagctgagctgtgaaaataatgggatttaaattgtcggtcgtctaattaggctgtgacggtgagaggctactattctctctcactccactctcgcactctctctctctaaaataa

SEQ ID NO: 4850 - DNA, 1024 bp, Cannabis sativa
agatttacaacagtaggaggtagtgaacaaaacaaatgcacataaaaacaaattgctaactgatagtgagctagtaacagcaagccttcagcttctcatacctacctattatgcttaaggagccactattgccgttgacaaaagagcatcatcacataaaatgtacctgtcttatacaagtatttcatggtgctgagaaatttcaaaaatcttctccctcatatggtacacgataccttcacattttgcggcaactggcaagtgtacgtgaaatattgacatacaactatccaagaaattgttcaagaattattgcgaaagaaagatatagctaggcttcttcaaaggctacatacagaacctccccaaaatatgaacaagagttcaactcaagaaaattaacccgaaaaaatctcgggggaggtgggcaaagaatcactaactaaatgagctacttacagctatccaatacacaaattacacgagtcaagaacagaaaatatgaaaacaagaacacccagatgagattaaagtccgaaggcaataaggaatatagaagaaagccgaaaaaatgaatgaggttttaggttttagaaatggatactcactgaaattttaaggcgcctttttgcggaagtgtgggtgatgtattgagcagcaacgtcgccggcaccccagaggaagccggagctgatgacctgggtcttcaccggatgaaaagccaggcagttctggtaccacttccagagccttagcatcatttcgtgtctatcttgaggaaagaaaataaaatggtaaaagaaatttagggacagaaaagaaaagaaaagaaaagtagtaaatttgaggggcgggagtgaaggtcctaatcttatgaggcttttgtctgaaaatgtatcaactcacgacactcactcatctaatctttcgttgttgggttttgttaactgactcactctaaatgtttcgctagggtaggtaggaaggagtatcctaatgttatgcaaagaagaatacacaatat

SEQ ID NO: 4851 - DNA, 2148 bp, Cannabis sativa
  modified_base (203)..(216): a, c, t, g, unknown or other
ctgctgccccattttttgtgaggttgatcgatcgagtgcttcaaacttcaataattttattattaagtataatttagtactattgaaataaaatatacgctaattaacaattttattattgaattttgacatatattaaatgatacttctgaattgttttgaccgttaaaaattctttccgaattattgagattgttggattnnnnnnnnnnnnnntaatttcattcaattttactgttatcgattgtttatgtactaaaccatttatgtactaaactatgctccccactaaactatgctccccagactttgtaaactatgctccccagactttgatatctaccaaatcatgtccctcaaattttaatatgtactaaattaaaccccttgaactttcatacatgttagaattttttttactaaaattacacaaaagtctttaacaaatctaacaatctcaatagttcagcggaaatttttaacggccaaaaaagttcaggaaacataatttggtacatgttaaagttttgaaagaaaaaattactaattagcctaaaatataatttgtatatacttataaattataagtaataacttacacatacaaacttttttttttaagaataagatttgctattataattcaaagtgtcatttacaataacagaaaatatagtaggagggatctcccctaaccaaacagaatcaaaatccatcactaaagcttgtttagccaaaccgtgacttacacatacaaacttaacactatataaaaggtaacatttgacattgtgttttataaagttaatgttacaaaatgtccaacattatataaaaggtaacatcttataagtcggtaatttattatattatttattaaactaaaatgtgtaaaatttaatatgttaatatgatatgatattagccttttgcatttcacaaacatacactaaactatttataaagatagattaattagaaagatttatactaacttaactaagatattgctgaccactcttttgggctagtttggatatatatatatatatatatatatatatattttttgaagtttgtgccatattattttggttaatttgtgttattttattaggctaattttgtgaagttttgttggctcaatttagaaagcacttaaagattttcacttataagtttaaatctcttgttttggtttttactttaataaattttgaggactttctttcaataatttatattatcatttcattaatattttttattagtttacaaattaattacgacataatggtgataatcttaatcaaaaaaaccttcaaagatatggatgggtttttcgattggaagttagtcggtcatagaattgtcaaatataagttttattttcaataaaatgttgagctacattgttttcttgctaaatattttaactttattatgatcaattttagtgtgctaattttcattttgcatttaacttttattaattgtataggtgttttctttgtttaattctttctcatagaagtgatatccaagatttagatcaaacatataaattagtttcggtgacacaatttaatcaagaagttttcaaaaaataaatttttacttgtttaatttttatttctcttcataacagaaatatagttagaattttatttctaatataaaattttcattctatttttgtctatttattttgtaggttcgctttaattgataagttaaaccatatgttatttttgagtggtattattttgtctaaatttttaagataacttaatcttatataagttttattattttatagcgattcatattctaactttaaatataccttttaactataatttattggtttgtgagctagaattccctttactctaaaaatgataaaaacctaagatattgctaaccaagttgacaaacgagtatagctaaattattaagtaattaataataagttgaatctattaatagttacttgtattaagaagaaaaaaacactaaaatccaaatagctaatcatttggtcatctctaataggacggcaaaacttcaaaaataataaaattttgatacaaaaatagtttaacttaactttaaatatcatcttatatataagggagtttacagtag

SEQ ID NO: 4852 - DNA, 984 bp, Cannabis sativa
ggagtcctcaaaatgtctgttgaccaatagacattatgtatttatatatatttgagtactagtcacatgtacaatcgtgtatgacatatgtacgtactgtatattagcttgtctataatatatacagtacgtacctcaataataaattataataataagtgacttagcttgttgctttgctacaattgttctttttttttttcttatatgaaaaattcgctacaaccatatttagaaaactcgtcccatttgggaaaatgaacttcttttgttaataatggtacatccgacaaaaatttaacacatcatttattttttatttaataaatgcattttaacccatccgtttatatagttacttttcattggtttatccattcttttaaaaaataaataatatcttaaatactaataaatacaaagtaacgtttccggacgataacaacaaataattatgaggcatgaataaattggtgtactggaaacactgaaaataaaggtcgtgtatatcaaaacgatcaccctggtgtagatcaaatccacgctaaccatttgtcaaaataatacacaatatctttggaaagtcgtcagaaagtagcggagcttcaaaatcgtcaccgagaaaagtagcaagttaggcgaaataagttttggtggatattttctcttcaacgtgctgggttttgaggtgaagactgattgtcaaacggaggtcaaagctggccaaaaaatgcattcaaagtttgaatctcaaaactttgacgctcaatcttggtttaacgacgacgttttaggagacaccgcttgaggtctagcgtcccaagaagtcgaaaagtgcactgctcttgtgcgtgtggttggatggtgaacggaggagcttggtaggtcatgggggttatggtggttctttgatgagagagaaagaaaaggagaaagaggaagagagagagtgatctgcgtgagaatgagaaggagggaaagaga

SEQ ID NO: 4853 - DNA, 1605 bp, Cannabis sativa
aggtgtaatgttgatgttttggtgtatagaaggccttgtccggggctgtttttcaggtagcgaagcagatgatgcacaacttggagatgagtagtgcgaggattagccatgaattggctgagagaattgacagcgtaagtgatgtcgggtctggataaggttaggtagaggagctttccaacaagttggcgatagtgagaagggttttccaaggcttctccatcttcgttgtcaagtctaagtttgggatccatcggagttttacttggtttgctgttgatgtatcctgattcttcaagtaattgaatggtgtatttcctttgggatagaaataacccatcttgagcacgggcaacttcaaaaccaaggaagtatttaaggcttcctaaagccttaagcttgaacttgtcatgcaatgagtcttgcagctggtgtagaatgtcgatattagggccggtgatgatgatgtcgtcgacatatactaggagagcgatgaaattgtcttcagctcctctagtgaacaaagtatagtcgacttgagattgtttgaacccttcttgtagtaaggcttcagacaacttcttataccactgtctggaggattgtttgaggccgtaaaggaacttatgtagtttgcaaaccagattggttcctgcactgagagaaggaggaagtgttaaaccttgtggtattgacatgtagacctcttcattgaggtctccattaagaaaagcattgttaatgtctagttgtaaaatgtgccagttcttgatggttgagacagcaagtaataattttaaagtcaccatctttgcaaccggggaaaaggtgtcaaagaaatctagtccctcttgttgcgtataaccttgtgcaactagacgggcctttaatcgttcgacactcccgtcactattgtattttattttataaacccatcgacatcctatagctcgtttgttgggtggtaatggtacgatggtccaagttttgttgtcggttagggcttttaattcacattgcatagcttttaaccatccaactatttgtatagtctccaaataggttcttggctccttgacagatgacactgcaaatataaaagctttgtaagtgtcagatagatttgaataggagatgaacttctcaagatgatgaggggtagatgaggtgtcttggatagttgaatagcactcaaaatctcttaaataagaaggaggcctggtctgtctttgagatcttcgtggcacaacttgtgattgctgttcgttatttgcatcagaagctgctgtagcaggtatatttgcttctggaagtgttgcagaaacatcattttgagggataggttgctcctcctcacttctttcatatacatcaggtattggggtggcaggatccgagttatttgaattttctggaggatattcacaagctgaaacatcacttaacacattatgaggcataacaatattagagaaggggtcaatatcatcactgctggtattcaatttatggaaaggaaaaatcccttcatgaaacactacatttcttgatataaaactttggttagtattcaaatcaaaaagtttatatcctttaactccttgg

SEQ ID NO: 4854 - DNA, 663 bp, Cannabis sativa
aattaaagatattaactccatgtaatctttaagaacacatgaaattttgaatagccaagttgagtagctttgccttagaagaatcaaccatctcaatcccatgacaccctccaacaccaaagtgatgttcaacctttatacccattttctcaagcaatttccccaattcaatctgacggtcataaagtgggtcgccatcccatcccgtcaccatcaccttccattccaatgacttgataatcttcaaggcttttgatccaccatccaccgttggattagaatactcgtgatcacggtcagcccccagcggcaaagccaactcccacaacaaatcagtaacgcaaggcggaagaatagcgtcattgactaacctcaactctgacccacatctctggaccccaccaaagaacggctgatgtaatatcaggccacgaatccttatgggccgtagactttgggcctccgccgcggcccgaagcccagtatggtaagctattgatcctccagcactctcccccatgaggaaacagttagacaaatcagcatgatttctcaaccaatcatcttcggagattctgatacggtacagcgcgtccatggcatcttcgtacgccgccggtaaacggtgctctggagcaagacggtagttgacggaaactacga

SEQ ID NO: 4855 - DNA, 700 bp, Cannabis sativa
atatatatttatatgtaatattatatacttattaagtagtcttaagtttgtcataattatagagcttttattatattaataaatgtttaacatatgattgcgttgctaaattggtctcataaaatgtaatgaatatattatatgtatttatatattgctcttaatattataataataaataaaagtgatcttataataaaatgcatgcatggatgaacactataatttcctaaagttgtactctttctataactaataagctatataatttgtttatgaaaaataataataattaaatatatttttgaaccacaattgcatgaacatacaagactatatataataatatataactatagcatggttataatttatctataataataataataataatataaatatatatataatcaaatataatatatattcattataaacacttaaatattcataataataagaaatgaaaaaagctaggttagtaatatatcaagcattattataatgaaatatttctaaattatccacgatacaaaatctatatatatatgagatatatatttttatatatgtatatatgaatatatacacagtggatcatctcatgatcacattatctccgcgtgaaattaatgcaattgaaccaacctttatatctctcaactgtaaaagctataattataatattatatatata

SEQ ID NO: 4856 - DNA, 1507 bp, Cannabis sativa
tcttgtcccaaattaatgaaaaatctgttaagaaagatgttgaacatttttgtgaggcttgccaacttggaaagtcacactcactgccatttaaaacaaacactgagaaagcaaagtttcccttagaacttgtgcacactgacatttggggtcctgccccagtaatgtcaaacaccaacttcaggttctacatacattttgtagacaactatagtagatatacctggatatatccactcaaagccaaatccgatgcccttccagcctttactcatttccaaaacttagctgaaaaccttcttgacaggaaaataaaatcactaaagtctgatggagggggtgaatatcaagccttcagtaaccatgttgctgaaagaggcatcgatttccaacaatcttgtcctcatacctctgcccaaaatggtagggcagagagaaagcatagacacattgttgaaatgggtctaactctccttgcccaagctggaattccccaaaaatatttgtgggatgctttccaaacatcagtctatttgattaatagacttcataccccggttcttaaagataaatcaccattagaacttttgtttggaaagaaacccgattacaagttcatgaaaactttcggctgcacttgttacccatgtctaagaccttaccaaactcataaattccaatatcactcaaccaagtgtgtaaaccttggatatagtgatagacataaaggatacaagtgtcttagtagcacgggcagactttacatctctaggaatgtcatcttcaatgaagatgaattcccttttatggcaggttttcttaacacacatcaaaatgaatagtatgttcatgtctcggttccctcctggtccacgattctgaacatgccaataaaccaaacacattccactcatccaaaacaaaacacagccacacatcctgaagctgactcagaagaaccaccgactacaccaaggtcttcacatcacaatgatcaggtaacaaacttatctacaccactgatccctgatgtacccgagacagatcacgatgtaactcaagaacctgctatgactcctacacttgagactatgcctgcagaagatcatgaggatgtcgttcaacctcttacaacccctgttatacccacacatcctatgataacaagagggaaagcaggaatttttaaacaaaaagcttactgggttaaagtacaagcagaatccatatcttgatgtgccaactagtgttgaagaagccttagcacaccccggttggaacaaggccatgaaggaagaaaacactgccttagtgaaaaatcatacttggatccttgttccatacatagaaggtatgaatgttgttgggaataaatgggtgtacaagataaaactcaactctgatggttcggttcaaagtctcaaggcacgcttggttgccaaaggtttcaaccaaagagctggtattgactacagcgagacctttagtcccgtagtgaaagcctcca

SEQ ID NO: 4857 - DNA, 894 bp, Cannabis sativa
gtgactttttatgaacacagagttatgatattttttttttaatttttaattgtatcactttttaataacgtaaaaaaaaattagcataaaatttaatatacgtgttttgtacgtaactttttgctaatatataaatatatatatatatatcatgcgtatgtatgcgtataaatgaacacgagagggtcaaacatataggagtaaatattaatatcatctaccaaagaagaaataaaattaaaaataattagtgtatatttgtattttccaaaaataataacattatcatattcatatagtatcaccaattcaccatataatattaacaaaacatagaaaataagcaagttgcaataagaaatagtttttcatccagccaagttagcaaagtgaccacttaagtcaatcggctcgattagtcggcttaattagtcgtttggcaagcttgttcttcatcaatattattaaattaagtattgttattagttatcagtaatgtctaacattttataataattattataaaatgtataaaatttattaatacttaatccactaagcactactaatatttattaacatttctctctcatattaattcaattaaagtaatcaattaatatcattatcactaattatttatataaaaataatatttaggcaagaaacactaattatataaaacaaatatatacataattaaaataataatcacatggaaagaagaaaaaaaaaataataaaagtactattcaaaaatagaaaggcacaccaaacaaaatttcatctaaccaaattaaaaaaatatataatgatcctttatttgtaccttctcccaaaaaagggaagaaagtgtcctcgtttcaaattgcgccacgtgtcggtgatctatacg

SEQ ID NO: 4858 - DNA, 1376 bp, Cannabis sativa
gccaataatgtatcttacaaatcttggacacccataaaaacgtctacccgaatttcgtatgctccatgagattcgaactattgcttcctctacacagcgatatttcattataggtggaaagtcatcaaaattcatatttattgaaccttcagtgcttgattcgctgcactcataagagtttttcgaatcacttcggctaggttcttggagctcaacttttattattgaagcacattgtttgaaacttagatgagccatggggttatagaaatgaagaacttgacaaatgaaaatgttaaaaaaaatgaataaatgttgggtaaatggccattgtttgttttatatattatatgtatataaactgaataagggtcactaaataaatgttggccaccttttcatctcatattgtttttggttgacattttaaataccaatattttatacatcatttaaaaaaaaattctaaagtgcacatttacaggcatgctcatcaaatatatatagggtaactgtttatttttatctattactggtgtacaacaaagtctatacatttgcagccatgtttatcaaaagaacaaaagctcaaggaatgggagagggttgacgaggtggacaaaggcacctgttggtgttgtacgcatggggcccaggcgcaaagagcctctgcgcgtgacacgttgcagagaggggcttttgggccgaatttgggctgctttattggtgattttgtggacttgaaaaataccaatattcatggttttgggctctatttttgccattttcatttcttttcttttaataatgctatttttttttaattcaaagaacaagcacaattaaatccaaacaaaatattttcaaaataaaatatatcacaatcattttaataaaaatatttatttaaaatttaatttgcatttctttaaataaaaacaatacattttctttattacttttatttctttgtttatctttttcatgtcataaaatgttatttttctttataaaattaattgaatattatattattttcaaataaaaatatattacattaatttcataaaaatattatacagaaataatttttttttattatttttacactaataaatatacatttttgactacataataattcgccactatgtagcttgtttttaccgaatagtcttaccgaatactacagttatttattttagcgaaagactttgccgaaagtctccgaaacccaatcggatcgtaggattgttccaaaacacgtcgtaattagatttagtacgcacgatttaccacttattgcgacgattgacctacatccgccactatgcagctttttttatcgaatgctatagttatttattttagcaaaa

SEQ ID NO: 4859 - DNA, 615 bp, Cannabis sativa
ttcagtaacagttcactgattagcttctaaattacatagctgaataagcccacaatttaatccgcaattaaaatcgaacaaacataccttggtaccccgctggcgaattataatggcgcctggtttggcaacctgatcgccataaatcttgacaccgagcctctggcccttagaatcacggccattcttggtactccccgctcccttcttgtgagcattttcaatcgtcaaggggaacttttgcggacaggagaacgatagcttgggacccactttaatggaacccaaatcccctttgaagaaagacgatgaagagcttgaggttatggatagtcctccgaaggctccgactaggttgaaactcatagatgcagctgccatctttgtgaaattcgagactaaaagaaagtagaattcagatttctgcgaaggttgtgagcatgaatatggtgattttgggaaataggagttagggtttcgtggttacgtactgtgtagataaaagggaatgttaccttagctcggtctgtgtctggataaggaggaagatagagcgcgtgtaataaacggtctttctgggttgtgaatgaggccatgccacgttgcatctgggat

SEQ ID NO: 4860 - DNA, 1069 bp, Cannabis sativa
tcttcttctctcccctttatttcttcccagaggtgtcgcacacatctaagagaccgacgacttcaacggtgcaggcgagggatggtggacgatgtaaacattggtatgggggagcgaccgtcctaggtgagggcatgttgtcagcgattgaagacttcaccgaagcatgcatttatttttggcgaccgaagctttaggtacccgcctcttcttcttctgataatagctgaggaagttaaatgataacagttgaaacttatatccaaataggtaactttggagagatccaaagaatcattttctatggttgagttccttatagtgctaaatggcatcttcaacgtcagaagaaattgtgcctgataaaaaattaaaaaaccatcatcaaaattaaaagaatagcttcgaatatcatagttgtactgaacactgcttcttccaaagctcatttttgactttaccctgaaaatcagttggctcaatctagcaggagcagcataagatggtcttctttattttttaaacttttaaataaaaaaaaataattaagtgtaataattttaaattataagattatatgtgtaacaaaattttaattgaaaaattatgtgttataattttaaattataaaaaattttgttataaatattttaataatttaatagcaaaaaataacattattaaaatatctttgttcagtaataaattacaaaataatttatatataatatatatttattatttattttatttaatttttaaattaattatcataattaaataataatctaatggttaaaaaaatataaccataatgctacatatttgacatttaaacttctttcgtatatatgtatatatatatcacaacgaaaaatagtgacaaccttttatcataattttttttttttgattaaatatgacttttaatcacaataaaaaattatttgtgactaaaacatagtatttagatttacaaattgtcactaatttaattttagtcacaagtattgtaattaaaagtacatttagtcataacaaagtaaaattttgtgactaatacatttag

SEQ ID NO: 4861 - DNA, 2470 bp, Cannabis sativa
gtgtcatgtagatgaatagagaagaatcgacttttgagttggtgaagctccattgcattagagttctttttagctaatcaaaccatgttcttggtgcttgtttcaagccgtacaacgacttgtgaagcttgcacacatgatttagtttttctggatcttcaaaaccttgtggttgcaccatgtaaacgtcttcttctagctgtccattcaagaacgcattgttaacatccaattgtttgatcttcaaaccctttgacacagctatggtgagaacaattctaattgttgaagcttttatcacagggctgaaagtttgataaaaatcaacactaaggctttggtgaaagcctttggcaacaagcctcgccttgtaccttttgactgaaccatctgcattccttttgatcctatgaacccacttattgccaaccacattgtagctgtccaacctgggcacaagtgtccaagttttgttgtttttgagggctgtaatttctgagttcatggctggattccagacaggtgagttgagagcttcttcaagtgtttttggatcttcacttactggattccattgagcctgtcctaaatacactttcgtttaaatattctggccttcgatcgtgttatcatagggtgagattgcctaggagctttagtaggaataatttcatgttcctgttttggtgttggctggtctgcaatatcagattctaagctgagttatcaatgttatcattagctacattgttatggtcactaacctcttgctgatgatatgtggcagatggggctccaagggaaagttgagaagcaggtacctgttcaatatcagcaggaacataatattttggttgagtgtatttagtgaactgtatgataggaagctgagaccattcagagttgtgaactattacttctttttctggtgcataattattaagaaaaccagctttgaaaggaaattcctcttcattgaatgttacatttctagagatatagactcttcacgttgaacttaagcacttgtaacctttgtgagagtcactataccctagattgacacattttaatgagtgaaactgaaacttactggtttgataaggtcttagacatggaaaacacgctgaaccaaatactttgagaaaaagcataatcatgtttcttgttgaaagtgtctcaaaaggtgatttatggtgcaatatgggagttggcagtctatttataagatagactgctgtttgaaaagcatctacccaatatttcaatggcatactagcctgagccaagagagttaaccccattttgactatgtgcttatattttcgttcagctctaccattttgggctgagatgtgaggacatgagtgaacaaattgaattccatgttctatgataatgtcagagaacgattgagattgcccaccccagtcagttctaagtgtcttaatggtctttttaaactgattttcagcaagaactttgaactgtaggaaggcttctaaggcttcgaattttgctctaaggggatataaccatgtgtatcgactaaaatcatcaacaaagtgtatataatacttatagtttgtgttagataacaccggtgatggtccccaaagatcagtatgaacaagttctaataccttagtatcacgattagaggacaatttaaatggtagagcatgagacttaccaaattgacaagtatcacaaaacttaacattctcattgcttggaataggtacattttgggaggctaggacttgtttcaacactctaaaagagggatgtcctagtctcttatgccatacatcactttttgaaataaaagacttataattacacggttgtgacacattttcttgggttaaaatagagacaccagtaaacggtttagactggttttgacagaatgttttaacagtgacttggctgtagtgacaagctggtacaagccatctctaatcttcccttggagcagaaccttccttgttgttttgtccttcacaaagcaaaatgaagagtcaaattcaacaacaacgttattaagttggtccaaattatctaagtttctcgcgcctctctctctctttcggtgacccaccggagctatggcgaaaagggcacaatcggccgggaaagttaaagctaaaagcaagaaaacaggtccttcatcttcggatagggtcatcaagaccagatccatggatgaaatacttggaattcaggaattagaggttccagaggctttcgaaccaatggaacagtaccgagagcttccctcccctgttgcgaatgaagcgtttcaacggagtgagtttcagcaggaattttctgtgtggttggatgttgcaaataaggcatctcaagatgtaagtattgggaagaatccttctctcccaatacttagggctagtgtcgttcaaaatttggaaacaacattcaaaggctcagagttgaaaagtgaaga

SEQ ID NO: 4862 - DNA, 1069 bp, Cannabis sativa
taagattgagattgattgtggattttgttgttattttaggtattttttatcagaaatgtttggaagattttatatctaagttcttgtttcagatatggtattgttgtttaaatttgttgtaatttttgtttttaatttttgttttttttttttttgtgttatttgaatacaaaaacaggttgttggtggtggtggtgggagttggtgatggtggttttggtggtggtaggtttgaggaagatgaggggtgttttgggttatgagttttatgatttttggtttgatttaatttaattttttattggtttttttaatttaaaataaattttgaaataatttttataatgtttaaataataatgttaattagatcaatataatggggacacatatataaaaatttatacataagtaatttatattgacacttacaccttaaatttattaacagatcagtaatttagaggttttattatcaaaacttaaaattaaaatgttaaagagggaagttgaagaatacttttttttttttatatacattaaccaaatttacattcaaataaaatttaattcaaatatatttctttttatgagtattgtattcatattatcttcatggatttatataactaagatataatttcaaacataatatatttgtattctttgtagatggatacataggtttgtcgaaaagttagagtggggtaaatttttattagaaaagaccgaaaactattgtgaagtaataggaataaaattggtagaatgattgaaaaaaaaaaggtaaacataaattttttttttaaaaaaaagaataaaaattaaaaacatcaaattaaaaaagaagtatgtagtataatgtagaagtaaaataataattttagaattttgcccaaaaaaacttatatggatataagatcacacatggagacaaaagtaacaaaacttagaaaggacttaattatggaatggtacacatgagtcaaccctctctcaacgtggaacaatcaattcgccacgtgaaattcatgtaaaattaaattaataaaggtcttttcacatatttt

SEQ ID NO: 4863 - DNA, 1015 bp, Cannabis sativa
aaatcccttgcatgaagtggggttttcatgttaatcacatcatgtacatgatcaccttttgacaattggcataggcggtcaagagacgagggaagagaggatgtgccataatcttgcctctcatttttgcagaagaaagattagtagtgttgttgttgttgttggtgctgttctcatgggtagtgtagaaattcttactgttattattattaccatcattgccactattactgtagtcttgaggattaatattgatctcggcgccggtgactctttggtttccagtggtaaaagatagaggcatgttgttgtgattattatccctatttttattcatcatcatcatcaacatcgaactattactactattactattcttcttctccccaaactgatccatttatataaaacatacatacacacgatatgtattaactaattaatctaaacccataatataataagttccatttttctccctgttcccctatctagctatagttctcccgggttttaagctaaaaaactgagtctttttacagaaaatcctaaagtttgcagggtttgcctgctatcctattagctatagctactcaaaagaaagaaaaaaaaaaattacaaacagggttttgttttgttttaattacttttttttattgattgaggaggtgattttccctctaaaatatgtgttggcctggttttactgtaaaaaggtagataatcagatcagacaggtctccctcggaaatgtgtactttttcttttctcccttgctatacataataaacagtagtctctctagtctctctctgtgtctttttgttacataaaatcacatatatactgtaaagggcgagacagagataaatagagaaagaaagaaagaagggctgcacgcggaaggggttaacgtgtacctctgcaacttgtttccttcccgatgaaattaaatcaaaccctagctattctaatctcttccactcctcgtttcttgcaacttatatttctctct

SEQ ID NO: 4864 - DNA, 1355 bp, Cannabis sativa
agcagctcagcttcaagagctctttccaacacctcagtatataccatgttggtcacaactatgattttcacatccgttttaatcatggggttcattccttttaggaaccttaaggctcagagggcctcggttggtacaatatcttgtgtgaacttggcaaaacggttgaattgccttgcatactcattgacagtgagattgttctaatttaaattcataaactcatcttcctttgcagctagtatggtaaaaaatatagtacttcctattgaacacttctacaaagtctaaccaggtcatagtttctatgttgcggctttgtcttactacttcccaccagattcgtgcgtcctttttaagtagtctggcatcataggacagtcttgccctatcattgaggtccatatattccaatatggactccattgagtgcaaccactcttcagcttcaagtgagtctaagccctcaatgagatacctgaagaggggccttgttaggaccctactcctgaggttgtcccaaggaaaaagaacaaaaaagtcgtagtaaagagcagagagaatacatcgacgaatggttaagtgaaggcttgtattttagagctctttcaagtcatgtctcacactcatcatatggaaattctaaagatttcaagtctaaaatttgtccccaagataagtgcaattttttccgtagattactcgaaaacgatccaacatatgagattcaaactttgaaagttgacgacttttatcaagagtcaatttttaccattagatcattatcaatggccaagatcagtaccaaatgattttttctcatatattctgtattatttaattattattttaatagaacctcctttcctatataagttgagctcctctagtttatttttcacattcttctaagtccccataaggtcaaatcatctctctcttctctactttctctctttagaaatttgagctcttttcttagtcaatttccttgttattttcgtgaaaaataaaaatttgaagtagacgtagctctattattatcacgatatggggagtgaactactataaattttatttgtccctctttaatatttacttaactcattatttatctcgtcaatctagcgagcgagagttggtctttttttaacttcaacaaagagaatcaaggattagagtaattgaacagaaaaagttagtaatttctgttgcaatcaatgtgaggattctattctatttatatgtttatttaacatttttatgaatgtcatattttaaaatgttggattataatgtatatataattgtcaactttttttttaaaatgtctccatcaagttcttcactgcttt

SEQ ID NO: 4865 - DNA, 1346 bp, Cannabis sativa
ctggtaaaatatatccaacagaaccttccctgtacaaattcgctctgattctttgaaatcaaatccgatagcattagtttcagccttgaatagatcatctttgctgcggctttgtataatacattgcaacatgctattggtctataatcaccagcaacattggggcactttgtttttggcacaagggccaaaactgtattgttcacctctctaagaatttatccagagtgcaaaaaggaggtaatggattcataaacatgttcccctactaaatcccaattgtcttgaaagaaagagctgctaaatccgtctggaccaggagctttgtttccaggaatatcaaatattgccttcttgacttcctcttttgtgtactgcataacgagcatgtccgcttgttgattagacagaataggcccttgctctataattctcttcataaccgatctcctcttaggcatcttactccccagaatctggttctagtactcaagaaacaaagttgaaattatatgaggattatcaactcttaccccactagtatccatgatagagaaaatctaattttgacttcttctaacacgaatactattgtggtaaaaagctgcattcgagtccccatctttgagccatagaatctttgctttttgttggagaaaagaagcataagcattttggatcgaggcaaattcctttctgacagcaacttcacgactctgtaaatctatattcattgggttctgatgtagttccttttgacattcctccaactcctctttagccttggcatgtgcaataggtaacttggcaaaacgttgcttatttaacagtttaaacagcagcttcagcccctttaatttagtgacaatctgaaacattttcgtgcccttgtccctttccaaccatctatctcgaaccaacttgttatactcaggatgggaagcccacatcttgaagtaccagaacggtttcttaccaccaagaagaagaaccgaaatcgttagaacagctggagagtgatctagcagcccctcattaaggaatacaacttcagcattcgggtgagagtcaagccaacttggatttgcaaggactctatctattttagagtaaatcctctcatctccaagttgcttattagaccaagtaaagaaattaccaaaaaacttcacatcctcaaggttgcattcttcaacacaatcacgaaactccgaggagttcttatctttactttgctgcctattctttcttccttattaagtatgtcattaaaatctccatgaatcacccacgcttctttacttgctatgtctcttcagtcaccccataaactccttctcccaatc

SEQ ID NO: 4866 - DNA, 1104 bp, Cannabis sativa
tgcgaagtagtcgaagatgagtgtcgcctccaagagatttggtaaagatatctaccagttggtctctagaacaaatatatgatggagtaaggagcccttgttgtattttttctcgaacaaagtgacagtcaatctaaatatgtttagtgcgttcgtaaaaaattggattttcagcaatatgaattgtagcttggctatcacaaggactgtaatgggttgagaatgagtaataccaaggtctgtaagaaggtatttcaaccattgcaattcagattaaagtgcaacaagcgagcgatatttcgtttctgcagacgaacgagaaacaattggttgtttctcggtattccaagaaacaggattagaacctaacaaggtaaaataactagtggtggatcgacgtattgtaggacaactagcccagtcagaatcaacatatccaacaagattaagggagcttgatgcagaaagaataatcctttaccaacagtacctttaagataacgaagaactctatttgcagcatcaaggtgactggaataaggagattgcataaattgactaagtgtgttgactacatattggatgtctggtcgggtgacagtgagatataaaagacgacccaccagttgacgataaattgtcggatcagaaagtggagcaccaattgctggttgcaagcaaagatgttgttccatagggaaatctaatggttttgaacttgtcataccagaattagataaaatgtcaatggtatattttctttgatatagaaaaataccttccttagatcgtgacacttcaatacctaaaaaatatttaagagtgccaagatcttcaataaaaaaagattgagccaaaaaattttaaatttagaaatggcagcatcgttgttgccagtgttaataatatcatcaacatagacaagcacaaaaattgatgtgggaccgtgaatatatgtgaaaagactatagtctgaaatggattgtttaaaaccatgactaatgagtgtgtttgagaatttagagaaccactgttgagatgcttgttttaaaccaaaatagatttatttaatttacaagcatctcgacagtgaatatatttgga

SEQ ID NO: 4867 - DNA, 982 bp, Cannabis sativa
ctcaaaaaaccaggttcggttgtgcattttcaagatccgaagcccggaaactcgaacccgaccacccgaaaacccgacccgtgttcacccctatgtaaaacaactaaggctgtgagtgttgattttaaaaaggcagtcaaggttagagtgttggatgttagtaggagcagcaaaagcagatttgacaattaccttcttaatgttttgaatagttggtaggtggttgctgtggtaggggttgtttcttgctgccctttgtttgtgtttgtattttgttagtagtttttaataaaagtattttttttgttaaaaaaaaatacatgatattaaagataaaataaattatctaaagaaacaaaaaatcataataatgtatattataatattgagaaaaaacaaaaaaataaatacttaactaaatatactaaattttatcgcccactttaataatatgagaacttaaaaactcataacaaaaattaactaaaaaaaattataaactatcttatagtgttttctctatatttctggaacataaaattactacattctaaaatcttatgcttctatttataataatgtaaaaggattaatgtttaattaaatttattacaaattgtacaagtgtaattatttttaattttaaaaccggtgtgacacgtggtatatttggattggtggtttggtaacatctgccacgtgtctggtgttggttggcttaaaattgaacaagtttgacaattgggcacacttggcacatgctgaaagaagctttgggtcgactctgagaaaggagtaccagttgcacggctggaaggtgaatgcacgtatggctgaggtaaaagagtgcgtcacatgcgcgcttgagagggagaggaggcagagcctcctgcgattgctgcagttataggacctgatggctgacgcgtgaatacggaggtgccacatggatgacctgtctgccggaggagaaaaatgggcc

SEQ ID NO: 4868 - DNA, 1039 bp, Cannabis sativa
gctgcaatagagattgaacacgaattagatatggctgaaactgtcaacgtcggcaacaatggtagtaacaatggacgtgttgtagaaaaattacagttttacaaatattgctacttatgctgctaaaaataaacattaggattatgccacttacaaacttaaaattttgagtatttatgccgctatttatcctaaaataaacaaccaataattattctagggttgggtgaataaatgaaactgaatgacccaaattaggtcatatataatcatttatatataaagtatatttttttttttttgaatattcgacatttatataaaaaaaaaaaagtattattaattatgcatgcatgtacgattgaagttttaaataattggaacgccattaataatgattcattaaattataaaggtatattacgaagcatcgaaaccctatatatagtgaagattacaataattatttttctagtaaaagagagaacctgttgttgtactatttaatttattaatttgttgttaataatgggaaaagtatgtaattaatgatttgttagttatgttttgctcatttataacacgtgcatacgtgactattattttttatttaatagttttgcattttaattagagtattttttttgtttttaattttattttgttttgaacaccgacataatgtattacttgaattattgttctggttgggtttaatattaattaacgacttatgtcatcactctatttatatataaattaataatttggagactctcaaattacatagcgtagttaattttaactatataattaaaagtagtgtgattcttactttaatacatgttattgtgtgtaattagtgtatataatttaagtgtacttaacattacttatatatttaaccacattaaacccattgcacgtataaaataatgaaaagaaaaaaaaaagttacttttcccgaaattttagagataattttgcatattaattaaattgtataatttgactgaatgtatttgtatatttatttata

SEQ ID NO: 4869 - DNA, 2257 bp, Cannabis sativa
atcaccaacgtaatgtgaagacgaagtgtagttacagagaaagagaaggagagaagaagaggaagagaataaagtttatgggagctgacttggttgaattagtcaacaaaatggtgacattattaatatagaagaaaaaggaagaataataaaacttcacttatgaccagtcaacaaaatggcaatattggtaatagtaagattttaaaaagggcaaatttatcatcaactatcacaccaataagccatatttataatagtaagatatattattatgcgagtgaattttttaattcgttaaaaatagttcatgaaatatttatagtgttgtaaattagttcttcttttaagttttatcacacgtagcaaaaaaaatgatgacatggttatttaatcagttactacgttagtgtcatgtcaataccaggtatgtaattaattttaaaaaaataataatttttttttaaaattagttttatgtaattatcttaatcattaattagtttttagttaaatgattttttgaaacaaatgcataatttttattttttaatttaatttatacacacggtactgatgtcacaattgactagcatgtcatcattttgtttgacgtgtgacaaaacttgaccgaatgaccaatttacaatactatgaatagttcacggattatttaaaaggtttgagctaagaaaggtagtgtatcaccaaagagtggtaagacactacaactccaatgttaaagagataaaatttaagtctagagacatggtgttacgacgagtattcttaaatgtttatcgagatttttaaaagtagaataaaaataatatgaattgaagaatgaacaatcaatagagaaagtataaaacgagataaacaacttttaatgtggttggggcgttaagtagccttagtacacgagtcaatcttattcagtaagcttatgcctgtaaatgctttaggaaaatacacagactgtctattctcaagttttcctgagcaaaatatgcaagagaggtcaacccctaatccatgagattaatggggtatttatagcagtttgagaattacattaggtttttctttctactggggagttaacaacaaagaatatttgtgggctttctcatgtggtccagcccatgaagaagacgatttgttgactagacggattgaattgtgattgaattggtcaacaccgtgtgcacaaattgtggacaattaatctgaattaattgtataatatttgttgttggaagtttaccctttaatcttgattcgatgcactattgcgatctaataactagagtttccttatttatgtttaagaatataaaagaaaatcggaagggtctaatgggaacgtggtgccttgcctctcccgtctcattgtgatggacatgtattctgggctcagtttgttgaaagcgaaagactttgtgagggtggaaccacaaaatgttcctggaaggtaacacctagatgggcttggcccattttatctttaatgagggtcccattgatggatcttgaatgttgatctagagtccacgtgtcaaatgctggaaacacagataacatttacccccaagctttcaaaatgctgcgaaaggtggaatcgtgtatctctttcttgatttggacatgtggaaatcgaggaatgaaatagtgatatttcaaatgtgacttgaccacagaaggtggcttctatctgtgatgacaatgcatccacgtgtcagtcgtgcgtgcatgacaaggtgcgtccatcgaggagtcactttctaggaacgactacattttgacgattgtctaattttcggcgcaaaaaccaaaaaaaggggcatttttatcatttctttgaatcttgattctgaagtgtattaaatgccatgatatgctcagattgtttgactcctcgattttcggaaggaaggtgtgcttctggagaaaagattgtagtcgtctataccattctcacgtggattgcctttttgggtataaattcccttgataactcctagttaccacttttacttctttttcaaattttcaatccttcgaagcgcacaagtctccttacaatctctagaaccacagactgaattcgaatcaaaactttcttcttcaatctggaaaatgttgtagatttgtctttgactgttgttgaggattagagcacgagagttcccatatcatcgacccccagtgatcaggacttctacgggaagagaaattgcaagtctagatttcaacg

SEQ ID NO: 4870 - DNA, 2004 bp, Cannabis sativa
gaagaacaagacttggatagttgtaccgaagccggataacaaaaaggttgtggagtgaaaatagattctcaaggtgaaagagggaatcaatgagaatgagcaggtttggttcaaagctagattagtggctaagggatttactcaagtggaaggaattaataacacgaaatcttctcacatgtgttaaagtacaagacgataagattgatgttatctttggcagctcaaatggagttttaagttgaaaaacttgatgttaaaactatctttcttaacggattcttggatgaatagatcaacatgaagcaatcatctaggttttaggtggaagtgaaaggagttgaattagtatgcaagctcaataggtccttatatggtttgaaacagtccctaagaaaatggaataaaagatttgatacttatatgcaacaaatcgggttcaaacaatcggcaaatgatcactgcttatattacaagaatctagagcaatctacaactgtcttcttattactctatgtggaagatatgctcatcatgagcaaagaaatatctgtgatcaagagggtcaaagccaagctcaagagagaatttgaaggagcttggacaagttcaaaagatacatgggattgaagtttcaaagaacaagaatgaagagacaatcaacttaaagcagttcagatacatcaagaaggttattcagaagatcaacatggaagacgcaaagagtatatttgtactgttggatgggtagttcatcttgttgaacaaacaatgtcttaatagtgcacaagagaaagaggaaatgaagggcatggctcatgatctaagcatcctaagtcggttcatgtcgaatccaggcattgaacattagaaggccctctaatggttattaaggaacttaaagggcacttgggattatggtctggcctatgagaatgcaaaaatgagaacttgagttaaaaaatttcgtggacactgactatgcttcgaataaagatactaaaaaatcacccacttcctacgtattcatgacaaaccaaaattgtatatgctgaaaggcctagttacagtccgtgattggtctttcaaccaagaaagtagaatttatggccactacgaaagcgttcaaggaagctttatggcttcgaggaactctatatgaattgaaatttttaataggaggagtgattatgtacatggataatcaggcatccatccatctttgtaagaatctaatttatcatgaatagaacaaacacatagatatatatatatatatatattatttttactggattagagaaaagatagaataaggattggttgaattagcgaaggtcagatcaaaagataatcatgctgatgttgggactaccaagtttaagtattgcttggatttgatcaatcttagaagttagtatactgagatatttaaaacaccaactatgatggctgttttctttcttcatcaccatcatatcttaatttgaagaaactaggaggaatttgtggtatagttcctccaaataaaaagatctccaaaagttgttatggttatggaaagttaaatgtcatccgaaagggtgttcttagaattcttacttgtccatccggaaggagtcttcaggaaagctagtcttcctccgaaaaggagttctgaatgactagttgttccttcctggaaggaagttctagataatcgactccaactatgccattcctatatgggaagtccctttatcgtacgctctggtctttctttcaagaagcatacgtctaatccagaagcactttaacttaagttgacgtgggagatattgttacaaggagtttgctaagttcgttaagtcgtaactaacttaacatcttagcattggcaaccactgactttggaatccatatccctaatctataaataccaccactcttatcattttatagtaaaagagatgaacatacgagttttaagaggtgactttgtggttgaagagagagagagagaga

SEQ ID NO: 4871 - DNA, 817 bp, Cannabis sativa
ctagtgatctttattattaaattgtaattagtggattggacgcgcccatacccatgattatgaaattaatctaaacaaataaaacttgtatgtcgctttctaaataaattaattaattaaaagttattgtcacctttagaatttaggattactcatgacgttgggcttacatcaaataataataacattaatactattactacttattaacaaggtggtaataaaaactttagagacaataacttgtgtgtctcacgcggtaacatttctctctttttcattataaaatattgaaagcaacacaatataaaattgagtactatatatatatatatatatccttatgagatattttaagatgctaacactgccacgagtaataatataaagagaaaatatctctaacaacagcaatcctctaatataaattaaaatatttatgtaatatagtattaaattgcacttaaaatttatatatatgacacctaattgtggtgttaacattgcgcttagtatggtatataataagtaatatataagatggtaatagtaataataataagtacctgataacaggcaccacagccagaaccattcataaagagcttataagaaactcctgagacgtaaccatcattaacagtccttccatattcaccaaacccacaagctccccctaataatataatataatgcaccacaaaataatataattaataaaataaggtcatttctgttgagttttgtcaaaagataaatactttataaaaataacaaaaacattgggaaaaagaacactatacttggagtgccatag

SEQ ID NO: 4872 - DNA, 1403 bp, Cannabis sativa
ccaaataaatagcaaatactatgtttcatcccaatctgaataatattgaagatatttaagaaatactattacagtgcaaattaggcatcaacatgtcaccagcatatataccaacatgcggcgccacttgaccactttaaggacctccacctaacttgtatcgtgccatcttggctgacacatcacaatgtgcgatgaggggataaaaggttttagtgactaagagtaactaaatattatctttccagtcactcataccagtaacccttagtaaaaagttactaaaaatctttagtctcttaaattgggtcacttggaagcgaatgataagagatttttataaaaatactgaatattagataaaagtttacaattttactgtgacatagaattttttacaaaaatactgtttttttataaaacaaccgtaaaacaacaaaacaaaacaatcaaaacaacagtggaacaactataaaacaaccatgaaacaaccgtgaaaacttaatacaatatacagtataaaacttacacagtaattttgaaaaaaactccgccccaaagtaaacaaaaataaaaaaaataaaattttaatatatatatatatatatatgtgctgtaaaaaacccaatgatagtaatgttattgtgatttgcgtcgatggatttagcattgggtttatggaccgacatcattggtcacaacctttgtttaaaagagacaattaatccagagtactgtttattataaagtataaatttttctacaagctacctaaattttaaaatttagtactatgagagagacaaataaaacaaagctagtaattctttttcttttcccctcaaatatttaatattgattctgttttttttttgtatattaaacctagtactctcattattatatattgttattagagtccgaaactatattgttgcttaaattctttattattaattttcgaccaaaaaaaatattttttgtttgtttacgataacaatttctttccatgtttctacaattaattctgccacattgagtgggcatgtaatgtttatgtatacagatgattttattatttattattattattatatcgtttattcattattaaataattatgttttttttcctatcatatcttgaatattatttttgagaaaaataataattatataagaatcatccattagtcacaattataatctttatgaattttatgcagtgtagccatagatccaggattttaagttgagaataatcaattgttttactatatataatatcatatataggtagttattaaatgtgaaactgtgtttgggtaaatattagtcgtgatgggggaaatattgcaagcaatcacgactttaattatttataattatacgaaaataattaat

SEQ ID NO: 4873 - DNA, 1815 bp, Cannabis sativa
atcctattgctactgaaggtactaataattttatcgaagtagaatttagtaattgtgaggaagctttcaaatacaattctttttacaagaatgtgaatgccaaaaagtggattgtttggtccaatagttctgatgattatatttggaagcctaagtacgactgtaatctattatatgagtgaaattgtgaaaagaaacattcatggtattctcataactctcaacatctatacaatcgttccctagatgacactattgttgagttacaagcatctatggcaacaaattgcaagatgttgaaagactgacatgctgagttgacacaagttaagcaggttttgagcaaactattttgtcacctggtaagtttgcacgctaattgttctcctctacaaccggtgactgaagaactaattaacctccaatactacctttcacacaattttaacgaggtaagtgtcacctctacctctagtggtaaaatttttgaagatcatccattctaccaagtatatatgagggtggtaatttgatgtggtacccatattattcatagaggagaatgatacaaccattattccgaaagaaaatctttttcattctaccattcttcctctaattatggatgaaaataaatgatatcgtactgacgtgatagaaaatgttgttgaggaaattagaaatttattttcacttagccatttacaatatatttcctctactacttagacaatggtcattttctttatcccaaaaatataactaatgcttcaatttttgagacataggataaaagaaaattcaatattaagttagtaaaccgaccagaggagacttatctcaggtttgccaagagtaatcaggttctatcttaaatttcttttatttttggtatattttaattattgttttgttattttactttgatcatttgttttttatttttttatgaatcaatctcatgttattttctagctcactctcatagtgttctcatttcatgtatatacttttgaacaatgagaacattatcaaattttgattggagttgtgagcatattaaagcacgtttgttaacatttgtcatattaatatttttatagtcaaatttttaaaaaactacttggttattcttgtaaaatattatttttgaggcaatttttgctatattaattacttaattgtcaactggcccagaattgtttgaagatcatcaagagttggctgtcctgaggtgctctttccactgatctggacaagctccttcaatgaataaatcgagcaaaaattagcaccttcaaaaagaaagttttggttgttgctatagctggcctggtggactcggtatggtatgctagaaatgataagacatggaacaacaaggatgaaaatatagatgcaattgtagagaaaattcagtacactgtcaagtatagaataaattctttttggccaaaaaaagtgagccaaaaagattgagaaaggtcctaactttgtaatactttagaaatgttcttgaggcctcttaaagaagagatgctcttactttgtaaatgttttgtgaattaatacattgctgattaatttatcaaaaaaattacttagaatttttttttcaagagttataaaatgcacatgtcaaacactgtggtaagatggttgttagcacatatttgcttagaaaatgcttgagaaaacacgttgtgcgtgtgactattgagataaaacacatggactaaattagtatttttcttacagtgagccacatgcaaggactaaatatcatcaaataacttgcattccataactgtttga

SEQ ID NO: 4874 - DNA, 652 bp, Cannabis sativa
cacttgttgttggattttcccaaaatgcattttattccatttcttcaaatgctcctttattttccttagtttccggtacaggttcaccattgggtcatggtgaagattgtcccgccaagcatttcgcaccacccagaagcatctcgggtccctcccccacattaactcatacttgaattgagacttcaaacaccttgttcccccctcagtattgagaaggattggtttatgatctgaagtaccaactgtgaggagctcgacaaccacattaggaaataaaattctccaatctatggaggctaaggccctgtctagtcttgctcttctaactgaagctccaccagtagattgtgaggccttttggaaccaggtgaattttccgccaaggcagccaagatccaccaagccggttctcaccaccattctcctcaagtcaaaggaatatctagcagaattcttctgattggcataatttaggcattcatgatctgcaagtgttccattcaaatcaccaataagaaccgtgggtgacgattcttttactatcaagtctccaatacgattccagaaatcctctcttccggacatcgtaggcggcccatatattccaattaaattccatttggtaccaggaggatcagattcaatcgaa

SEQ ID NO: 4875 - DNA, 1245 bp, Cannabis sativa
attaggattattttggcccacttaaatataaaactaagtgagtaaatgtctctttttataaatatttagtaaaatgatatatcacttaaaatttggatgataaaattacaattaaataaatttttgataattaaccttaactttctattttcttcttattctcttgtttctagaccatctcgccttcttatttgctggtgactgaatgattggtggatgaaacaaacttcaatttatttttggtgaaagagataacgaagaaaagagtagtatatctattttatgtgatacggtatataacgaaaggaaagaaaaaaaataaaatgcattagtttaattttttcatatattcatttttaaggtatatcatttttatatgatatggagtacttgaataaaaaaaagaacataaaaactacgaatgagatattcatatcacaattctaaagatttcaagtccaaaatctattcccaagatagttgtaattattgtccacacattactcgaaaatgatctgacgaacgagattcaaactttaaaaattgacaatttttattaagagtcaattttgtaacgttagataatcatcaatggccaagatcagcccaaagtagttttttctcttttgtattattttattaatattttaataggaccccttcactataaaaggagagttgttctagtttatttttcacattctattaagtctctataaggttagagtatctctttctactttctctttctagaaatttgaactctctccttagtcaattcttttgtaattttcatgagaaataaaaattcgaagtagacgtaacttcattactatcacgacatcatggggagtgaactactataaattctgtgtgtgtctctctctctatattattaactttaactctaggtcagctgtaggctaaggtcggctaggcccgcgcctagggcctactcattttagaggcccaaataaaaaatatattttaaaaaatatacatattttttaataatttttaaaaatatcatttatttttatagtaagagctcaaaatttgttttgtatatgacccatttcaactcaggatcggtcctgcttaaacttattattcatctcgtcaatcaaacgaattagtattggccattttttttttcagcgtcaacatcctttatttctacccttactattttattcattctcttaggtattctctctaatagtaatggctgctaagaaagtaatt

SEQ ID NO: 4876 - DNA, 941 bp, Cannabis sativa
tttttttttttttttgaagatgataagaccttgcaatacaatacaaactttacagccaaaccaaagagatgaatagccaaaacacattaaaagttcaaatcaactaaaacagatagaattatacatggaaaaagtcattaaaacagagaaatagatgtaaaataataaaataaaattgggcagatgttggagtccagggatcaatcactctgttatcacgcgagatgcctatctagtgatatgtgttaattaactggacctgaccaagttaatttcggtccaaagaatatgtatattttgggcaatcatgctactctttttgaattaatcaatcaagccttaggctgcaaaagaaaatcaaaaatatattttcacactagtgataaactagaacgcagaggaggagatggaggttgtccctactccctagtcctttaactacactcacattgctggaaaatgaaaaggaaaatctagactaatagctttgatgatggagaaggaaattctacgagaaagaagctgggatttgtgggcagtgctataatttcttctattggttttggatggaggtcattgttcatgtcaagaaggagctaaggactaaaatcttttttgttcttatggatcaccttaccgataccatgggaaacgtctatcttgaagctatgacatattaaccccaaacctgataatgccatattaatctactttcataattaagccaacgagacatttcaagctagtatacctttctaagctagagtccaaactagcttcataatctttttcttaaccaacttaagcacacatacgatatcaattgtatagtgtaattgtatttgagtgtttgataattatatttatttgataaatacaaaattatcaaaatagacatcactatagtattaatttcttataaattgctagcttaaatgtaa

SEQ ID NO: 4877 - DNA, 580 bp, Cannabis sativa
cacaatggcctcagtttgcttcatcttacagggaataggtacttgtaagatgattttgaggacagttataacaagaaagcatacaccttaaccttatgaaatgatgtttatgctaaaaagagtataatagaagcacaaatagttggctttttggcaccttaagatgaaagtgttgtgactcgcataaatgcaacattgatttgggaaacatgattcttattctacaggatgaagttcacatatttcttacacattctaataacatctatttttgtaggaccagaaagttcattatttttatctcacaagcaaccctaacaagtgaaatccaacatatataggattgccaaacagctatttccaacatctactctgctatgcaatatcaagtactagagtgtagtacttataataattatattagaggctcgaggatgaaacaccaaaacatcaagacaaaatgcaagacagcctaaccaacatttcctccatttcaaccaaattcaaataaattcatacatatataaccaataggggcattcaacaggactcgagacaccagcaattacctcttgccata

SEQ ID NO: 4878 - DNA, 1484 bp, Cannabis sativa
gcaaatatctccctaataataataatgtaaaagatcacttactagggacagattcactaaggtgattgaaaccatcaaccgtgtaatttttcgaaatgtaagccgcctgaccagcataggataaaacgagaaccgggtaaattaagcatacgaaagtaatctgcaatgtagaacaaaacattcataagttcttatcaaactctaaaaatccaagcttttctctaattgagaatggaaatgatattattaaacagttatagtactttgatagatttcttcgaaaaatgaccaagaccagcaaacatagcttctgatcctgtaaaagacataaaaattaaccgaaccattatagtttgagacgaaataacagagcttaaaacaacactcttagtcttaaaccaacctgcaacacatagaatgatgctaccgagcgatctccaacctttagcacgagcatccacaacgaatctgtacatgtaagttggagatatcgcgtagaagatatgcgggttccatctgataatgttataagtaccaactccactgataaataggagccaaatgatgacaattggagcaaatatgaaccctatttttcgtgttccataatgttgcagcatgaaaaggcagaccaatatggcacacgcagtaggaaccggtacatctgaaacaatttcgattttcaaaaattggaatatctgaatttcgcaaagctaaagacagattattaactcacattctttcaatgctttcgagactctctcctgtctatgttctgaagacgaaactggtaagaacacaagcgaaattaggaactgaagaacacattgttgttgtgtaaaaggacattagaacagaatggtattattatcttacatgtgattgaagacattgatcttccgaaacctgttgaagctgataatactggaaacatagatagatagacaaagagaaagattattcaaaataaagagaggaaaagcaacgttcctagtgcaaaataataggacaagatgataaggaattgcaaacccgaaagagaaggagtaagaactccatcgccaatcgccatgcatgcaccaaacaaagccaagaacaacatgagataatggctacttttgtgtttggcaatggctcttcttgcccttgattcaaccttggccttaaaaggattttcttcctcatattgcataacttcatttgcacttgtgtcatttggaagcaaaccaactttggcatgcctacataagattgagtacaaagcaaaagtaccacctacataaatttgtccaaaaccgaaaactttatagtcaaaacactaatcaatcctgacaatagctctcgaatagttacataagaacaaggaaaaaaagggtaaatactattttggatcatgtgttttgcaaaagttactgaattgaacctctgttttggtaacggacaaattagacaatgtattatctaaaatagtactaaatagtacc

SEQ ID NO: 4879 - DNA, 523 bp, Cannabis sativa
tacttattcttgctttgtacagatggtttgtctagtttggtaaatcgtgattgtgacaatagtttattgattggttttcttgtgggagaggtggtccggtgatctcccatctattgtttgctggcaatagcctcttctttcttaaggctttaaaagtgtgttgtctgagatttaagcaacttcttagttggaatggtaaagttttgggacaactagttaactttattaaatcggcagtgtgcttcagttccaacgttgcgagccttgagagagaaagattggtagccttaatgagagttgtcggagtagattgtcatgagacttacctgagtctctcctattttgcgggtcatagcaaagctagcttgttcaactctatccgagatagaatttagaaaaaacttaatggctggaaatccaaaaagttttctatggcaggtagagaagttttgatcaagggtatcattcagtccatccctacttataccatgaacttgtttaaactcactaaacgttttatcaa

SEQ ID NO: 4880 - DNA, 576 bp, Cannabis sativa
ttcctcaaaattgaaagatatttgctgatttatttctcatgttgtaatctttagttatatgtgagggctactatatgtatgtgaaatagacggattgaacactgcttttttttatattgtaaattattctaaatttcttaaaattttgtgaaatatttaatgaaatataacgtacacaattgtgaaaacagatataaggtgcattaatgcactccttttaaggggtacatagtagaattattttatattttgtataaaataaaagttattaaaatataatatattcataaatttttaaagtgtaaataaaattaccctaaaattatgttgagtttgtttttgtagcgcagcctatagcttagggtttctttcattctttgaatggggtctaaaccagtaaacctttcataaagttgctatcccaaagtaactaaatgagtctatatgacaatcaataaggtaataataaattaattaatatttatttaaaaggttgccaatgcccaagttgatctgaaaaaatgcatgatcgattaaccaggaaatttctttcaaaattgatgtatatatacatat

SEQ ID NO: 4881 - DNA, 1005 bp, Cannabis sativa
gccacggtggccaccacgccaagcctcaccttatggtcatttatgaaggcagcagccaacaatggtgccacagcgcccactgagaaggccagtgcagaagccaccgcagcctgcgctggattcggtagcttatcattctcctcctcctcatcatcatcatcattctgtccaatacgacgtcgttgctgtcttcgtctcctgatttgagacttttcaatgtcgtattgagtgtagacagaaacgaactctccaatggccatgctacaagccccggctactaagcctgcaaaaccagctagaagcatggctttgatgtcctttctgactgacccaactcccatcatcagtgatgctaccgaaaccaacccatcgttggctcccaatacagctgctcgaagccactgtgctctttgggagtagtcaactacttcctcatcatcggttttcatcgcttccacgttattattattattattattataaactgggatttctacgtggctattattgtacatgttgttgttaccaagggtttgatgatcaccagcagaagccatatatgacagattcttttcaaagatatatatatgtaataatgatttgatggattgtttttgtttggtgtatttgcttgtggtgaacacacgccttcccattttgagtatatatagatcacgaaaaggggatattcattagtgttcaggggccatggtaaatggggtccttgaaaaaagtgaatatcatggagagcaccatagatttgtgggtttaattttcctatatttaattccaattccatatagtggagtttatatttaaaacttatttctattaaattttctttccgacccactcactcactactctcattttttttattatacatagtttggtcattgaataatatatatttccttcattaaccatgtatcttatttagttcccgattgtataccatatacatatactcgaacctctagcctctaagaaaaataaagttattgt

SEQ ID NO: 4882 - DNA, 811 bp, Cannabis sativa
aaaacgcttaattttattagagtgggaaaacaaaatgtatatacaataacaaaatttcaatagctaatattaatgcaagaaaaactcatctatatatgtatgtattattacaattaagttaacttgatatgtatatatatatgtacaattgctttagacaaaattattgaatttaattacagtttttgggaaacttgatacctgtcaacattttaattagcggtcaaccaagaaatcaccttttcttttaacatggcagatgagtcatcatttccattattacttgagcttgttgagctctcattcatgatctgtatccaaaaaaaaaaaaaatcagcatataaaataaccttagtttaaacatcaaagctcaagtatggtgatggatatctaatggagtaattagttcctgctgatcaataaattcatcttaattaaagcacaatacttttttttgtatgaactatttgtgaatgaacaaaacaaaacaatataactaaattggggaaaaaatgtttttctttttgtagggtatgggggaaaaatgttggatgtaaaggtttcacttttttttttcttacctcaacatatgaagattgaattaattagtaggataaaattaactattccaatgttgttggcttatttatttcaatatattctctcagcttaaaagcattgttattaggtatcctagcaatatgagacttcataaaccgtgaatctccttaaacatttctcttataaaaattatccaacaataatccattctaattcaatccacaaaacctcatatagaattatacatata

SEQ ID NO: 4883 - DNA, 1035 bp, Cannabis sativa
tattaaatatatgactatgagtaatgtaaggcccacttgagttgcatacattttacataagcaattttaagagtgtacattaggtgggttttatcgggtttttgggttcaagtgtatagaattagtaatccgaactcacttgtttgcgtaaatgggttttcgggattcaatgcgagtggatcggttttaggttggacagtattcgggtgggttttgatcgagctcgggttgggctggtctttctttttttaaaaaaatatcattttttatatatttttccatataaaaaaacagaaaaattgaaaagaaaaatataaaaatgatatatcattacttgtgatcgggtttttgggtttttcagatttcggaccgactgggtttgctaagtgggtaaattttcggttgtaaatattcagccctaatacacatttaattttagtcctaacatatttttgggtactacaccatttttaatcatgtagttaatattaattcaacttcattatatatatagagcattgctataaagtactattggtgcttagcactatttaaaagtggcgcattacaatcagttagcgatataataaaaataattaattatataaaattcaatacttattacacaatttctcgtatatatacaatttaagtgtattaatagtatacttcatcatattttttggaatacactatttgttgtccttgtgatatgtgtcacctctaaagaaagcccatgaatgatgtagggcatgtctaagtgttgtgataagggtccaagggtggaatggtcccaaataatcattacgatcctaaacaactaatattgtctcgaacaattagtttggcgtttggtaacgaacttagatcactcatctattaagaataatatagatgagtgatccaggctcatcagttaggctcctcttccaatttgtaggaaggcgtgtgagcaaaatgtataatcacttttggattaggcactcataataaaactaatgtgatatgtcaaaagcaaagagaccgagcaagcac

SEQ ID NO: 4884 - DNA, 1418 bp, Cannabis sativa
acaagaacatcaattcatgagcatgatatcaaaaccgcagcaactactgctcccccaatcatacacacaaagtctgaacaaaaagtctcgtgctggatggatgtcctaatcgcataacataaccgggtaaatcacatgtcaaaacccttatcctgcaactcaaggttctgttattatcactagggaaaaaattatcctaggaaagaggaaaacacccaactaaggactgaaatgggcaagaattgagaaaacgggttattcggggaatctacccaaaccggttaattagttttacaggtactggcaaaccgattaactggtttgcaccaggtttccccaaaaaaaatcataaccttctcaaaactcatccaaatgctaccaaaccttccagagtacctaaaacaagcttacacaatatattccaaccaatagaaaccagaaaaacacactgaatcaaaatataccattgatgactcaaatttgagttttcaaactcaaacgtggtcatccacctcaataatcactaaaaatagcaagaagaacttaaacccaactcattttaagcttagaaatcgaatcacacaaactttaaaccctaaaagcccctaacttccaaaattgcatattataaccaaatagaacttaaggaaatcaatagacaaggacttctagggcttaccttcgttagaacctcctcaaattcttgctggaaacaccaaaatctagtagaaattcccttggttcttgctgggttcgaagacagagaagggaaagagggagaattatttgattttttggcttttctttttttttttccctctaaaagaaataagggttaataaattaaacctttgttgaaaataaaataactaggtgtcacacccctaggcagccactgaacctctcattgggaaattactaaaacgccctttttcttataacttaagcaaaataaagtctaggggtaaaacggtcaaaaatcataacctcgctcaaactcgatattctatttcctccaatatatatcccactaagaaataagattctagatttacgcatgtgattaaactagccatcgatcgcattttccgttgtccccgagtaaaaattacaaaaataacataattcacatataatacaaataatgcacctagagtttaataaattcttaagaattgagaaataataactctactacctatttctaacaataggacccacaaataatttaattccacaaatactataaaaaataccaatacttaatgctaattgcctttactaatctatataataaaatgcggtcattacaactatcccacattaaaaggatttagtcctcggaatctaacctgaatagctatagatattgagtcctcatgtctgacactaactctgtaacactctaactagcatag

SEQ ID NO: 4885 - DNA, 1372 bp, Cannabis sativa
tataaaaaatgtgctcaaaactcatgatatcaaatctacctcaataaccctttaggagggtgtactacaggctttccctttattatttaaattttagtttaatttggccccttcacatttaattctagctcacagctcataccttagctaaatatgttttatcgactattattagcaaggtttggtgtcccctatttgtattcaaacttttattttggatgatgcgaattttggatgaatacaaatttgagtcctctctcctttcttagtcttttctttgagaagttggagtttctttaggaccttttctgaaaaaagaaaattctattaaagatattatttttctaattatctctatttcccttagagttagagcaactctctcatggtgaaatttaaatttgatgttaaatcaatataaaaaaaaaaagtactaattttttttcgaattccaaccacaatataaattacactaaaaagtatttctttgttattatattactttatttaattattttattattttattattttagcactaaatacttttcaagttctaatccaaaaagtattatttaattattgaaaagtaaaatgaaaaaaaatattgtggtctacgataccaattattgttagtgagacactatagactcccataaaaaaaaaatagattttgcaattccattagagtactttgtggaaaaaatcacattatatatatgattttacctctcggttggagatggtctaaacctattctttttgagcatgtcacttataatcttgccatgaaataatgatgtaattttgttgagagaagtatagttcatcacattttctttttgttcatttcactctagccctatgtttggtagtaagagaagaaaagtaggaagaaaaaaaaaaaagaaaagtgagaagaaataaaattaagttatttggtaaggaagaaaaatagagagaaatgaaaagtgaaaagaaaaatatggtgtgaacccaccaattttcttcttcttcaatttagaaaaaagaaaatggagaaaaaagtttcctacaaataagtaaaagtgaagtgaaatgacaaatatttttacaaaaaaaataaaattataccaaaataatatatctacctaaataatgtgctgtttagtttgaggtaataaaataaaattaaaaaaataacttttattctattttttttgtttagtttcattttaaaatattagaatgttattcatattctagttatgtgttcattccttccaactaaatgccacctaatagagtgtttattatgtgagtttgagttaaagagagtacaattggagggagtagacttaaagggaacatgaaactcaaatgttggaggaga

SEQ ID NO: 4886 - DNA, 1076 bp, Cannabis sativa
  modified_base (984)..(985): a, c, t, g, unknown or other
taagatataaggtgtatatttttacaataaaattgcttgtatacaattcaaattttatatatattacaataatacttcattatatatttattttttaaaacatgaaataatattaaataattaaaaaatttattaacttttaatttgaattattattattttaaaagttaatttcaattgttttcatataggtattatttttaaataaataattttacttgtgaattttgttattaatttttttatattaatagttaattctaacaaaattgattacttaagtacttttactaccaatttatttagatacatagtcctactataattattttttatattaatttttttttatcaagaaagataattttaattaatcaaaccgagtcaattacatctgcaaggtccccttcaaaataaaaacttacaactgtttcacatttttaagaataattttatctatgctagaccatttattttcctttacaagataaagtttactttcgaaactctcttttgctagtatctatacatctaagattcatatattgtttttttatttatatacaaatttcggtttagccaaatgtcataaattgtacatgctcacacattttgataaacataatatactttttacgacacattctaatatatatatatatatttatttttaaaattataagttttttttaaatatatatatattttttcaataacaaaaagcaaaaaaaaaaattaaaataacaaagtcaatttacttaatgtaaaaaaaaaaataagtccattgatgtatattgttgaccttagaatttggccaaccgatagcgaaatcgtatttaatactcatgctcttgccacgtgttacacaataagaataataatgtaaataagacacaagattttatagatgtttggcatccttagttagcgagtaatgacttgctccccttttagttgtattgataccgagagataatactactnngatcactatagtgatgggatctaaagtagcactcttaagatttcaatgtatgaatcagtaggaaagtgtcacaagagagagagagagagag

SEQ ID NO: 4887 - DNA, 1386 bp, Cannabis sativa
tgttcacacgggaaatccaggaaacattacaaaaactacaaagattacacaaatggaaaagatgcacaaaggtaggatacaactgccaagaagggacatgtctcgctagaatagcatccaccgccaccttgcaatccgaaaagatcattaccgtcggccaaccacaataaaggcatctcgagaatgcattgaggatagctcgcacctcaggatccaggggcgagacaacaacttccttccccgcatacgcctccaaaaccttacccgagctatcgatagcaagaacaacatagaaccccatattgtctctcaccgcagcatccacaataggttgacccgattgaccgagccaagatcaaaaaaagcaggagggtcacatgccaccgtgggaggaacttcgcaatccttgggatcaaaagaactcacagaatgaaggatccccttgaaaataacctcgggaggatcacgcaccccttcatggaagcacttattccgggtggaccacatatgataacaaagaagagcagcaaagatagagaacctatctaaatccacattgtcaggaaaaggagggaagagaatccattcgacaatgtccctcgaggagttgaactgaagaagatcacttcgaatactccacgaactcctaaaccaacaaaactgagccacaggacaatggaaaaaaaagtggactaaggagtcggaatcaccatcacatagaacacaagaggaggcattcccaaacagggactgaagcctctgcccacaagggaggatatctctcccaaccttccagagaaagagtttaactctttcaccaaagggagatttccacagggtcttgtaaagacgatcaaccccaccatgcctattcttagtaatcaatcgatacgcagccttaatagagaacttcccatcctgagagtctttccaaaacaggatatcttgctaagtaggggggagacggggcagagacttcagccgatcaaagaaagagagtctcagccaacaagacaaggaatagatattcagctccccattccccaacaagaactacgccaaagagatcgactgcttgggacggatcattggattgaaggcagctagaaactcgtcccactcaagccacggaacccacggagaactccaaagatcaatacttaagccattccccaacatccaacaactttccttacgaataagatcacgagaagcaaagattcccctagcaccccaagaagccaagggagggaccggagcattccaaaaggaaagatctctcttacaatacttagccaagaaaaccttacaccacggagacgaatcccccttagccaaagcccaccccaacttagcaataaaggccaaattcaggtcatgggattt

SEQ ID NO: 4888 - DNA, 1512 bp, Cannabis sativa
ttttttttttttggttaaaaaaaagttactaatatttgattttgtgcctataatttgttaccatctaataaacacaggtgaaaaacttggattagatgcaagcaaaaggatgataatgaatgatgaaggagcagagattgattcgattgaagtaattagagataatgacaagcttttcattgttgattatttataattgaagttcgatcaacaatgtttttactccttatataatttgataatcaaataaacatgtttggatcaagagccaaattgtctacttcaaatgttgaaatatatgtgtaccagatactaattcagttagattttgtgttacttctatagaagagtgattttcattactaataaaagctctttgtacagtttataaaagaaattacggtaaaataaatgaaacaaatgagaggattcggtcaaagaaatcgatttcatatgatatggaagaattatattacattgctttctttcttaacaaatgctacaattttttttagtgtaactcatcatctatcaacaatacatgcttcatttcaaacataataataaaataaataataataataagaaaatattcaatgactaatccaaaaatggcactggaaagatgcataaaatgagtaatttctctctgcgagatgatttttgtcaagcaaattttttatttatatacgtaattaagaaaatattcttatagataacgacaaataaattaaacatcctataaatgcacatgcttaccaatatatagaaataaaatcctacccaattgaaaaaaatgaaaacctagaattttcaggcaaccaccatttggccaaacatataaattaatttgagaacaaaataaataaataaataaataaataaagcttcgattcactaacaaaatagtcattaaagctctccaatcatgtccatagaacctgtcaactaaatccaccattaaagctacacaaagcttcgattctctgaaatcaaacaaatggcaccacaagtgacagtctattttcacatgttactagtgacctcttctgctaaacgagggaaaaagaatcgctatctggcggcattctctatcgaccatgcacccatttcatgcagggtactcgaaccggtggagaatgtgaagaaacctacaccttctaaaacggctagaagagggaaaggtgtgaaaaatatccctaagattgtgcaagccttgagaggcaaggcagcaaaaggcttcaaaaagaggtaaccccaggcaatgaaaaggtccactgtgaaagttgtcaagacagaagggaagccaacaaagattgactgccccataactatccaaaaggaatggggccaggagcgtatcttgattggttatatccctattttcttgcccattgttgcttcagtgatggttatctccacaaagaaaattgagacaacaccgacttctcaaactctgagaggtaggaaggaaacaaatggcaggaaggggacaaaaacttcaccctcacc

SEQ ID NO: 4889 - DNA, 1003 bp, Cannabis sativa
cattccattccaacctaaattagttcaaatgctctttctgatacagaactcgatatctatagttctccaagcatgcctagaaccttcacttttaatttgcatcacaatgtaaatagaaaaccaacttgaggcctgcagacttatggtcctgtaattattatcatccttaaaatccctcaaacatctcaacttcgggtggaaatttcatgttctgtgctgcaaatgactctaaaaatgaatacaacttttacatatccaacaggctcaaccactagctactttaacaagacagaaacaacaacaatgatggacaatccataagtaaatgaactacaaaaatgattagaagaaccatcacaagaagattgctttgtaacataacttcaaataaaaattcttcggaatataaccaacacactgtatcctcatttgaacaaagtcctcccacataataattaaacattcaccacaaatataaacaaagtagtttgcatcattctaattcatgagataatcactataaattcactcttaagtactattttatcaaatttcactcttcttctcagtaaccagctgcaacccaaagcttccagcattgaaaatataggaaaaagcataaaaataaataaaaacttgcagcttaaataaggttaaattgaaaacctaaacaaaaaagtattgaggttaaattgaaaacaagcgacatgggtatgtttaaaatttgaaaatattgagaaatagagcaagagatactcacagccatctttaagattttcttgcctgaactgtttcggaatatggtcgaaagatttggcggaggcagagacaaaggaccttcgagctgtggtatccctctctgataaaactctgaaagaagaaggagagtaaaagaggttggtggtggcatgaaggaaggaagagtttgttggagccagatagcgaggtgaagaggagggagtggagagggatgagattagagaagtcgccatggattttgagg

SEQ ID NO: 4890 - DNA, 1262 bp, Cannabis sativa
agagttataaggccgaagaaagggaaacattcgcagccaaacactcggagtagtgaatagttgggagctttgtcatagagtaagtgataggggctgtcataatggagaactcgagtagaaaggcagttgattaaatacacagcggtagaaaaagcatatggccaaaaatgaaggggaagatgggcatgagctaacaaagtgaggccggtttcaacgacatgttgattcttgcattcgactcgaccattttgttgaggagtgtggggacacgatagatcatggcgaatgccatgttgagtgaagaaccgagacaaggatcgatattcaccaccccaatcagtgcgaaccgattgaatggtactttgaaattgagtggaaacaagatttttaaatgtaaggaatgtattgaatgcttcgtctttcgtatttagaagataaaactaagagaaacgagtataatcatctataaataagagaaaatatttaacaccagtgattgaagtaacaggggtcggtccccaaatatcagaatgtattaattcaaagggttttgaagcccgagatacagagttggaaaagctaagcctatgagattttcctaattgacaagcagtacaaaaagttaggcaatctcttcttggaaaagaaaaattacaagtagatgaaatccgagaaataatatcggaggccgggtgacccaggcgagagtgccatacatcaatggaagtcttggaagtgtagaggagttgaggagaggcagcaagagatgtcgcgggggaagaggtgagtcgatagataccttgatcatgaaggcctttgagaaggattttatgatttccctgatttttgacaagaaaaaaagtaggatgaaactcaacataagcattattatctaaacaaagttgagagatactgagcaaattcttagacaaagaaggagaatggtatatgcgattaagtttaatgttaagaaaagaggaagatggtagatatgcaatgcccacatgagaaatggaagaaaacttaccattgctcatagtaatgtgatcattaccatgatatggagtcccggactcaagaagatttagatcgggagtgaagtgataagaggcgacagagtccatataccaagcgggatctgtgatggctcccatagatggaggagtgggaagtaagggtggattgctggctggtgaggtagttaatgatggtagagtagtttgtggttgttgttgggtgaaataggaattgaatgggcgtgg

SEQ ID NO: 4891 - DNA, 909 bp, Cannabis sativa
aaaattaaacttagctatttataatttactaagcttaattaatatttaaccaactaactaccacccttgtcttagactctttactgttagttatattttaatttacagtttggaaaataaccctaattacggtgctctgctcccctccgacgactacgaccgacgccaccctactccggtgactacgaccgacgccaccccactccgatcccatttcctaatcctttggtatcttttcctaactttttcactacagtcatactaaatttatttgagctccattacattgatgtatttgatactctgtactctatttctactctgatttttgagaaattgatgttgttaaacttagaaattggtcaaacaatcgtagctgttgccttttatttggttagaacactcaaagtttgttttttatggagtattatttgatacttagtgaagatctgatctgatttttgagaaattcatgttttcaaacttaggaaatgatctaaaaatcatggttctgtatatcattgccttttcaattttcatttgcttagatagaacacttttaagttttttttttccttttttttgtgggttttggtgtgacagtgataatggaggttgagtctccgcctagttttagtctggaccaaagtgatgacgaaagagctgaactgagcatttctgagctcatttatgatctcagatcggcattcaggagctctgattttgaccgagtcgaggagattctggtcaataaagaaaacaagatgaagaaacaaatcactgagttggagtctgagactatccgacttgatcttgaggtcaagagattgagtaaaaatagtagtgagagtagaatttcgagggagaattatgagatcatgagaaagagagtgaaggtggctgaagagg

SEQ ID NO: 4892 - DNA, 504 bp, Cannabis sativa
gtatttttaaccgagaaaatatctcaattaaattgcaaattattattttaattgattgctataaataaaattgcatcatttattaaaaaagatatttgttgatggaagtgggggcccgagttggagttggactcggactctagtggttgcgggccgtgaaagtaagaagcaagcaacccttgtttccccctgaagcggggagcaccatcaaaactccacacctcagctggaatatattatatggttcttttatttgtttagactttgaacaaaatcaaatacagaaagagaaacagaaaagagaatatgggtaatccgaagcagaagtggacttcggaggaagaagaagctctaagagcaggagtcgcaaagcatgggactggaaagtggaaggatattcagagagaccccgagttcaatccctatcttgtcaatcgctccaatattgatctcaaggtctccgatttttttcttttttctctgtcttctttttgggcataaaag

SEQ ID NO: 4893 - DNA, 1527 bp, Cannabis sativa
aaacattgcttgaccctaaaaaaaacaaaattataaccatacgaaattgacaaaaaaataaaaataaataaataagaaatttagaactcaaaaatacagtaacactagaaaatacactctttaatcttagtagacatgtttataaaatgaattgaggtaaaaatttgtattttcaaaatcagaaatgggctgtgtagcttaatcaaattagattaattaccaatatcgtgaagttgttgccaagaacaatgccagtgggaaaagacctatcaacagtggaagcagcaacagtcaaaatccaaggtgaagtattatcaatggtgtgagaagaaggtccttcatttccaccagcacaaacgacagtaatccctttagtgacagcatgaaacgacccaggtccgatcccatccctttcatcaatttgaggaaacaaaggaagatccgtcccaagcgacaccgacagcacatcaacgccgtcgtgtatggcatcatcgaaggccttcaagatatctgccgacgagcactggcctctcggcacgttccagcagaccttgtacatggcgattcgagctttgggagcgccgcccctaaggaggccgagtgcgatgcccttgtagctagcgttggggacgaaggagccagcagctatggtggaggtgtgggtgccgtggccgaaggagtctctgggggacttgaaatctggagcttgggtggtgttgaaaggttggcgattctcggcgagaaatccatcgatgtagtatttggctccgatgagttttcgattgcagtcctgtgtggcattgaatcgctccccagattggcatgatcctttccagcgttgtgggattgggcctaagccttcatcgttcaaaatcactgactctggccatattcctatagtggagttggaaatagagtgtcaccattccaacacactgataaacttaaaatttgtttttggctaaatttgtaaagaacacgtaagttacaaaaaattaaaaaaaaaaaaaagtgtcgttttcttttctcacgaataatttttattttttatctagtatattttatgaatatatttaaattttaaaatcttacttattataattaagataaatttatgcttttttattgattatagtaaggaaatatttcaatttttatgaaaatagttgtggtgatgcatattaataataacacttaactgttttaaaaaaataacaattaatcatttattttcgattgtcaattttgtatttactaactctatttattatacacactattccacttatattagttttttaaatgagtttttatgatgcttttattttaattctatttcagacattattttttttttcaaaaatatacatgtaatgggtgtccaatgggaatccttctcccgtcgagtaatccctaccccgctcccgctttaattaaacgggtattggggcagaaatggggtgaattttggaagcgggtatgggggtgagagagcaatccccaccctgtttacatccctaatgctaa

SEQ ID NO: 4894 - DNA, 1252 bp, Cannabis sativa
tttttgaggttaaacaacatctaattcgcacttgtgcggatttaatttttcaatctaatttaatctgcacaaatacgaatatctgcattttacgaattggattagatcggatcgaatactttatgaacagctctagtaactatctaaaatgttgggatttgtttagcaacctagtgagaaacaatcatttgtcaaaaaaataaatatcaatagatattaatattcatggggcacttaggccaagtcttgacattggccattttaaacttcccaacataacttgaagggattcagtaagcctcctcaggtctacaataaaatcacccagaggctttaacaacactagtgaacatttgctttgttacaaatgtagatttaagttaacaaaacttttcttatgtgaatgtattccgaatgttgcgggtttatcgtcagagaggaagtctctgaacaagcaatatgtccttccaagcctcataaaacatccatgttatgccagaggatggcatgacctttaaacagcttgcaccccaacctctgtagagccccataataccttgctccttgatcacttctgaaagggctgcaaccatgttcggtggacacttaccatgcaacgctcccaccatcagtcgcttcctcgctacctctaaaggaaagcttattgtactagctgtcagacctggtcatgtatgagtaaaagatattatgaactatacgttgtagtcactataataagatagtacgcccagtttctaaatttttttgagttgaagttttacaatcactaatcaagataaaaaaaaaatactatataactcctaacaagccagaaagtgatgtcatttatttcccaatagctgattatggtgtaaccaaggctaaacttcttaccggaaacagctccaatcaacagcaactctggacgacttagagactttttatttttcgattcgcagtaagatttctttactgtttcatacataaaatagtaacatgtgctatagggaagcattccgatcaatgtaggtgaaaggccagcataaaaagcaccaattccaccatccttataaactgtgctgattgcaatgcttaaattagggtatgcctcaggactaacagtcaaccgatcctgaataagacagagaaaaccatttcaatgacaatgataacataaaatggaaagacatttttcattggattgggcaatatagttgtgaaggagatacattggaagcattattagctctga

SEQ ID NO: 4895 - DNA, 892 bp, Cannabis sativa
caagatacttaccatgacatggaacgagcgaaactccaagaatgtgcgccaaatacttatgaaaatcaagagaaatgttagaggagaaacaaaccatagactttcagagattcacaagttggctggaagcattctcatattgttgcagaacttctttaaaccgaaaacaactagccatcaaagtttccaagaagaaaaaaattcatcagcaaataagagatgagaaatcatggggccccttcttccacattgaagacccaaaattgaaccctgaccaatagcacgctggataagagaatctaaacccacagcacagatgataaacaaaaaaaaggatagggggtccccttgtcgaagcccccgggacggcaaaatatgaccaatgatctcactgctaaaattaatagcatacgacccagaagtaatacaacgcatgagtaacccaatccaaccaggatgaaacccaagtttagacaacatgccacgaaggaaggaacgatctactctatcataagccttagccatattcactttatatgcaagaaaatccttccaccctttcttgtatctttttatagcataaatacaatcaaaacaaatcatatcattatcaaatgtcaagcgaccaaggataaacacactatgctcctcagaaataacatcacccaacacctctcgtaatctatttataatcatttttgtaataattttatacaaaacataacaaagactaatgggccgaaattcactagtgagagtaggggattttacctttggaattaaagtaataatagtctcattgatcgaccacgcaaaacccaacccattgataaacccaagacaagctttacagacattcgtcccaataatatcctaaattttttgataaaat

SEQ ID NO: 4896 - DNA, 807 bp, Cannabis sativa
tatcaggtattgatctttatgtacttttgcatttgagcttggttcttacagattgcttgaatgtgccatttcttgtctcttttttatatttattttgtaattttggtcgttagagtttatggatttcttgagaggttatacttcataaagcaatggattatatttcactttcgtcccttgtgtttgcgtgtgttttaaaaaaatgtgagaaaagaaaaacaggttagtgttaataacatagatgataaggtatcatccaaatgacaacctacaaagccatgaatagtcaaagcaatctaatgcaaaccaaaagacacatatagcaaggaaaagtgctatacaaggttttaaagtcataactggaaacccatatagccacccaatcccgagcttataaaaaacaacaccttctcttgtacttggaaaatatatttttaacttgaagtaatgctagaaataatccatgattgaaagctcaaataatggcatgatttgtatcacatctgatttcaaagtgggactgtgccatttaccgttacatggttgaaaatcatgtcacattgcaattgctaggtgtagtgtaaataattagcgtccctagtattactcatagtaaaagcctaacaaagttccgattcatgtttgttgcgtcgaacaatttttgaaggtaggcgagtttgggaattgaatacaatgcgtattttgcttagctactctgcttagtgttaatatggtccaatgtcctattgcaggttgctagtgtcacatttgacttgttgttgtttctggttctgggatcttacttga

SEQ ID NO: 4897 - DNA, 668 bp, Cannabis sativa
ctcgaaacttgtacgaaataaataggtttagatttttcttaaatagatttgggtttttttcgaattgacatgactaactcatttattaaataggtcattttcgagtcgatgtgcctaatccgaaaataacatgacaatgaccaatttaaaagtgtacacttttatatttattaggtataaatagtattttttaaacttaaataggaaaaaaaacatgttaaattgttaataaagtagtttgggtgagttacaaagtcttttgagcacccctatatgagcaatactcaatttattgcaaaataatgggattgatcatacacaaagtaggtagattccaattaagtattacaaacaaagaaataattttcttgttaatagaggtattaatcaactgttaactatgtaaaaaaagattacttcatatattcttgaacttgtttttaatatggacacactcatacatcttctcaacaagaaacacaatcaaagaaagagagtgccccaaaatgaatcctttaattgaaaccatgtgtacaatctttacaaaggtgatctaagactaacatcacccattaaaagaggtataagtatggtatacataatgtttgctacttagtgattgtaaaatttggtgatcatattattacgagcattgctattaagcacta

SEQ ID NO: 4898 - DNA, 1026 bp, Cannabis sativa
ttagtgttttattccaataggtgagattcctatttatactatacaagagttaaatattaagaaattaagaaaaaagaaaactaaaaaaatgaaatattaattacaattaataataataaataaaaaatttaaacatccacataattattaaaatttataacataataagatatataaaagagagataaataaggaatatgtaaaactataactaatataatgttgttatccttctataaataaaaacaaaagaataaaggtaaatattgtgagcgttgtctaccctttaaaattgctctgtggcagttatggttttcttttagttttttttgctttttaactactttcttcatatcttctagcctataaccgttccagatcttgctctatagtattctccccttttgcatttcaggtatccgatttactctgttacaatcattatggattcctttatctatgatgtttccaatgctctcactgccagggaaaaagaagttgttaacatctgtaatgtgactgctccccctccaagtcctacatcaaatcgaattctatgtagaattttctctaatcgtggtcacaatccaaagcagttccataacttcataaataaattttgggttgggcattttcctgtggaaatttctaattatgatgaaaacttctacatgatcactttttgttgtcaaggagacttacttaggattctctctaaagaaccatggcattttcacaaccaacatttggttctctgcctaccaaatattttgggtaatgcttctttagactcggttaccatctctccttattggattcaggtgtacagattgccttttctaagcaaatctgaggcccttgcaaagatcattggtggattgataggtacttttcttgaagtacatgaagactccctgaatgaaggatggggccccttcttaaggcttcgggtggccattgatgtgtccaagccacttcttcgtggtcagttggttactttgcattggatcaaagatgaactttggc

SEQ ID NO: 4899 - DNA, 1174 bp, Cannabis sativa
tcactctaactttttttacaaaaaatatcacaaaattttcacaagccccattacggttttcctaataaattaaatttgtatacattatgtgggaaatcttgcacctttaggcattcaaaggccaatttacaagtgaaaattctttaatcatcactcaaccaagtgtattttattaatcctgaggtgaataatgactatgtatacttggtaatggcttgtttattggctattctatgatgaattaacttgtaagacataccaggctgcagattgcagttctggggctcttatttaggctgttttgtgactgatgaagctgcattgaggcttgaggtctgtaaatttatagaggttaacatatgggtggcatttttgtttgggatcgaaaaggaagatctgtttttgtggtgctcaggatgtgtgagatatactgtaattaacatcataaaataaaagtgattaaaatctttggatatttgatgtcattttattgggtgtactgtgtagactagagttagggctcaagggtggtagtattataaagaatgtggatgaactggaacaaaaaacaagcttgaatattttctgaggatttctttttcctcacttgttctatttttcctaaataaagtgtttccgaattttttttttcttaaatatagcgatctggtcgtatccagaaaattaagtagatggtccagccaaaaaaagaaaagatgagcagtttacaggtttgatagtgtagaaatccagcacattttttcagtacactggattttagagacaacatgaagttggttctaagtttgagggttggtcctgctattctctatgtgtcatgcagtagtccttgtcccttgtcttggatttttattttatatatttaatttgcattctcaatgatatggagcttccagattttgatactgtcttctttgctcaacacgtttaggttgcagcatggggattgaggtatttcagttctgttatttcgatatgctatatggagggtcatctaatcattcatttgaacccaatacatgtcctcagcgtgtgtgaatccattaggctgtgttattgttaaagctaaactcttacttggccttcagctcatatgatgtctgaaggccaagtaagaggtaaatcgtcttggttgcgtgttttatgtaatacg

SEQ ID NO: 4900 - DNA, 1953 bp, Cannabis sativa
tgtttgggttcttccacaatcttagcctttccttgacctttctgcttcctagttgtcggagctttaaactttcctacccgggaaataatttgggacatcttctcaagtatttgacttccatataaaggtcggggagcatgcccaaactcttgctcaccgttgaatgccttcatcaaagttcgaagcttatgactctcgagcaagaattttctatgtcccatataacatacttttcgggagtgtttcaagtactcagaacaagttccttcttcacaaatgggacaagctttgtagcctttcacactgaaacccgataaatttccataagcagggaaatcattgattgtccacaataatactgccctaaggttaaactcctcttgcttgtatgcatcataaacactaaccccttcactccacaaaattttcaagtcatcaataagaggagctagatacacatcaatatcattacgtggttgtttaggtccatatatcattagtgtcagtaaggtaaatttcctcttcatacataaccataggggtagattgtaaataacaagcatcacaggccaacaacgatgcttattactgagagtagtatgcggatttatcccatccgtagaaagacctagacgtagattacgatctttagctccaaaactaggccacttcatatcaactcttttccaagctaaactatcagctggatgtcttaataaaccatccttcaccctctcattttcatgccacgataaatttttactatgtttggcacttctaaacaaatgaatgaatcgaggaataggcgacatataccacaaaaccttagcaggtactccttccttaacctcaatgctattttttttcttttgccatcgtgactctccacaagtaggacatgagtatgcatctgaaaaactattccgatataatatgcaatcattagggcatgcatgtattttgtgataatccatacctaatgagcatatagtttttctggcctcatagaatgtcgtcggaatttcattatctttaggcaataaatattttaaaaaaactcagtaaatctgtaaaacttcgatcactccatccgcgtcttgctttcaaattgtacaccactagaagcgccgataattttgtaaaacttttgcagccagggcagatcgatttctcagcatcactaaggagtgtctcaaacttgtctggttctacttgagttccaaattgtgcatcatcaaacatttcatctaatggatcccagttcacttcttctatattccccttactttactaatcatagtaggggaatcatctaaatttgtgactttctccccatgattataacaaatagtataactcttgtcgatcccattgaaaaataagtgttcttatatcatgttgaaactcaactttctaacattaaaacacttaacacatgggaaacatgtataatttgggtctctcccattctccaaacaaaacttcaaaaagaaatcaaccccgttcttatattcttcagataacctattagtcaccatccatttcctatccatatcttctttctataaaattaaaaagaaaaaaaaagataaataaataagcatgtattgcttattagaagaataagcttaaactaacttatttcctatctaatttctatgcttacttaaaactaagcataataattaatgtgacatgtcaagttaaattttaattctatcaaaattttagcaacataatgactataaattgaacatacaaaaaaaaattacaaacaaccaacacgaatgcaaaataatcacaaaattatttaagcataaaaatatttgccacccatccgaccgcagtatattcttttgcagaacctgcttcactacgaatgaatatctaagatattcaaactcttctaagtaaatattattaaatttttagtaattacctttttttaaagaa

SEQ ID NO: 4901 - DNA, 1101 bp, Cannabis sativa
ttctaataatttagaaactccaatcaagattcaaatatcttgctacatatttatacacatgtacaagtgacacaacaaaagcaacagaagcactgacttgtggatgttttcaatattattcatcatggagaatgaaattcttgccaacaaagtaagattgtccacatactcaatgttacatctattaatgaacttaaaatcacagaaagagagcaaatttcttgacttcaaaacctctgtaaaaaccttagtgcatccacctgttgtgagcggaagcaataaatagcgaaagataacgataaatatattttaaagcagcaaataatacatgcaatatggttgagtcttgtaactctaataaaatcaatcgagagactaatcataaagaaaagactaagaagcctcaagataaaaagaaactaaaggaggaatttttaataagacaacaagtgttgatgattcattctaaattcaaattcttgacaagtaacgtaattttgaggtagagaaatccttttaaagttaatgaattacttgcttgaggctttgtaagtatcaaaaatgataaatgtgagattctaaaggttcacaagcataagctaaacgtgtgcatcaatgatagtggagcactgactgaacagctctgtaatgaaaaaaattgaagcaacaataacgtacagctaaagatgatagcaaatcgctttatgggaggtaacccatacaatttttttaatattttttcttttgttttttagtttttagtttttattttcgaaccaaattttattttttgttattttgtattttatttagtcaaagactagtgaaatatgtgaaaaaaatttaaaaaaaaattagagacatgtcagccacagtaagtgatatgtcgtctgccgattgaactgaaaaaaaaggctaagttttatgccacttttgcttgacatttgtcatacactgaaaaaggctaaggttcatattggattcaataatttttttatactctttcactacaacgctgatatgaaccctaaaactaacataaaatagacaatctttctcaatatagttattgaccttaaaatttagccaactaacagcgaa

SEQ ID NO: 4902 - DNA, 1384 bp, Cannabis sativa
atttattgatgagttatgtttcttctcaacaggacagtatattgagtctaatgaagcacattggtgtaggtaagtgtacaggttaatgtctattcaataactttatagtttttatctggtttgtttctaatgtctcttgccaaccatgtggagcagatggaggatgcccagctagtgctatcccagaaagagctatggtatgtaatgacatggttatgttaattgctatttactttcagaagttgtgatttttcttttcttttctagtatctgcctgttatgcttgaaaatatacttttgaagtctactgatgcaacttcaaaaaggcaacgtaaggagtgttgtttgctctaaaggtttcttgaaattttgttattgatgttcagacccttacatgtcctagattaagaatgaagtttttctcaaattataacttggattgacggctgatgcattaaatttatgttcgaaaaattggatcaccatggaatctaaaattgctcaacaagaaatggagcttcttgttgtttgctctacttttcccattcctgccaaatatttaaacttcttgtttcactccagttttttaaatatctgttttataggcatgttatgagtgtacaacgaataataattcacgacccaatataattgatgcaacttgccaaattagttcttgtagtgttacactgatcttcttctaatactttataagctttttacttttatttatgaatgatattgagacatgctatgtggctttaattggagtatttttaccctattgtagcttgaagctgcttacgaaaaggaaaaagagttacttcacgagatagctgaattgaattggaggtactaaaacgggtacatacatgctgttattatgattattatcttgaaaattatgacagattttgttatttttgccatatgtaggttattctctagcctagatgagcaacataaaacaacagaaaatcaagataatacttcatataccatctaacatgttcctaaactttcaatgaccgtagattctagctcataatttcaggtctgactctttttttcttttcgggatcagtatctgattgatgcagaacaatttttttactagcccttctgctctgaagtatcccaccatggaaaagaattaataatggttgtgtatggtgaaagcattaggctgctttactaaataccatgttaaagattctctgtttagattcacaaatgtgatattaaaatatgcacatgtttgtggtgtgtactactttcagtgcttaactcttttaagttgtaaatattcagatgactacagttacaaggatttataatcctaattactccaactctgtccttcctcttttatttcattatctat

SEQ ID NO: 4903 - DNA, 647 bp, Cannabis sativa
ataaagtaaaaatacgactatgttgctctaaaaatttagataaaaccatttgagacgatctcaaaaagacatccaatctaaataaacaatttaagcaatgaaattactttggtgccctcctgtgatactttatacatttatatttttccattgatttgttgtctaaatcaatggcaatttctcgttgttatgtggttctaatattttctaagcttcattggaccacattcatcatattcaaaccaaaccatatatgacactttttcactttaataattatcaaatcaagggcaatcaagggattatatcggaagagtgttgacactcagacaactcagcctattctttttgcttattttgttcaacatttttttgtaacatatatttttttttgcattgtattatgtctctatatatattttttagagtaaagagagagatttaattttttaaactacagtgaatttgtttttagaagaaaaaaaaaatcctaaattatggatttagtatttataatttcctttgaaatttataagaaggtatgttaattgttcgttagttagagttagttgagtttgttagttagttagaggctgtcagttgctgttgttgtgtaaagggtatgttctctggttttgtactggttt

SEQ ID NO: 4904 - DNA, 526 bp, Cannabis sativa
tcttagaggtaagtaaaggattctttttttgagctgccaaaaaattgagggagacccaaatatttcttgagagagtcacgagtaggcatattgagcaaggaagtaatctgattcttaatcaagtcagtggtgtttggggagaaatagagcgatgatttgtcgtaattgactagttgacccgaagtcaggctgtaagcatgaaggagttctttgatatgtgcggctgcaataggagaggtggcactaaagagaatattgtcattagcgaaaaatagatgagagatgattggtgcagttcgggagatcttaatgctaagagcatgctcccttggaaggcgttgatggacttgttgggttatgagcgatgagaggccttcaaagcataacaggaaaagataaggggagattgggccaccttggcgaatgccacgggatgggataatggatccacgaagttgttaattgattgaaaaggtgaaggaagcggtggaaagataggacataacaaggttggtaaagtttgatg

SEQ ID NO: 4905 - DNA, 812 bp, Cannabis sativa
aaaagccatgaatgaaaaacactgtgaattaactaataatacttaataagttaatgttgagtttgaatattatgagattagatttatatagtgaagagagaaaagagaggtcttggaaggttatcttaaaattatggagtagtagttgatgaatttagcgtgtggggaaaagtaacaaagataaaagagattagatgtaaccagctggatcccaaaaaaacataataaaactctcttaaacttataattatattgctttaaaaatactaatcttgatttagtctattttattttgagaaataataaaaggtatcagtattctttaacactacttaaagttttatattgttattagctaggatctataaaaaataattatttttagtgataatttttatggttaaatgcgacttttagtcacaacaaaaaattatttgtaattaaaatatagtatttagatataaatcgtcactaatatttaattttaatcataatatttaacacatttaatcacaacaaattataatttttgtgacttatatttttagtcatgaaccttttagttataatataaaaatgataattcataataagacaaattttatacttttagccacaaattttgttgtaactaaaaataagaatttttatagtgagtaattaaatgtcatatttataattaatttaatttaataattattataaaatattattaaccatttattagacattacatctaagtatgcaccagctcttataatagtactcctttgcttttctcagcctaataatatagagaaatgttaaagggt

SEQ ID NO: 4906 - DNA, 1461 bp, Cannabis sativa
tagtaagtattagaaactcacattcaagcaacatcccacaagcttagttttatatagggtgtttcttttatagcaccaccaaaaaagatcccatggatatgggtgttaattggccaataaaaaaaatgacatatcaattaattatatttggttttgtagctaggtaggagatacactgaattatttacctttacaattctgacttttccttttttattttgaagtgacatttttgactttgtttttgtgtttgtgtatttttttattttgttttattttattttatttttgaataaagttatatattgaagttcttacagaaaaatatatataatatattgaggtcacactaaatagaaatttttagagggttcctttcttttatttgaagaaagagaattttattattttcaccatttaaatttttaattaataataaaaaatataaatatatttttctatccaatcaaatctatgtattatcattttcccatttaaatcatattgaattaattaacaaaataaataaaaataaatagactctaaaaatcaagcacgtaattactcggcactctaatcgtactgatgtgattgtatcaatccacactgcaagtacaattaactataataccaacctatactcaacactctagtcgtactgttgtagtggcatcaattcgtactttaataaattgccaaacatatatcacattgatatccaagtgcaattctatgtatattaataccactcttacataatatattatctaattaattagaaaacataaacatgtatgctaaacatgtgcgtgtgttatactaatctcaccttaacaccacaattaggtgcgtcggccaacttgagtgaaaattattactcgacgattagtggtcctaagtcataatcacgtagaaatggtaagtgtctcgataaaataattttggagacttaaacttaaaactagaagtttttctatcgataaataacacgaaaatatcctaaatattgagaaaattcaaaaattggggtaaccaaaaatcaccccaaccggtcacccagatccccaaatggttcaccgtttcttggggtcctgccgagggaaacggtgggccattttcaatgcagaaatccaatgcttcagttttttttttctcaattctatcctaaatcttactaaactttccagaacacctaattagagcataatgaacataactcataaaaaaatgtaacatcaaacctttgaatttaaatcaccattgttgaggaagctttgagtttcaaaactcaaacttactcaacaccaattacaacaaccaacaatagataaaataatcacaaacaaactcaattcaagctcccgaaatagctcctatcattctcgaaccctaacagaacccaactcttggaatcaccaaccaaaaccaagattttcttaacaaaatcaaaaaaaaaaaaaa

SEQ ID NO: 4907 - DNA, 3634 bp, Cannabis sativa
gagaagatggaattggtcctattacctagatattggaatggagaacatcttagaaagtactaccaataagccaattcttaaaaaaaacactactcttaaatagtggttcttgggcggtatgccgcacaagaatttgtacataaaacatcactcttaagtgatggcttctgcacggtatgtcgtgcaaaaatgtgtgaataattttgattctaaaagtagccttaaggaatttaagcttttattttaatatatgttcgttgcccagaatcaacatatttgtaagaccaatgagtgaataaaagtgattctttcacttagattgtgtcaaataacttgctaataattgacttattaaagttaatattttgtctaacatgcatgcaaataggtctgcccaagaaacgggacagacaaaggctcatacacttggttaattgcaagtgaccaagagaccataagtctgcttaatcacttgggggcacctacacccatacaacatatgacaagcatagaagaaaatagttaagcaaaacaaaagttcaaagcaaagttaatgcaagaaattgaaagctaagtatgtgcaaataaggctctgttaaacataaaaggtaatcagtccaggattaaaggctgtcggccatctatacgtcttgacaaaaataaagtcaggattaaaagtcatctagctagctatatgtctcaaatgttgtggcctttttggtcgtgcaaaaaataaagagatagaaaagaaaaaaaaataataagagctttaaagctttagcacatcaaaaggagtttgcaggttcatgttgtcactgacctagtcctgggcgacaggataaaaaggtacctcgatagggggtccactagcgtaatgggttgattagtcgcatcgataacctggccgatagcattagtaggctggccggtggtatcttaggcggaggtattctcccctagtggtttggatgcctccatttccttaccttgggctatcatcccttcaagcaagccatgcttcatatagtattaatcacccacggggttctgtttccagaactcatagaaagtttcgatggctaagttgtcatactcttctttttctgcagcccaggtcctctctaattttgctagctttgcctcagactcctccttgagtctggtgatctcctcatctcgagcacctaacatccgacccaaggcctccccctcgcccgtcaagtttctcactcgcctctcaccatcctccaagtcctcatccaacattctactagagggcatgtcttcaatttttcttttgagctcttttatctcattgttggcagtgaactactatttgttcacctcaccaagatgggcctccagctcgtcaatctttttcttggtgacggtaccagtcctcttgaggcgagcataagtatgcctaaatttcaaagtcacctaaaacggtgaagaagtgaaagttagatagtgtactgcaatatacgaaaatgctcctggtagaaaaatatcaattaccaaagaaagctcctttagaataccagagcccaggattttaacggactcattatttgactcttaccattgctcgtccacctggaccaggcacatgtccagatagttatgaataacctcctttgcctttttagcctgggccaaagtagcttcccagttgattttttgacgttctttgctagacctcctgggagtagaaggatgtccgtccaagctgaccaccatgggttggttggccggaggagcatagggaggtggaggaggaagacatgaggtagtaaaactcgacccctcctttcaggcaactttggaaggggacttcccaagggcgcatgtatgttttttttatggactgccctaacttggaagcccacatgacagccagcacctttacatgtattaaaagtgtccatttgtataaatacctgtatagggacttggggacaaatgttatcccaaagtttgtacagctgacgtggtccttccacgtggcatgatccagccatcttttttacctggcagaaaactctcctggtagaaatatgtctggcagttctatataaggagtgagagccataagatgcaaatgtcccatgtagcatatgatcggatcatctacttgtcggccaaataagatgggggcaacaccctacaagggtgattctacaagccaatctcataaaggagacaagagtcaagagatttgacgggatggccaacatgccgaccagatctagcactgttagggatactgaacaaagatatgcgatcctttatttcatcctcaacaagcgtcctcaaatatctacaactaaatcctacaaacttgaatccaacaaatctatccgagaataaagggcatttaatatattataactacatcctaaaaaatagggatattttatcatttgtttactccttttacggagccataagtaacaactctcccccaataaatagtgacgacattcacaaggagaggggcctaaaacataagagttatactcatacttatgcatctaagatcactttgttgaaagatatttgtaaacagtttgagagttaaagctagaaatcacttcgtcttctttagtaatttgtccggtattatcacgcaagtaatacaactaaaggggagtaagtcattatccatatacaagggggctgaacctctataaattatgtgtgttctttatttatttattattttaacctctttattagtgatttaccagcatttattagacttcgagtcagttggctattttttcagtcaacaatgaattttactaaggaatggtatatttgagagaaaaaaagaaaatttcggggttatttgttaattaagagaccttggagggtctatatggtaattttgttaagtaattaattataattatcaaatatataaagttagtatttaaataattaaaatagataaatgaaattttttaagatagaaaatattgtttcatttaagaaaataaaataatgacaaaaatcaaactcatcggcccttaaaggagatttcggccatgggctttattttagtgtcattatatcttttttaatcagcccagttattccaaaacctaaccctagtatctccttacaaataaaatataatggcctttgattctacaacttatgactctctcttgtctgacaaattgaatcaaaagaaagacaattcttattctatttatttttcaaaaattctcttggttttcttcatagaaatttgtgctccttggtgttgagaaattgtccataatatttaaggcaatactcagaatagtgaggaagactacgtagtttatttgtggtcagaaagagaatgcatgttcagatattgattatactctactacagacataaatcaagggatagagatatgaagggaagaagtcataatattttgctacaactaatgtaaagatctctatatccctttatgtgttcaaattattgttttaaaaattctatattttggatattagattagggataattaacatatttcaatgtaaattaagatcccaatgtaaattaagatcctagttaaaaaataacaaacggaatgttatagtgaaatgaagaaaattggattttttttctt

SEQ ID NO: 4908 - DNA, 792 bp, Cannabis sativa
aaaaaaaaaacatagtaaaattaatgagttgatcatttgaccaaaaaacaaagttgtattttttttttttttagaattgtaagatgcatttaattagttatgagaagagtagctcatggatcttatatatgctacaatctttccatacattagcaatgtaagatgcatttaattagttttgtcaagcttttcaatgtgattgagttaccccatactaactactaaggttcatttaattttttccatgtcatctctaatataatatcaaaatgacattatgaaaacaattcagtcctgcctaatctaatttaattctccaaacttactttatctcagtcactttgttatgcgaaaatgcagtaaagaatattgaattttgatcatttgttgttgatgggtttatgcagagaggaggtcaagctgtctctaagattagtcttttgattctctctgttgtgtggttggttgctggagtttgtacttttcatgctttgccaaaccattcctggctttggttgatctctgtctttaagtaagattgtattctttaaacatctctatcattttattttttgttggggttttctcagtttcaaattttagatgataattccaagttccctaatgtcaaaaattattcttctgcctcgattcatgatatgctttcgtgggttctcatttcgatagcctgattaacatttgaaatttcatgtggaaaatatgtggtttaattgttagattctgacttggtttcaatccattcatatctcagcttcattgcagtgtttttga

SEQ ID NO: 4909 - DNA, 1090 bp, Cannabis sativa
cagttcacggttctccttgtctaaaatctgaaagttgcttatgcaccagtcgaggaaactatgatgttgctgcaaatcctgatgcaagccgaccctttcccagcagtcttttgcaattcgacaggtcactaacgcatgggagatcgattcttcttcaacagaacacacagggcaaagagaatgagggactgcgtgtttgattctaagttgcaccatagtaggaagacagtttgtgcatgccctccacactaaatttttcatttttggaggcattttatggttccagaattttctccagaagctatttacttgggattcatcaaaattcaccaaccctttcagctcttggagacgtttataaccacttttaacagtgtataaaccagaaatttcaccaaaccagattaaatggtcaggaccggttgcaatattgatgggaatttgagtgatcaaaactctatcccgaggttcaaataagtcattcaggatctcaatatcccagccaagaccgtccatattcaatagattggctactttagcattttctagacccggatgagcagaaataacataagcatttgctttgtctggcagccacggttctcctagaacatcaatgctttttccatctccaacctcccatcgaactccaccagcaaccaagtgttgagcctctagaatacttctccacacgaaactaggattagacccaatttcagctgtaaggaaagagccattcgagtaataccgagctttgaagatacgagccaccaaggaattaggattggttagtaagcgccaaccttgctttcccaacattgcaagattaaaatctctcagatttctgaatcccattcctccttcggttttgtgatgacatagtctttcccaggacatccaatggataccggagttactactagctgaattcctccaccagtactttgacatgaggctttccatatctctaactatctccataggtaataagaatacattcatggcgtagctaggaagagattgggcaacagacttgattaaaatttcctttcccgcttttgaaatgaactttgcaccccaaccttgcaat

SEQ ID NO: 4910 - DNA, 1675 bp, Cannabis sativa
cgtccaccccactctaagaatgggcctaaaaaggccttatttagaattttaccctaagattcgtacgctccaccctaaggacaaacttaccaaaaaaatatatatataattatataagcttactgagtaaattatagtgatgagttgtaaattccagcctagtctccatgaagctacacttctatctagacataaaccaacaatagcagattgcagagctccaataagacatgtcaacattgttgaccaatacttatatggaaatatttgcttcaacttaacctgtattttataacacataaaaacataaattagaagtcaaataagtaaaaatcctcttaaccaaaagacataaataaatctatatataataaaggtacatacttgtataaggaaccatgtagaataacagaaacaacttccaaccaacatgagagtgccaagtggccaatttgtatgagttgtgttaggaatgatatgagagtgatttgtagtatggtcatgatgatgatgatgacttataatgtagtaagcttttcctttgtaaagactagttgtaagagctccacctacacacatcaatgcccctatacatttcactttacctccttttgtatctagattcaacctctctaatctacaccaaaacaaaattcttaattaattacacatatatcatacacatatatacacatatttatgtaaatatcttacttgagtaggattgataagacaaatgtgacaataggaattaaattgaggaaatttgttgcataagtagctgttgtatctcttagcccataatagaacaatcccatagcacatgttaccctgcatatacatatatatatatatatatattattcaatttaagtcatgaaaagcaaataaaaatctgaaagtgacaaaaaagagcattgagttggccatttcattttcatcaagtaatcttaaaagtgaagctgaatgatgtagtccccaatctggtggaccagaccacaagaatataagtatatattatttatttttttctcaatatgtgtctgtcagttatatatatatatatacatgtatatttttattatcataggatccaatatgataaatatgttggatgaaagatttttaattgatttgaagacaaggaacacccttaatttaaaaagcacttttggcctaacaacagcttcaaaaatgtttgtagtcattacaaattgattccttttttccaataaaagagaaataataattataattcaatgaatttaaagtatttgattgacacccatgttcattttaagaagaaataaataaataaaattcaatatagaataaaatccaaaattacttttgatcatgagtactagaatttcagtacatttacataaagctgtaatctttatatatgtgtggttttacatcattaattatatatgccatcttttcagaataaagggtatatatatatatatatacatatatgacacagaatcatataattaataataaacacagcacattggatagaattgaaaaccattttgctctgcaatgcatacataatatggtctgtttatctagtcacaacacataatacaatttgtgtgtatatatatatataatgagattgatatcattgctttttgaagaaccaattcaatgtgatgaacacatt

SEQ ID NO: 4911 - DNA, 1504 bp, Cannabis sativa
gtgttaccaaacggcaccaaaaaatttaacaaaattaaatagtactttatgtaaatttctcaaaggaagatccttaatttgatacgtacatttattctacatatttaaagtagacataatgatattaacttctgtttgtaacatatcattaactactatgtaaaatatgcttggatggatatctaacatgcattagcattactcatttcataaaacatatgataataataataatgaaatagaaagttgtttaatattgtaagtataaggaaatatgcttacttggatatttacatattttcctctacttctctatgaagattgttaggttggaattgaatggtggttgtagctgtcgttagaggccgctaactatgtaggggctgacattttacacccctacaacatcctaaaatcaccccttatataacgacacctcttcatctctatgtttaatattattaattaataattgcaatcaaaacaaacagagatcatgcataatggggttatttggattagaagtagcaatggcggtggtcggaatttgggcggtgtggttgcgaccgtggctgatgacattttccggtgagatgttggaagtgataggctgcgccattttcaggattattagaggcactccatcttttgctctctcttcgtatcttccttattctacttcttttatggactgacactactacttaaagcaccacttaatataaaattagtcatgtgtaactaattaaacattccctcctcctctcaattaatatatagtctatttaattagaactactatttggaaaataagacagctagttttagtagcttctcattgagttgattagcccaacaggcacacctaatttatcaaattttgtaacatcttgatctttatagtatgaactttgtgtttggtgtgtgcaaaataattgtttctatatggccatcagggaagtaaaaaaattggctatgaagaggtctataccagaaactctgattttatgtaaaaataaatgaagtaatgatgaggtctggcacaaaaagtgtgttctcaatatatatttttgcaatacataactagaaaacaggaggattaatgttccaaattagcgagctttacccaagaacaagtaagcttataaaatataagcttaattgcagcaaaactcacaatatttttactttcttagcaattaattcttaaaacccaaattttagcaacaaaactccttaaaatatattctgttagcatttagccatttttatccatctttagcagttaagtgccaagttagctgtctatgtgcatagattattgtcgacgtagacacaatatacatgtgacataatttaattggctcacattgataaatattcaaaaataaaataaaaataaaaaatatacataaaatttgttaaaaaaaattaaatcttcatttcttttttttttctttttaccttttttttcacatttacagaaatctctctctctctctct

SEQ ID NO: 4912 - DNA, 869 bp, Cannabis sativa
cgttgattatcaacctatttcaccacatgtttttcatattaatgcaaaattatataccgttgcttcaattttttgcagtatcgttctggttacaggtttttgttgtaagtacacccttcataaatttgtggatgagtgattcatgattaatatgctatactgtttccatactgttttaggattgcactatatactcattctgattgtagaacttattccagttagcctaagaaaagaggatgttcaagtagttatatactatgcgaacctaacaatacacctcttttaagccaaagtccacgtccacggcggtcctctctacggtggcctaatctacaggtcaccccttttggaagtcgcacattctatgacgtccgtctcacttgaaagtgcatggatctaacttcttagagtaactccaatgcaagcatcttaaaaaatagccaacattcacattatcttaaaatattatttttattttttctttcattcacatcatttttgaccactttactattattccaatgctaaacaattttaaaagtcatgagaatagatttacactctattatttaatatattattaaattacttttaatattttaaatattatattaatacacctttttgatagaaaaactataaaaaaaaaatagaaaaataattcacctacgttgcttgagagtagcaattatagtagcccacacaattcttttagtttttagtggttaagtaatcttgattgctgttcttggactgataaaaggttgatgagcaacgtgaatatgtagagcattggagctgctctcataccacttgatacaactatagtaaaattcacctccaaaaagctagtctaagaaaggagg

SEQ ID NO: 4913 - DNA, 1706 bp, Cannabis sativa
taattcaaatttgggagattaaagtggtagttgatagttctctttttccgcaatacaaggaattatggggactttgttcaaaaacaacaaaaaaacataagttgggctatggtgcaaggaagtttggttgaattgggtgagatagacttgagagaataccaacagattttggtaaagaaattgagactaaaccgaatttttcaaaatatataatcaatagttctaagaggtgggtacaacatttttttttttattattagtagcacattttcttaaactttgatatttatgacttttttaagtgttatatacttctgtgtacctaattaaaaaattttaaaaataagagtactcgattaaaaataaatttatctaccacaaactatttttttttttttttgaaaaaaatagtctcaagtcaagaaacaccacttaagagcaatttttttttttttttttatcttctgaacctcttgttttcactttagtttttaaagaatatttaagttaagcaaaaaaactcaagagggcgagagttaacagattcattgataattgacatcagctaacatagaatttgactacaaaatggatagtcgggccaccaaataattaatattagaagtagttttcaatgtaaaattagcaagagaatcagccactacattaacaattctaggctaaattccaaccgcatgtagcatgacaaagttttgacacaataactgcctcactaagtgaccccgatagagagcaaagaaaaccttatcgatggaacccacttatttttaaatatgaaaattattttaccattaccaacccgctaaatagccccaaaatcaaaaaattctttaccccaaaggatatttttccacaaagaagtttctcttttcgttgagacgacatctctaaaattcttaagttttggtgataaaaacttttaattaatttcttaaattaatatttatttttaaaatattattataaaataaataagaaataatctgatagcaccctaaatattaactactattattatacatttctctatttataaatctatcaaactttggaaccatagggccaaaacctatgttcttatatgtgtccaataaatattatatgattccaacaagtgtctctttaaatttcttcccaaccaaaattatagttcgtttcttcaccgccaaattcccaacactacccacaacaaaatcatcttagccaccattgttggtggtaacaatcaattaatttcttaacttaatcattgtcacctctgattagatatcactgtccgattaaatctccacgccttccacctttgattaggaccttaatccggttggtaatattttggcttgaattcgaaaatgatgatattgttgctcaaagagggagggaaagaaaaaatgatcatgaagaaaacaaaaatggtgtggaaaagtttgaattgagagattactattatcaacaattgattgattatagaaaaaaagtaagtggggacagtaaaaatgatggatatgtagaattagaaagtgaaagaaaaaagtacaattaaggaaaatgtaattatgggaatttgacttatttctttgactgcttaaattataaatgatgaaattaggggtggtaattagtgttcatcaattgtaaacttataagtaaatgtcaaattgaaatctaacccatttattaattgt

SEQ ID NO: 4914 - DNA, 1236 bp, Cannabis sativa
agagaaaaaggtttctcttaaacaaagttatatataataaaaaagcactattttttttcttaattaattaattaattataatgtttatttaagcatgtgattcaacctgccaagcaacaaaattacctttgtggagacaaaagctctcttttttggttgaagagtctgaataaagtaaactaattaaagttagaatcaaaaaagaaagaaagaatatatcattttttgcttttggcttttgttaaatattaatacattaattttaattaaatatctaaaagattattaattattatttgtgttattgaaaggtatatatatatctatgttattttaatcatggttatagagagaatgttttttttttttaaaaaaaataatattatttaaatttaaattcactacactatctacacatatattttttttttatcttatatctaatttattgcacatatttaaaaaaatctctttctatctaaaaaaaatatgttttctattatttttatataaaattagactaaatataacatttatctaattactaatatattattttttttgctttgggctcttgttaaatattactatatcaattttaattaataaatttgtgttatagaaaggtgtatatatatgtatttatatgatggaattgttcttggttagactgtcagcttcatatgatctaagtggtcctaataagagagaagagaatcctaataatcttttttacaagaatattattcatattaatcaattgccatgtggtttctgacctaggatccaattattattgagataaaaccaagacatcataaataatgctatgaaaaaaatacaaataataatactaccactactatataataataataataataatatgatcaagttccaattatttttactatttatgctctacttcaattcattcatatatatgtatacattttagtattgcagatatatatatagctactaataatttattgaaaggtttttcgacttttattaattgattataacatttatgaaagcttcctaaaagtacataactttgtggggtttcttttgtcctcccatatcgatctattattatttgtaaccattaaaaaaaaaaaaaacttgagaaatattttataaaatataatagggtaccatccccatatctattgatgatcgatacatatatttaatgcctgcagatatgaccttttaataatcatggattta

SEQ ID NO: 4915 - DNA, 1865 bp, Cannabis sativa
accattaaccgctaattacacactacaacaatataatattggacaatttaaagtgtttaataataatatttgataaataaagtatgccatatgtatgtattattatatcatagctttaagcaagaccatatagcacaaatataagataataaaacatatgtcaacaaaggtcaccaataccaacattgatctaagaagacgcctctacccaattgtgttatttaattagtaccctaatatattccagtccaaaagggctgttaactaacattgaacaaacaaacaagtacaaattagcttaattcttcattaatataatcaacaaagaaagtctttaaattattatatttaaaataaagaaggaaactttcatcataatttccttcaaaggaataaacccaacaaagttatttaataaaatgtgaaaacatggcaaaaaaagtcatttaataacactttcaaatttgaatatgtaacaaccttatttgaaaaaatatatatcatattattattaaagagcattttgtttggttaagtctctgatccaaacgtctcctttttctcatttccatttcaaaagagagaaacagagaaaaacagcatattcatcagagattatttcagagaaatataattctctcttcaaaattctaactcaacccagcaataatgaaggtttgttatgtacctaaatggcttcaaatattatttaattttcttcttattattattctcaattttgatttttgttctttcagagaaatattattttactttccattacaacaatattggctaccacttttctcatggattcatcttcagctctcaaggtcactatcttcttcttcttcttcttcttcatttttgctttaaattaaacccaaaatcttatcttatttgctctgtttcgcagcaaggacaaacttgtgtttcagataagaactgcgattctggtttgcattgcgaaacatgcgttgcaaatggaaatttacgcccgcgatgtactcgaattaaacccattaaccccatttctcaggtactccacaaaatcatcatattactttttgtttctaatttcacatttttttgaatttgtttttgggttttggtggaaataggtgaaaggattgccatttaatcggtattcatggctaacaacccacaatgcgtttgcaaagttgggacagaaatcgcagacgggaacaccgattgtgtcttccatgaatcaacaggactccattactagccagctcaatgtaagtttttttttttttctttagttagtgaaatttatgttgtttgtttctcgggaaagttttgcggtaaaattaaggggaaaatatgattaatgactggactttacaataactaaaaagcagagcctaggtttagggtgtcagatggtgaatattaagtgttactagaattaatgctcatctgccttattatccttcactttgttaaatgaccaaactacccttacacttatgcaccaagtttgtgtttgtatagtctttttacggtaaaaaaaataataattttcttgattttaaaattatctttgtgtgattacaaatgagaatgtttgtaggtttgtaggtttggattatgatatagtgatttggattaaaatatggttaacaatcttgtaacaccatattacattctttaaaatggttgttatggtacactgtatttgaatctcgaacaaaatttaagttaatttttttttataattgtgtatattaaaattattaggagtacacgtaaatttttaattattttattgagtaatttatagtaaaaaaagactaaaatattttgttgtccatttgactttcttttgttatgcatgtaacaag

SEQ ID NO: 4916 - DNA, 774 bp, Cannabis sativa
ttatttggtcatccacaccaagatttccattaaaccttaatttcctatatatcccttccacaacctagggtaaactgttaaattctcaaatttcacatatttaataatttaaataatagtcacacaatatttttatcctgtctacatgttattaaatatttacaaaaaggttgggtgttgcaatgcctacaatttacataggttttttccacgaaactgaaagcacttgtgggtataactccctcatttcttcctcgcatttccatgtggcttcaaccactacaagaaaaataggctatataacgaggacaaatttcgtcggtgaatggtgttttcttttatcagtgataactatcaatagtgacatgcatcaacaaaaaatcattggtgataactcgtctccagaagtaaatatcaatgccaacatttaaagtcgttactgaaaataaacattaataacgacaatgttatcattgataatatgctattattttattttatttttaaacggtgggctatcattgatgatttagtcgttattgattatactattaaactatcaatgatgattataagtctaaatgtgttcagttttagaaaaaatataattataaattaattttctatatataaaaattaatttgtattaaatatttattttcttctattatatattaatatacaaaatatttaaattaaaaatcaaacataataacaaactaaaaattttcatatcaaatattgaaagtcaaacataacaatatcgttaaatta

SEQ ID NO: 4917 - DNA, 1402 bp, Cannabis sativa
atcttgttctatgaaaaatactactatgaatctatccccgctgctaaggtggaagaatttatacagttggttcagggtggcatgattgtgacagactatgcgactaagtttgactggttgggtaagctggcttttgattaggtggccactaaggctgctagaaaagaaaaatttattcgaggcttgaaagaacacattgctggagatgtgcttgtggcagctaagcaactaggggttgttcaaccatatgctcaggtagttgagttggcccttactgctgaaaataaccattttcctaatgtttatgggattttggcctagaaacaaggagatttttatagatatttacttttcttgtaattttttattcattaaaaaagatgatatacaagatttgttagtaagacaccccgacatgtgggggattactaacaaaccctatagcctatataatgagaagtaagaggctgaagtacgggatccttttttctgaaacctttctttgagacctacttgaaggcagccaagaacgacatacttactctcatctttttattgagtccaccatactcagtcgacaccaagacctcaaacacattgatactcattcattttttatactttattagtttattattcctaagaaccttacaaccaccatatttatcagatttgtgaatattaagtttcccatgagccttgtgttcataagtctcaatataaattttactaagaaatctattattgtattatagtccacacactcttgagaacataactctggtgtgtcggatccaattaataaaaataaaagtagatgcagccccattagcattgcgacatgggggtgaactactataaatctcgggtatcattttaatttattgcagttttattagtcaaattaattcatcatagtcctctatatttttacgatcttcttagatcagttgacgaaaaattgcgtcaacacctgtatctcaaaatcatgagtatctctgatgctggtgatcttcgtgttgttaggtgtacaaacatatcatcatcatttggtctataatcatttaggagaatgatttcattttttggcgactaaggctcttattgtggctctggttgtggctctgcatctggtgttgaccttccaagatcttgcaggagtctcattatggtcttcaaatgacccataatctcgttttgccctttcaaaagagcagcctagccttacttaagagcaagtttttcctttccacaaccgccaaccttgctagcatggcagaggatattggttcatgaggctctaaagtgcaaggaatagatgcagatggggcaacatgagactcatctggtagtgaagatgatgcaggtggtggagacggtgcatgtggtgtagcctctctaa

SEQ ID NO: 4918 - DNA, 1967 bp, Cannabis sativa
cataactttataaatacaatttttaaaaaactttatagtttctcactttcattatatgtttttttatatatgaatttatattttaaaaaattataattaatcaaataaatatgatattaaatatatgtatatatttaaattatgctttaaaaccgcgtaaaacacggctttgctttctagttagtatataatttgaagttttaattacactttctaattctcatacatttgtctataaaaatttagagtataatttctgaaaaaatttcatttttaaatgttaagtactaaatataaaagaaatgaatttactaaattaaaatatgggtttagtcgtgaataggttgctctctttaagactctgcggcgctgcccagaactgtgcaacaagactatcagtcttgtcgtcattgtatcgaagctatactgcacgatagagaaccgtcgaaatagcacacacaataattgtaatactgctctgaatacatatgtattataatcgtatatatttttctgtgagaaaaagatgtctttctcctgttagttttgatgcattatataggaacgcacataatgaagtaacagaaagaaaatcattttctgaccgtgggaacgatcatgtgaacgttactgaaaatatggagtgagaaattgtcttactaatcaattaaaaatgtttaaaactattttgattaaataaaaaattataatataataaataaattttctccaaaaagataaagtgacaccacacccgcccgccagctcaactcagcacggttgaacgaaagtcggcgacgcgcactcgtgtgtggtggtatggtgtgtgagtcctcatccatgcgcacaaaaaataggtaccccttggggccgcatcctaattccaaattatatacacttctttgaagtatttatatcccatgtgagactccattcactcacacacactttacttctcgttttgtaaaattttacaaagtttcaacaatcccccacttgaaactttttaaaaatatttctcgagcagtattctaagcaataagattgagcatagacaaatgtatttttcaatttgaacctttgcgttgtgaatacaacttagaatatactagagtgggtcgtagtcttgaactctatctctaacgatgtacctcgcacaacctttcttgggtgtagtccaaaatctcgtgcttaaatggccatggacgtctattgtggtatagtgaacactctagaatttgcctaaatttcataggaagcggcttcacttccacattcacgtcggtgagtctatcaagattacttttgtagctcgttactccactccacatagagtatagatctcattaacagtttctattatgtcaaccttatatcacttcaagaattcatgcttcatatttcttataacaatagcatgatcttattcttatcacatcgtaacttgttattgcccattgaatctatttcttgagatctccaatctataggcttggttaccattatgagtgactcattattctaagcgcagtagtcccataacttttgagaatttaagaactttctttctagctaatcctttcgtcatatgatcgattaagttttcatcaatgcgtacatggtccactcttactgctccaatagagaggaactctctagtagtactatgtttacgatgtatctgttgtctcttactactataataatgtttttgaacttttgcaatagtcgtggtactatcacaatggatcaacacagctagtatctgtctttcccataaagggatctcagttagcaggcttctcaaccaacctacttcttcactagcagttgctagtactatcatttcaaactttatggtggactgtgccaaaacataattctataaatgaaattaattacattcagctttcaaactaaaagaatgttatggtaaaaacattgtttaaaacgatgtggtagaaagc

SEQ ID NO: 4919 - DNA, 534 bp, Cannabis sativa
gggatctgtgaatggaaattatagagattgttattttcgtaattatatagatgttatttatttatttgatttggaaaaatgaaatgatgaatgatgggtttgaatgcttttagaacaaaagtttgctctttctttttttgctttctttttgagttgcatacaggtcagaagtgtcgggtcttttcagcaccgttttggtctttcagattcttccaccccattaaagcaacctttcatcaaatcaccaaaaacaaataccttatagcatgtgtaaacaaaacaacacactaggtatgacacattcattcttaattctatttaaattaaaatcattattattgagtattagtagtgtctaacaccttctagatatattcttttgtaattagctagtggtattctttaaaaattattacattaagtcatatatggaacttgatatttagttagatcgatagcgatattgatatgtaggagggtgttctaactagtgtcttttagcaatacttctcttaaattaattacacactacaa

SEQ ID NO: 4920 - DNA, 3245 bp, Cannabis sativa
ataatttatgccaagtattagtggaatgcaataatttgaccgaatttaagtcacatagatacgattgagtatcttaaattagtggggtaacttagttagacatttagaatataaaaaatatttagggttatggtcttggaccattttacccctaggtgtgtagattacttcttaatgatgtaagggtaaataagtcctttacccctttttttagtggaattttgggattctagtaaattagttcctaagaattattaggaagatatagatgaaatagttactggacacttatccaaaaagcaaagaaatcaaaccaaattctccctttctctctctttgtgttcagccaacctaattcaagggggtttctagcatagaatttcaagaattttgttaaccaaggttaaggtaagattctcctttcctttgaaatttcaagtaaggaattaggatttcatgcaattgttaggttttgtttctatacaaattgggatgagttgaggttgttttcagaagttatttttgagttatatatgttgttttaagctagtttgttggttattggtgagaaatatcaatgtttgagattttgagctcaaacttaggcctttaatggtgaaattagattcaaagggttagagagttataaatgttgttcttttgttggaatatgttgtttgtcttaattaagtgttttggaaagtttagttgaatttgggatagttttgaacaggttttcaaagtttggggttttcctcttttctagaaacagtgtaccggttttcctagcagaatcccaaaaaaggtaagccatttggggttttgattcactggattttttagatttcaaagcctagttttttatgttttatcaatatttagggtattgccatgctatttatcgatagaaatttttttagttttgagtttaagtccccgaaaaagtgttttagtgggtcacttgccagtttatgcgaattgcgacttaggaccttaaatcatcgagcaacaatttctacttaattaggttgatgaatacacttgaattcagaactgagataagattagtatactaatatgcatgtttacatattaaacgtacatgtttcaggattgcctgggagataacatatcattaagagcagtattagtatacatagagttgcactaaatacagataaatatatatgtttagtaaagtatggattgaagctatcccatcggtacgactagaatactgagtagaggttgatattatggtcaatcgtattgtcgtacgaacattccaaacttagtacgcattggacacgagaaaggattgtgattaggtgtatgggcacctgaccacaatctggtaggggtgcacatttagacccgtaaacctggaaaacccgactacccgccgccaaaaaaaccgatcacctaaaaacccgtttggtcgggtcgggttcaacccgaaaagacgccaaacgggtttcaggttcgggtttgattatttatttttttcctggtttaattaaaaaattaatacttaattaatatacttaattactaatataataatcaatattatttcaaaaagaagcctactgaacttagtggactaatagatgcatgagaagagcaaccgtctaagataactaatagtgaatgaatcataagaatttaaccaatatcaatcaaaaagtcaaaataaaaatgaagagtcgtgtgcaccccggtggactattggtaataccgagtaagtctcaagccgtgtgcacccctaattcattactaattaatattatttcaaaaagaagccaatttggtattcttcactatttgacagctaagcctattacatactaatttattactgtatcaaatatcaatgtggcgtgcacccctttttttagtaataaataattactaatttattatcacacatttttagatgctatgataggccctaataattaatatcattactattattcaaaaaacaacaaaaaaatatcattactatgtgtatgtagtaaatagatttaataggttcagcaaaaaaaaaatagatttaatagaataccaataggacccgaactcgactacacccaacccgaaaaaacccgactcgataccctgcgcacccgcacacccgaatactgggttcggttgtgcacttccaaaacccgaagcccgaaaccccgaaaagtcgaaaacccgacccgtgtgcacccctacttccaatacgagctgctactctatggtgccttaggaatatgtttaatataataaaaattggattgattaatcaaatgaataattataggaatatgaaaaaaaaataagagatttaagctcagaagcacttggttatatctgaaataagataatggtgatggacccctccaacacagaagtgcaaatatcatcatagcttattttgcaccagccgggaatcgaacccgggtctgtaccgtggcagggtactattctaccactagaccactggtgctctttgttcctgactagttagttattattattattgttaattcattccaaagtttaaccatttcattttgataagaggctataaggacccctacttctactctatgaatgaaagttgaaacccaattaattctataattatgatttttacaaaaatgagtaatagcataagaataaactatcttgattttagatagaatctaatgggaaaacgaagaatccaaagtacttgatgtacataggtaagctttgttaccatctaataacttacacatgggaaacatctacaaggttgtctcactcacctatgtatatacatatatgccatacatatttttcttgacacaaaactctcaaaaatgtttctttaactaatcccaacaaactatgttatcaataatttgaacaaatgttgtttgtgtaactaaatctatcaaaaaaaaatgtcatcaattgtgtatgataaaattgttaagtgtgtctctgaagctcaatctgataactatgatgcccaagagaaggctctccaagctcttgcttccatcaccaaggtcagccctcaaaataggaacttggtagctcaatcagaattaggagcaatacaagccttactcaacctcatcaagtcttcctcctcttccaccatccaagttctttctttagccattctctttaacctttccttaaaccccgacctaaaaagatctttggcgagtatggaaaccatttcccacctcaattccatgatt

SEQ ID NO: 4921 - DNA, 1269 bp, Cannabis sativa
ctcacatgggtgtacggacaacaacgatactggttgttttcgacgagccgtggtgtgaactaaacccagttttgctctttagaaacttgccaactttgctaatgtcaccaaagcctaaattagtgaaaaatagttcaaagttacaaacttacaaacttgatctacccattttcaacaaaatttttgtggcactctttgagtaaagagtatatttggagctaaggatcaaagttagacacctcttgtttatggagatcttaattaagtaatatagaaaattattaaaacaaatattaaagaaaagttaatagtcgtgaaggatgttgcctgaggtgatgatgaagctccaatagatttctaaggacgacgatataagagtatgggtcgccaaaatgatctatgtggtggtggctgactttaaatttgaataagaatgaaagaaatcggggaagaaggtcatgaaaagtggaagagggaatcaggtaagagaagagagagaaagtgtgatgtgttaatctggagtgttctttgctagtccttattcatttgttttaaaaaaaattattcaacttcaacactatttaaaataaaatttgggctcttacaacttacaaggctacgtcgtgatatagctaccttattagtcaacgtacataaggtacatgacaccatagtattattcttgcaattgcaagtatgctatatatatttatataaaaggtaataactagaaaattagggtgatatttggttggagataatgaaatgaaaagaaataatttttattttattcttttgtttggttgcatcattttggtagaatgattattttattttgaaataaaataaattaccattccaattaatggaagatgagaaaaaatttaataatttttttatcaattattttaatcattctaaatttaattttattttatttatattttcattcacatttttattcctttcaattaaaggccatctaattgttaaatatatatttttttagttctgatattacatagttaattataagtatggtcattgttttttgttttagttaatttgtgaggaaaattattagttggtggattaatattattaagaaatcataaaattaatttgtcaaagaaattagcactagtttttttttttaataaagaaattagcactagttagtactcgtagatcctaatttttatttttttttattattggtcagagcataggtcccaattcttaaccaagaagacaaaaaaaaaaaaaaaa

SEQ ID NO: 4922 - DNA, 1270 bp, Cannabis sativa
cgaaacttattttcgtaactcttatttttaaaacaataatactgattaacaaaataatcaatattcataaacttaaaaacaatatttccactcactataaaatttaaacgtttactatctctaatatgacataccagtacatgaaataggtctaacctttagtatatgcggactaggcctgtgcctaaggtccactcaatctaggggtccaaaaaaaattacccttttaaaaatacacataatttttttactaatttttaaaatacaacatttctttataattaatggttcaaattttaattttttttattatggcccactaaagtttaggatcggccctgacataagaactaataaataaacgatatattatttatttaattaagcttaaaataaattaaaataaataaaaattatgaaaagctcatttctataaaattaaacaataacaaattaaattaaaaccattaataataatatatagaaaatttccaaacttcaatttttttttttcttaaattaaaagggtactacattaattcgacatttaatttcataaaaacatcaaataacaaaaaaccaacttaaacataaaaataacaaaaaaaaccaaaatacataaattaactaataacacaataataaattactccttctccttcttaattgccacattagagaataagccaaacttgacctcaacttcaacagcattttgtttcttcttcttattaccaataacaacattattaatattattgttattattaatcttagtttttgaccttataagaagcttggctctcttcctcatcatcttgtacttgttctcataattaggattagtgagcatcatcattagtgcataattattcttcttcttccttggcttaaccatttcaagatacttagtcaaaccatacttagccaaaagccttttcttcctttgagccttagtctcatacttgtagtgagatcccatgtgagctgcaaaatgttgtgaagttgtgaaaacccttttgcatttcggacaagtgtacggtccatatttcttgtaaggaagactatgagttctcccatcaccagcaccctccatatcgaaatctttaagagcttcaagctcttctaattcggcctcttccagctctgctgctttcagatcttcctcgtcaacatggaaatccacatcacgatcatcttcgtcatcatcaccatcaccatcctcgtcttgtactggagaggatggtgaagaaggcggtggtgggggtgg

SEQ ID NO: 4923 - DNA, 1097 bp, Cannabis sativa
  modified_base (722)..(722): a, c, t, g, unknown or other
ttcgttttatggtttattactaaccacttttgccagtgttaatgtgattataggtgtaactagtattaattgttgcatcgacaaaatcatttaatatatatataaactacatacttcttttttttctactctgcgctcggtttcctccaatagatcaagcctagttttctcttgtttttttttttttggtttgttttgggtttaatttttgttatttatccctataaactattattgattttttaaaaaatttactattaatattttagaaaaacaaatttctattttgggggattttttttctccattgttaagtttttctgagattggatctccgaccaatggctgtgtatcaacactactacaaaaagcccttttaatgtcccttttttatgtccaacaaaattattgttggacatgaaaagattttggggagttttttagtctagcattgttgcactagaaaaaaaattttatcatgtcctataatattggactagaaaaatgatctactttcatgtccaactctcctagactagaaaagtactttgggagagttttctagtccagttatactggacatgacattaattgaagaaaatttaccttacacgcataattagtgccgaaattcaaggaccactcacacatatcactcatttttcttttttcaagcaaacttttcaagtatttattattatgtttttattattattattatnattattattattattataatatcaagcactcaaatatttcaaatatttattatatgatatttacatataaaacttaacttatttctttgagataacctaacatagccgcacctctctcatctacagaaaaaaaaaaaaccaaatctcattctcataagattcattttctctatctcactcttattttaatctctcactccctcttgggaggtagttcttcgtaggggttggttaagagaaggtcgtagaccgtagtttggggtttaaagaatttaggctttgggcctgggagttgggggttcaaataagttgggctcgcacaggtgttagacgttcttgacgttcgccgcttgcaaaggagaagaacgatgcata

SEQ ID NO: 4924 - DNA, 963 bp, Cannabis sativa
atggcagcaagggcactttgcaggaactaaaatgtatcttgttatcactaaaatgaaggctttgaagaaggctttcaaggagttaaattcctaacatttttgtgatatccaagcctaagagattcaagcaaggaacacacttgatgagcgtcaagacaagctacaccaacaaccttttgacactgatttacagatattagaacaagaagccagagacgattttgtctctaaacacaaaagctatctatcttttttacaccaaaaggcaaagctatcatgggcaaaagatggtgatgagaattctgcattattccacaccagtatacgtgaaagaaggagacacaaccaggtcttatttatcactaatgctgatgggaaaagggtggatgaaccaaatgaagtcaaagatgcttttattaattactatataggcctccttggcccctgtatgcataatagattgaaagtagagtagggcattattaaagagggaagtatcttgacaggagctcaaattaatctactcatggccacggtcacaagagatgaggtcaagaaaatggtgctagcaattccaggtgttaaagctcttggtccggatggctttggaagctatttttttcaagaaaactgggacattattcatgctaaaatatctgatgccataatttcctttcttgagacaggttgcttaatgaaagagattaacaacacagtcctaacacttgtgccgaagctcaaatgcccaaatacagtgaaggactacaggccaatagcgtgctgcaatgttatatacaaattgaccaccaaactgctttgctctcggctcaattgcttacttcccaacttggtatcacaaaaccaaggaagatttctacaagggcgattcattgcccacaaaattatgatttgtcaggatcttatgggccattatggaaggaaatgacaaaagctagctgtata

SEQ ID NO: 4925 - DNA, 846 bp, Cannabis sativa
ctcctctctcgcttgccctaagtcatctcatctttatctcgatgtcattgtctgattccctttctctgtctcgcctttgcaattggcatctccaccactggcctcatctctggcaagaaaaatccacagtaagttctcctttcttatctttttcttcatctcactctttctcaactccacctccctttctcactcttttttattattatttatatatttttacagatatggtttgtggggaaagaaaaatgtgggtttaattgattttttcttaacttcgtggtgaacgacgaagggagcttcgagaattttagtgctcgaggtttgaagcccgatgaaggccatggtggtcttgactccagagaaaggggaggtccgtggtggcctccatttttgatggcaaggtttctttggcggcagaagaacttctcaggcccgagagagagatttggggcttagatatttttatgggcccaatacttagtcaaattcccaagtattatttcgtagttacaagtataggctatggtgggaaagataccaaagggatatatgaccaaggataagtttgttaaggctagcacgcctctgtcaaatcctaaaaagaagaagtggttgtacaacgagtacaacgggtacaagtagtggagacttgggtgtgtagaaagtcatcctattcaattacaactgttcgatttaatcacaattgatctaatagaatcagatatccaattataattagatcggatcagatctaaattctgaaaatacaattggatcagactggttaatagattggacatacaatccaatggataaccgaactgaactaatccaattatcatc

SEQ ID NO: 4926 - DNA, 1658 bp, Cannabis sativa
attgggtggttaaggaataccgttctagcgaagttgaacgaactgattcatggagtatccgatgaaatgagtcgtattgcccttggaccaaattttacggtagcaaagcatgaagcgtacattgtaaagggtaaacgttttcataaaaagtcaagagatgatgctcgagaggttcaaaatagtggcatacgtatcatcatagaaaccatgcattttacaactgcaaaagataaaaaaccctattataggtaccatgacgtattatggggttattgaaaaaatatgggagctcaattattttgtgtttcgaattttcactttttaaatgtgcttgggttaacaacaatgttgaagtaaaagctgacaagcttggttttactttggttgatttaagtaagagaggaagcaagaatgatctatttatcatggctagccaagcagtgtaagtgttttacatttttgatctggctaatgataatggtctgttgttttatcgacactagagatgaggttcttaaagaatgaagaggatgaggataatgtttatttatgttatgatgacttcattgttgggcaaccaattcatgaacaagttgtggaaattgatagtaaccttgaagaagatgatgttcaatacattataaacgatatcaatgagggaaataggtcaactatgattcaagcaaagataaacaaaaataaaagaaaagaaaatgtgtctaattggtaacttacttgtgataccttatttgtgataatatttctttatgtagttaatatttgttatagcttaattgtgatactttttttatgcagttactctgttatagctaactttatatttctgggtacgttctattacaactcttatactgtcaaaaatttagtagaattaggatcaaattttatatattatatggagttttgaatagggtctacgagctcaaccaccatcaagatgtgatgtgtcaaagggaaaaggtctcatgccttgtcaaaaaggcagtggtgatcaagcagatctattattcacaccagagctcatgccactaatccctaagtcacttaattggatggttgaagaatttctgatagttaaggaaaaaatgagataatcccaatttgcgtaccacgtggattcatagcacctcgtacccagatcatgatatttgaagaagatttatagtagctggcgttatgtgacttcatcgacaaccatggaatatttttggaataatgtataaacttctttaatctaattggcttatatatatcaaattctactaaaattattataaaatactaatatttaataatttagtgcaagcacatctgcgagagcttaaatgatttcagatgaattttaagttttacgacctagaacttatcgcagtgaatggtaacaacgatttagaggaggcataatttttttagaatgtgtcacaaggattggctcattggttatcatcgatgaataaccaacaccaaatgctttttactcccaagaatatcgacactacttaagagataatttaaaattgttttctatattataacttgaaattatttttacactatcttacatacatcccaacataattttttaatgtgcattggatgttaaaggtcgttgcgctagggaaaattattcatttaga

SEQ ID NO: 4927 - DNA, 885 bp, Cannabis sativa
atgtttagatgaccgaaaattttgaagtacctcttcttggagcttagcaacaacctgaggctcctgcaaccaatcgaaaagaaatatgttaacatttagaactgttttttcgaagtgtatagtgtagtatagaatcatttcgatttctagtagtgttgagaaatattgttagcctcatttcgtgtgattaccttggataaaagataaaatgtccatgttaaaaccgcagctgaagtttcatgccccgctataagcattgtcatcaaatcatcgcgaagttgcttgctcgaaacctacaaatagatgatgtatcattatctgtagaacatacatcattataaataatacagaaatggaaagaaaacaaaaccgaatcgtacgtcatctccagaggctaagaggaagtgaagaatactaggatccttttcgttcatgtattcctcgtggaattgcagctcttcttcatcaaccatcctctgaaaacgcaaaatcgagttgcctattattagcaaatgtacaactaaaggatcaaaccatagattgggtagagcttgcatcaaaagactaagttgaatatactataccaaggccgagatatatgagttgcgttcggctagaggtaatgaaatagaaaggaacaaattttcattccagtcttttgtttggttgtattttaaagtattaaaatgtcatgctaaaaggaatggtaacttttttactattttggtaaaatgactatttcattttgaaacgaaagagaagacaaagatttattaattgttgttatgcatttcaaattctattcttattctcatttttattcttcacaaccaaacgtgtatttacttcaaacagttgagttttttttaccttgcatattgcaat

SEQ ID NO: 4928 - DNA, 1544 bp, Cannabis sativa
aaaagcaagtgtgccaatttctgttgtgataaatgttttgttgatgaacagatctacagaagagcaggcattgcttatgaagctttgtcgactaggttgggagctcaggactttctctttgaaaacaggtctgttctgaatatgctccaacttgtatcctttaatgtaaaaggaaatttcagaaatatgttttttttttcctaataataaatttggttattttacttttaatgtaatgagataagaaaaggggaagaatgctgtctcacctttgatgctttccttgcaggccgtcaagtttagatgccatctttctgggacaggcacttattgttcttcaagcattacctgtgagccaatttagttaactatataaagtttaatattggtttattgtcaaaaatgtttccatcgttagacttgtttcagataccctctgagaaacactgttgtgtctgtgttgactaaattaaaatgtacagtgatattgtggggatgaggctaacatgtttgctgattgaggcaattgaccccttctattttttttatacttgtggtggaaggtttatccttgcattattttgttagcacgtataggtagagcttaactattgcatatagacaagtattccaaaatcatgtgtaatgttatttctttggcgttatctaagcatgtttggtggaaagtttcaaagtttctttactgaaagtatgctatagattgattttaactacataaatcttatgtgctataatactatgttttttcaggagatgtcaatactgcggagaaaactcttagaacatggtaatcttgtaaggtatgttgagagggttaagactgagtttgtcgagactggtccttcatattctgtcccacattttagagctgactcatcatcatcaattcccaaaaaaggtcctagtaagagtaagatgctttaacattctgtatatgcttacaaagttccgttattcttttatatgtggctgactgccttgccatatttgtacgtacttttttcaattactttaattaagtgttgtacaattttacatttccatgctaatttaaactggatcttgcttatattttgggaatttactgaaattgctgtattgatacaattttttgggcatccttaatctttttccctcatggactgagtttcttaatcagactgagttattggtttcttggtgaagtagcttaattggtgtagttgggtgaaaaattaactatgacattcttctggatcagaatacttcctcaggaaaaacatttcatgagactgttttatttactagaacattttttgagacttaattatttcctttatctcctttggcactgttcatttgttttatatcgaagttagtatttttcaagttgcatgtgaaaattgataatttttatagcctttattgccatgttttattgtaatttgttaaatgtttaacgccttagctagtgactttgttggaaaggagctgttcctaataatttcctattgataattcattttggtgattgtcattttttt

SEQ ID NO: 4929 - DNA, 506 bp, Cannabis sativa
agggaattatataaatatatagatggttgtattgtgcattaaatttgatataaccgtataaatgaataaaaatttactaacaaatgtataaataaaaaacagccttatatattaataattaaaattaatattataaaataaataaaaatattaaacatgtctccattaaggcgtggtggtatcttcatccccaacatatttaacattcaaagatataaagttatccctattcccatcttgcagggaatctccaccttattaagggtggagtacccacagactaaattttcatccataataacaataattcaaaatttagtcaactttaaatatataatgtttttcaattgagagcatatatgatatacataaaaacaacaattaaataaatgtaaacttttaaaaaatttataattaataataatccacatgtgagtttttttctttcaataatcaggcaaaccaacaaaacataattatttatgacattattatttatttattaa

SEQ ID NO: 4930 - DNA, 545 bp, Cannabis sativa
tactacaatgtctctacaaaaccagttttgatggtctgagaaagaagttgtgaagaattcggaacatccacctagctgacactgggggtggtctatgaagtagatgaagtagatccacatgtaggtttgaaaagaacaattaaaccaatggaggagatataagaagtgtgcatcaatgatgaggattccgtgacagtcatgaaagtgggaaataatctacctccagctactagagaaagaatcatctttatagtaaaaaaaaaacagtgatgtgttagcctagagccattctgtccttactggaatcaaccgtcaagtgatttttcatgcattaaacacagatcccacgattgaacaaatctgtcaggagataagaccattagatctagtctgagcagaagcagtgaaagcagaagtagacaagttgaccaatatatagtttttctaggaaactttatatcaactatggctttccaataaattattggtcaaaaagcctaatggaacttggagaatttgcatagacttcacagacccaaacaaag

SEQ ID NO: 4931 - DNA, 546 bp, Cannabis sativa
aagctattattagaggattagacattatcaaatctttgaagttaaaatctacttcaaaaaccatactaacataaccaacaaagttcaaagatagaacagagagaaaaggccataaatacactgtcgttccaagaagtgtgcaaaaaagtcaaacaagccttgttcgaaatatgtacccttccaactaaatcaacaaatggaattaatcaactccggtctgaattaaaaactgaaaaagcataacaatacaatagagaagaagataaaccagtattcttgtaacctcaaacatcacaaagaaataagtttgacattacaatacagtaagcacaaagataacccatcattcttgtaacctcaaactataccaataaataacttcgacatcacaacaacatagccactgacattgcatacaaaattattttccagtctagctcaacaaaattacaaaactatccaaaatgaacaaataacacagtctaggggcagagctacgaagagtatcacactggatttcgcctaaattgttataatattacatgt

SEQ ID NO: 4932 - DNA, 1401 bp, Cannabis sativa
caaaagaaatgtaccaaatggtttgaggtctttgaagatcctaggcacgggatctttgtctgaggccaagtgcaggaagtaagaattccatgagaatttagccagtgtgttttgcaggaaactgtccccaataaggggtgagccaaaagtgatacaaagtagtttgcgcttgtcccgatcctttgtaaagacaccgctttctaacagcaacaaggtgaagagcgaggcgattgagcctcccagagagcagccagtgacaattagtggcatggaagggtcaatctgtatttggagtatgaaagttaagaagctaaagccaaaccagttatcttatcacgtgtcaattgaaaacaatcaagaggtgggtgaaaaccacaaaatgtaccaggcacagcaggagctcacagattatggttcaatagattcactatttttatttagagtaaatagcggcataaatactcaaacttttgagttcataaatggcatcaattcaataatttttttagaggcgtaagtaccaaatatttataaaattataattttcttctaagacccagattctaaattgtttgatttggacataaacatgtagtataagcttctttcaaatcttgttttaacaaattcaaaatagagttgtactgataaaattgaaaaaaaattacaattttataaacatcgaatacttattatgttgctaaaaagatcattagatttagctacttaaccaactatttacccttttgtttatgtctaatttggcaaaacacactacattacatgaaaataaactatcacttttccaacagcaaaaaaatcaacaaattataaatcagtgatatttttcatgatcgtgctagttcttgatcataaaaaagaagtaaaattcaaaggaagtggggcaagtgaaaggtaccttatttttgagttgagaaagttccttaaggtactggttgaagagagtaatggcagcttcattaatggagaaatgtgttttctgagtaagagattcaaaaagatcaaaactttcgttgactgttggtgatgaagatggaaccaaatttgagccttgttgaagcttttccttggcaaaagatggtgaagtagcaaaagctataatggtaaactttcccacttggtatttttcgaatttgagaccctgaaacgatgaagaaattccattggaaagctccataatcttcttccaagattgttgggggaaatcagaacccaccaccagatttgccatttctgaaccactgctaaatctggaaatcaatcaatatttaataccccaaaaaataaaaagtaagaatttttatgttctcaacttaattgtgaacaaatcccatgaaaaaaacattaaaacaaatcgaattgggcagtaaaagattctta

SEQ ID NO: 4933 - DNA, 1940 bp, Cannabis sativa
ctattaggcactagttgtggtaagtaagcctagcacgaccaaaaattggcctcttgtgaataattagcaatattttaaggtaaatattattttgagttttgtgttttgtaaaattttccaaaataatacaaataagatcttgaactaatttttgtcaaaatataacgtattattaatctgatctataaatattatgatagaattgattatattttctacacttgtttgtgctaagaattgtcttcatattagtcatattaataaaaaaattgtcaaaaattgaattgagagttatttttaccattttcgaaaatataaaatttattttatcatttaacaacatagaatattcaatcaataacttttgcaagagataataacaatactccacatctatgtatggtaatcatagtagtagttcagtccattactatatgcaatatttcttaagctaaatagcccaaatcaattaaaaactgagctaactagtgattttagtagaagaaatttcttcaaaagaaaaaaacaagagagagagagagagagatttacttgtagtgttgggatctcttcaggtaggttggaggagaggaagatgagatctactttcttttctttatgaactaaaaaagacttgaattgaaataataatggcagtgttttaatattatgatctaaatatctacacttttttctctagttagtggacataaacaacggtcaggatttaatttaacacctttagctacattattcttgtaccatctcatttaataaaatagaaaaattaaaaaagataaatataaaccacaatagaagctgtaaatatgggttgggttttttttgtcacggtaagaaagaggaaattacactctatacccttttcatattgttctctttcatttttaccctcttttttaaagtcgatcatttttacctctttttttaaacatcgtaccaattttgcccctgtcacttcaagatactctccatatgactctcttatatcagggtattttgggtacaatacatataaaaagaggtatgtttcaaataaatataaaattagaggcaaatttagttaattgattaataaaagaggcatttttcaacttaccccggtaagaaatcacgcgagttcaagatacaccagcacgacccagcacgaaaaaatataagtttaggcaagatataacacgaaacgtaagtacgaatagattagcccgaaaactacaatattacaaaaatttgtgaataataataatatgattatgaataaagtattgttgaaaaattatataaaaataattgaaactataaaaaataactataattaaatgattaactcattaattgtaaaaaaaaatagtacaaaagtgaagtttgagttcagcctgtataaaaaaaaaaaaactgacctatctatgaaagacggacccacccgagtaaatcaaggcatgaaaatgtgaacttacaagctgtgtcaagcttactttttaaaatattggcacgacacagttcatatctttttatgggtcgacacaacacaactcatattatcgcggatttttcaaaatatagaccaaacaagtacaacacacacgtatttacagctatatctagggctgttttcaaagaaaaaaagaacacaagacagggaattagaactgaactgaaaccactttgattaatgatatgactagaactgaactgaaaccacttttcacaaaaacacagttttgtgaaagatttacaatgagattatgtaaaactttctagtttttacatcaacaaaaacttacctatttctaagtccaatgcacatatctattactattctaaactagtgaaaaatcaattctccttgcctttatgtcaatcatcaaactcgaaaagctcatcaagttgttcatctgtccagtctggcattgaggttgttg

SEQ ID NO: 4934 - DNA, 682 bp, Cannabis sativa
agcaagccagttttgactatcctggatttcaagatctttaattcttctgccaccacttctatctttgtaagcgaacatagcattgaagtctccaaggatgatccaaggagcattcagatgcccgatactagcaagcttattccagagatccttcctttcattcatagaattacttccataaaccgctgtgagatagaactcctctttgtatcccaccattttgagcttacaatgaatgagctgcctatcttccaacaaaatgtccactttgacaagcttgtcaatccaaaccagcaaaattctatacgaaatatcctgactggaatatatcctccagtttgggttattgtaaacaagattactaactctatcatgatgaaccttggtctcaaaaagagccccaaaacccaccttatttatcttacagtgttcaaaatcctcatgctgcttctcgacattattcaaccccttcacattccaacctaagatattgagattatccattagattattttctattttcagtagccaacaccccttcagcatcctccaaagcctcatagccattgctgattttcgcttcttgttgaggccgatttactattttagaactttttctctttggagtaacccagttttcattactggttggattagtggaagttatggtagcccctgtttc

SEQ ID NO: 4935 - DNA, 899 bp, Cannabis sativa
tatgtttaatattttatgttaaaattaagaaaaatagtcatttcttagggaattgaaaacaaccttttgtcccctattttgagtgcctatagttttccaataacgacaattgtgtatatattttacaaagaatatataagacattataatatgttatatgcttagtttaataatcaattattcttatatgtacattattaattatacattaaaaaagacaatagggttttgttttatataatcaaggacgtttggttcgttaagttgtacggcgtgagagtttcaataatattggacgacaattatacaagagaaatgctaaagggcaccagtggtgcctaacaccttcctatgtatcaatatcgttattggtacaactaagtatcgggtcccatataatttaatataataatttgtagggagtatcaatttaccaaattgacgtgaaattattaactacactcttttttatgaattcaaattattaaaccatatctctattcattcatttacttgttgctaattgagaagaaattgtagtcataatcaaagctaattgtcttataatatctactaaaaaaagagaatggttaaaaagtatcaaatgcttagtattttcttaggtattatattatattttactgtaaaacttttgtaattattacataaataattataataaaaaaagtggcaacaaaaatacattattttataattttgttacacctattttcggctattaaatatcaattaagaatcatgtgataagatattattagattatgtataaaataagctaaaaaaatatgtcgtcacgtatttttgagttgacacttaacaattaaaaaaggatatgactccaacaaaatcgtaagatatataaggtacttttgccgtca

SEQ ID NO: 4936 - DNA, 614 bp, Cannabis sativa
aaagtacgttggcccaatcacacctttgattcgagaactgagagaagagatctacaatgagccttaccaacaaatcagttggagcaaaatgaggcatctttgcgtccaggtaggtgatgatatatatagattaatactttactatatattacattgatatttgatcaatactattttgatattgattaaaaactacttataagtaactataaatatatttatacatggataagttatttacagtttttttttgtttttcacacgatggtgtatgtcgaaattagaattcaaacattttattacacctaactataaatattaaaagaaacatgtgcactgtgagacatccccttgtaacaatattaatgagtttataatagaatttgatggtttccatttcaaaattaattggcaaaaagaagagtggtcattcttctaattatatatgtattctattattttttcacacactagcaatgtaagactctctaacaactctacaaaaacacaggctgataactactacccacatggtagaatgcaacgtctcttgtgggatagtgtctactacattgctgagactcttattggtacttggccttttacgaagataa

SEQ ID NO: 4937 - DNA, 602 bp, Cannabis sativa
tgaaccgtgaaacggtggctgataagtttcctattccagttattgacgagcttttggatgagctccacggggctaccattttttctaaaattgatttgaagtcgggataccatcaaattcgaatgacgccgcaagatgtagagaagacagcttttcgcactcatgagggacattatgaattcttggtgatgcccttcggtctcacaaacgcaccagccactttccaagcgctgatgaatgaggtatttcgtgattttcacggtgattgtgtgttggtattttttgatgacattcttgtgtacagccctactttagagtcacatattattcaccttgaattagtgcttgcacggctacaacaataccaattgtatgctaacaagaagaaatgtacctttggccaacctcaagttgaatatttgggccatgtgatctcatcccaaggtgtggccgcggatccgagtaaaattgcagccatggtgtcatggccggtccctaacaccatcaaagacctccagggtttcttgggcctcacggggtactaccgcaagtttgttcaaggctatgggggtattgctagaccactcactgatcagttgaag

SEQ ID NO: 4938 - DNA, 1050 bp, Cannabis sativa
gattagttttatttaggttacattttggtattaaaatatcatatgtaatttaaataaattaatatagattgataattgtacaaagcataatagtatttgtagaataaagcaatatattgagtataattttaagaaatagaaattaagctaaatatattagtaaaatatattaaaaactaactcttaataaaatacttgtgggaggtctatctatactattacttggagttttctataacatatgcagttgtgaaaataacagtcttcctaaataacaacattaacaaaaatagactacttaaaaaacaatcatacatgtttaactatctcttgcacttttgcccaaaaataaaattataacatattctttttttttaatgggtagtgattgcatgtaagaatataaatttaagaactaaacccattaaggaacatgctgcttttttgatcttagcgcagaaagtttatggatgtgacagttgaaaaaaaatgtagttgtagagcttaatctatcttgcaccactgaaactaaagcaatcaagagccagttttgaaccccaaattcatgttgcagctgcatttacttactgctaggcaatcccaacagattattcaattgttataattattattattattattacattcataataatggcataaaaactaataattttatacacctacatcttctagttatattatacacaagtaatcgagaaagcacataaccagtcaccaggtatgaataataccctagtgatatagttttgaaaattcaataaatgtgattataaaacaagtgaaattgtagagctctatctatcttgcaccactcaagttgcagtcaagagtttgcttttgtaccccattacatgtctgcagctgaataaatttactgcttcacaatacttaagccaaccggctcggccaccatatgctctgtgtagccaaccagctgaatagattctcagtaactgcacaattatctctgaattctttcagattctctgaagatgaattgaagttaacatttgaatcaatgattgc

SEQ ID NO: 4939 - DNA, 572 bp, Cannabis sativa
aaaaaaataaaaagttgttttagatattttaagcttaattttaatatttgaaacaatttgaaatgagatatttgtgcagtggttgttggtgacgagtatcagtataaatattaaataacatggctggctactcgttactttggatctaccagaaaaatagtgagtcttaccaggggaaatagtgaacgtgtgaagaaagaaatcatcaatgggtggaggtagttcctattcttaatttgaaataataattttgtttattaagattgttatcttcttatgaattgatattgatagtgaatttataaattgttttaacagaaccagagggggtcagatttgataagtttccgatatgggtgcaacttcataaccttcctttgggattttggcacccaaatattctaagaagaatcggaagatttattaatggggatgatgaaaaggctgaggagatatatatagactcaacaactgcgattggccaatttgctcgtattagggtggcttatgatatgaataagcctctgaagaaatctgtacgtgtttgggtaagagataaacaagttatcatt

SEQ ID NO: 4940 - DNA, 2528 bp, Cannabis sativa
gatcgaagtagagccaaaataaaaaggagcaaccaaaaataaaaaaaaaactaatccaagagccaaaaaatcaaaaaaaaaaaatcacttgttattcgaggatagtgagccaaaaaaaaagagtcaccaaagatccaaaaatatgctccatacaaaaaaacttctacagattgatagttcctataatatatacattcccaaagtatattaagagaagcaaatgttttagaagtggaagagtcatagaactaaattggtggaagcacttggatgtcatcaaggagttgttcgacaatatacttctgctctattttgtgacgaaattcatatttagaaatctttatctcaataatatacttctttatggtggatatatatatattgataagattttcaacactcaatattccatccttttataaagtagattataaatgttagtataatttggacgttcacttagtaaaggtaataaattaaaaaacaagcactatatagtaatatatagtaatacctcagtagtttcatccattagcttttctgcggtgcattctaagaaagtttcagtaatctttccaaatattgtagcaggtaatgtgtcagttgagtcatgtatattgatctagatgcaacatctagaataggaaaaaaaaagttggtaaatgtataagaaaatattttttttgcagttaagtgtgtttaatgccttgctactgctttttgtttgatttctattttctttttgccttttcattatcattccaacaatagttgcatgcgaaataagcatcaaagtcagcacatgtagatctattacatttttcacatgccatataccaaaatttttggtgatgattgtccattgagatggtgcctttaatccaatagtgtgacttctgaaaatataataaatcattattaaaatgtttgttgtcaattgtaaaggctatttgttgtttagtttgtatatgtttgtaaattatcttttcttcagcattctgtatgaagtttatttgttctatttcttcatttggtggtggtttggcaatataaacaaaagatggaaggatttttccactttgaagaagttgggaagtataatgattgtcaatgaacctgtaaatatataatgtacatttaattatacatgttttcaatagttttgtatagttttcagaaaagcttatgaaaatgagaagaaaaatagttaaatagatattgtaccatttctgtaaaggctttaaagtatctacttcaggcaattcaagttcaagaagaatagagctttgtggatttgtagccaatgacatttttgaaggaaggaataagggcatgtaatttttatagaagataaatgatagtaacacattaatactataatatccaaatatttattttttcaataactctgattttaattcttctaattttgctctaaatattcttgcaactaaatttggacggttttgagcttcatcattttcttgtaattcttttttttattatttctaaccagctcgaattgcacgtcatagtcaagaatatatcaagttttcgaatcgttgtactaatgtcattgcatccatatatcttttcctcctatttctaggacctccaataaatgatgatggtagaacaattatatgtccaactttagattcttgattctcacccatctctaagctatcaatgattccttgatataaattagctcttatatcatcttgctttagagaaaaatagtctagcttagatgtttcaagcttgacatacatatcaataatatactgttgcaaaagtcggcctgctcgtaagatcattgttttttctccatctctaatttgtaatttgtaacaataatattctctacaacaaacttcatcttttctttgctttttaacaattttttttttgtaataactcagtgagtgaccctatacgagataaagcaactaattcatcatactttgtttgaggttaggattttgagctataattaatctttttgattccttgacaccctccactttctccatatgggaacaataaaggatattgtagtggatcatatagcagccataataatagtctaccttatatgagaatcctgcctcagtggtaacagtaatatctcgccttctttgttctcctaatgactcatcattcatccatacagtagcaacttgagacactgaagaattattgtacactctttgatctagatcaacatctaattttattctaatcctataattctctaaattagaaaaatctcttaagcttctaaaaaatttagtgtaaggattaactttcaatatgttaaccagtttagttaagatagagaagttaaatttggttgaagaggcaatcgatattataactcttgttcagtgtcagaaaaatagttgaagatgagaaggttgtttttcagatattaatactcatttatgaaatagtaaatttgtccttgtaagcgaaatgtataaacacttttattatttttacaaaggtttttatcatatttaata

SEQ ID NO: 4941 - DNA, 639 bp, Cannabis sativa
ttttttttttccaattaatatgggacctgataatggttttacatattttcttattgcagagaaccattaattacttgctgtcctgtttgtggtgaagttcttgaagtttctgataagctgaacaacatgattcatctgacattgtgttttgacgaaggaactggaaaccaggttatggaaggaggatttttaaccgatacacaggcttcatatgggtgagaaatagaaagaactgcataacatatggttaatttaagcaatggtgaatgcaattaagtcacataactgattgctaccaccaacttttatatttgtaggtggatgttcaaactaagtgagtgggtccattactcttcttatgatgttggtttgaattctggatcaagcgcttctcatattgtggtatgtaatcttaggtcttaggtctgtcttttatttcaatgactgtcttaaagctttgtgtttttttttctttacttaactaaaagaatatatcgactgttctgagtgagtttgtcataaagatatgaactatattgttacaaatactattgtttagaattagaaatatttaaaataggaaaccttcccaactcttaatccctccatacccatatatatatgctataaaaaaataca

SEQ ID NO: 4942 - DNA, 2127 bp, Cannabis sativa
tttgttatttgaaatatcgagatgagttaatttggttaatcgaaataaagccgagggaattggtccgctgagatagttggggttcagatctaggtagagtaacttctctaactttcctatactattaggaatggaaccattgatttgattttcccacaactctaaacgagtaaggttgattaaaagaccaatggactcaggaatggaaccaatgagttcattgtaagagagaacaagtactttcaaatgagaaaggtttgttaaagaaagaggtatctcacctgtaagaacattgtaggaaaggtcaaggtgggtgagctttgtaagagtgcctatctcctgtggaataatcccaacgactccagcgttagaaagatcaagagtagctaaatttggaagacaagtgaaattgagattctttaacattctctcttccaatttagcgacaccatcattaatatcatgcaaagtgatttgagtaatgtgaccagattggtcacaactgataccttgccattggcagtgcagtctggtgtgctggtcttcacaccaattggtctgtagtagagaaaaaacacgtgagtcctgaagagaagctttcactataatgatgaagaaagcaatattaatcccccataagagtgttagtgaattgttattagctttagaaatgtaaggtatcatttctagttaataataataacctagtttctaatatatatttgttatgtgtgatgatgttgatcattacacgacctgagtctgtatttaaggtttttttgatgataataatgattatatatatatataagagatatatgctaatgtagttagactgatctcatggttcaacgctttcagactatcagtggaagacagatcatgtattaaggataccacttttcttaattaattatatgtatgcatgtgcaagattaggtatcttaattgtatattttaaggttttgatttatgcaatttacttccctatgttcatatcaatatatatatatatatatataaataaattaatatcatccagttcatacaatagagttcttacattatgtcactcatgaagtcatcatcaactatattttcattacttcatgaataaatgaaacctttatttgaaaataataatgaagaaaaaagattcctttaaaaatatatagtaataatattaaagttaaaacgtgcatctaataggaattatatttaatttagtcgtacactagtttttattagtttaaggtttagtgaatggtaggtacgtaggaaagtagttttactattagtttaaactaaataataatactttattttttgtattttaggaaaagtagtttatattatcctattccttcactcatttttatgcatatgttgtagcactcctgatcagtcttcatacattttctatctttatcttttaaagtacattaatttttttttttttcattcaaaaagaaaaaaaatcgaaaccagtaagttaaaaaaataggaaattaataagaactgtacgtaattattaatctaaaagttgtaaatataatctaattttctaaaccatatgtcccttgaactttatgttagacttttttttattaaaattggataaaaatttttaaatccaacaatctcaatagttcacactacaaaaaactactacttttagtgataaccttttagtcacaacataaattttttgtaattttttgtaactaaatgtgacttttatccacaacaaaaaattatttgtgactaaaacatagtatttagctagaagttgtaactaatttagttttagtcacaacaaacattatgactaaaatacaattagtcacacaaattgtaattttatgaataatacttttcgtcacggaccttttagtcacaatacaataataataatttataattaaccacaatctttttatctttagtcacaaattttattgtgactaaaagtaaattgttttgtagtgtctgagagcatttttaacgatctatgatttggtacatgtcaaagcttagagggtaaaaatactgaagtttactcaaaccaacatgtaccataaaactttaaaaaattatgcaatctcatcttaattaacatcgttgact

SEQ ID NO: 4943 - DNA, 1788 bp, Cannabis sativa
  modified_base (1325)..(1325): a, c, t, g, unknown or other
  modified_base (1605)..(1616): a, c, t, g, unknown or other
aaaaaaaaatccatggaaaactagtattaatccagcaggataaattgagaatgagattgaaagaacaacaataacagaatgtgaattgcaacttatttagctaatacaatacctgtatcactttttattttctattctttaaccacaactacattgaaaatatccctatcttaatgagacaaaaaaaaagtactaacttgccatattgacaatgacgacctacatgacatctctttaggcctgaatgagaacttgaattcgaacctgcacaacttttcttttcctctttttctccatttccacaattattaccccttctgcgtttcacctcagaaaatctgggacaagcattccctgccattttttcttctctatcgttaacattagagctatcagcctgtccactatggttatcagtctttgcattgtcatgcaaagacgaaaaatcttgcatcatttcgttccatgcttgatcggcaaatcttgagattgaatttgcatttgcagtgtttactgaggatttagattgatcagattgccgaatcacgttagagggcttcttagtgaacggaacgagcaccaaaaattgaccattactaatattttgctcactaatgctgctccgcaaacccaattgtacaccctaatgaacatttcacacaataaaaacatcaggtccacaatcgaaaccaaaaacaaaagaagaaagaaaaattacatttgaagcttcaactcagaaaagctaaatgcccacatacatacatcgcatacagttatacacaaattgtgaaattatataattgattaaacaattaatacatggatataagaaggataaagagagtttgccttgaaatacaggtgaaaattggggtaacgagtggccgcagggaagttctgcctgagaagaatcttgagatgttcaatagtgctgtcagcggggaggctgacaatggtagattcgccactcaatgtacggactacaatatcttgaactgtctccgccattgttatgtccatttcctcattttgaagcaccctactacttatatattcgaaacgggaaatgaatggcggtttgatggtagggtctgattggttcgccctgtgaaactttagaaattttattgggaaattcgagtttctatgcttaaaatactttcaataattgaggaaattttatttgcaactaaaaatttagatagagatagagaaattttgttatatttaacataaaaagtaatcggtgcatgttcttaaaagaaatgtattgatgcaccttttaatttgtttttacatttagaagaattttttagtctaatttnttttcatattcatgtatgttatatctatttaagatattaattcggaataattttcaatatagaaaataatgttcaaacaacttattttatacgagtataaaataaaatattcacgcgtgtaacacactgtttgaacgtagttttcgacgtgttaaactttttcgaatttcttaaaattttgcagaatggcttaaataactataacgtacatgatcatgaaaaaaagtttgactaaaaattattacggatgctaacacagataggggtgcatcaatatatnnnnnnnnnnnnggtgtattgtagaattttccaaaaataattttgtagtcgatttatattaaactaagcaatgaaactgggttttacgctgtttttgtaataactaaaaaaatgaatataaattgtgtacaatagaaaaaaaaaaatattttaataaattatatgactataaaatttataccac

SEQ ID NO: 4944 - DNA, 527 bp, Cannabis sativa
taagagtaaagagtggacttattctagtctcaaaatctaaatgtgataataccattattgaaactatgaaaactattaaaaagaatcaatattcccaagttgggattgggaggtaagcaaagagtgataagtagtaccaaagaagtacccacctcaaaagggtcatacttatatttaattaataattaataatttaaatatatttgttaaagtgagtggctttatagtttaagcatgaaaaaatgaacgttatacagattatattcattattataagacaacatgaaacagaaaatagaggaggatcgattctttgagctggctataaaataaataacaatactcaaaaagtgaaatcttcaaaatgctaaagacagaactagcctagctgtaccaaccattgtctgccacgtggattagatccaacatttacccaatctgggaaacactagcattatatgtaaagcaaaagacaatagaatagatgttaactgtgtcacaaaccttttttttttcatcttaatagg

SEQ ID NO: 4945 - DNA, 804 bp, Cannabis sativa
aatagtattttgaagattttatggaaagaaattaatgactggtctctaagatcaaacagtagtgttacataatgatatgatttaatttgcaaatttaacagggtacaactgcctctgtaactgtttagctaaccaaatagaggacttggtagcaatttgatcaatgcacacaagaacacatgtagaatttcatttaacattattaagctcaatgcatatgtcaagagttttgaatagaagttactaatttcttttgtcgagtttggacatctgaatatctgattagtgttggtgtatttttaactagccaagtctgtaattccgtcagacagcgagtggttcttcttttctcctcgtggaaggaagtatccaaatggctcgcagagtaggagggcaaccgagttaggttattggaaggccactggtaaagaacgtaatgttaagtcgggttcaacatttattggtaccaaaaggacacttgttttccacataggtcgtgcaccgaaaggggaaaggacggaatggattatgcatgaatactgcatgcttgacaaatcccaggtattcttgttagtgttagtattacttactagtcatttttaaggctgctacattggtataatattaagtaggtatcaggtttaatgtatcttaacatattttgttcctgtagtttgtataactaacaatcagttcggagcttagagctttaaatgttcgtaatactattaattgtataagaatttgggaataattaaattgcaatcatgttggttatctcccacttccaatatacccttaatc

SEQ ID NO: 4946 - DNA, 626 bp, Cannabis sativa
gggtaattcctctttttcttataacaaatttaatagataatatatattaagatagtaaaaaagtaaaaattgatacataacagtaaaaatataataaaaatgagagatccactagtgtaaattttccaaaattgatggcagtatgagcccattatttttttcttgtgagggcatgagcccattattaagactatgacgtttgatgaatctaactaatttgggtttctcattaataaaataatgtctttccttatccataatgtgatagcatgtcgaacttattaatgtcgagacgatctccatttgtaaagagatatatctattcactaggctatagaagccttgattgtaaaattaattagtatgttattaagaatagtaaattttgtattaaaaaattaattaattattgatttaaatggatcccttctaatttatcatgtatactactacagcaaacaactttggcattttgtgaagtgagatttggtataccaaccagtgatagatcgatgatgagagtaattttgttggtcacatgtaaattttactgtgggaaaagaataaaacacaattgcaatcaactaataagccttgtgaataatgatacctcgtagatatatata

SEQ ID NO: 4947 - DNA, 1433 bp, Cannabis sativa
tcaatcctcacccatatcgaataaactggatgccatcttcatattttttcggattctgctttttataggtcttacctattttttttagaaaaaaaatatttctttcacgtgatttattctgaaacaacgaaaaaacaataattcatattttttgtaagaaaaatcataaaaatatatataaacaaataataaatccataacaaacgtaaaatttttgtcatttttaatatctatgaaataatcttttttattttgttgctaacatattagtggtgtaaattttgttctagcaatggctatttttaaattataatgtaaatctgaaaaagaggagaaaaagttggtatatgctagaaacaaatatgggtataataaagggatattttcaatgtaaaatgacaaaaatggtattagctagttgagagacacactactatgtgaagaggctccaactctcagtggcaaagcaagggggcaaggggcaacgaggcaagtggacaagtgcggcgtcgggcccatttaagattgttatttgattattttattttggtcttatactactattttattttctttttctttttctttttctaaatcccacactttttgtatgtctatgtccatttagttttattttagattcaaaaactataaatctaatatattctttcaagtttcaacgaacatttgaccatttttatccaaaaataaaaaatctatgttaaagaatttttgaaaaatagtaaaaatgattaaaaaaattaaaattatacaaaacagaatacaattttgataccccaatttatatacattttatacacactaatataaatagtgtttaaaaaatgttataatttatcccccaaccaactttgatatttgaggaaaaataacttacaaaaactataccaaaaataatgtccaaattaatatcattttattttattttttaaaaatttattaaacaacaacaattacaaagaattagacacttcaagtacaatagcttgacgagtacaaaagggatcaaacccaatccaaaacatacaaactttgtgaacaaaacttaattggctaatttacgaggtactttagactcacagaataacaaaataccatcaacacaatcaaataataaaagaatttttaatgtgttctattaagccatgcaactatttttctttgtttatattaaacggacagctttaaggcaatcaaattcaatgttgaaacgtagtatatattcgcctctgaatttcagcctacaacaccacttgaatggccatcactcagcttgcagcggctgaacttttggctggagccgttgaagaagcaaacaacacctcccctcagcacccccgcatcatacataggagtcaatttacaaaaactactaaaaaataatgtctaaattattaggattttatacgacc

SEQ ID NO: 4948 - DNA, 748 bp, Cannabis sativa
aaaatttaaacttactggaatatttgaagtctcctgctattcacctaatgccatgttttgcccctcttcagcctcctcaagatgctctatttgcacaccctaggctcttcagggcttgtgttccaccaggtatgcatagattcagaggaaatatatgggactatgacagcagaccccaagtcatgagaaacctgggatatcccttagatatgaaagatagcaatccggacatcacccaagccaggaacattgaacttggacttgggttacaggtaggtctcctcctatatttcatctttacatttactttggcccttcaattacttacgaaactggctcttgactttggttgcaacgccaagaagtaaggaaaccagaaaaactatgtaaagcttctctagctgtatgttaacctactattgcgtgtttttaatgttggctgttgatctgattttttatatcaattactgataccaactcagctcctatttttcctttagaattatgaagttttcaagagaattattcagtatggatcaacttgtttgagaatttaacgctggaaaagattttttttgaatttaacgtctagtcttctgagtaaattttagaattggttatgtatgtatgtatttttttttttttttgagattaataacttttttacttttcatttttgttacagttaagtttcttgcatccatcaaaacacaagtttgagcacccccgcttttgctatgagcgatta

SEQ ID NO: 4949 - DNA, 1404 bp, Cannabis sativa
ttcatcaacaacttggttttgattacatagaaacattcagtcctgttgttaaacctatcaccattagagttgttcttactcttgctctcaccaaaggatggacaattaagcaactagatgtaaataatattttcttaaatggtgatttgcaagaagaggtgcatatgctacactcacctggctttgaagtccctgactctccagaccttgtttgcaaactacacaaggctttatatggtctcaaacaagctcctcgagcctggtttaagaaattacatcactgccttctatcattaggatttgcttcctcaaaattaaaccacagtctcttcataagacacatacccctctcagtgacactcattttggtgtattttgatgacattatcatcataagcagcgatcccaaactaatttctcattacacagttgctcttaatgctaaatatgctcttaaagatttgggagatcttcacttcttccttggaattaaagttacttctacctcaggtggtcttcacttgtcttaagccaaatacatcaaggaccttcttcacaaagctaaaatggatgaagtcaagccttccaacactcccatggatagtggtctcaaattatcagcatatggtagttcccttgttgacaatccccacatgtacaagtccattgtaagagttttacaatatttgattatcaccaggcttgagatttcatttagtgtaaacaaagtttgtcagttaatggctaatcctttgcaatctcattggcatgctgttaagagaatcttaagatatctcagtggcactattgactatggcattcatctcataaaatcagaccaccttgaccttactgcattctatgatgcagactgggccacagaccttgatgacaaatgctcaaactctggttttacgatattctttggctgcaatctcatagcttggcaatgcaataagcaacacatagtgtccaggagcagcactgaagctgaattttaaagcttagctcaaactgtcactgaactcagctgactgcactcattgtttactgagttgtacatccacttgcctagacctcctactgttttgtgtgacaacttgagcacagtgcttcttactgccaatccagttttgcatgctcgcacaaagcacattgaactggatctctactttgtttgagagaagattcttcagcatttagttcaagtcaaacatgtcccaactattgaccgaattgctgatggcctcaccaaacctatatccagtcaactattctcctcctttaggcagaaacttacaattggtgatccctctaattataagtttgaggggtcatattaggatagtttgttaggagttgttaattcagtttgttaggcttggttagctgccaactgtctct

SEQ ID NO: 4950 - DNA, 1358 bp, Cannabis sativa
cttgttgagttttgcacattaaaagaatgagtattgtgttgaacaacaaacactcacaacaagtgatatctttccaaaagctatacacttgatgctcagaatttaactttaggatagagattagatttgtatttgaacaaaaacctctacattcagattgttgaagcgctacggagatgtactcatcgagcgataacaaaacaaccaaatcttgttgtgttggattttcatcaatgaagatagtagaaatgttacacatttcatagatgttagacattggaagagacttgagatttttgcattcgctcaaatctaaacgttcaagattaacaagatgttcaatagacggtggaaccacatcaatcgatgtacaatgtaagagaattttttttagattctccataggctccaagatttcgggaaagctttttagctgtgagcaatgtgcaagagctagtacctcaagagacttcaacttacaaacggtggttgggagactttcaagctttgagcaactcatgtctaatgactttagataaggcatgcattcaaaggatgatgaattgacttgtcgtattgatgttccactcaaatctaatcgtttaatatttaagggaagctttggaaacttttcaatggactgacaaccatgcataactagaagttccaatgatttagaataacaaatactactaggaagattcttgagattttcacaattagagaggtcaagcacaagaagattcttaagatatccaattgaagggtgtaattcttctatttttgtcccttgcaaatatatgaatttgatatcaccaaacatctctgaaatagttctcagattgtagcagtctttgagattaagtacacagtcatcaaaactagactcataagcttcaagctccttaagcatgaaattgttatgaagggctattacttttgattgtctacgtggatcgtcatgaacattgtgaaaccttaaagaagaaacctcaaccaaactcttacaaccacgtaggtttagtttccaaagatttgctttagataaatttgggacacaaattaatttcaccgagaaatgaagatcgacttccattaagttttcaacatcctgcaaaaagaaacataataagcattgacgtacgtgtcaacctgtgagtgaccagtgacttttttagtcacaacaataagttacttgtgactaaaatataatatttagatacaagttctcactaatttacttttagtcacaacaaaagttgtgactaaaaacacatttagtcataacaaattttgaattttgtgaataatactttagtcacggatcttttaaacacaacatagaaatgatgatttat

SEQ ID NO: 4951 - DNA, 1660 bp, Cannabis sativa
  modified_base (291)..(296): a, c, t, g, unknown or other
aaaggccaaggcttcaagtgggcagggaatttttctccctcttttgagctcagctagggtcttgtgatggccttagaagcatatacaactgtggccttatgcgtggtttctcttggaagctctatataaggctaggtaatgagtcctttatagtcaattttaaaacttaggccttactgtatgtcttagtgagtgtatttaagatggtacttggtcattggttgaccttgtacactttgttttacttggaagatgcccgtgggtgttgttgacttgaatatatttgtagcnnnnnnaggttgctcacctccccttattttttccatgcaagtagtgttgggtgttgaattggggaggtgacagatgtgtagatcttttgcttacatcgtactcatggctagaatgaagcaaactctgcatctggccccatgtatgatccttatctggccatggtggccataaggggtcaggttagagtggagggggagactgcccaacccattgtcaaggctgagccagagattgatttagagtttgagagttttgatgcaaaatctgagctggaagaggttgcgccagtgaggaggaggaggtaaaggacttgctctatcctccctgtccgtcctttgggccattatgacgcccgaggtaatccactaaacaggtttggtgagcctttagaattaggattggaccatgtcatagagcaggagagagctggagatactggatgtgaagccacttaaagcaagttgtgtttttcctgcttctactttctctaatgagtccttcggtaacatccttaccagtggtctgatggggaatgtccattgtgagattccttctagaaactatagggctcacaggccgcctttaggctgattggcatggtctaggcaccacattgaacacggggcggtgttgctgcatcaccaatattttctacatgtcgccgcttactttgggatgtgcccaatgtagctcatgccaaagagcataaagtatctctcggtgatgtccgtcttatacagggagctaggctggcctctgcctaccctttacgagattggatactattttgatttgaagtctgtaccgaagtagggcaggactggatttttttatttcagcaagattggtcaccaatggctgggctacaccaactgtgcagccatgccaaaggttggaaggtacgcaaaaagtattttattgcatagggtcttcgcaggatcgagcaccacgaatttcagtatttgccactctttagacgttccatccccaccttgcaaataagggatagagcgaatcacatcctttctttatcgactgaggagagaaacgtcatcttgttgaccagtgtagacaatttttggatgtatagcttgtatgctcttacccgtggagctgcaagagtgctaactacagatgaggcctgccttggagatgggcagggccctgggatgatgatgatgaagtacctttgtcttttgcacacaatttggagaggagagagaaggctctccgtcggcacctggccagcgggggtctagtaggtgatgcttcccttcatattgggcctagaggctaggtttttgagagacctacacgccttgtgcctacttctatgggcaaagggaaggctgtagttgagggctttgat

SEQ ID NO: 4952 - DNA, 504 bp, Cannabis sativa
ggtccaatttttatcgcttagggcccactgatggactttaagtaattgtcttatgttcacgtatttcttactagaaacacggataacagaaaaactcaaaatatatatttatctatatatatttggtggtttaagtttagatcttttcactggagcacttaggattattggggataatgtctcccttgagtaagtaattggtgttcaaattttcagtttttggacaagaagaaatttaagagattgttcaaatgaaaaaggaaaagaaaaattggaaaaaaaaaagttttatttttaaattttataaaaattttaattttatttttaaaatcatttatgtcacgtgtatatttgtgtatacttcagcaatttattttagcatttaattttttttaaaaaaaataagcggagaagtaaagagcaaaacagaatagcaatttagagagtttttcctaaaaatattaatttgtagagttaagtgtaataaaatgtataattaaagta

SEQ ID NO: 4953 - DNA, 1489 bp, Cannabis sativa
gacaagcccacagacttaattagggtagcgcgtccggctttcgacaaagtcttcgccttccagccctgcaatttagaggttaggttgtccagaacaaagttaaaatcagcatccttctgtctagctctaaaaagcggcaaccctaaataatttatagatccttccggagaattaatgcccaaagcttccttaatccctctcctcataccgtctcaggagtgtttttttactgaaaagaaaattgacgttttgagtttatttactttctggccagaccaagagcaaaatctctccaaacaattccagacacaatttgcttcatttatattggccctacccaccaaaataaggtcatcagcgaagaaaagatgggtaatagttggacctcccctacttagtttgattccatgaatattgccctgcccaagagtctcttccagcagtctcgagaacacctccgcagcacaaataaacagggggatagggggtctccctgacggatgccacacgatggcataatctttccaacttggcccccattcaaacaaatgtttaaggtggtagtggatatgcattgcgagatccaagagcgtatcttcggagggaagccaaaacagtccaaagcatggtcaatgaacctccaactcagtctatcataagctttaacaagatcgattttgattgcaaaataaccctctctaccgttctttcatttgaaggaatgaataatctcctggactatgacattattatcttgtatatttctaccaggaacaaacgccgtttgagtagggcagattatagagggcagcaaaggcttgattctatttgcaactattttagaaatgaccttatagataacgttgcaaagggagataggtctaaattgactaggtctcttcgggttcatgaccttagggatgagaacgacattggtggtatttatccctttatgcatattgccgttcctgaaaaagtccgaaactgcttcacagaaatcatcacccacagactcccagtaatgtttgaagaaaagaactgacattccatccggccccggtgccttatgactgttcatggcaaacaaagtattcttgatttcctccctcgaagggcacagaagggtcccctcttggtcatctatagacagcctctcctggaatagctgtctacaatccaggctctggtcaagatctgagccttcaaatatactttggaagaaatttgtgaattcgagtccaatagattctctatctgtaagccagacattatttttgctcaaaatactttcaatggcgtttctccttcctcttattgcagccgagaggaaaaagaactttgaacatcgatcaccctccttgagccaagtgattctggctcgttgcttccaataaagcgctttcctggttaacatttcattcagcgatctgcgcatttcactctcctgggtccactcccgagcacccactgggagtctctggagtctatc

SEQ ID NO: 4954 - DNA, 745 bp, Cannabis sativa
ttgcatgcagaaacacctatatatattataataataagtatggacatgcaataattaataacataatatatagataatgtaatatattatatattaataatcgtttgaattagtaagatagatcaattagtgacttaattttaataccttgatgtttccaatcaacatggtaactaaaaggagtccactagtcaagacaatgatattgaacacaacttctaaccattcggttgtgctctctaagttcccaaatgtgctgcaataatagtatatatttacagtaattataactaaagagcacattaaagataaaaacatgtcaaggtgtagaacaagtggaatgatttatactaattacgaagtctagtagtagtactgctattcaatgtttatcatcaaacatgtgttactattattattattaatttattattatgaatgtatactctagtaatatgttttcatttgttccttcttctctttttattgtaactaagaattatggggaatttattactacattagatttcaaccaaaccaccatttcttaggattatttcgttattctttataatttctaaattatatgtactttaaactgttgagtttgaaaatttctttattatattacggccaaaactaaaaaatattatttagcttaaacatgaaaatgatcgtgtacaactgtttattaattgttcccttggttcaaaagaaagccacacatcaatatcagaccaaacct

SEQ ID NO: 4955 - DNA, 1264 bp, Cannabis sativa
gttactttacaattagtaaatgataatacctaaaaattattacacttaattatatcaatagagatattaatatgtaaaaagatgttagtcatcactaatatcttttagcatgattcatattaattctaaatactttccaattaagagggtccttaaaacaagtgagggaaaaagggagtttgagagatggatagagtgtaagagaaagaatgcgtggtcatttgtgaggagaaatgtaaaacgacttgtattaatttatgactttttttattattattatcttattaattttcagatttttatcaaactatgtatggtgagtttatcaagttttgactgaaaattatacagtagtaaagcaaagattttaattatagtattatatcttttagatgtattgccttatatgagagctaatatttaatatattgatacgtaaaaagaaactacaaagtaatcttttagcatttctccaatttttgttatgcagttttacagtactatcgatcaaatattggattggcatgtgaaaatgaaattgaggacagtaatgacattattacatttatatatactgtcactcatggtataaatattggataaatttatttgattgtgtaatgtattataatattactgtactggatggtggatatatatggagtaaataaattttttgttcagttaaattggatgtttaaattcactcgttaggagtaaacaccattgttgacattattgcgcgcggacccaggccaggcacaaacgtcccaagctagccgcttttcaatcggtcacagccgagctctgcctattggatttaaatcaaatatggcaaccaatgagagactaatctcttcatcaggcttacaattattcacactcgatgaccattaacctataggaaaattagattgaacatggtggcaccatgttctccacattcaacggccgtgattcatcttgaaaatgcttagtgggtccctgagctgttgacggttaaagattaattaaagtcctttctacgtgggcatattgatgattgtggagtggctccacttcatcgcttttattcaaccgtcggtgacacctcatcactcacttcattataaaatcaaaataattatttcacgtagcattctctcattcctccctcgcactaactccatctttaattggttaaaatcaaagaaaacttactgtttttcacattatcatcttgttgaaccctcaaggctcaaactaattatattgtgttttcctt

SEQ ID NO: 4956 - DNA, 1180 bp, Cannabis sativa
tttgaggaccaaaatgttgatgatcatgacccagaatggcctgatatggaggaagatgacaatcagagtggcatgggaggagtaggtttggattatgatggaatcaactctgaggaacctgaattggaggatatgctttctgattgaataaacaattttaggttaatccaatgtatagattgattctcccttcactaaccttctgatctgattttggcatcctgtatagaagagtatgggggaaaagtttttgctcttgttttatattgtagtcacttgtgattggaaatagagtctgagtaaaagagagtcacttgttgatcgagcggttcaaaattggtgaacaaatataatcaccatttgggaggatgatgttagagaattgtggacacttcatactaactatttgttattgctgattaatttttaggcagaatctcttatgtcttccaatacacatcacctaaatctatgtcaagtatgcgaaagtcactaatttcatttgagaatttgagctaataagcatacaaacaaaatccgattcaacttgttttttctaatctgatgttaaaatttaatctaatctaattattaattgaattaaattaatttttaattcgatattcaattatatacttatttttcatattaatttaaaaatataaagaaaaaatatgtaaaaattaaacccaatcaaaaaagaagggaaaggccctacaggggagtcaaatattataagtttaatgtaattaaaaatttaaaataataagtaataaaatagatcaaaacatatggaattaaataataaaaatataattaaaatatatccatttattttttttaatatttttattatatataaataaatacaagcaatcttttagtataaataaatatagttgaatttgattggtttttaattaaattttaagattaacatccaatctaatccaattaaaacatccactttaatgaattgtagttggatatttaattttttgtatttaattagttcggttcaaatagattaaatagattagatgttagctaagatcatatatgtgtttgtaatctatcaccattaagaaaacagtttgtctctaattaatgtagtagtttcaaatatttttaaaagagtacaaatgactattgtaaagtgttgtcttttgaagagtataaa

SEQ ID NO: 4957 - DNA, 1304 bp, Cannabis sativa
aattttaacgaaagcccatttgattacaagccaaaaacaccatagccatacagataaatgttgtcattacgattctctaactttataatggcaaatgggtatgcaagaaaatgacaaaagaggaaggaatcagtcgataaaataaatcttaatccataatcgaatatagctaaaatgaagaaaacgagggaattaaactgaaacgttaaaacaaaagcaagtaagtaagagccagcatccgcgttagtgggagtgagtcagagaccgtgttcttcatgactcggattttgtaccccacgcgccatattgtgtttggagttttatattagaaaattgttatctaattctcttgtttagatataaagcataagttttaattggaaggcatatacttgcatcaaaataacaatatttttcatataaagaaagaaaaatgatatggtcatgagtcatttacctgtcaagttcattaattattaaaagaaaaatatttatttattatattagtgcaagtacaatctgaaattagtggtgcctaattcgatattggtatattggtgtaaagtatttcacttttaaaattgctagaggcactataataattagtaaggttttattaatgattatcagttattgataataattattaaagtaaaataagtgagatttaatattaaattgcactaataatatatcttatcagagtgttaggtgtcttttttagcattttttggtctttttaatttaaaaattatcatttgacattttatagtgtttaatattatgatgtgatattttataatttgttagtaatttttttatattatttattaaattaaaatatataacatctaatattaaaatgtatcaataataatatattattttaataatatttatttttaattttaggagaggaaattcgaacttaaaatttcctcttttgagaagaaatatagattactaagccatgtggatgatcacattatttttattatgtttggcacttagtatttatattttaatcataagaaacaaaagaagaacaaagttttcaatttttctaagcttttagtttttatcaaatgttactatgatagaatatggtatatgctaaggttcatttgtgttatccaagaggaaaataagtttgttaatgattatcaaagaaatatgaggtttgagctctcgaaaactcctataagatacctaaatttacattataaaatgtatattctcgtaataaaggcattaacttataaaagtgatcactttctataaatgatgtgtaaacagaaaaatat

SEQ ID NO: 4958 - DNA, 2136 bp, Cannabis sativa
aataatggtgaatttcaaatgtatatacaataatttcttgaattgccttcttcctctcatgtaataaatttttaatcatggaaatggaacacactacaattgacaaaaataaaaaaaaaaattatgaaatggtatttatcaaacttaccgaggaaattatcaaaagaaatagaaatggcgtcgcccgggttcgaaccggagaccttcagtgtgttagactgacgtgataaccaactacaccacgacaccatttgatgattatcaagcttatatatttttaataaaaacaacaaaataaatgttagaaattcttattcaatctctcctcgggttttgataattctcccaatcctctctcgttgataatatagctcagtgggagtttttcttgtgtgagaaacaatggttaatgccggaaatttgaattctcttctcacaattcagagtactactactactaccaccactaccacagcttcttctttcttgttcttcccacacaaaactcacctgaaccatttcctttcaaactggaagaatccctcttcacctttttcaaatgggttgtgttatttctctacccatctgaagttttcatctgttaatggccggagacgaactgggtcgagactattttcatcgaagaagaagcagggtaagcaaggagtcgagttcttggaaatggaaggttttgatgatgatgatgatgatgatattgatattaatgatgaagaagaagaagatgatgatggaagcattatattgccattggagaagatgaacaagtggttggagaataagccacgtgggtttggtgttgagaaggtttatgatacttccattgaagataaattgcttgaggaattggagcaagctagagtggctcaggctgctaatttgaataagctcaagaaggatacaaacccaaattctgatttgaagaaagatgaagaacagaagaagaaaggtttgtttgttgattatttgtgttaaagtttcaatttttattctaatttctgaatttgtgtttctgggaatttttgtaggtaataatgagattcctccaaatggaattagagtgagggtttctaaccttcctaaaaagaagaatgttcatagagatttgagttctgcttttaagggggttcctggtatgatttgtataaatgctatggtttctggaaacaagaagactagagaccctatttgcaagggttttgcttttgttgatttcaagtctcaaggagatgctattaggttggtacattttgatattaccttatagagttttgcttctgaatttttgtccattgaaatttttttcttcaaactataaaaatcgttgcaattatctccttgcagttgcattctagtcatttatttaagcaatttgttaatggagcattataaagttgatttaggccagataaagaatctagacaacatataaatacataaatagcagtctcatgataaattataagagtatataggtgcatttttaaaactactgtcggtatgtttagtgctaatatactgaattttaggtagcttaaaaaatgagcagaatgtaactagaagggaataattgtaacgatttgcatagtttgggagaaatttttgtaacagagaaaagttcaagggacaaaactctacaaaggttatagttcaggggcaaaaattttatttactctaaattaaattacgcgaaatgagacccgatacttaattacatcaacgatatgatatatacaagtgttagacaccaatatttctccttaagagcattgctatttgctttatattgcataatgtgtgttactctttagtttagtggtttattggtgtaagaagatatttggttgttaatgtgtgaagagtggtgacttgttaataagagttatggctcactttaccaattaatgaaaattatatgaatatcttactctgactcaattctctctattctttatgtttccacttctatcttcttcttcttagttttatggagtaagccaacactcaaaattttgctattttgctattctttacattaagttttatatagattccagtactaaaccagtttttgaatgtgttttgtgtagtcattgatcataatggtgttcattttac

SEQ ID NO: 4959 - DNA, 1632 bp, Cannabis sativa
tgaacaatacatatacatacttaactattaatttatataaataaatcttaaatataactggtggagttgaaagtcaaaaagaacgtcaagcgaggaggagaaatgggccaacaaggagccatcgaccttgtttcgagcggagaacggacccagtaaatcacaaattgcacattttgaaggaagccattcatattccacagatttttcaacgatgatgtaagatatcgattttggcgggttatctgagatttcaatatatataagaaccctagtaaacttcaccttagatctcttttgagttactttatcactcataattggtttgcctatagtgctaactaaatcactgagattgttgtgaccccagaattgcaaactaagactattcaacctgatccaaacagggacagatcgaactatcttcacagaatccatgtccattactacaaattaaaagggaattttacttcgattttaaagtgacacatcaataatttttttcggtttgtgtaaccaacattattgtcatagacgcgaatattgatttttttgcttcaattttgaaccgacgctaaatgttttttttttgcttcagttatgaatcaaagcaaaaaaaaaaaaaaaatttacttcggttcataaccgaagcaacgaaaaacaagtgcaccgacactaattggtttcttgcttcagttatgaaccgaagtaaaagaatttaaaaaaaatcagaaccatcgcaccaccacaaccaccaccacactattatacatttcacaccaccacaatacttggtggctgtagatcgacgctaattgtgtatacatattttttttatattttatattttatcttttgctttagtttttgttttagcgtcagatagataaccgacataaattgataattatttgtgtcagtgaataactgaagcaaaaaagtgtaggttgacttttgcaccggtcaacaagtttgaccagacgcgttgaccgacataaaaattcctttttgtagtagtggtccgaagtccacagatggaggatagccaactatttatcaaaataaatcactcgagtctctaaaacaagatcctagtagtttcatcacgaaaactaactaaggtaaaaccgaagtgcatacgcactatccgaccaacccccaagtttttctaaattcttttcacaaagccctcaaaaactctgaaatgtggattagcacccaaaactatgcaaacaatagagattcgtcacaaagagatttcaacatcaacctcatcaagatcaattttagcaacaaattaatcccatattttcataggttcagagtaataaagcctagttgaaggagctctcacttggctagctttgaacttgctccaagtatctttagcagaatattgatagtcctccttttcaacctccttagcccaatttgacgtcctaataagacctagagaagcaccaccggttggacaactcactttatcacacgaaatctcagcctctagctcatcacaggggttaagaaataatctcattatatatgaatttgctaccatgtcttggatcaaagggagatcaatctgattcagagcctcatcttcttcggtgaccactaccgtcggctttggaatct

SEQ ID NO: 4960 - DNA, 2176 bp, Cannabis sativa
agcaccacaaataaagttttaaaaaaattttgggtacccatcgggcctacatcgggcccatcggacccggtgccacaaattaaccagaaactatttctttggtacatatcaagccacaatcgggcccacatcgggcccatcggacccggtgccacaaattaacaaaaaaactgttttttgggtacccatcgggcccatcggacccgatgccacaaattaacccgaactctattttttgggtgccaatcgggcctttgtcccttccagcccaatttttacagtgcattggaccaccatcggtccggcatcggaccccatcggaccagacaaaaaaaatgcaaaaaccaggaaaaatgcagtattcacatacaacaaacattttcacacaaaaatagtaaaataacagcaataatccacaaatcaagcatcaaaataatattctaaactaaatataacaacaacaaacaagataaaaaaaatttattacccattgatgctttgtatatgagagcttgtaatgttgaaggttgtagttgtagtgttgtagtttagtgtagcaactagtagtgttgcaaatgagtgaagagaagaaaaaaaaaattatggtggtagtggagtggagagctcggctggtggtggtggagtggagagatcggctgagatacaaaatgggaagagaggagagagagggatgtttgtattgggagggtaaaattgagtttttagaaaaattatcccatttcacaaatttcttaaaattttgatttagtggacaaattttaatccatattaagcatgaatattcaaatttccttaacaatattaatatataaaaataacaatattaccatataaaaagatggtaagaacatagtcatagctgatgcacaaatcaaaaaaacgaatcatatcaaatgagaatcgtcataaacttaatgaacccaagcttttggttctggagccttctagcaagtatgcagttcttcctttttcctactgtgaattcggtccctctaatgggggaaatcgtccaccctttgatgttaagtggtgatttaatttgttttaatccctttggctgttcaatcccttctgtttctctctctttatcaagcatttattgctctgggggttattattacctttcttcccatctcattaatcctcttcagaacattaattgcttcagctctccattttcgtcatccctctctcttctccatcatctttttttgtcttcgcctcatttaatccagatttctcaaatcttaactctgagaaatacccttaaagattgtaatatggaggcgggcgactgggttcccgaagctcttcagtttctcttcatcattgtggctccaagatatgtgactagggaagtgactagggcagcgttgaagaaaatccttcgtggattatggttttttcaatatatatccaaactcaggtatcatttctttcatctttttgtgttaatctttcctttagttgtccctgtctctgaagtgttttcttttgcaaatatggatgaatttttaaacactgtttctagtgctttagctctccctcctgatgagtccactgtctttacttatgaggttgcttcgtctagttcttctcatgctcctgttagtcttatccttaagcttcacactattaggccttataatcgtctttccctgatgaaaccctttttggtatgtggtcatcgcaatgtcgattcccggttgttgtctctgaacatgcagatggtatgttcttggtcacttttggttgtgagggtgataagggtagagtgttagatggtcagccctggcattttgctcagagcataactatttttgctgctcgagatagctcctttcctcttacccctgataatttacactatgttcctttttgggttcaagtgtatggaatcccttttatgtgtaagtctcatgatctagccaggttcattgccatggaagtgggtgaccttatcgagattgataagaacaccattaaggagggaactggcccctatatgcgtctctgtatccttctggatgttagcttgtccataaggaggggagtgaatatcaaattcattcgtatgggaagagagttcatcaaatggctggactttaaatatgaaagatttccagatttttgtttttctgtgggaagttagatc

SEQ ID NO: 4961 - DNA, 1087 bp, Cannabis sativa
accgagtataggcggatattatggctagtagtactgtcatacgaacgttctagactcagtatgcgtgggacacgggataagattgttatgttatgattatacttttcttacagagtctgtcaactcacaatcattacgtgtatgtgcaggtaaaagttagcactgaactgagatgagtctaaagttaagggtgaagattgtacatatcaagacagttagacctgaagcgttcagggtcttcgggacagtttaggctcacttttaatagttgttagctgacgacttttgtagtactaatattttccaaacttatgtaacttttaggataggattctatgtaatttattatatatatatatttaagattaaagtttaattatgaaaaatttaattattcacgtttttcaataaaccttttgattagcaaaggagtgcactgtaaattaaaatcacaataacgtgcttaatctagtaggacgttacaattactatataaatttataaataaatttagatgattatcgttagtttaattattgttcttatataaatttttaaaaattttaaaaattaatgcaagggaaaaaaggcagaaaatatgcattttcctttattttttcaatgtaacgacggaaaaaaaaccatccatgaaaaatacatttttaaattgaaaattgtcacttgtactatatgtcacggttaaaatcgtcgcctttgcttgggtataggcgacggttataaatcgtgtcctgtactataggcgacagttttaaaatgacgcctatagtatagggcacgatttataattgtcgcattcacctatacccaagcataggcaacgattttaaacccccgggaaagtcagattggcgactatttcaaaccatcgcctattctgcccattttgcaatggtcgaataggtgatggttatagagactaacatgaatactttactcgactgttaaaactatcgagaaaaaccaatttttaagaagtgtcataaatcctacatatagtgtagaattcgtcttgcttaaccaataagattataacacttaaaaacaaatttggagctaaaacacaata

SEQ ID NO: 4962 - DNA, 863 bp, Cannabis sativa
agatatacaaaagcctatatttaatatatataaaggcattaaaatccaaccaaaccaacttttatatttatataataaattcattcccataattccttggattcagttattctaaaaatgaactattcttgacactatgttatattttaatttaagatgagtagtgtggagtgtttgtgttagtgaagtttgaatgattgtacttcactagttttgcaaaccaaacgcggttgcattatgtagttagtgtgctcaactacaagttgcatattctatattaattacaagaaaagcacaagttgctatttaatatattatatgtgtgtttgagtacattacataatgcaacatgtattagtagggatagaaattaggtaggtaataaacgagtaatgtgccttttaattctgtctccgtttcctatcatatttcttattttcgtctttgtcccgcttaatccatgataagtttagagtacaaaaatcttcattgagtatgaatacccattgaatactcattaaaattagaacaatttaataagaaaaaaaaataaagtaatgtaattcaaaataaaaactaaaaaataagatattgattgtacaatcaataaatattctacttattaaaaaaaatttattacagagtaaattagaaaagattaatagttaattttataagtataatcaataatataattagatgaaaattatatgaaaagtttggaaaatatatattaggtcgaatttagggtggatagtattacttccgattttaccctgcttgaggtatataaaattgcactctacccactctccgttactcattaaagtgtgtaatcattctgtactgcatgagtagatcgg

SEQ ID NO: 4963 - DNA, 1579 bp, Cannabis sativa
aagaactaaaagaatttagatatcaccaataataagactggataatttgttgcccttgttcaccaccattggagcttgtctgctaatcaaagagaaaacgaccgacatataagaactgactgaattcaaaggccagttagtctctctatatctatatttattctgttcaaactaagtgatccgcataacagtagcaaaagcctcaattttcagtactaatgggaaatttttagaagatgatgggaagcaaatcctcacacttagagcgcaccactaaataactttagaagcccaaatcgtattttcccaacacagaactgaataagggcagccaaaaagagcacgagtaatatatttcgtgtcctctccacaccggaaacatcttgaagagaccttgattatcctataatgaagcacatgagacactagaagaatattgtggacaaccttcataagaaattttttattttggatgggatatgaagctgccacattttcctccaccatttggccttaactgagctagaagtagaaatatcatgagaggcttctattatagcatggtaccccgacttaacactatactcaccatacaaagtgaaatgccacataatttggtcaacaatgtcacgaaaattgagaagaatgtcgaatttttgattacaatccacttctcaaaagatttgtttgagataatcaatattcaaatgcccatcagtggtgaaattctttacccgccataaagggccaagaacttctaggtttgtgaaaggatgaaacgtagacaaatgggggagccaagggtcatatgttggatgagtttgagactcatcaccaactctccatctaatgccaactccaacacctcctgctccaaagagtactacaccacacaaaggaaataccacctttactttccaaatgagagaatcaccattttaaaataattagctttgagcactctagccatgagacaagttgggtgagtcaaaagatatcacccttgttttgcaaccaaggcttgattaaatatttcaagattatgaaaacccaatccccttcatgtttaggcacacaaagatcttcctacttcttccaatgcatcttatgtttatcatctgttgaaccccaccaaaaagggccaccattgaacaggccaccatcgcttccatatcctgacacatgaatttaggtaacacaaatatactcatagcatacatagggatagaaagcgcagcaaccttgataaaaacttttttacccctagttgagagaagattacctttccactcttaaaagtttttttcaaacccgatctttaatatcctcaaacatcgccttcttctttctgccaatagtcaaaggaaatccaaggtactttgacatcgctgaacacacatacaaccccataacatccttaatgtcttgcttcacagcaacaggaacactaggactaaaattgatcagagattttccaaggttaacaaattgaccagaagccttctcataagtgcatagaacatacaacaaggcttgacattcaacaatagaagccttacaaaaaattacactatcattc

SEQ ID NO: 4964 - DNA, 1181 bp, Cannabis sativa
tcaacccactgccctacaattaactttgaacttctagttatcattgtgaatcataatgtactccttgcctgtgtctatgaaattctccttcagtgtaatccttaagattttgatgctaccaaactccgtgttcaactcaaacttaaaatcattattctttgttagggattgaactccaaatttgaggtatgagtaccatcttcatcatcactgtgaaaactgcataggtcatcacctgactctatcccatcattgtcatcatcctgaggatcaatatgaatgtcatttgcttggtttcaccatttacttggatctgatggtccaacatggttcctttcccctatactgttatactgttggattaaactcctcttccacaaattcaaagtcaccatcacctctggcttaggattctaaatttgtttggggttggagttaggattgaggttacaaatctattttagtttgtgtgtggggttggggttccatgtcaggttgtgtttcaggttcttgttcagattgtgtatgaagtaggggttccatgtcaaaatctatttcatgttctggtttagtttgtgtatggggtaggggttccatgtaaaaatctatttcaagttatggttgtgtttaaggctatgtgtgatgaattgcatctgccacatggggtacctggtgcatctgccataggtagtgtttggggttgtgattgaacctttctcatcctcctcaatctcaacctgaagggactgaggttcctggaatccaaccaccaaaaatattaaaaaatacagacaaaaccaccaaaaaaattaacccttatatacagacaaagtcacccaaaaaaatcagccatatacctcttcagataactatccattcaattctgtctccataactttaagatattgaggttccgtttctaatggtacctttcatggtttacaaagtgcaaccagaattaataaatattattttcaaacatatttgacatctttttctaaataaaattgaaaataacaaaaaatatttacactaaaattgtaacaaattcaaaaacatttacctcttcatttgtgagattagacgcatcaccactgtcatccaaaaaaaattgccattcctacactatgtttgatataatgaaaatgtggagggaaagaaagaatagtagggcgaggagt

SEQ ID NO: 4965 - DNA, 3034 bp, Cannabis sativa
aaaaaagagggtcaagctcatcgaaaaagccttttaaagtcaaattgatggaggagcttcttcgggtagcgaaagcgaaattcactgaggatgaattggagaatggagatttggctgctggaattgaagtggagctattatcacttggagcttctctgcaactgatttagaaaatgcaggaaatctgcaaagatttcttaaatttcttggatgtttcaaagagaggttcttaacaagtaaaagctggtaagactcccttaccccctattttgagatatgggaatgtaattcaaaacctgaatgtgaaatttagaatgaatgaggatggactgaataagaaaaaaaggaaatcgaaattgaattagaggacattgaagaggaaattgatttttggaattcctccttagtgtgctacgttctgggagctaatcctcccattgggtcttttgccggttttgcgagaaggatatggggagattaggttgataaagtaggtttgcttaatcatgggatgtttataattcactttcatgctctagaacacagagatcgtatcctggtagggggtacctttctttgataagaaatccattattatgaagcctttgaatgcatacatagactttaagaagaaaaatatcctcacagctcccacttaaattcaattgcatgggttggatatcaactattgggggaggaaagcactattcaaaatagttgcccagatcggggaattgctacaaattgaccaaataacctagtagaaggaaagattatcctatccttgagttctaattggggttaaattggatcaagagttccctgataagatttcatttacgaatgaattgcgtctgaagatggatgtggaagtgctttatgaatggatttcgattcaatgtgcaaattgccatgaaatttgccatatttcaatggattgcaaaaggaaagatagtcataagcaagatgggttccaaagaaaacaaataaggcacccaagaagaaagtggagatagatgaggatggatttcaagctataaaatcggtgaaaaatggcaagagaagtgtggaaaaggtcctatttataactaccattgagaatatttttcaagtgttagaggaagaaggggatgctcagagaaaaaggaagaggaggttaacaagggaagggggagcaccctacagctcatggatagaattatgagttggaatttcaagggaatcaacaaagtgaataagcaaatggagattaagaaattaatttcctcttttcaaatcaagttggttagtctttttaaaacgaaaataaaggcttcgaaattgggagttatttatgttacagtttttttgggttggtgtctctccacaagtaacatctagcatccacaagggagaattattataagttggaatccactaatgttttcagttaatattttcctttgtacaagccaaataatgcattcggatgtcgagtcaaggctagggaaagaaagttttttgtttacgtttatgtatgcacttaatgatgaggcatgcagagagctgctttggaaggatttgaagtctttggctattgaaactttaaaatcgtggctagtgttgggtgatttcaatgatacccttagtgttagaaaggtagtgggtgataaagtgaatattacaaggatgacaaccttcaaagattgtgttaatttttgtaatttagaagatgtgaggtcttcgggatgtttttttttttacttggaataacaagtaggagagtggagatagaatctactctaagctggatagaattatggctaatcaagaataattggatagatttccatcaaccgaggttgtttttcttgcaaagggccagtttgattactacccaacagttttgtctatctatctagagctaaaaataggggaaaaaccattcaagtactttagattttggcaaaatgctattgggtttactaaggtgctcacaaatagttgggaaacttatttcgcgaagactcccatgtatcagctgattagtaagttgaagaggttaaaaggggcattgaggcagtttaaaaagctaggaataggtgattgttatctcaagaatttgcctaactggcgtgacattagttggagtgacaggtggtgaagaatgcacgattggtcatcttttttaccacattatgcaaacacgttgcttggataatcatgttgcttaactaatcacattattcgatcagtagcatccagctgacttaattcggtaagattctattgctaagtattcacagggcaatagtctggtcaacctaccgactattaaggcttggttgagtgtattcaacatccacaaaattagcctccaaatccctaaataataggccataatagttccctacaatcaaggaattgaggaaataaatagctattattgaatattctataattaatactctatttgcttctggtaatagaccatcaacaagatgctattgcaaacttaagagtagtgatctgagagcccattaggaaagacatgatgtattccatgtgatggtgttcttggagtttcttcataccaccacaagtgcatccattgcaagtgtaattatgcctgtaatttgacagttcttcctagatttccttcaacttcgtaaaatacatgatgatggtttgattgtcttgctgcaaattcattagtcattttttgagattgtatatgtgtgggtcgttcctttgatgaaagagaactttcaaatttatctagataacaactgcagttttgtcataaagaatgctagcataattttttttagagacagagttaagaatctaagagatcataatattattattcctaatctaagcattgtaaaaattataatcagtaggaagaggtttaggaattgaaccgtccacgaacccaagcttattcttgacataaatcacaagttgcatagctcgattccacgaaagatagtattattagcctgttagaatatgagaaaccaaaatttttccaggattgtctccatagtag

SEQ ID NO: 4966 - DNA, 808 bp, Cannabis sativa
aatgagcaaagcaaacaacagtccaaaaagatccccaaaatcaaataatatcctcaaatctaaagacacaaaaatggcattattcaaaaagttcagcaagatccagcaaaaacccaattcagcaaaagcaaagatcaagtcataaaaattgaaactttcccaacaaaaatgaaaacccaaccttaggtttgagattagatccataatcaaacttccaatcgtgaccgtacggaaaagatggtgaagaactccttccaagcttgagacaatcggagtgagcagagtgagagacagctgagatgggagaagcttccatgccgggaaagagcttctcagagccaggtggggcccaatgggtggtgggatcggtgaccccaccacgccattggaggacgaaagctaaggcagcgagagtgagagggagaagggttagaagaaggagaagcttggaagtgaaggaatgggatgaagatgatgagaaagaagatgatgatggggtttgccggagtggggtgtggctgggcatggtggtggttgtggtcaggagagacaaacaaagctttgatctttagagagagaagaagatgaagaagaagaaaataccagattaaaggggtcttctttcttcactttctttcttggactctcaaatcaaagattttatttatttatttattttatttactacaagtacaagagactcctattataattttttaattaatttttgtgtaaaaacacacatattaaaatgtaaaatgtatttctttttaaattattttgatagtgatattccttatattttttt

SEQ ID NO: 4967 - DNA, 2009 bp, Cannabis sativa
attcgagagagaaaggttttttttgctcagaattcactaaataagaaaaatactaaaagtggtttattgggattttttgccctatttataagcagattagtgaaagggtgcaatcatttcgaatttcaagtgcctcaatttctccataaaagtaagtattgagaaattaaaagcaattaagtacctggagaagggtaactgtcaaaagcatgcaaatagttggcgcatctcgaggtacaatttaattagagcattaattagtcgaaaattgaaggaactcttggtcaggatcacatcagatcaccaataagcacatcagacacgtgccacccgttcagatacagtcttgagatgagtgaagtctacatgcgacatcggaagtcccgtacagacttgggggcaaatgttatcccattttttgcactataacatgacaacacatactggtgacacatggctcctatttcctatatcttattgaagggatattctaaacaaagctcagcatacatctgcacggatagagtctgcctgaccgaccagggcaagggtagacgatctgaacaatgtatcaagacttagaagttttgatacttgcattgtgaagcactaaagcaattcctataatctagggatcgtatcaaagggatatggcaagctgtctaaatctcccaatctatgtattctaaatatgtaatgtgtgttcttaccaattatagatattgtaagcaaaagggaaaccttccctcatgcatttagccctataaatagtaatccatcctcactgtaaaaaggggtctaaagaataacttcaaagagatctaagagaaaatactcagagatttcattgtgagagcttcaaaagtggaaacactgtattctttgtctatgagttaatacaatctaaggggagtaggcgattaccaaactaaaggggccgaacctctttaaaatcttgtgttctttattgtttactggttcttaccttatctcaattacatttcttatcgcttattaattgactcattgtcgttggctaaaagcgaggtcaacaatactctattccaacaacaaaaagaagaggtgaaattagatcacactatcttaaacccctcttggaatgaaaataccagtgcaaagcaccattaatacaaaaagagaaccaaagagtagtaacacaagtcataaccaccccgtggaaagcaccatcaatacttccaacatttctctaagaaaatcccaatcaagagtatcttaagctttctgaatatctatcatgaaaaggcaagccaacttagcacacattctatcataaccccaaaccattctgacaaatcatgatgttatgagcaatttttcctttcacaaatctactttggtttttcgatatgatgtgcgcctgaatatctctttatctattacaaattattttagtggctactttataaatcaccttatagcacgcaataggtctacagtcactaactaatttggaacacacaattttgggcagcaaagtctccgcggtagcattaatttctttgaggagctttcctatgttaagagaggataagataatttctttaaattccttaccagttatctcccaagtatctttaaagaatataattttataattatctggacctggagctttatcattaggaatggactttagggctgcttccacctctatactagtgtaatctcgaactagccaatctgcttgactttgactaatcaatgaagaaagaaagaaggaaaaataaacttatttatttattttaaatttaaattttatatgacattttcttaatttttaaataacttttattatttctataatacttaaataattaatattatgtagactactaaaaatctgtcacgcgtacataccattaagagggccttttaaatgaaataagaaatagcaaaacagaagggaggtttggaggtttctaccactaaaaaatcagtatgtaaggttatatgttacaaactgtata

SEQ ID NO: 4968 - DNA, 1061 bp, Cannabis sativa
aaaagaacatcatttgtcatgtaaataaataaagagataacaaccttacattcaaaaatttattcagtgtaagctcaagaaaaagaccaaagatctccttatcagttgagccaaaataaattggaaaaagaaataaagaaaagaataatacatatggatacattttttacaattggggtacactagcaatgcttctctaattataacagcacttttttgctgcagtgtataggatagggaatattttagctgtagcataatatataagggaaaaaaaggagacaaaatactaatgaaagtgatgtaatttgcttttggaggtctaatatggtacctcaaaatggtggaaaagtgaaaggcaaaaatgttgtatttgagttcgagctgatgaacaacttctgaaatcaatgaattgctgtcaaaaatagaatcaaattctgtatgttaaccagacaatgcagccgtttatttgcttaaaatgtctagttcaagtgtcttcagcgaaaattttgagtatgaactcgcgaaagcgccttgagtactgtttgggatcaacagccgaaatagatgttggatcatactgaatggacttgtaggcatgttcaagctttttgctaatgtcatagtcctgaagtatgtctatgacaccaaaaaacagtataacttcataatattctccagtgggttctcctataagctgaagttctaagtcattttttctcaatgtccgttcagctcttgctggcatgttcatacccaattttatactagcccacctgcaacacatccaaattgataatcatgatttcatggtaattaaattattattatatccatgaatagtaatctgtggagaaaactatatgcttcaacatcaaaagtccttcctgtaatagagataactactattctattatttcctgtcaaggaaatgaggttttaaatgattcaagttctccacttcatgtatcttaaaaaaagtgtattattcttcaagttgattttaataatcctaaaagttgcagctttatcaataaaagtaccttcctcttgaaccatat

SEQ ID NO: 4969 - DNA, 500 bp, Cannabis sativa
tttttgtggtgaatgcagaaaagtaaagacaatgaacaccacaatttacttggttttgatttgatctcatgtgaatagtcctactccaaggatcgacaaggcttgagaataatttcattatgtttttgaacaatgttgcacacttaaacacagatacacaaactagttttcatctcactcgagcgcatagctctacaattctctcaactcaccaactcgctcttagcttagttcacaaccaacttgtacaacaattagtctaacccttagttgatcagtctatgggtctacttataggctttggttggtgattgaataggaaggaataacaaaattagctaattaactttgttatcttgagtctcggacaactaaaacaattggccttagtgttttaactacttgttatcatgtcaacaatctgagtgtgtgtttgattagcttggaaaaataggaagcagacttcagaattctccacctcggttcctaatttctttaat

SEQ ID NO: 4970 - DNA, 777 bp, Cannabis sativa
atgatgcttagtcatgtagccatgccatgctgtatgttcattgtgcctactagtgtgctatctagtcatgatgatctgcagatttatatttatttttaatcaaatcatctcatctcctttagcgtcttaatgattttcattactttgttatgtatttgactaaatagtttaaatttatataaaataaatatttatatgcaggtggtatatgatgcaaacaaacttgcaaaaatggtcaagaagaagaagaaaatgcagaattggctcgtctactacactaataagttttcaagaaatgaatctttaaagcccacgactaaggtacttaatttcgtaaaagaaattaaaaagacatttgctatttaagtttattgtttaaccccaatatatccatgtgcgatttttctttcagactggttttcttgggctttggggaaaaaaagtggacgcaattgaattttacacatctgaaattgataaattgacaaaagaagtaagtattacttgttcacttgtctcttttcctaaggtcaagatgtttcctgataactttatttttcagattcatatgtgtatgtatgttttgtatacattttgtttggtactgaaaattgtaatgctagagacattttatacacacactgatgtgccatgtacccatgaaaatagttgatatatgaccggcatggattgtatttatatatatttatatatatatgattacaagtaaattagacttaaatgaatgtgaaatttttatcagatggctgaggaaag

SEQ ID NO: 4971 - DNA, 615 bp, Cannabis sativa
gttgttaaaatgcactactagtgcttaacatttttctcggtgtcataccactattagtgtaattatatcgagtcttaacttaagaaaatagcttttagacaatatcactaactaatcgtaagacgatacctatagaaggtattgtactggtacccaataacaatattctatattttagtcacaaataattttttattgagactgaaaattaaatttaattaaaaaaaattatattattactaaaaaattataactaaagtttattttgtattttttttagtgtaccaataagtacaaagtatttataagctttctttctaaatgaataaataccagatgcatgtaataaacattacggtgatattcttttttcttttatttggagagaaaatatttttttttatttaaacgtttatatattacattgcataatttaacactcaaacagcctccagtgttttggaggggaaagtagttaattagaaagacgttgagtaagaaattatatacgcgttcaagtcatattcattattcaatgtaagaaatgtttaataatacggtgtgacttatttgctaacgtgtcgtgtgctgctttttatatagagaaatataaaa

SEQ ID NO: 4972 - DNA, 1201 bp, Cannabis sativa
tagtcttgccacatatataatgtgatttaattttcaatactaattttatataaagtgttgctcaatataaatcatggcaaaatgaaattttctttctttctttttgttattattatttttttgttgagaaaaagttataacttttagaattgtcatatatatatataggaaccaaagtacgttttttttttcttttgaaccaaagtacttattatgaatgaggagcaaaatagatgaaagggagtgatgatcacctgactaggaattctcctaccatagaagacagaagtgtttagtgttgtgtcgttgaaagaagggtcggtgtggacataaatagagtaaaatccctcatgtccctggaaaaacctctcccacaaaggagccaacggcagtggacccttggtcaagaacatgaaagccacttttggaccaacatcctcgtaaggcagctcttcgatcatcggaaccatcgatgctctccaaaacaactcctcatctttcatctcatgcatcagatgatcaaccccaactttctcttctttattattattagtaatacaactagcgttcatggtcgtgggagatattaatggaggagccgatatcaaaggtggcaatattggtgataatggaggtggagagtctgtttgaggcaacttgaatgaataaatggaggcttgtgagttgaatgggaagctttgaaaacataagctgagaatgacacctaaagacagtccaataccaaagaaaaggcaataaaagaaactattaaaccgtaaatgggaggagttgatgatcaaacgcttagagttggtggactgaagggaatggtcttcgtcgaccactcccatattgttaaaaaaaatgggggaggaaatgttatttgacttgctaatggctaagctaattaggttctaaacccaactttttgtagtggactttttttttattgtcttatttgtgaatgtgtaatataccatttatatatatagtggtcgtacctgggatttcccatattgattgaaaactacgcacagaaaagcaattagtcaaatatatatttaatagggatatataaccactgaggctacctagattataaattaaagctctattatacgtatcaaaatagttaaataatgtgtgatattgaccaaacattaggtcgttttgcttgtaatatgcatgcatatcgagcaag

SEQ ID NO: 4973 - DNA, 1327 bp, Cannabis sativa
ccccagccactttgatatcataattagccgacataacatcatcatcgagttccttgagtgcactcgagaatgattccaccgtggctttataggaagaagcacattgctcaagtacttcttgttgaccgctaccacttcccttcttaatttcgttgttgatgaaattgaggctccctttcgcgtttgatattgataattgaactgatatcttggcaagagctttgagacttgttgtggtttttgatcttggatcggattcaagagctgccaagcactttgtgttgtctagggtttctttgcaaattgtgtcaaccaagtttgatgatggtgatgatgtttgtgcttttgttgatgatgaaaataagaataggaaaaagaaaagggaaagtgttgttgagatttttagggtttgggaatccatttttaatgtgttgtgtagtttagaagtttattttgtatgtcatatgtttgagatatgtatttatagttgttggaatatgatgacaaagaatttgttgggtttgttttctttttttttgtcttttttgggtgtgtgtggatcagaatgagtaagttcagttttctttctagataagaaaataaaaatggtttagagaaaagggaaaaaaaatctttaaaaaaaattaataagggaattttcttttagaagaatttatattatggaattttgaaattatacatagcacgacttatataattttttgggatattggtggtaaaattatttgaaatttatattttttaacatttaactataaaaattaattttttggaagtaaaattacttaaactccaatttcgttttgcaatttatgtccgtccaaaaatctcagtttagtgtcacagtggactgcccacgtgtacacacttgtacacgtgacaaattttttgtggtccgcgtaatattaattattaaaatattataaaaaataatttaaattttattaaaaaaaatattttttttttatttttttcctttttttttctttttcttcttcttctttcttaagttttctaaaaccctaaacatctctttctctctctcaactctccctcccaggccctctttttctttctctcgtctcactgcttaggacctcatcggatcctcaccgaagcacccaagccctcactgaagcacccaagccctcactgaagctccctctttctcttgagccatataccctctttttctgtctctcgatcttttccttccgaaaccctctctttctctttctcatctcttttgtctctctttgtggtggtcaccggagccaaagctccacgtctctctctctctctctct

SEQ ID NO: 4974 - DNA, 996 bp, Cannabis sativa
aaaaattccctaaaccacacgcatgtcataagatgtaaggcacataaggtgtggcgccttgtaccaattctctttcaattatccttcatatgccaaaatttaatattctgctcttaactgaattacatacaacacaacatacatttactattcctgtgtttgtgtttcttctttacaatcctactttattttattcatacaaaaaaacaactttttccaagtttccatctctttggattttattcaaaatagaaaaagtagagaaaatgatcatgtgtgaaaatctataatggtctctcatttccatagctgtaacatttgaccaattccactatgtagaagatgaagattcaggcactgtgtctaccactcttacaggaatcactggaatcgaatcccaccattctttcaatcttctatttcctccttggttgtttccaaacttttgggttaattttgatgtcataatgaaacaatacaaaatcaatcccattattatatactttgttggtatcacagccactatcacacccaatccaattagagccaccatcaccatatccgcatgctgcaaccacaaaaaaaatctctaacattagacaattgtatcgaaccacatgcctgatcattagagctcataattagtgttagtttttacctttggggcctttgataagaagatggattgaattttcaacaatgctatgtttgcttcttgcactaaatcaaaaatcgataccaatttatgttgagctgttaccacactttccctcgtgctcgtgctcttatcagacgatttggaaactactatctcgttgcatctctccccgagcctgtttcgtctcgccttgatcatgtacgccaccacccaaaacaagaaaaccgctattcccttcccaacccactccctacattacccgaaaattgttatgttataaccaaatatttcatctctaataatcgaagtgcctacaaccaaattgtaaattaactcac

SEQ ID NO: 4975 - DNA, 960 bp, Cannabis sativa
tttttttttttttggttttaatacgatgtgaacccctagtgatgaatctccaaaaaatggcagcaactcttagtcttagtcttgtttgttgatgaataaatttatgtgattctgaatttctgagatctttagtttgttgataaatataatccctatgtttcgatttttttttttttttgaaactgaagtaatttacaaggttggtcttcttttgatttgtttatatgtagttgttgatttctttgattgaatgaaatttttgtttgagaattctcttaatcaaattatgttcttgatcttgtatgccatttatacgaatatctcttaattagtgaagcttctcagctgagatggagaactcttgttctcctaattcatggatggtttccttttcttcataccctaaaacccataactctcaggtctatagaggacaatgacaaacttgttcactttataattaagttaacaaaccttctatgcacatatttggttaatagagaaagacccttttcattgtttggtatatatgttggcctcaagaatggataatccaactggaattccaattttctcgaggaagtgaatgatatttcctaaaattctactttcatcagttgttaaatatatcagcattgttattattattattattatctttaatttttcagtgttagattatagtgagacaaacaaacgttaatctttctatctaaccattaacattttattgattgtacagtgtactctcagatcattttcttctatatacttctgcagtatattcttactgttgactgatcaaacatcaaataagttttttccccccttaattattacctgatttgtttatgttttcctaatgagaactaaaacgaggatgggattattctatcatatttaattttgatcgtcatattaggtgtgtttcttgcttattgagaatatttctcttaaaga

SEQ ID NO: 4976 - DNA, 770 bp, Cannabis sativa
tctctctctctctctctcaacccattttcgacaaccaacgaccccaaatggagcacaagtttgagatcgtcgacccccaaatatttcatgatgtaaatgtctgtccacctcatctactctcttcttgatcttcgtattcttttatgttttttattttttattttttatgtagatcttgggttctctctcttcactgaatctttgagctttttttaattgtctacagatttatggttgttttgtatatattgggggctcgcaaatggccaagcttgcgtcggagtttagaatcacggttggtcggagttgtagatcgaactcgaccaactctaaatttgttaatctgatatttgaaattatgtgtttagatattttaattttttgcgtctatttcatgaacttttgtttgttttagaactgtgttattctggtttgattttggtagatctaagcaggtgtgagctcatgtagctcaagtctggattttttttaatgtgatagtttaaaattgtcgacaataatggcttactattgttgacagtttgaacagctgtcaattcctttgccgactgttctaaaccattaggtacagtgctagttattgccaacaactttaaacaatcgagacatatgcatgcctcgcgatttttttaccaatgcctattctacctagttttgtgacggtcaaataggtgtcgatcatagagactgacggcaaatccgtaccctgatcgtttttagcagtcataaaattctctctctctctctct

SEQ ID NO: 4977 - DNA, 765 bp, Cannabis sativa
tttttttttgggtgtatttatgaaataattgcaaagtctttgagagtgggagtgcgtaattggggatttacccttatcctattattccttcttaactgaacagttttgtttactgaggctgagctactgcggagaatggaggcaactgctcttaaagcccgtggaatagcaatagcagcagcagcagctcccttatactctctttgccatttccgcactacagtatcaccgtccctgcttcgctctcttacttccaaccctccacgctttcacctctcttgttcttctcctcctctgtgctctctcggtacaaatctctgctctctctctctatatatacacacatatatgtttgtttgtgtgtacttaacaataaaatacaatgcttgttttgttggaacaggtagaggaagaactgagactactctgcctcatggagtagaggataatctcacctctgaggtctcccactataacattcttcaagtggttcttgtttctcctcaggtttaatcccagaataactcttttctttttttagcatttgttttcccagccgtagtaatcttcgcactagggtaaaaaaagtaagtttccaggttgccttaattttatattaaaccttaaaatgtctgaattatgtgaaactaaagcttaagaatctgtgacagttttattatttcccttaaaatgtgtgaattcatctttaggtactgtactcacattgaacctacaacatagatgtagtatttaccttaagatttt

SEQ ID NO: 4978 - DNA, 1040 bp, Cannabis sativa
ataataatactatttgaatagctaataaaaacaaatcaaacattcatatataaatatttataaataaatacgtatataaataataaatacgaataataaaaaatattaaaaatacttcatcatatttatataacaacaaaaataaaaattaataataatgagaaataactgaaaatcgttattaattaagaaataaattaaattaaaagtattaataaaactgaaaataaaattgaaaacaaatcccaataagtaatcaaaaacgttgacaattgattatctcttgctataaaaataaataaatatggtaagaataaataatataattaatatggtaataatttcactaacaagttaataaattagctgttaaaacaatcaaaatcaaactaaattatagaaatatatataatcaactatcataaactagaaaataaattaaaattagcgtaaaatacgcaagtatatattgtagtgatagagccgagtcatgcgccatcactggagcatagtccacccacctaaccgatcgaggaaggaaatatacatatcatatacattgaaacttgaagaaaacagcaaaggctgcaatgcaatctctctttctattaatccaaaatgttaattaataatcaattaattagaacgtccatatttgaagatccaacgtactaaacaaatttaaataaataaataaataaataactacaccctttggtaaaatatatcgtagtcttcttgattgtgctcgtaatttgagtctgcttcggtttcagtggttgaggcctcgggactctcttgtcattttgttcgcacttgaagagcgagacacatgttttgccttcgatattcaataccttttgcatatcggtcaccctggtctccaacttctgctttctttgtacaatactattgtattggtattattggtatcgcctcacaacttgttgtgtacgccatatacgttggttgatccatggccgccgctctaagcctcgcccaaatcactccctacatttcccacagattaagcatcgatg

SEQ ID NO: 4979 - DNA, 1240 bp, Cannabis sativa
tcaatatgtgcattgttttgttaaattggttggtcaatcaaatgctataagtcttacttttgtttatgggttcaacacaatggaggaaagaaaagggttatgggatgggttgattaatgttaagttgtctgccaagccgtggttgattacaggggacttcaattctctctttgagttggaagataggaaaggaggtaatgtggttaccatgaatgatataagggatgctaatgtgtggcttacgcaaagtcatatggacagactcattaagatagggtcgggttacacttggactaaccaccaggatgggagtaaaagaatttattccaagatagaccatacgtttgtgaatgaggactggacagatgtgttcccaaggactaaagctcactatagctgggagactatctctgatcactgtttgtgtgttatctcgatggtggaaaatgaagaaattggattcaaacctttcaggtattacaatttttgggctgagcattcggagttcaaagaggtggtgcttgaaagttggcaaaagccgatgagaggtgagggaatgacatgcctttatctgaagcttatgcgattaaagcatgcaataaagaagtttaatagaggaaccattggggatattgggaagaagtatcatgaagctagagataattacttagaagctagattgcaagctcaaacacatgctttagacccaatttaccaacaagttgagaaggagactgccacagctttcaataaccaagagaagatgtatcatagtttcttgagacaaagaagtaaagtcacttggttgtgtaaaggggatgagaacaatgctttttttcatgcctttttgaaaaaaagaaggatggaaaatagcattgtgtcttacacaaatgagcaaggggagatagtagatgacttcaaagaggtggcaaggcatttcatcaagcattttcaaggttatatggggacaagctctcagcctactcaaaagctaataacaaactgcatggaagtggggagcgtccttactatggagcaacgactaaacatgataagaccctttactagtaaggaaatcaagaaggttttattcagtatcccagactcgaaatcccctggacccgatgggtttggagctgggttctttaagaagatgtggccagaattgggcatcaagttcactaaggctgtggggaattttttcacaacaggtttcttacctcaggagtttcatgccaca

SEQ ID NO: 4980 - DNA, 1120 bp, Cannabis sativa
  modified_base (800)..(804): a, c, t, g, unknown or other
tcatatatgaaaaataaaccaaaaataaaaacattgacatgagaagaaaattgcgataaaacaaaattcactttgcagtagtacaatcaaagcaaacagaagttctattctgattccgtcacaagattaagttacatacaataatttattttaagccgataaataaacagaacattttgcaagagctacttacctatatcgctttacagctggagttttattcccctgtatccaaactttgagcaaatattcataaaagctgcaaacaatatcttttgtcaataaaaacaaagaggtactgcacaggttagcaaattcagtacagagaagtttattagataaagggatctgaatgaaaattatgaaacattaatgaaatgattgcagtacctgtctcccatagcaccaaaggttattgtagagtacgcggttgtacctctatgtgggtcaagatcgatgggaactgaagcaaaccatcatctgggaatatttttttttttttctgtgttataacattctcaacctggaaaagtaacatggacataattcagctcactacaatcgcttggtccatggctgttaagatatccgaatccaaacatcccaatttttcgaaacatgtggggagtgcaaattttgatggtataagcgaatatttaatatcagttcaaatattaataagatttgttttattattattttattatatatgaataatattttattattttattaaataaaaataaaaaatctccataaatttctcataaactaataattttagttatataggcacactnnnnntaaaatagatatatatatatattagattatattcatttagaatttagaatttactttcaacccactaattatattgcatgttctaccacgatgtcatcttctcagtcgcatttttaggagaatgtagtttttttttttttttcttgaaactagagaatttagttatttattaatttattttttcacttcccattttcagtcgcatttggatttttttctttacaattttgaaagagaatcaatatatcaaaaaacaaagccaccacctaaaaaaccaaaagagaaacaagtaattcactacaccaaaaattagaat

SEQ ID NO: 4981 - DNA, 581 bp, Cannabis sativa
tcaaacataagtaaaataatcgaaagttcaaacattacagtcatccaaaatcaaaagtccaaaatataattcttgaaagtcatttaaaattgtccatagtgattaaaaacataaaataaaattgatcagataatcataaaccatcattcaacatccatcttcatttcttttggtggggatcccttgaccttagatttatcatcatatgaaagaatataaattaataactataataaaagaaaaaattatattcaatattcatcaaatatattatgttaccatcttcaagaaactcataagcttgaatttcattcaaatactccttagtttaaattccttcatgattccctttcaaccaactttgagtgtaaactagtgcctccaccattttaggactcaaagaacttctaaaaaagtctaaaatgcatccattagtactaaacgcagattcagaagccacaattgatacatgaatagcaaggatatccttacaatcaatgacatgattttaaacctactagcattatccttccacgtccaaagtaggatgttgaataaagaactcaatggattgataggtt

SEQ ID NO: 4982 - DNA, 612 bp, Cannabis sativa
ataaacaacagagtttagaaatcatattttgactttatcaaattgcgtggttcacatgtttatttacacaattatatgtttaatatataacttatattaaatcactacaaaaatttgggttttagatgcgacaaatatcacttctaatagtactggaagtcacacctaataattattagagcgacatgtcacccttaaaagtttgcacctaaacatattattaggggcaacaaaagcaatcactcctaattaggggcgactaaagtacttttcaaatcataattttgacttttaagtcgtctttaatgtaattaatattaaaataaaaaacaataacttatatggttattatttcttttcttatatattattttatattttaacttgatatattttttttaattaaatcaaatctagaattgattatttttatttatgaatatttatcttttgattgtaacataaaataattaataaattttatatacaagtatatgtattatttatatttatatattttttattatcatgtttgccaaagggaacaaacaaaataatacattctttttattattaggagcccattttttttttttttttaaaaaaaaaaaa

SEQ ID NO: 4983 - DNA, 862 bp, Cannabis sativa
catgggacgattattcccttttattacatatttcgtcgtttcctttggagtttaccttctttgacagttggtcacgtgcatggatacacgtgctcataagatgtttgcaagataattattaccaattatatatattcacatcaactactgtaactttctccttgtaaaactaccagtccagaaaaaaagactaggacaaaagaatctacgtttaaccatatgggaaacggtcgattgtttcaaacatgtatattgcattaattattattattattttttgttgaagaaatggcattaattaattaatatagtagtttaacagcgttttcattaatggaaatgccttgaaataacaatcaccaaaccgtttatctgttcatcacaacatatatgccaatctcatataaaattatgaatgaaaacgagaactgtaatatatttaacaataatatagtacgtagccttttgtttgatttaatcatcatcatataatttttaaaattagtcatcagctgcttactttttgagatacgatgcttcaaaatcaaactgttaacaaatatatttgcacataaatgtgtgtatatatatatacgagcgaacaattatttatatatacgtacgtttattttattttttacacgatccaacttttacacttataatgatgatcaaataattgattgcactgatactgtaaacttttcatgtgtcacacatgtcaacagtaaaagtggcagaagtaaatagtaactacatgtgagactcaaaagagaaaaaaaacctaatagcttaaagttcaagaaacgaagaaaaaaaaaactcagaattgtaaacttgtttcattgacttcatatattta

SEQ ID NO: 4984 - DNA, 2554 bp, Cannabis sativa
aataaaaatagtgtcaatattttggctaatattgccctcaaacatcaatatttcataaaaaactaaagaaaacatattaagtaaatgtaaaagaattaagcaatttggtctgatttgagctgctggcaaaaattctaaaaccatgactgtactagagaattataagttattgttcggattaacaaaaccattaacactggattcatttgtttcgatctgaaatggttttagtctggattggttggggtttggtatggattgtatgaacaaccccgtatgtggcagccttacattatggagacttggccaatgaagttgttcatgtttgttgttaaggtgtaaaatgtattcataaacaactctaattggaattacctttgattggtatcatgcaggagaaatgttggttggaccagcaaaagcatttttcatggatgaaatatcaacaggattggacagttcaacaacctttcagattgtcaagttcatgaggcaaatggttcatattatggatgttacaatggtcatctctctgctgcagcctgcacccgaaacatatgatcttttcgatgacattatccttctttctgaaggtaaaatcgtataccaagggcctcgtgataatgttctcgaattcttcgagtatatgggattcaaatgccctgataggaaaggagttgctgactttctacaagaagttacttccaaaaaggaccaagaacagtactggtttagaaagaaccgaccttaccaatacatctcggttattgaattcgccagtgccttcaacaccttccatgttggtctaaggctctcagaggatttgagaattccatatgataaaaactcaactcatcctgctgcactagtgaaagaaaaatatggtatttccaataaggaactcttcaaggccgggttttcaagggaatggatgttgatgaagcgaaactcttttatctatattttcaagactactcaaatcacaatcatggctataattgctctgactgtgttcttaagaacagaaatgaaaaccggtcgtgtagaagatggagcaaagttttggggagcactgttttttagtcttattaatgtcatgtttaatgggatggctgagcttgccatgacagttttccgacttcctgtgttctataaacaaagggattcattgttttaccctgcttgggcatttgcattgccaatttgggttctgaggattcccatttcatttttggaatcaggcatttggatcattcttacatactatacaattggttttgcaccttctgctacaaggtaaaggcgaaaatctcaacataactctcattgaaacataattgaatgagaattctcatcatttgattgtttttcttcaatatttacaggttctttaaacagttcttggcctttttcggtgtccatcagatggcactttccttgtttcgtttcattgcaggcctcggaagaactgaggttgttgcaaacacaattggatctttttcattactattggtgtttgttcttggtggttacattgttgccaaaggttagaattttctttccattgtaaaaatatttcatcattgaatacattgattttcattaaggaaactacttttttttttttcttggtgtatagatgacattaagccatggatgatttggggctactatgtttctcctatgatgtatggacaaaatgcaattgccattaatgaatttcttgacaaaagatggagtgcagtaagttcccaaatctctcctcaaaattcttagtgttgattttgttttcgaaatccttaggcgttgtttggtatgatgcaatgttttcataggaatgacaatatttcacattcccatgtttggtatgagtttccatataatcatattcttagctttaatattcttattaatcagattattttgaactcctcataccaaacgtccccttatagttttctctccatttaagataacttgggttttttcatctcttttacagcctagtggaaactccacagttgggaaagtccttttagatcaaagaggccttttcaaggaagaatattggtattggatttgtattggagcactcattggattttctcttctattcaatggactctttattgcagcattgacctatttaagccgtaagaagatcatcacttttttcttatttccaaatgattatttcaaatcattcaacttttgacatacttgttttcttttgattcaattacagcttttggtgatactaaaactctcattattgatgatgaatccgaaaagaaaacaaggcgaaaattgacatccaatgcagaaggttagctaactaatctcgaaattctattgtatttctctacaaagttatttttcataactgattttcaataaaaacttataggtattgatatgcaagtgaggaacaatcatggtattgaaaatgctgcaaataatcgagtcaatcggggaatggttttacctttccaacctctttcacttgctttcaaccatgtcaactactatgttgacatgcctaatgtaagccaaa

SEQ ID NO: 4985 - DNA, 1159 bp, Cannabis sativa
taaaagattcttacttgatcaaggtattcattttcaaagtccctgtcctcatactcatgagcaaaatggtcatgctgaacgaaaatatcgccatatcaatgaaactggcctcactctattggctaatgctgatcttgatttatcctattggtggcatgcatttagttgtgtgtcttcactattaacaagcttcctacaagggctttgaatttttccactccatatgaagcattgtttcacagcaggcctgaatacaacatcctcaaaccatttggatgtgcttgcttttcacacctcagaccatacaacaagcacaaattagacttcaaaacatatcaatacatttttctaggctattcttctcatcataaaggatacatatttgaaaattttgaaggtagaatatatattgcacgaaatgtggtgttcaatgaagacttttatcctcataaagttgccacagcctcttcctcagcagcacaaaaacaggtatcattttctgccaatcctttattttcctgttcttcattgttttctactcagcacaacacatttcctaaccataattttacctctggtacttcatgtaatgctaagtcaatacctactgtgtcaagacctgcatctattagaatgcagactgtgattgtagatgctcctgtttttggtgcaaatgttgataaccatgctatgatacaaccaaatactggtactttatatgaacaacaaccaagtgttgtccctttatctgacttagaacatgttgctccattacctgaacaaaacacaactggtaacaagttatctaaaatgcaacaggctgctactttacccgaaccattaatacctactgcacctttgcctgaaccataaaataatccttatctcttacttgatactccacaaattaaaccatccatccatatcacatactacatccatagcaactgcaacattacctatgcttcagtctgatcctcaaattggcccacctactgatactgcagcaccctcaacctccactcaaactaataccacaagactccatcccatgaaaaccaaatcacaaagtggtatacataaaccaaaagcttatatggccaccaaacatccccttcctgagtctctattacccactaagcccaagtcattaaaagct

SEQ ID NO: 4986 - DNA, 617 bp, Cannabis sativa
ctcccaaaagatcaaatataatccttctcatcaagatctcatgaagatatgtggtaagatttgaatctttgactaaagtaaagaaaaatacctttattgcataaaattgcttgatgtatattctacatatttttgaataatttaccatacaaaatataaagttttaatggtatgtttcatatgtgtatataatacggactatttaaattttattttaatatgaaaaattattttaaatttctccaaaagtttaaagaatatcctaaatatttactgtgtatatataataaaattataatactcaaatgtcgaaaatataaatgaatgttcaatacacttatttttcaaaggtacctcctataatttccatttaattcttttttccttatcaagggaaatattattattagtttgagcaagataccaattcaatccaatattattattaggagatttgagatattgttaataattttttataacaattattaaattaaaatatgtaaaattacatcaatatactaactaacttatattggtgatagatactaagacataataattctcaacctcccacaagtatattatcattggtctaattaactaacaaatttcac

SEQ ID NO: 4987 - DNA, 512 bp, Cannabis sativa
tatagtctcaaagtcaagcacaaaatctgagtatagagccttagcgcatgttgcatatgagatgatcactttgatagaatcactactaagagagttcaaataaaaaaaaaaaaaaaacaataacctagtgtgacaacctcagtatcagtgcacttgcatctaatcctatttatcatgccagacaaaatcgatgttcattttgttagagacaaggtgctcaagcaagaattagaaattagatatttctcaacttctaatcaagttacagattaccttacaaagtctttttttctctctctctctctctcactcactcaaggtttcaagttcttgtggacaaactcagtgtagatgtctcacccctttatttgagggtggtgttaagaacctacctatagtgtgactatttgctctgtagtaataatgattactactcatcattggattcaagaatatgcaaaagtgtgggagtgattgtatgaattctgttataaatttgttatgcattgttt

SEQ ID NO: 4988 - DNA, 734 bp, Cannabis sativa
atttttaaaaaaggtctaaagtgttcataagtaacctctaattttctatcaaaggaacacttttttagaaaacccaataatattcaaagctatttttattatgagtgggagttctatttttacacacattcttcacttatatattttatgagcagtgctaattacaacctcctattataaccttttagtcaatctctacgtccgaaatcacatgctaaaatatttttttcaaaattttttcatagcggtatttgttatagttacagtttcatctctgtagatttttgaaaaattccgaatagtttacaatatcgaaaacagagttccttatattctagtttactacgcgcgttcaaaaaactttaaacatattttcgacacggtaaactattcgttttttttaaaaaaatttacaggaatgatgttgtaagcataacgaatactcccgtgaaaaataattgaaaaaaaatatttcgacatgtgttttcgggtgtggaagttgactaagagattgtaacaggagattcacggtaacactcatatttcatatatgtatgtgttgtataatctattccctaattttattcttttattttcttatatagttaggtttatttaatctctttattaatctttgttaattattgtgtaatctctataacatatatactcacatgcatgtaacaaacaaaacacaaaattcaccatgcacaatcaaatagtacataatagtt

SEQ ID NO: 4989 - DNA, 502 bp, Cannabis sativa
ttttatgaactatgtcttttttttttttaacatcttcaccgagttcttgaaataatgtaaaacaacccaatacaaacatagaacaacataaaaataccgtacaaaaaatataaaaagcaccattccgtatttttgtaaaaatatacaaacaacatacaatttgtatttgttaaaaaaaattggtaaaaaaaataatataaaaagcaccattccgtatttttataacaaaaatgttacatccacaaaaacattaaaaaaaaaaaactctaaatccgtagctttataatatttttttgtcatttttgagtcttggaaaaaaaaatagataaaagaattacaaaaataaaaaaaaacaaaatcaaaccgttgaaagcacgtatttctccaattaatatgttatgctcttaagttcttaactaatggctagcaacatgcacactcattttaagagtaattatttcgttttgtccaacccaatattagaaagtgacaaatctaagat

SEQ ID NO: 4990 - DNA, 1288 bp, Cannabis sativa
agttttttgaaaactgaataattttagatcctaagaaagtaatgaaggtatgagtaatacaataataggtaaaagatttttacgtggttcaggtgttaattgttcttagtccatgagtctattttattaggcacttcgggcggagattgtttatacaaacacaaaatgatggacttttttcctaattctctatattcctcttgaagaataagaagcttagtatgaatattctggagttatcagtagggttacagtatgatgtgtttccttttgtgaagaagaggtctcaaatttttcagtgagaatacgaaggatgggtctggatcccttctcttgtgccctagttggaatatttataggccaattccacgacgcggatcgtcttgaatggatcttcatagggatgaacccccaccgttggattggtaggtggcacattttccaatgtcagatcgtactggctacaccggcggggctttggacgcgtgtcatctcagggttattctcatttgaatttctcccatccctacatgttggatcgcttagcacggtacgcaaggacaagtgtgctttgcatggtagtatggcgtgggagacaaactctgacatcgtacttggagaaaaggcgtgggcagtgggcccgtagcctggcatgtacggactgaactttcgcgagttgaaagcgtatcctgaattgacgcatcctggtggtaggcttgtacccctcgctagagcaaaaggttctgtcttttgaaatggagaacgtcagtggctcgcagacatctctatcgtggccttttcctgggaagacttctctcgtgggaacttgttccgcgagttttatgttgcttccttcccagagtgcaaagcagggcacttaggtggcttaatgactcctcgtccttcattaattagtgttcgcatgtcgttccggtgaaaatgcagataacagttctaatttccttccacataactttgaagaatccaaaactatacccaataggatcaggaattttaaccgatggaatgctaaacctaacctttttaacatctccccccatagtagatccttaatcgtaccacattgttgatctaaaacaattttattgccaaggtcaatacatcctggattaatatttgttattatcgaactttgactacccatacaacttttgaagtgatttagatagtgtgcaataatctctttgtaagagtcaacaaatctcccctgtttatcaatagaagaagtaacttttttctccactctcctctttttaagactagcaag

SEQ ID NO: 4991 - DNA, 1014 bp, Cannabis sativa
gtattgcttccctaaaacttacaatacttatagtagcaaaaaagaaatatttcaatgagaagtttgtaatgtaattgatcaaatgtaggtagaaggatcataaattaacaatttttgaagatgataaatgaggaaatgtatacaaattaaagtttatatgaaaagaaatgctatgggggatcaacaccatttaaaatattcgatagggtgtatcaatgcattatttactgtttcgacatataagaaaaaaaattaatttaattttcgtatacgttataattatttaagatatcttgtaaaattttaaataaataaaaataatttacactataaaatgtaaaatgtaatgttcaattaatttatgtaacacttttataaaataaaagaatctcgtgtgcaaaatctaaacaaaattttcgataaattattaatataatgtcgatatcttatcgacaaactcaagacattcaaaaaattaattaacagctactaaattatcgacatattatagataaaatattgattttctattgataaatattaaaaaaatttaaaaataattaagctaaaactatcaactactcattttatttttaatcaatattatatagacaacttatagataattcatcgataacactgaaaaagctaccataacacataaacagcttcataaactcaacttatctccaaaaaaaaatcacaaaaaattaaccaatttcaagaacatatataaattcacacattaatctatgaaaaagctacaatttttttttaagaaaaacttacttgggaggaacaatgagttgggtggcgatggtggttaagagaggccgagaaggaggaagagaaagaattgggtagatgagatttgagggttgttaggttgagttttgggtagatgaggaggttcggcagtggaggagaggaggttcggtggtggtggttggtggtcttggtacctgagtctaggtttggatttggatggtctcggtggagagagagagagagaga

SEQ ID NO: 4992 - DNA, 1250 bp, Cannabis sativa
aaacttcttttctgtcttctcagtttatatttcataagattcatgatctgttggaacagacagcttagttgttgcaataggagagtcgcttcagcaggtgtatcaataaacctattaatattttctttagaagaaaatttagaaaaatcccaggaatcatcaatgacaacattagcagactccattatagtttgggttctcatgttgtacacacgataagccctatgttagtggagtatccaataaaaataccctcataaattttggcatcaaacttaccaaaatgatctctatcttgcaaaatgaaacaagcacaaccaaagacatgaaaataagccacacttagttttttaccttcccaaatttcataagataagtacatggacaaagaaaaacacgattaatgatatgacaatcagtgttaattgcctcagcccataattgtgtggtaagtttcttgctattcagcatcactctagccatttcttgaaaggtgtgatttttcctttcaactactccatgttgttgaggagtttttagtgctgaaaaactcaagagaaatacccacagacttacaaaaatcatcatacacagagttttcaaattctttaccatgatcactttaaatgcacacaatcttaccactattgcaatcctttttaactttcaatttcaaacaaagagttttaaaagaattaaaggtacccgaattttctcttaagaaatctacccaggtaaatctagaaaaatcatccacaaaaacaaatgtatacctttttccatttagactctcaatttgaattggacccataagatccatatgaagcaattctaaaacttttaagtgtttatatgagaaaaacttttatgtatagtttttaattgctttccaagctgacaagacttgaacttaccatcagattctttacctggtttaggtacaccatgaacaatacctacatgtgacaactttttcaaagttttgaaattcaaatgaccaagttttgcatgccacacattagtattgttattcacaacagattgacacatgattgatggcaacatggtatagcaaatgtcattaaatctaaaaccttcaagcacattctcactgtttttgttcaaaacaaaacaattatctttatcaaagttaacaatgtaaccttgatcacatatttgacttatgcttagtaaattagctttatgtccttctacaagaagcagacttttgatcttaggtaacccttcaa

SEQ ID NO: 4993 - DNA, 687 bp, Cannabis sativa
aatcaccatggggaggtttcgggcggcttccaagcagctcgtattttttaatcccctcctcgacgaagtagatgcttgtgatcttcttgcaattgagaatgcagtttctcaaaagtgttttttttttttttgtaatgataaaaaaacgactcgaaaattgttatcaacgcgccaacaagaatatgttcttagtggaattgataattatatttggtattgtgttccatgtagtcattgatattatatttaatggttaggtactaaggaaatttcaaaaatataagataataagtattattaattattgttaaaaattaaattgttaaatatttatctctaattgagaattaaatttaattatttttatatgtcagtccaaattaccttattatataaataattatgaattttcgttgaccataaaataatttgtcttggtcttcatatttatatatagttaattaatagttaaaggtggttaaatgtgatacacactcgaattctctcactttccaactcatgaataagatcaaaaattctatcttaaaaattcaccatcccatattaatggcctataataagtttatatacctaataagattttgaattttgataatgataatgatgattacataaaaagattaattttcagatttaattaatacatgcaatattgaaccaggaaaa

SEQ ID NO: 4994 - DNA, 1706 bp, Cannabis sativa
tatagtttattctttgcgccattactgtggcctggtgactaaaatccataatccattacagtataatctgattttttttttttcttttcattctatgattagctctgtcataagtttgtaatcttgagatttattgggccatcgccaataccattcctaagtcctaatatgtaaattgtttagcttctgtcaaattcttaatttctattagacatagctattgtgaagtgacacgcttcctctgtatcttacatgcttcatgttcataatcataacatatgtgtatgtatatatgaaaatggacaactatatgtttctttaattcactaatttagtcgtgattttattttttgcagctgctgttctcacggaaatcattcaagaaaaccaaaactgcaaggaaatatataattgcatcatgggagccaaaagtcaatccatgaactatttcaacaaaatttgagaactatgaatcctggttgaagctctcgaatggcttcatccaaacaaggatttggtttatatcatatgtattaggtagccaggtcgaataaatgtgtacctattagtgtgttgtgttattagagtattaataaaagttgcttaagagatatttttggtctcgggacacttgtacaaatgcctcggtcgaagtggggctgtgttttggagggattgtatgtgtttgcagtgtgaactgacttggccaggactggagtaacgagttaaggcaacatctgtatgtattactcttttggcaaccattcttattagggtttcttaatctattattgaactcactttttgttttaagtattcttatttcgttattaaaagatctaccagtggtattgctgacatgttggccaaacgggctagattgtgaattgtaacccttcacagccaattatcagcctgagtaataatatcaatatcttttcaagcttaaaaagaaagatgggtaaaattacgacattagtgacgccccaatttatttataatttttaggcgctgttggtcaaatatagcataacagcatcaacaatagcatatactgcattaacaaaaagaaggcgaataagaaatcagtagtagttgatggatgaaagattacctctaaaatataataataataaatgaaaggcactttctttgtgtccctttgatgcatgcactaaaaaaactcagaatggattgaatttagtataacattgtaaattcaatgttacaatatttgacctgttcacttatgtgagctatatatacttctaattaatctcattttactcatgcatgtctatggcaaattattcatgtttgaatttatggacttaaatagttacaagcaaactactcgtttgaatttataacattaacagcttacactcgatactctgtatcaaactctcgtcttacatagtaacttattaaacgaatataatatttatattatttaaaaggtgcttcacaaggaccctcaatacaatccctaactgttttaatatctggaagaattttataatctaattttttttataatataattatttaaaaaaaatttaaatatattgataaattcaaaataaattacaatataaaatttaatatgcaaaaagtcttatttcacatctgtaatgaaaatatcaagcctaagacagactctctaaactttattttcagcatattaaatattttcagattttgca

SEQ ID NO: 4995 - DNA, 646 bp, Cannabis sativa
taaagaacataaatatttgatattacaaaagtttatctattctttaatacaaattggtacatcatttatttatacggttaagtttgtttgcaatatctctaagtgaaagtattttttaaaaaataaatagactattatataaaacaatgcaagtcattatacatcattaaatagcaaatagagagtatcttctaaaagagcatacttttctaatttataaacactaatatttgtaaatctaaaaatatgagagatctgtactcctaaaaaaattagccacttccgaatattagtaaaaatacaataaaaattagacattatatttaaagaagattgcaatccttttgctaccataagaaaattagtttcaatgaaatgtactagaagttgcaactcgactaaccattgaaggctgtaaaagatatacatagcctctaaaatttttggtttgaaacatccatcgaatggctttgacaaaactgccacaatcgtgccatcagagttgtgaagaatagccccaaaaccatattttcacttcattgtatctactgcaatgtcagtgataagcttcagttggcctaatggagggttcaaccaacttggttcataagtaccatgtctagtagtagttgtttgttgacactac

SEQ ID NO: 4996 - DNA, 3106 bp, Cannabis sativa
tgctacaatcaatttgaaaccacttctgcaaattgcatgtcaattttaaacagacaaaataattttgtagtagagaacctcagttttcttcaatatatcaccattgttttatctaccactacttatcatcttctaaaatgaatatctaaaggttattttggaaagtatgacacaacatattctaggaacacgtggattaacatccaataaagaagtaccaacagttctctatgaagataatgatgcctgcatcactcaacttaaaggttggtacattaaaagagagaactaaacacaatttaccaaaattcttcttcacacacaatcttcaagagaatggtaatatcaatgttcaaaaaattcgatcaagtgataattttgcagatttattcacagtaattactaacatcaacttttgagaaaatggttcgcaagattagaatgtatcaattgaaagatctcaataaatgctaaaataagataaagtaatttcatactacactattttttctttgattgagttttgtctcactgagttttttcggtgagatttttaataaggcagttattataacaatttaaagaggagtgttataaatattaataaatatataaatgttcaaattttttatttattactattaattataattaatatatattttttttaattttttaatttttgactctcgtatgtatataaacaagtgatcaccgtatgaaataagatactaagaaaattctcatttctttaaattataatattttataatacattatttattcccttgtgtgtgttgtgtttgtgtctaggcaattcaaaatgtagacatttcataaatctctgatataaacaagagatataatttatttattaagttaaaagagaatcacacaaagataaataaatttagttgatactaaaacaaaacaatgattaaaacttgaaaatagcagcaccacttgaaggcttggaggcaaaaacatagagaccaagatcattattattgatcactcctttttcaatcctagattggtagaaatgttcctgatacatacatccatacaaaagttaaattttttttttcttcaatacatatatatttacataaaacacacaagaactatttgaaaactttagtactaacctttaagttaagaatgaattgtgggacaatattctccttcaccaaagcaactgcacaacctccccatccagctcctgtaagccttgccccaagagcaccatatttacggcaaatgccaacaagttcttccaactctgggcaactataattacgaagaaaaaaaaaagttaattgataataataatagcaataaacactctttgatttgattttccagaactttgcctctagacaactagtagtactattagtacctgcactcgtattgaacactgcagctatggtggctctcgttcataagatcaccaagttctttcagtatgtcttcttcactgaaacaacaatttccatagaaatgttaatagaaaaaatggtaactaaaaattcatacactacttctcaatggctggtatatataatagtatttgctaatagaaaatagtatgatgtaccttaaatttgaatataccgtgtccttgaaagcatggactcgtttggcttcagtatacacatgagatgctctctaataaagaagttccttggagttagtttatttgaacttggaagagaatgaaaagacataccaataactggttacaaagatgtcatagggaacatatatatgttaaaaataacaaatttatttcattcacctgatgtaacttaaagtgtgttgccgcatttagcacatctaaagaagatggagaatctttaaaaattgacgaaagatttttctcagtaatttcttcaatttcttcagctgtataaggaacctctttcaaacattccttaaaatggaacaaaaaaattagataaggaaatcaaacaatatgagctcaatagtaccgcattgaacaaattagaaactacatatatcaccaataaatgacaaattcataataatggaagagcctatattcaatagtaccttgactgccaggacaggatctgatgaaccatggttaccagcaaacgccacacataatccttcaacatcagaaagggttttgacatttgagattgcctcttgtggtttcatccccagctttatcccaagcacaatctggaaagaagtgtcaaaaaaaaaaaaacagtatgaattcagatatatcttggaataaaaactatcttttactttggttatgaaacttacagcagctaaacggcattcaacaaccctgttattgtaatttgtagcagcagtaactgctttctgagattccgccaaagaatgggcgataacaaaggttccaccagctggcaattgcacatccgtagcacgaataggattgaaatcaataagctctgcaaacccacttttggccatgacagatatcgcctgtcaaatgacagatacagtcttaggtattgcatctaataatctcctaatacatggtctacaatctatcgtggctacagatataagtagcactaaggcaagaagctgagaatagatgcatcaaagaatcaaagcctcaaatggaaatattagttcacaatcatctcaaattcactatattttttcatttgataatagggtggcatgctttggcgcaatttaacatccaagtttcaacattttattttaatttcaggctaacatttgaattgaaatattgaatacaaattagacggttcaaaaaaataaactgaattgatacacagctattacacaataacttagcattcaataccaaatttccttttcatttcattattctatagtctagaccaaaccaccaaagtaaagtgatcactaaaactcaacaagaataggaagtaattacaacaattttatttcaacatactcgaccaaattttagggctaatgcaatccaattcattgtgcatatctgtggctatatatataaactacctgatccatcccaccagactgtgttccaatgtgtcgttcacattcacaagtaagttgtgcaatttctttctgtttaccaatg

SEQ ID NO: 4997 - DNA, 1261 bp, Cannabis sativa
  modified_base (733)..(733): a, c, t, g, unknown or other
ccaaaaaaaaaaaaaatatccaatcttttctttctttcatccattaacaatgggaaaattctttgatgggattatttcgttttctgacagtatgctataaatggggattgcccttatatttatatataaatttatttttgaaggaaatggttctcgataacgaattgttttgggtttgagtaaatgctttgttgttggttagaatttgtgtatttattcgtaatcttaaagatgatgatggtgatatatataatatatatgtggaagtggaagaaagaagaagagactctcggtcatcggttcttttctttggacatatgaatttattacagtccatcatataacatatatttagggctacacaatgtcatcatatatatacacgctttcatgtgaatcccatttgtactgtgtttaagtttttggataattctaatcttagtgttgatgaagtgtttggtaactttgagaaactctccaaataaaatctactttatggtgtttctaggcattttgaattgtaatcaacaatgttgtgttgttgattggagagataaattgtagttgtatcaaattttatccggtgttttaataggaggagcaaaataggcaatgtttcgttgaatagttagatgacttgtttagagaagttttgaatcaaaatggacaatgcttcattgaataactaccaactaatagcttgtttagagaagttgtgaacaattatggtttnttcatttgcatctcttcagcattgttgttagtatttgacatgtttctgtcgaaaccaacagcttttaaaaaaatattccgttaagtcacaaggaattgtgataggcatttaaaaatatattttggttcactgtttttgatattcaagtttatcagaggaagaacttgtcttgacattgaattatttgatttagttttgcctttctgctgtaggagttgattctcatcactccaaaagtttcaacagtcaatgtgatgaaaaatatgagtctcaactttccgaagtctatgtaatgttggaatcagacgattctctagcagaaaaaggtggagggaagacaaatccattggttggtaatcgatccagtactcctatggatcttgataaaggaatgaccattgccatagatatgagtgatgctgataatggggatacagctatggcaccttcaagagacattgatcttaatactgaagacttttgtagttttatgaatgaagatccattttttccatacaaaaatttgaa

SEQ ID NO: 4998 - DNA, 1206 bp, Cannabis sativa
ggtgcagttcaaacaacaccaggggcatttctaacttaccttgatctatggattcaatgatgagaataaaagagagcaaatgtggctagatttggaagaattgggcaagaacattaaggagccttggcttgtaatgggagactttaatgagatccttaatgttagtgagagggttggcaaaagagctgggaacaaaccatcacaacggtttagagattgcactgatcaatgtggtttaaatgatatgaaattttcaggtaatttctttacctggaacaacaaacagaagccggatgaaagggtattttctaagattgacagggctttggtgaacttggaatggatggagtcttttgtggattcagaagctgttttcctacctgaaggtatttttgatcacaaccctattcttgtatcaatataattggctaggagctttggcaaaaaccttttagatattttaatatgtggagtttggcaccagggtatgatgataaagtggctcaaagctggaatcagccgattatgggaactaaaatgtttagagtagtcactaaactgagaaggctgaagcaggtactaaaagatatcaataatgaggggttctcggacattcacaaagcagagatcttatcgagggaggcactagcagaggcacagaaagaactgagtactgatcctcttaatggggaaaaaatgaaaatagagcaagaggcaagcaggaattacatagaaattcacaaggcttattcgttattccttactcagaaggcaaaggtatcatggctcaaatatggagatgaaaactcagccttgtttcatgcttcaattaaagctagaaggaaccataataaaatcttttctattgaagatgagaaggggaattggtgtgatactgcagatcgggttcaacaagcatttcttgagtactatacaggcctactgggtagttctttggatcatagaaggaaagttaatcagagtatcatagatcttggtgctaagcttaatgaaagccacaaaaggatgtcgatcacggaatacacaccttcagaagtaaaggaggctctctttgctatccctggtaccaagtctcctggccctgatggatttgggagtggtttctttcaggataactggcaacttgtgggatctgaagtagaggaggcagtactctcatttctgaactcaggaaagattttaaag

SEQ ID NO: 4999 - DNA, 545 bp, Cannabis sativa
taaatttctaatatttattcattggtaatgagaattcttttcaaattgtacagagggttcatggcttccaagatcattgtttgttatcggtgtccatctgattatgtgcgttgaagacctagcgaagttcgcctctctttcagtggatgcacactcaccgtcatacttctcgcttgattcatgttgctcaattgacagcatatctgagatggtaagtaatgttttctctatgattgacattaattgttctttgccttgtcccaaaattcgctaaaatctgtcaaccatttcacattttcaggttgtagaggaagaggagaatcagtgcgtaaccttatccctttcccgcccaacaccgcaccctctcggttcttccttatcatcttatactggcaaaaaggtagaaacctcgtcaaacaaagaaaaaacaatatggaaactcaagtggttctcaaaagacaatatgttcaatttcgtatctttgttaaaggcgttacacgaaagaagcacaagctcatcgcctttgccagtaagatacatccctt

SEQ ID NO: 5000 - DNA, 926 bp, Cannabis sativa
ttgttacgcatatggttattattgcaaattaaatgtatattgatttaatttgccaaatcaaaaatctagaatattattgaggtaataagcttttttatttggtttgttaaaagtatggaatgtaatatttttgttttctttccttttattaggcacttggcattaattattcaaatctttcacggtcagctatatatccatttgtaattggaaaagaagctgctattaattcttcagttgtgtcaattgcagagtaagtgtcatcacaccatcaaaacatcaagaaatggttaaaaacatgtaactaattaattagatcaattgacatgttatggatgataacattaataaacatattatacatatatatatatgtcataatacacatttaacatattttaaaatgaaataaaaaacattattaaagaaaaagcatgaaataaagtaaaataacattatttacgaattaaaatatatatattatttatgtaataatatcatattttacgcacatagagtaacgttgtatttgtaaaagaatttattattaaataataaattatatactaaatgtgcagaaagtgttatagtggatctttggacataaagaaaatctctggaagtattgtagtttgtgttgatggtggagacccttcacgtttagacgttgtgcctttaataacaagcaaaggactaattatgtttacgggaaagactgtgctcggttctacatccacattcccatcagtacaagtaaacaacatcgcagactatgacattcttgtaaactactttcactctgccgcgtaagtatatatcttcaatctctattactcgctaactagtgttgaccataataacatgtgtcactctgtcatgggtctaaaacagttaaattgatattttaaattataaaattaatatat

SEQ ID NO: 5001 - DNA, 633 bp, Cannabis sativa
ggatatggcaaaagaggtaagtcaattatttttgcctattgtatgtcgaaaagagaatgtttgttttctcaatgaaaaagaatatattaattactcacgaaaatgcgataaaaatagtcagatataataatacgattaaaaattcacacaaaacaaatgagtttaattttttcttaaatgaatttgggctcctaacctaattattaaacattattagactcccttaacttgaaaataacacaatattaacctatgactaaaaatatatacatttgtattcattatgttcattacatgtaaaatgcattaaattagttaaataggtcataataattaacatgataaacttgtcatagacatatgttaataaattgataagtcaactatatttaattctacgatatagattgagttatttttattatttttgtcttgggattttgattagtatatattagtgtgttttagattttttttattatttattgttaatatttaatttaatatttttgtaataaaaaactcaaaaatgatacaagcagagatgaattaatttaatgatttttgcacaagtatttgtgatgattaatcatgatttattagttcgtacaaagataatatttgaaccgatga

SEQ ID NO: 5002 - DNA, 861 bp, Cannabis sativa
ggaactcaggtataaagttttctttctcgtaagtttatttggtcaataaaatgtaattgctatgtagatacttttctgctagactagcaaaatatagcaattactatgtaaatacttaggagagactcaaaattcagatcttataggagcaaccatttgagctaacttcctcttgagtataccaataatattattattaacttataaagctttatgttggcaatttgatttggaagctgaaactctattataccagccaaatgcaaaagttgaacgcttataagctgccaagcccatgagctgagcgtggatttgagctttttttgcaaccattagtctcatttcccatgttgctgttaaattagttattaatttttaattctctacttggctttgtcacagttggcactttatatcctagtagcaggcattctttgcatatacattaactacgattgtgataggcaaaggcaagagttccgcagaacaaatggcaaagctttggtttggggtaaagctccatcaaaggtatatggctctttgaaactcgtcatttgattctcgttatacatacaattttttgtgtatcttctgctaagtcctgtgcattgttctttcctttctatttcacagataactgcctcttacaccaccacaaccggggaaacaaaaagcagcattcttttaacttcaggatggtatgttttcaggctttctcatgtaaatatgacttaagtgaatgcggcttgagcatcctagcaatgtggacgatttgattttctgatagagggtgctttctttttcctacgagtcctttatctaatttgtgaaatggtgaaattctaatagaacaaagtttta

SEQ ID NO: 5003 - DNA, 1158 bp, Cannabis sativa
tttttttttttgaaaaagaaacctgtatccattaataaataacaaagaggacctagatacaaattacaattgtaaggatgagttcttccacaaagcctcctgatctaggcctaaagctttcttagctaaataatgggcagcttcatttgcccctcggtatatagctaataacagctttagggaaataagacagtaagcttttaatttcagttacaaatttgctaaggtggaggttatgtgtagcattattacaaatgtagtccactaaaactttacaatccgaaacaatggcatctggataaatggaatggttgtgacaccaaagaagagcaaagtataatgcatgtgcttccattagtaaagggggttgtagtccacaccaaggcattgccaaattcaaaagaacttctccctgatgtgtgtgtatagccataccaaagcccattctatttagttgaacatccttggcaacatcaaccgaaagccgaaggtgatagcttggaatggtgggatctttttccttggatagcaaacagacactctgtgcgtgattagaaccagaggccttcatattacagctttgatattggtccagaaagtctacaaccgaaagtaagacttgggtaggtgctgtagataaacctgtatgtaaccatttattcctgcagttccaaatcttccacaacaaacagacaaaataatgatagtttccagcagtaaaagtgtttgtagcaagatgtaataagtcccaacaatttaataatatgtttttagcaatgaaatcatgaaaactagtaagttcccataccccctggacagctgggcacctgaaaggagcatgctctagggtctcatcatgatacaaacaccggcagcaagaagatgatggtaaaattttccgcttaaaaaggttgtgactagtgggcaggatatcatgacaagtacgccaaagaaagtgtttcagtttgggtggtaaagggagtgtccacatctgtttccaccaatcttgggaggctgtgctatttgaagatgctgggtcattatggtgtagttgagtatgggcttgatgatagccagaactgactgtgtaggtgccatggggtgtaaaggaccagaaatatgagtcaggtgtgcctatgttggttaggggaatggtta

SEQ ID NO: 5004 - DNA, 541 bp, Cannabis sativa
actacaatgattttttctgtttgtgattacacaggtcatggtttttttagagctatttggtactgacttggggaattaaatcctcaagattgctagaatgtctcataatgaaaaggattgtgtcgttcggaagaatgctcactcgggcaagcattcagttaaagcagcctacttagaagatcacaagtggcggtttgggactcaaaggaacatttggaaatggatatggaagccgggcttgcaacctagaaatagctttgatgctttggagagcttgttaatacgctatccctaccagacataggctgccttttatggaagagggtgagtgttatttgtgtcatcacctgtacgaatctgtgctgcatcttttcagagactgccctcttactagagcagtctggtttaatggtgagttttccttcatatcaacaatgtttcaggtacatctttccttgaatttctagagaacctttgtgagttggtcttgcctagggagaaagttaacctcttcaactttgcaagttgtgcttgcttggag

SEQ ID NO: 5005 - DNA, 2027 bp, Cannabis sativa
tttgactgtgttgaatggtcttttttggctccggtgatgggtaagataggtttcaatattcgatggatttccctcattatgagatgtttgcatactacttctttttccttcaatctcaatggttcagtggttggttccattactcctcaacgtggtcttcgtcaaggtgatccactttccccatatatctttcttatatgttctgaaggcttgtctcgtttattacaatatgaggaaagaattggtcaactgaaaggatatgctgtctctcgaagagcccctatgatatctcatttgttttttgcggatgatagcctcctcttttgtcaagttgatggccgatcttgtgggtctataaaacgtgctttagacatctatcaccgtgcttcgggtccagaactcaacttggacaaatcggttatgtctttttctcccaatactcctcccattgttcagaactcttttcagaatattcttggaatgtctattagtgattgtcatgaaaaatacttgggtttgccagcttactctgaaagggacaagaagtaactgtttagtgatattaaagaacgcatttggaaattgatgaactcttggaatgacaaacttttctctattggtgggaaagaagttcttctaaaagcggtggtgcagtcgatacctgcttatgttatgagttgttttaagctgcaatctactttcagtcaccaattagagcaaatgatggctaacttttggtggggttcagacaaagataagaaaaagactcattggagaaaatagaaacttctttgcaaaactaaaatggatggaggaatagggtttcgttcttttatacatttcaatcaagctttgttagctaaacaagcttggaggatcattcaatatcccaattctcttcttagccgtgtcttaaaaggcaagtatttttcacataatgattttttgcaagctcataaaaccggttgctcatcactaacttggcaaggtatttgttgaggtcgcgatcttcttgtgaaaggcttaaggcaaaaattggtgatggttctagtgtcaaatgcatctcagatccatggattcctcgacattctgaattcacacctattcactatttgggagacacacagaatttggtttctttctacatctctgatgacaaagaatggaacctccaattactcactcgtgacttctcagctgtagacattgactatattctctccattcctctagcttcatcacctgtccctgaccaatggatatggcatattactaatttaaatgagtacactgttcaaacgggttatcaccttgctaatgaccttgaagactccgagctttctaacccttccaataatcaacatacatggtggaaatacttttggaatttgaaactaccatccaaggttaaaatatttgtttggaaagtttttcatcaagccattcctactgctgcttctttgtgcaatcggaaaattattgattatgcagcatgtagtctctgctcgaatgcatgggagtcggtagaacatgctctgttcctctgcaaacatgccaaaaaagtttggcattctgctggtatccctcttgattatgatatggtttcaagaatgaaatttgatgattgtctggtgttgctatctacccttaaaaccacctctaaaatggaacaaatactgtgcactatgtggtttttatggactgacgagaacaattttatacatagcaaaccagtcctctctccatcacaaatctgggcgaaatcagttgcatattaatgcaattttcagcagcattctactactcagaactcaatcaaagattccacaggtgcggctgctaattctaaatggttccacccacctttgaatgaattaaaaatgaatgttgatgcagcttgtgatgtttcccgtaacaaaattggtgttggtatcatcattcgaaattcttctggtcaagttgttggggcttactcgaagtctctcacaggtagatacaagtcgcaagaaatggaagctaaagcttta

SEQ ID NO: 5006 - DNA, 1114 bp, Cannabis sativa
atatatatacagctcaaggtactgagagggggagcaagggtatgcagcagcttcattcgtggttgccatgaccaatcttgacaccctaaaacatactgatataaaaattgctatcacaaactggtgcctcattcaatggagttaacagtgttccttctgatacgccggccggagattaggattaacaatgtgataggtttttcccgtagtgtacatcactcactggttgctttctattttacatagctagtaagtatgacaaactacaaaaatcctgatggtataagtataataatgtccaagcaaatcatccattttctccagcaacttttaacactgaatgagtgaaatcccattcattggtttagtttgggtgctgcaaaaagcaatgtagaagtttgtaactcaaaaggtagacgtttcaaatcacataagtagatattttgagatatttcaaacactgaacttgatatacaatttgagagtaaatctttcttgttactagctaatttttattgagagacgggacaaaactgacctgagggtataacgtttcatctaacatagaaacagcgtaaggcccagctgtagaagcccaactattttgatggtttgtctcatatccatgtctaggaacttcaaaatttccgttgacttgataatccaccgtgttttcctgtggattcatctctgtttgaggttgaaatttttgatcacttagaacattcagattgtacggcgcataaggaaattgaccaccatttagttgcagcctcataggtgtggttctgcttaaatcggtaaccatgccattttcttgtccagaattcgaaatctctgggtttctacccatgccaaagtaaccagagtaactaccaaatgaggaacttgtagagcactccatatccctgagacaaatacaaaaacagcacaagttaaagattgttgcagatgaaggtaccaaatctccctcatgaggaagtgattagaggcagcaaaatgaattagacacgataacacgacttgaaattgcatgaaaaaaaatagatatgggttttccttaaatagttttaggtcatttttgagttgaacacacgaaaataacacaaccact

SEQ ID NO: 5007 - DNA, 1117 bp, Cannabis sativa
ataatgtgataaacatgtcaaattggtgttaagggatcgtgttgtgtttgatctatttttatttcgtgtcgacctgttttcgatcggtatatgtagaagcaccttttagtttattatttattaaaaatattatttaaaatttgtacgcaagcagggtggttttgaatttttgtttggttcttagaacatttggtcagttcaaccaagttgacaaagttacgagactatatctataattatttaatacttaattaattgatactttgaatttgtagttatcaaatattacacaccatatcttgtctgcttaaatagaaaatactcagttttcaaaaaaaaaaaagtcacttatatgattcatgccatattattaaaaaatattaatttattttgtaatatattgtaaagttttataatatgagcttttgtcttttattagggaatgtctcactttgattagtgattttttatattatttattaaattaaaatatgtgagactttacttatgtggaactcgatattaaaatacactaataacaatatatagtactcattagcattttttgtgagtatatatctatttttgtagttataataaacactttatttatttttagaagaaattaacttgttcttgctctttatatgtgtgcaattaaatattttgaatgtaatttttagtataataaattaatttaactttttcgaaaaaaataatgtagactttgatatgataatatttggctataatttttaaaaatactgaaaagtgcccatgaaaacaaaagatattcccactataattgtcaccataatttattatgtcacactatttgaattatagttgatgtaattattgctttaattggttcaaaaaatggttaactttttccatgtaccattactaattaatcacctacttatccaattatttacaaagattaaagtcttcattgtattaatataaagttgaatataataactggcaaaacaaggcaataagcctataattatggtgtttccaagggatgataaattaataatacattaaatgattatttattatttagataagtacttttaatatgagtttaacaatgttttgtattttcctt

SEQ ID NO: 5008 - DNA, 1533 bp, Cannabis sativa
aaagaggcatcaacaatagtacctccgcatgccaaacgctgttggagggccctgtcccttttatccatggtcttggtaagccaggagacgggagcatcatcatctgaatcaggtgtatgtcttttccccaggcaagtctcctctgctagtagagtatcatctaggcctccaaacgggcccacaactccctcaacacaagacacaggaggatacaagccatacctctgaaagtttgcttcacaggccaacttgagtatgttactcctctcagtagagagggacaagatgtaattagctttatccctcatctggagagtgggaatagagcgtatgtaagttgtggccctttgaaagcggtgatggacttatgggatgtcgcatgcaatgaagtaagtcatggagtatcctccaacctttaacaaagctacactattaatgttgcccaaccattggtagcctagctggctaaagtagaagtatctgaactggccatgcctcgaaacggactttagctcaaagaagtatccgatctaataaggagggtgctaaggccagtccaacgctgttgttatcccaaattttacactctgacaaggcatcacacgatggtgacacgtggaataaactttatatatctgtttgcacgagatatgctgaacagagcatcgtatatagtcgcccagacaaagtcttcttggctgggcagtgagcaatccgaacagcacgccaacacttagcagtttcaacactcacatcgtgagtcacagaagaaatccctataattttgggatcatatcacagagatatgacaagctttccaaatcccttgattagtgtactctgcatttaatatgaaatcctacaattatatctattgtaatcagaagggaaactcttccctcaaagcttatagccctataaatagtgatctactctcactaggcagggggtcgaaaaacttatcgaagaattcatattcagagatattattgcaagagctctaggaaaaggaattattatattctttgttcttaagtcaatacaaactaagggaagtaggctattaccgaattgctcggggccgaacctttataaaactcttgtgtctttatttatttcattatattacatatatactatactacttgtcttttacaatcaagactcattgtcgttggccaaaagcgaggtcaacattttggtgctttcattgagagcagaaacacaggattgctctttatctcaaatctaatcataaacacgatggtggtacaaactcgtagaggcgtgggtgatccagcaaatccataggaagtggatcctacactacaaaatccatgaaatttaagggttcccccagccaggaatcctgaacaaccgaaaactataggccaaggtgtgacgactcctttgagtagaattgcacatgttgtgcaagagactggaaatactaattcaacaactattcagggtattcccaacattgtcgtttcgccagtaataaatttccgaacaaccattggagatgacacc

SEQ ID NO: 5009 - DNA, 1386 bp, Cannabis sativa
aagggcggttaatggaaagaatctgaaaatggttaaggctttttactttaacccaagggtcatttaatttaacccaagcgaaagaactggtatcgatggaagagctcatttagaattttggtttgttcagattgtatggctgctattcaggctttggggaaggggaaatgtgttcctaattggagtttttttttagtgtttctttgtccattttagatctttctaaaagttttatgtctcgtagtttttcttttgttaatcgttcgaaattagagtttgttgatggtttagctaaaagtattagaaactctacactttctgttggtgtttaccatggggagggcatccccctgtgctacccatccttttgtttcagtaatgaactctttcctttcaaaaaaaaaaaaaatgattcagtaaggacaaaattgagcaaaatcagatatatatgatgccatgtgatctttgtaatgttatatttatgaataatttattatgatatgctaggttagtgttgtatatggtattaattaattaattgatcatgattcatgcaagcataataaattaatattatttgtaatgtttaaataaatattattaatatatttagatgtagatcaagatctagatctttgataattaataatgtataaatataacttttcaaagatattatatgataatatataggatcatataaacaaatgtttttccaattttgtttttttccacattgattaatggtccaattaattgatctggtcaactactacaaatattgttgaatatataattcattattagctaatatagccacatacactaaattataatgttataatatatattcattaatattcaggtacctactataacaaatataattaattatatattagttcatgttctgtcaaaataatactataaagagtaataagtctctagtgcatttcggttgctttggtttttaacatttaagatacttttttatccttagttataatgagaaatgttaaaatgtattattagtgactaacactacttttttcgatattataacgttattggtgtatttaattatatattgagtcttatatactttaataaaataatttttagataatattattaatcaattataaaacgtcacttataaaaaattctaaacaccactaatatcagataataatattcaattataataatatatttttataattatttataactatttgtaaattttagagaaaattatagtgttggaaaaatagtgctcactttctagctacctccactcttgtggtagaagtactagttgtgttataattactatccttacttgagtattaattatatattatattttaagagtattattattag

SEQ ID NO: 5010 - DNA, 676 bp, Cannabis sativa
gaagagttataaagcggtcgtcgctgcgaagaaagtcgttgtctcaaaatccaatgctttagaggttcacaatcaattattgaagggtaaggtcgataacctcgatttggagaagaaaagttgggaccttgctcggctggttttggaattcgagaagaaaacccttactgagaaggtcgcttctcttgaggctaatttgatcgagatgaagttgggccatgagaaactgaggactaagaacgatgcattatctcaggagcacaatgccttgcttttggctaatgagaggatgaaaatctgaggtctcttctttaaaggtcaagttgtccgaggctgagaagacggcgggtcaggcgaagaaagctctagttgatgagaagagctttttgtttatggagatcaaagttctgaccaagcaagttaaaaaggtgttcctcagtgggagttatcagtccacattcaaattttattctgagtttaaggagggtaattttgattcgtatgacttggagaagtttttccagaggtacgctgagttcaagaaggatgaagatcttgtggacacttcttttgactcggacggggatagtgatgataacgacggtgccgacgacacttagggattgcttttacctccctctcctctttttaatttacttacttttatttcaataaa

SEQ ID NO: 5011 - DNA, 890 bp, Cannabis sativa
atactccgattcagtgcttgatctcgaaactacgacctgctttttagatgaccatgattcaagagtgtctcccaaataaacacaataactggcaatggatcttctgtcatttgggcaacaagcctagtcagcatctgaaaaacctgtaatgctaagtctgtcactgcagctgatgtaaagcccttttgttttggtatcctgcaagtatcgcaatacttgttttacttcgctctagtgagtgtcggttggagcttgcaagaattgacttaatttgttcacagcataggcaatatcaggcctcttgtgacataaatattgaagtgctcaaactgtgctcctgtatagtgttggattttccatttgcttaccatcagtgagcgacataggcttgccaatagtcattggtgttggacaggtctttaacttagtcacgttgactctatttagaacatcttcaatgtatcttgtttgtgtcaggtagaggcttgaagcatcacgataggcctcaatgccaagaaagtattgtaatggtccaatatctttcaaggtgaacttcctgtttagctcagtaatgaagctttgcaacttacttctatcattcccagtaataataatatcatcaacatagattaaggcaagtatgattacattttcatttctgtagaagaataatgaattatcagctttagaattgtggaacttccagtcagtcaaggtctcttttagttcgtcaaaccaagctcttggagcttgttttaaaccatagattgatttttgcaacttgcaaacaaagttttccttccctttttcttcaaagccttgaggttatgccatgtaaacctcttcttctaactctctatttaagaaagcattttaatatcaagttgcct

SEQ ID NO: 5012 - DNA, 1374 bp, Cannabis sativa
tattcactactcgatctagagccagattactacaacttcgtaatctccttcagaccaccaagaaaagctcacaatccattggagaatacacactcaatatgaaacaatacgcagattccttgtcagctgctggacaacccctttctgatgacgatcttgttctgtatattcttggaggactcggatccgagtacgaagctgttgtggtgaatcttacctctcgaacaaagcctctcacccttcaagaagttcaatttatgctccaaagccaagagatgcatatacaacaactcacctctgattcttttgtcaatattcaagccaatacaacttccacaaatttcaacaatggaggtagaggctcctataataatcgtggctttaaaggaccatacaaaggtggcaggggaaattacaacaataaaggaggcagaggaaatcagcccatacgtcaattatgtgggagagctgggcatgttgctattaaatgttatcacaggttcgatattgcttttactagccctccctaaaattcgaataccacatatcagccctccaccagtgaacccaaggcctatctcactgaaacgagtccctcctctaccacaccagatctcactaatgcatggtttcttgatactggtgccacgcaccacatgacaaacgatactcaaacctgtccacagcagttgattacaaggaaaaagctaaggttgttgtaggtaatggctcatctttatcaattcatcatataggtcatagtttagtctcaacaaaaaatcccttctaaacacttagtcttgcaagatattcttcatgtcccatctgttacaaaaaatttacttagcatatctcaattcaccaaagacaataatgtcattcttgaatttgatagtttgtgttgtctcattaaggacaagattaccggccaagcaggtccttcttcagggccatctcagtgaagacctatacaaacttgaagtgtcatctccaaagcaaaaagactcacctcaaactagtgatacttcactcaagtcaaatcccagggcttacaattttactacaacatgcaaccctgtccatgacccatctcagattgcttctacttggcattcaagacttggtcacccctctcaagctattttaaataaagtcttgtccattgttgttccaaaccagaaatgtaaacaactacttcctttttgtgatgcctgtcaattaggcaaattacaccatttttcctttaaaccttatatgaataatactacaatgccttttgaatgtgaaggctacaaatattacttaagctttgttgatgattttaccaagtttgtatggttttttcccataaaaaccaaatctgaaaccaccaat

SEQ ID NO: 5013 - DNA, 1416 bp, Cannabis sativa
atgtgattgactttgtcttctaataatcttaattagttaaacaactgaaatattatatagaagtttctaagaaaatatatatgtgaatatatgtaacaaatgattttgaatcaaaccaaaatttccatgagaaccaaaggaaaataatttatatttatatatatattgaattaattatcttgtttgaccaatatattatatatgaactaaatttgaaccttttttctttttcattattaagtgccaaactccactagagataaaatttgtgaccttatcttaattaaagagaagagtatgaaaaagaaatgatctatagcaaaattgactccaatgagtttttttttacaagggagttgaacagtcatatcaagccaatgtcttttgattatatttataatttattttatttaaaaaaattgaaaaagggtgcaagagatttctgtttgtcttgatggaaaatgaacatcactttcttccaagaaaagaaaagaaaagaaaaggtagttggggtggtagcatccagcctgtttatgcatataaattagggtttttgaggggtctcaaaactcacaacaatcattgaatagaaactacaacttgattagaaaaaaaaaaagtgaaaaaaaaatcatattgaaagtactaaagcttccaaatctatcattgtcatggggtataattatatgaaggagtgggaattgaacactcattacattcctaaagtcttttttttttttaaaagaaaaaacggtgatagagttaggggtgataattcgtgttcgcggggtcatattcgtgtcgtatctaaatccatgtataataagtatatgctcgacccgaacacaactaattaataatcgtgtcagaaattgaaacctaaatacgacccgtttttaaatgggttgacactacacaacccgtgtaacccgtttaaaaatatattttgtttaaacatatcaaccaataaaacgtttatgaagtattcaacatgtttatagtctatttatggcatgttaaagtactaaaataactttaaatagatcattaccaagttagtttcgtgttagccgtgtcaaaccgaacatgatccgcttattaaacgaattaaatgagttaatccgaacacgacctaaacccatttaagacaaacccaaactagctctcgtgtggactttgaatcgtgttatcgtgtctgactcgttttgctggctcaagatagagtaaatataaaattagacctcaatatcattacataaaacatttataggtatataggatactgtcacaaaactagccctagggtaaggcaccgtgtctaaagcccacctatcttaaaagtccaactaaatcttttaataatttttaaaaatactatttattcttattgtcattttttttaggctaattagtaat

SEQ ID NO: 5014 - DNA, 570 bp, Cannabis sativa
tttatcttcacacccaattttgagtggatttatatataatctattcttgaaatgttttttttggtcagaattgtgagagtagattttatcaaatgtaattctaaaattagcaagaaatataaaaataagaaaaccaatgaacaattatgaaaaaataaataatacaatgatctcaaaaaaacatgataaaactatattttgagctgataattaatggaattctaataatttaggggtaaaataaatattttcaagtttagtataaaacacatcattaacaaatcaaacactcctcataaagttgacaatcaaacaatacaataattcatatattgaaaaattaaatattacaagatgaatgtgttgtgtgacaccccatgatgtcactaaaaaaatcaatcaaaataaaaataaaacgagttaaaaaaaactcatcatttacattgaaaaaaacgaagcaaaacaatttaaatcaaaagagaattcccattgcaagagctccaagggatgcaaatacggcgggaacaaaggcggtggcatcggatgtagggctaggagccggtgcatcgg

SEQ ID NO: 5015 - DNA, 1932 bp, Cannabis sativa
gtcctcttgaatgttttaattatgattcaagttttgcatgaaatcatgcaaccctatttgagctatctggagttgtgtttccaaatattcatcctaaacaggttttagtccaacatgtggtgcccatatttttattacttgtcaatttgagatatatgaaggaagattgactttattcctttataacttgtaactgataatggtaacttgtgaaagatcgccaacttgtcatgtgcctcacataatagggcattttggtgtgtcaaaagcaaaaaagaaatatgggggttttggtaattggatgtcaaaacatatgaatagtgggggctttatagtaaatcactatttataaagcaaggggaaattttatttacaccccaaaattttttaaagccaccctattttaataattttaatttaatataaaatttatatctttagttatactaaattttttcaaattttttcttctaattcatatacttaaaaaaatatacctatcaaataaaataaaattatattttaaatattatgacaaaaaaattaaaataaatttttttatgaaattttcttagtaaaaaaaaaaaaaaaatatatacatgagttagaaaaaaattatgaaaataaaatcaaaataagtattaaaattaataaataatgtgagaatttttttttaaaaaatatctagagtaatttttaaaaattatttaagtatattttttctaataatgggatgtatttagtggggtgcaaataaaagtcccctcaagcaaggtatgttatattgggaaattctataatagacaccctaaaatcagacatcaatgcattccttaaattcttaacaattattgagtgtaatattaagtgtacacattatttggtggagtgtagcataaagaatacaatttttttcctcacatgttacacccctctgttttatccaaaaaaaaaaatctcactctcttaaccaccaaatctctattctttcgttaccaaacccactttttcttcctatacattctattttacattctcactgcaaaagcttaatttcatgactcattagagctgcgatgttctaaagttggtcaagtaccaaattcaaatgaggggttactctaggcaagaccattattgaactttgcgtcaacaaatgatcttccattaggtgatagttcataatatttaagtccaatcttcttatttcattgtttaagtgattttcttttttattatcgtttggtagtacaatactaattaaaaaatttctctttttttttttggaacaagagaaattaattttattccaccaaccacttaaaaaaatacaaaactcaaagggagaacaaacccaacaaacaacttaaaaattgtttgtcaagttgattacatctttttctttgtttttaagcttagcatggttaagataaatcactttaactttaatgctcaagttgatcctcttgctaaggactgcagttggttcgcagaaaccttcaaaagcacaattattcctattacatcaaaccatgtaggtaaccgcaactactactgctgacttgatatcaataaccaagctattccttctccctttcaacccaatcagccattccttaagatcagacagccaattaatcaagctgagccaaccacttagtgacctctaggataactttcttagtgaaagggcaagcaaagaagaggtgaccatggaactcaagatcaaattcgaagacaggatataaaagagaatcaagatggatgaatctggccaaaagatctcgagttagcaagttggagtgcacaacctgccacacaataaatctatgctttgggactttgagtttgtgtcaaatctctttgtgaaaagagatcttcggttctgttaagagagattgataaaagtgtttgactttaaaagtaccagtc

SEQ ID NO: 5016 - DNA, 944 bp, Cannabis sativa
aattaatcataactgtcgaattataattcaatgactaaatgtaaaaactaaaagtaatcatcatgattaaatatgtaatgtaatcatattaaaaactcttccacataatgtaaataattccttcaaaatttgatatgagaatcgatattcttctttatatattacctctatctgtgcaatatataataatatcatgatgataatgttgaattgagataaggatagtgatcccctacacatggtgaatttttccattcttcataatgagacttgagaatctccctagctttctcctttaaagaatcatcacactcatgagtttgaagcaaaacacatagcttcaaaacagctccaacctcaaccatctcctgaaccacctgtttcgttcccgagaatctacaaatcagggaaagtatcttaaccgcccgatcatcggccgccggagaaagccgaaaaatcctattagaaacaaagaaaatgcttcccttatgcctcaaaaactcagctcttccctcagcacaacaacacagctgaaaaagcacaccaagaacaatctcaatcctcttattactcacacccgacccgaacccgatatccacaagctcaaaaaccgccccggattccaccaacgtaacccggttccttcccaaagggcaaatcctcattataatctccaaagcaatgttaataaatttatcgttatttcccatattacccttcaaaactcctactacgtactcaaagaactgccgattcagcctacctagctcgctagggttagaataattttctatgaacaacttcaacaacgtaagaatctcacctttaacgtgattttctacaaagctgcagcccaaaatccatgccagagagtccataacccgatcggttcgagcccgaacgcggtccagttcggcgggagagatccgtggtctgagaagatt

SEQ ID NO: 5017 - DNA, 2034 bp, Cannabis sativa
aaaaaaagtctattaaatagataaaacaaaggtctcctcctaaggtgtgtacacaacacatttttccaaaattacaaattaattgtctgtagaagacaagtgacgacgggttccataaataattggaatttgacgttgttccgattgtgatatgtgggaaatgacatacgtacatgtgattggtctaaaacaacataaacttctatgtcttgtctctgtctccttcatcaatatcttataatattctatttaatacagctatatatgtatagtgcctagtaataatctccccatccccataccacaattacaaatacaatagcctcaaaaacacttctagttattcattaattgttgtgtaaagaaatgggtcatgatgatgaggaccacccacagccacaagatcatgaggtactcaataatatcaacggtagagagaacaaccatgatcatcatgttgaggaagaggaaactgtgactcatgagtctgaatcgatcttgtcagtggaaaagatgtttgagaagcaaaatgttcctgagtggagaaaacaagtgacaataagggctattttggtgagctttggtttgagtgttcttttcagcttcatagtcatgaaattcaacctcaccacggggattgtgccgtccctcaacgtctcggccggcctgctcggcttcttcttcgtcaagatatggactaaattgttggagacgtcgggcacgttgaagcatcccttcactcgccaagaaaacaccgtcattcaaacatgtgttgttgcttcttcaggcatcgccttcagcggtaactaatcattataattaaacaaattggtcaatgattaaattttaccgttaaatgtcaactagatatttactgtatacatctaagtatacgtgcatatattttcattacattcgaagttttagtgtcacgtgtacaaagatattcacggtagcgatttcagttaacatttaaaataaatttaaatgacatttaaatttgcaaacaaaagtaaattaaaagggtaattgtcgtcaaaaacaaagatcatagagttaagttttataaaaaaaaaataaatatataagagaattttaccgccaattacttattagaaaatgataagagcaccgataatgtttaactatgtatgaatctatttattaacgggacaactaattagtgccttaaaatatttttcaaatagttacaaagtttatgatagggattgaataataaaagttaattaacattgtcatattttcatatgtaacaaaatagctaattttgtatattttctacaaattaatatgtatgattcgatattaaatatagtgttggaaactagtagtatcctttagcaatttagatggcgtttggttggaaggaataaaaatataagatgaaaatagaatttggaaaaggagtaaaataaaatttaaaatgcataaaaaaaaattaataaaaagattattaaatttttttaaatcttgtattggaatggtctttctttcttaaataatggaaaagtcattccattagaatgatagaatagaataaaaattatttcattttcattctatttggtttcattagctctaaccaaaaatgctaccttagtacgtattttgtttaatgttagaatattaattaatgtatacgacaataatatcaggaggatttgggagttatctattcggaatgagtgaaacaatagcaatacaatcaggagacactactaatgacttcaaaaatccatcattaccatggattattgcctttctttttgttgttagctttcttggtcttttctctgttgttcctctccgcaaggtactatatatacctatcattaatttcaacaaaatattaatactccctacatatatgtatacatttctctcatcattatgtatatttgtattgtttcagattatgatcatagactttaaactaacatatcctagtggaactgcaactgctcttcttatcaacagcttccacactcccaatggagccaaattagcaaagta

SEQ ID NO: 5018 - DNA, 3115 bp, Cannabis sativa
tcccattaacaagtcagaaatatttcatatgcacaaaaatataataaaaacaatccaatatatataaccgtcatactaaaccctaattgtctatactttttgtgttgtgcaaatataatatatttccaatgataatatattgatattattattatttgattgaaatttcttccgttgctgtagctttctctctctcgatcatatataattatatatataacaattacttattcatgatcacctaccactgagccaaaacgacaataataaaaaaaacgattacatactaaaatagcagtaattaataatgtgtcaataaatataaaagaagaagaagaggaagaaaattaaggggtcatagtcatatataatatggccagcaagccgtggtgtagtcgaaatatatataattgagagaaagagtcagaagtggtcctttcaaaagatccagctgaacgaagccatccacctccactcctttgtattttcttttctttttcaattacgtaaccatcactacaatattaatattttaaggtaatagtcaaaaggaaacaatcatttttattaatttctttctttttttaaaaaataatatataatgattttttaagcatatagttgtgtgactgaaattgttgtgctcatttactaatttgtatacgtatttcttaattataggatataatatatttttgtaattatatacttaaattgacttaataaattaatataagtctttcttagcgtaataataaaagtcttatcaatatttgcattaaattatgaggaatatatatattctgttagcatttttataaagtataatattgatattagtgtaatttaatatcagatcctacttattttactttaataaagactatagaaaataacaaattaattatgaaatattgtcggtgctatatattttggtgctccgttaatgctctatgtatatattcgcatgcacactttaaaacaaattcaatgggaatttcgttattgtttattaaacatgctagtatattttgtaagaaatacttatgatttgtgtattgaacatgcttaataatgttgtagtcatgacttcttattgttattgtagtcacaacatatacattaataaatgttgtttactgaaataacatgtacaaaaagaaataaatgcgcataattttaatttgttatcccttatgcatattttgtttaattattaattattgttattgtattaaatgtcttgaaagacaaattatatgtaatattatatatggtggttgattatattgtctaagtgggagaatattagaattaatattatggactaatataatcataagtaattctaaaacttcattaactatgtgcttaatatttatcaataattataatagaatgattaatagttactaaatgtattagaagcacttgagagtaccgtcatgactaaaactagcctattaaatcctagtcccccattagtacccttactggttcaattagactaataacctcttatagttataagggtgtatcatatattaagttttaagagggtttgatgaatgtttttgtgaaatttggtatcattcatgttgtgggtttgtaatcgtttttttgttgaatattttcttgcaaaaatatgggagaaataccaagatataatgtaacactccactaatttaagcgtgttatcgtgattttatattaattgtgcaatcggttgctaatcaacgagtttgttgaaaatcgtgataaattaaaactttactaaattaccctttaattgaaagaaatatcttccgcataaatcgggatcctgtatttaaaatatttaaaaccataacataaaatatttgatataaaagttgtcgcctagtgactattcaaaatacagcctgctgtcttgaagatcgtatgctccaggtctaactgtcccgacatgtacaatctttatcttctcgcattaacagttgttcagccttagccttgcccttacctaacagtaactgtgagttgaccgactcagtaagaaaagtataatcataacataaatgtaaacaggatcacagttaggcacccatacaccaaatcataatcctatctcgcgtcccacgcgtactgagtctagaacgttcgtacaacagtactattgaccatgtgatagcgtcaattattacttataccaaagatacattcatcaatatgtaatctaactctatgtatactgataccgctatttcaatttaatctaatagacaatcataaatatgtatactaaacatgtaatcacatatgcatatcactctaataatcttacctcaatcctgaattaaggtgtgccggccaacctaagtggaactgctgctcgataatttacaagcccctaagtcacaatattcgtaaaattaatgagtgacatgctaatcaacttttgggaacataaaattaaaactaaaagtcttcctattgatggataatatggcaatatcctaaacatcactaaaatatgaaaatctagggtgtccaaaattgccacaactggcaaactgtatcccattcggataaccgattctatgggttctgcctgggggaaaccagttaaccggttctacattgcaaaacttaaccggttcagtgcaaaaaacactaaaaacaccacaaacaactcaaatcaacctcaaatcgtttccaactctccaaaccacctaaacaacccataataaacgtatttcaagcaacagaaatagtttaaaacctctgaaaaaaatctaccatgaatggacaaagtttgagcttaaaagctcaaacctggcctaagctccataacatgttgtaaattctacttaaaatcactcatcttaacatacaaatatctcaaaaaacaaatttaaacctcaacaattcgcacaacaaatctaacctaaaatttaagcatgaaaacctaacttttcttgaacaaacttagaagaagagagcgaggatcttacctcagtaccttcttgaactatagctgctaaaaaattcaagaactggacagaattgaagaacaaaatttctgattctcttggtttttaggtgagactgagcatagaagagagagagagagaga

SEQ ID NO: 5019 - DNA, 755 bp, Cannabis sativa
gaattaagaaatgaaaattaggggtggtgctcggacaaaatagcaaaaaatgatgatttttgggggaaaaaggggtggtcggcagtggtgctcggagaacacgcagagagaaaacgagaaggaagaaagagaagaaaagagaaaaaaatgggggaaaggggtgcgtcccaagttttattcagcctggacttttgccagcgcaattagatgcgctgccaaaagtctaagctgaataaaaattaaatgaaacattgcgtttcatttaagttggtacttttgactgcgcaattgggtgcgccggcaaaagtttcccacctaatttttcccacgttttcataattttggcgggaagttgactgcaaattttttttagcacttttaccagcgcatttatgcaccatcaaaagtgaaaaattgatgtaacgtgtcctttggtcagaaggacactacttttaacggcgcaattaaatgcgccggcaaaagtgcccacctacttttgcgcgcacgttttttcactgcgagggaaattgaccgcctttttttcaaacttttgccagcgcattttggtgccggcaaaagtaaataatattaaaaaaaattaataaatagtttttgccggggcatgtacgctcaccggcaaaagtttgctcgaaccgccaataattcccaccttttggtgccaacttttgccggcgcaattcgtgtacttcgccgacaatgttgtttattgtcggcgatattaagcgccggtaaaa

SEQ ID NO: 5020 - DNA, 879 bp, Cannabis sativa
atggatattaagtctttcaaatggattttacaggctgctgtcgctgttcaagcaggtgtttgtgtagatatattcgctgttacaaatgagtatacagatttggcttcactgaagtttctcagcatagaaagtggaggatcgttgtttttctattcaagcactgatgattcaacccttcctcaggacatgtaagtatggtatcgaagcagaattattttgcctttggatgaagcccttaagcttaacatctttagatctttattttaaagtgaataattcaatcaagcctttatgtgtcctctcaggtatcgaatgctaagtcgaccatatgcgtttaattgtatattgcgaatgaggacatctactgaatttaagcccggtcattctgtgagtattgcaacgtcatttgcatttatatttaacgttgtactgtttcttattaaatatctcaattttctgcagtatggtcatttctttccagatccgcagtatgagaatgttcaacatattatttgttgtgattcttatgcaacatatgcttatgactttgagtttgttggtgtcgatggcttttcaaggtaggagatctttcactattcccccctccccccgcgaaggtcaaaagatatcaaattctagattagattgacagtaaaaatatttgtgtgtgtgtatatagatttaaagaccatatctgtcctttattggttttctggaagacatttcaaatgatgaaaataagatgcacgacatgatcacacttaagaaattcttaaaaaactctcatctgcattgtactggtgtcaagcacccctgcctgcaattattagttttactttgtttgactggattttcagattacatttcagaattttagtg

SEQ ID NO: 5021 - DNA, 1077 bp, Cannabis sativa
ttggctagattggtaagcttacatgataaaatctttcttattttcttttggtgtggggaagaagagagatgcaattgggcttcctattaatgagtattgccatatttagaaaataactacatttattatttattgtgcttcgagtctctcctggtacatagcactagctataattttctgtcctaaaatatttgtattgttggggggatcctagtttcggaaaaaaaagaactactatgtatcatttatcacaaaagctcaataatgctcccatttcatgagctaaggtcaccaggtttatacaaattattgcaaatgcatcttattattttcagacaattttttacttggtactttttttaaatgcgtagataatggagcagtgtgtggcaagattagatgtggcaatgttcaatgctattcttcgagaagctggtgatgagattcctactgatcctatatcagatcccatcagtgactctaaggtgcttccaattccagcaggaaaatcaagcttcggggctggtgcacaactgaaagttgcggtaagctacaagctaagctaactttaatgttagacagtctttcattttaagcgtgtttactcattttgcttcttagatttttgcaagagttcagtaattatgtcaacttctaaatggtgacaacaggatggaatttttctatttcaaattactgtcaattatcatttaaaataaaattactgtcaattgtattttctggatttgtttttctaatcactctgcatttgtgccttgtgttaatcagattgggaactggtctagatggctgacagacctatttggcatggatgatgatgacccacttgacaagaaagagaacagccatgacaatgatgatgaaagacaagatacatccttcaagtctttccgtcttcttaatgcattgagtgatctgctgatgcttccaaaggacatgctcttgagtagatctgtcagaaaagaggtacaatacttgagccatactcgtctattggattctgaattttctgccttaaatactaattattcaatgtattattactttgaaggtatg

SEQ ID NO: 5022 - DNA, 1549 bp, Cannabis sativa
aaacatttaatgaatttgaaattaacaattaaatattaattaatattatatgcctttaattttacctcatgcaacctatctgagtgtcaccttcaacaagctccacaacagtccactgattctttagattcttcaaattttgttacatttgaaattaatcataaaccatcgatagaaaatttaagaagacagcacaacttagaacgatccatagtgttgcaaaaagacaccctccccaagtattgaatccatagtcaccatatccaattgtcattgaagttacctagctagcgtatacactctcctcaaataaattatcctccaagcagaataaaataattgtttcaaattcatagagctagtaaagataaataagtgaaaacgagttctcagacaagaatcagaggtgtccatttcgaactaaatagtgtcatgaataaacatagtaaaaaataacttagccatatatttgttcttagccatatattttgaaaaatatatctaaaatttgttcttaaaattaaaaaaaaaaaacaaagttacatttttcaaattattcatattaattttataaacttcactaatttattttactgaaaattatataagaatttatattatattcttgttccttcttaatatattataactcataattgttttcatttaaaaaatacatcaacacacaatacatatatctaaatatgctctccaacatactcgtaatatttctcatctctatcattaatgtacttaggatccaccaattccaatttacgtgaaaaatataacacgaatttagatatgctacaaattaatacaaaatttatattagataaacattttaattaatttgaagttaacaatcaattataaattaatattatatgtttttaattttatctcatacagcctacttgagtatcacattcaacaagctccacaacggtctactgattttatagattcttcaaattttgttggatttgaaattgatatcatagatcatcgacagaaaatttgagaagacaacacaacttagaatgatttatattgttgcaaagtgacaccctccccaaatgttgaatgcataattaccatttccaattgtcattgaagttccttaactagcgtaaacattttcctcaaatgaattgccctccaagcagaacgataccgtttctgaaattcagagagctagtaaagatacaaaagagataatgagtttccaattagggatcagaggtgtctatttcgaactaaacagggtcatgaataggtattgtagaaacgacttagccatatatttgttcttagtcatatatttgaaaaaaatatatctaaaatttgttgttaattttattttttttaaaatagaattatgttttccccaattattcatattattttttttatataaaattcattaatttattttactaaaaattatataagaatttatttctccttctccttactttttaatatattttaactcataattattttttttaagaaatacaccaatacacaatacatatatctcaat

SEQ ID NO: 5023 - DNA, 655 bp, Cannabis sativa
  modified_base (104)..(109): a, c, t, g, unknown or other
atttgcggccatatcattgcaatgctaaatgaaagattttgggccctctctttctcatttttatttcactgtatgttttggttaaaatgtatgagtttattgannnnnnattaaaatgtatgatgaatctatgtgatatgtgagtttatgttagatttagggttgggtttggtcgaatttgtgttttggacaaaacattggtttttacgccaggtccaatgcaggcctgacatttttctgttgttaaatgagtaaatgttgaagatgtaggtctgatgtaggtttgatggtggcccaatgctactcatttttcttattttatttatttatttattttaggaaaaattacgggaaaaatctttaaaaagtttatttgatgcagataaatctccaacctcaaaaaataacaacagtagtccccaagctcgagattcttgtaagtccgttagtcctctttttaacaagtctattaatttctctctataatgtcacgtgttgatatcaaattgtgacataagtttctaaaaagtttattttattgcagataagttcatcatctcgaaaaattgtgacaacatcccaaagctcaaggtcctcattagtccgtaggtacctactttaacggctctatttgttccaaaaaatatcatgtgtt

SEQ ID NO: 5024 - DNA, 548 bp, Cannabis sativa
ttgtaattttcctataaatatataaatataaaatttacgtatattaatggtgttgacttaagacatttattagtcaacaaagtgctcttcggtcaaggcctagaaaatataaatggaagaaaacgaaaatataaagtactcatatattttcaaaatttaaatgaatttaattgaccatataattgaattgtcatcttatttttctttagttatttttttaggttattaagtgtgtttcttatatttatttttaatgtttgaaaaaagaaaacacatatatattctaattgaaatataatatgattatatataaataaactaaaatatttttttttgcataacactataaaatttacaacttgataatatataatatcccaatgtaaaataagattaatttttaataatactattaataattctcattgaaactacacactaattcttaaaaaaacttacaaaagttaaaaagcttaaaagagagattaatcaattaaattaaatttgtttccattctttttaataataattaaattaatttattataa

SEQ ID NO: 5025 - DNA, 1924 bp, Cannabis sativa
  modified_base (1147)..(1155): a, c, t, g, unknown or other
tagaaattctattacactcacttatgtaaataattgacaagtggcattaaaaatattataagtaatcaacaattaagacaacataaccacacaaatatttaaaattgttatattattgtatatatattttttttaatttcttaaattaattgggttatgagggataatggaaatgacactcaatatgtaaactttgttacaaaaatatccacttttatatttagctactttttatgacatattttagcttttaaaatattttatggtattttctatgatgtattatgtataaatttaatttttaaagtacatattttaatgtttaaataaattatttcaaaaaataataaaaaatctcaaagttatttattctcctccatttaagtaccctacctgtttcacctttcaacaatacacctacctactgaccttcattcatgacacatccggcgatcgacgactaaacaaaccctggatacgagatgtccaccaccaaaactccaaaagatcgaacatattctgctgtagttggagatttagaaaccattttcttaaactgaaaaaccaatttcataatgaacaaatcttgtatgagttttggtattttgaattagttggtttttttattaagaaactaattttgattacattaaagtatttggtttcttaattaatttccttaacaaaattatttttaattagtttcttcatcaataaactagtttttatatatgagttttaagttttttatagtatttttttttttaaatacaatgatttatctcatattttaaagtttttttttaaaaaatattatatttagtgtttagatgccatatatatataaaattggaataattagataaagtactcatttttgtaaatttttcacatttttacatttaaagattatttttttttcttttcatttttacggtattctataaaaacaatacaaaaacaacattaagaaaataacatccaaacaacattaaaaaataacataaataaaaaaaattcaacaacaaattaacaaaagtacaacataaaaatacatcaaaagaccgtatttttacaaataaaatcataaaaatcataaaaatatttaaaattttatacaactatagtttattaatttttttttttnnnnnnnnntgtgtatttgtgaaataatcctaaggtataagagttgtctacagggttgggcccaagtgttagcccaacacaaggcctgtttggcggtccaaaaaacaaaaagcccataaataaaacatacagatacgcgtttaactctcgaaacgtttgccgcgaaacgcaacattcaatatccgatcgaaacgtttacgatattttccctcatttcggtttgtactccaaactccatagctcattagcttcgataccttcatctcatcatcttcatgcacagacgaatatactcgcttttactccgactctcaggtattgtatatttatacatgtaattatcgtataattaatcttcaaagtatttgatatgtgttcatttttcttcattagaatctgatttgtaaaaaaggcaattctttgagtacgcgatggaaatggatttgattgcgagtggcgtggctgaagaagacgctgttcttgaactcgatgattacaataatagtgtaagctctagggttaaatatttttatttattttttttggcttaaagaaaagaaataatgtttactttattttgaatatatgttagggattagttttacattttcaagattattgtaaggattttctgtactgtgtaggatgttgctaatttcggaggtgaaagatgtggtatttgcatggatattatcattgatagaggggttcttgattgttgtcagcactggtaaggttttgaaattaaaagaatttgctaaactgtagttaattttct

SEQ ID NO: 5026 - DNA, 1493 bp, Cannabis sativa
gtgctctggttttgttcaaagccaagtagaagatgcttatagctggaactcatgaatgaatgtaaaaagttggaggcactcaaaaattgttgaatataaataaccctaagaatgtgaacaacaagaacactactatgcgaaatttgattgactttgttttgtgtacaaaaagttcaggcataatttaattgaacacaagtggaagaagtcacacgtgacattgaaatttcagcttggagtttttttacaatgtgtacttaatttggtttaatattgtagtgcaagtagtttagaacatggtatatccgaactactaattgactagatctcaaatggtgaatggggaaattctttctgaagctctagactagaccattagacatacaagtggatatgatagataaactaaacgtaataaatgtcaagagagatagttttctgctgtagaagttggttgtacatttgtattggttattgtacacattagatttgtaataatttgcttcaaagtctagtttatatataacctgtggtaagagattcttaatcaatgagatccacatgtatctcacatggtattagatagagtcactctaatttttctctttctttctaatctgagctcttcgttcattgtgtcctcaattgaagcaaggagatagtgactgaaggatcatacttacttgagtcctttcgtcaatgatagccttgtgtgtctctgctttatgcattagctcaatcatgtgcagtacatgaattctaatgggacacccttcttcattttacaattcatgtagctacgagtagcatcatgtcttgtttgattagactgctacccaaacatgacctacagagaattcattatttgagatgcattctccatttctttatacatcttacgcagaatatcatccatgctaaccaacatgatacatttggattgaatccaagtatcatagctgtcccaaattttttttggaccattggcaacgggcttcccaagatactccttagttagaacaaatttgtagttctcacaaatcagcatcaaattcaaattagatttccatttcaaaaagtttttaccatttagttttttaagtactagtaaaatagtaagggaatttgacatagtagacatgactgaaataaataaagtgacattatgattatacttgaataataaatatcatttcagaatgactgtaaatgtgatgcatgagcgcatacaattaaaatacattaaatattatttaagttgttccacgataaaattctttgaaaattgatcgctgccttagggtcggtatcaagtcaatttcattgaatctatgagacaattctcatcttcattattttgaaacttaaagtaccctttttcggtcaagttaacaactagccacatgaaatcttagttacgctttgtgagtgtaacccattattttatattccatgacttaacttagtagtactgccttagggttggtatttca

SEQ ID NO: 5027 - DNA, 1614 bp, Cannabis sativa
aaaaagtccaacccacttattcaagaaaaaaaaagtccaacacacatttacaacactattgtaaagtaacaaaactgaaagttaatgaaggtattgctttacctttttcttttctcttctttgaggattaaaagataattcattatgaatctaacatgcactatacaagatcctgcctagctttctcaacatattatttatataaatatatattatgtgtggttgaagttgaatagaatttagtactgtacaatatgacctgaatgcctggacggtggatgctaatatatatggatgctaatatatatatatatataaatatatatatattgctgcatatataatatgatatgagacacaaaaaaacaaaagaaggaatttttactttttaattatgtctaaagaaaattcccaccaaacaacttgtgatgaagatgagattactcccttgtgacagttattgacatatttttatcattgtgttgtgtcatcacatttaagttgataaccaagtactatctttgtctatcaattccattggtttgccacttggctaagtatgccatctttaattacttatttttattaattaattatgttatttttcttttttgggtgaaaaatgcaattagcttacaagattgtggtccaagaaataatgcattttttttgttgagaattagtgcacccaccggtggtgtccaataaggtgttagttatcaatattttataataattattaaataaaaacatgtgaaacccaaatattaaattatacaaatgacagtaccctttagcaatttttatatttttgttttcatataaacctacttaatgttagtaatctattataatattaaaataaatcaaatatgtaaatactgaatttaattactgtgtaattattaagatagtaattaattattacccaacatatatcgtaattacatgccaaatcttgtaacttttcaaaattacaccaaattttaattagatagtttaaaatatttcgaaagcaaattagaaggatatccaaccactattcccatttattgtttttcaaaaaatcttagtcccaattccttctaatttatttttcaacaaatttaaagtatatctgataaacctttcaataataattttttttttctttttttgagatattaaaataaatagtattcattacaaaatgagtaggaaaaagacatgcatgtgtgtaatcctagctagctagctagctagctatccatcttgtgttgtttgtgaccaatttaatgaaaattttgtagataaaaaataaagtgtcccaattccaatataccaatatataggtagtagttgattatttgattccaaaaccactaacatttaattcattgaaacttgactaaataataaagcatttaaaagagtggtacacaaattctccatgatgctcaactctgaaagcaacaactaaaatctacaccaaaatacatctcaaccttagaaataattgttttaattaaacaaaatacacttgataaattgcatgaaaagttttttgttgaatctcacaaagcaattacctttgaaatatttatcaacttacttgtatattcatttatttcagag

SEQ ID NO: 5028 - DNA, 1048 bp, Cannabis sativa
tttctaccctattttcttctacttgtcaattttatacaaatagataaattgctttcttgtaatttaaaatggagaaaatatatacaagtcttaaagtttatggatataagtcttttctaggaaatcaaaatcatataaaacacgtataaatttttaaattgtacatatttatcactttaaattaaattttatcaatttaactaaatcatattagttatatataatcaaataatataaatttaaattgaaaattcataaaattttaaacagtttgattgtattaataaaaaattatcaaaattaaaaatttaaatttaaaatactaaatatgtataattttagaatacaagatactaaataaatattattaaaaatacagaatacataatttgtatttaataaaatacaagataccaaatatataaacacccgatcaaaatcatattaaacatatataaaattttcctcactcttaattggtaattggctataatggaatggaattacaacaataccccttaaacaaagccaagttttccaatatgacaaagttggtgattgtctttccatgtaaaaaacaagaagaagaaagtaccaagaaagaaagacttgtaaaaaatggtggattttggttctttcattggaaattgcttcacttcttatatatttcttactttgacatgtctttatttgcaggaatcttagagtacagagcactgtctcccaaattaacttttgacacttcaattttgaatatacatgcataagagaaaatgtaaaatttctaaaaaaaaattcatgctatataaatatttgaaaataaaataaaataaaataagccattaatagattacagatatcaccatacattttatattccttttgatcgtacaatttgaagtctcaatattgataaaaatataattagccaaaaaaaaagttataaatatgtattatccattataattatatggagttataaactatatttgtaaaaaaaaaattaaacaagtattcttggaaattttttaacatttttaaaatattt

SEQ ID NO: 5029 - DNA, 2027 bp, Cannabis sativa
gcttctcttggctggccagggaggttggtagagccccttgatggctcgctttactcctttctgtttctgcttgacggtttcatcatatcttgcatggagactctgttctcctactggcagggctgtactccacatgtacactagctttggcttacgttaacatggcacatcaggttggcaaaatttgggttagacaaggtcaagatatgatttttgatctttatggaaagtaaataagattacaataaaattagattttatttaggacattaaatccgtacacagtcaacttcacaatttcatattttcacttttccgacaatgtgatttatttagaaactgagtagttttgagtctcccatttctacaaaatatgaacatctccgcgaacaagtgtcaaattgccagaatacaaaaatagacaaagtaatgtcaaaatataacaaaggcatcaaaaatatatccctagcacgttttctcactcaccttgcgtccaaatttacatcacatgtcaaccttagcactgagtgtgaacctgggtgttgggatgccaacctatgcgatgggccgagaacaaccttcaataaaatagtcataccacactcaatattgattcgattgatgcgattcaatttatatttcaaagctattattcaatgctctataaagtcatgtcacacacttcaatgacaattctgaagttatcgacttcaaattacacacacaagggagttatgaatttaagttatcacttacttgaagtaggtcccattatcgtgacccatactccagaaattgatgatcaacctcataaattaattttcaccgttaaatcatcatttccggtcaagaatagccaacctgtattttttcatattttttgaattattttattcctatttttaaggatctcattcaccaataaaaagaagaactgctgtagctcatttctcaaattctattaaagttgtcataatgtcagagtatctctttctaatttctctctctagaaattagagcatccaaatttaactatttttctataatttcatctcgtgaaaataaaaactaaaagtagatgtagctctattattatcacgatatagagattgagctactataaattattctctctctatttatacataacatatatttcattctcgccagtgtaacgagcgggtgtagcttaaaaatgtttgtccaaataatttttgagtcaacaatatatatattaatttttattattttaattctttaaaatgaaatatatagataaataaaatgtaatacacattcaatctatatataaatgagagatatgaggcagtgacatgacactcgaagatctctctatttagtattatttattctctgagagatatgaggcaacaatatactaattcatataaaatatatacattttttttttctataatcttcttttttaaaaaaaaaaaaaataaataactctttagcttttttttcatcaaatttttttctttttttcttaattaaaaaatataaaaatcatattttattagattttttagctgtaacgttttttgatttatttattattttttctttgaaatctatatatcattatcattctaattctaacaaaaaaaaaaaaaacataattatctacatttactttttttttccagtcactttctttttactttctgtaaatatttcttaccagcaatcaagatttatgataaagatgataattttttttactctctctcaacataattaaatttcatcaatgataaagaaaattaactaagtatgccaaagtgattttttttttttgtcatagctagcttttaaattttttgtcacggtatgtatacaatataattatataataatttaattacgaaaaaaatttcaatcaccaaataccaagaacaccgctctaaaaagatgggatcaaggattttattcaagcatatatagtatttgttatcaacagttcatggagccaaagaataagcaacaacattacaagatctata

SEQ ID NO: 5030 - DNA, 1842 bp, Cannabis sativa
attattaatatatgtacacttaaatttgcaatcaaaagaactttctaaatgtacttttatagatgcatgataattttcttattctaataattaaagttctcacgtgaaacatagtaccattatagaaatgagagttggaattaattttatgcttattaattaaggagattttagttaacatgatccaaaagatcgagtccgcctacaatacaaaagtattaaacaaagactacaacgttcattcattaacttagatatactctttatataaagtctacactacagatgtcacaaagctttaacatgcctcggacctgtactattttgacggtcaaagggtatatgagtattatttttgagcagcgaagtatttttaaaatatatgactttataattaattaaggatatattcaaaaaactattatatttagggtacatttgaaaagttattgtataattagaattaagtataattttaagtaattataagattttgtgtatttatttaaaccagtaattatacagtaattatataattggagataattaagtagtttcaattacattcttcaatttttataaatttatgagaattagatgtaattacactataattacacaacattactagttttagataattaatattgttactgtgtgctcactaacttatttgtcaaacattaaaagtaagaattcatatacaattattatttataatttaattatacattatattttaaaatagagtgtaattacttttacatgtaattacctttctacataattgttttcaaacatactttaattatataagacttaatacttaattgtacaagtaataatattacatgtaaagtgtgctagataccatttaagagttctcatacataaatatataatcaagagaataaaataaggctagaaaattaaacatgaaacataatatttggaatctttaaaaatcacaataaaaaaattcttttctttttcagaagaaataaattatcatttttgtattgtatataatattttgcattttagtattaaaaaaacattgagtacttatttttttaaaagtatgtatgtgttgttttgcctattatttatttattttttggtctcgcaataaaataaaagaaagtattctctctttccatgatatttctcgatggttggttggcatgcatgtcaagatttcaatatggggaacaaacacatgaaacacacaaggaaaaaaaaatgaaaagtatacaatcatcagagtccagagaatttaagtattttttaagtttcaacgtcactaagtgggctacaatcaagtaccaaaaactataggttacctttttttcgtttctatataaaagtacaaaaagataattatcatattattataattgtaattaagtattaaattttatataattttagcaaaaaaaaaaaagaaaatattgctaactaattataaaatactaccactaaaaaatactaaacatcattgaagtctaatactgatttttttttttatttcctaaaggcttctctaacggtaggtgctgttagaaaaatggacaatttaatcttaaaatattaacttttcaaaactaaatattagtaatggtgctcaccagtactacttattatttttattttatttttttctttctagcttttggttggctagttaaatttcttttaatatatataaaataaaaggtgggttcaggcaacaatgctatattaaacttgccttaaggagaaaatgaagtacccctaattaactttgagtattgttatgtggcacttagtacaactataatatatgttttataattagttaat

SEQ ID NO: 5031 - DNA, 924 bp, Cannabis sativa
  modified_base (786)..(789): a, c, t, g, unknown or other
tatatttatattaaaaatcttactatatgcacttgtttgtgcattccttagacatactaacacatatggaaagcataaaactttagatggagtgaatcagtagaattataacttttgtataatataatatttggtacaatagaattaatactattttattttatcgtatttgtggcaagtgttatttggagttacttcttaatattgtgattcacgtgacgatattgtagcttaaattttaacttataacattatattttgtcgtaactaaaattcttttaccaagaaaataaagaaggcaaaccagctaagtctgaaatattgcaaaatggaatgatttagtgtaaatccctcaaatattgatatctaagaaaatgatgaaaacatgtacagcatatttcttagctctctgtttttctttttacttttttgacaagatttgtattcctcaatgtcaaaatatgtttgttcaccaaaaaaaaataataaaaaaaaatatatgaaaatatgtttggaccacacttttcagatatatggcttatgtgcaagtatctgtattcgtggttggtggtggtccattacgttttatgaacaaattcttgtacatctcaaaccatacaaggccaaacatcaacatagaccaatactaacttgagtcataacaggtttagtaagtaaaaaatctttattactttgaattcgtcccttaagtaagattatagcagtttatttatttattttaataaatcattcaattttattattaaaaatttacgcgcatacttnnnnttttttttttttttcattttatttcatttgtgttgttgtgcggtaattattattttttttactgtgtttactatttatttttttaaaattttgggcaacaaccagtacccctaaacgtcaaaaaaaaaaaaaaaa

SEQ ID NO: 5032 - DNA, 1298 bp, Cannabis sativa
ggtattgaaatttacagggacaacgctggaatatacttgtcccaaagtaagtacataacggagcttcttcaaagggtcaaaatagaaaatacaaaacctagtgtcactccaataacatgcagtagggaaaaccttttctataacaaatggcaaacgtatgagtgaaccaacaatctacagaagtgtaataggagccctgcaatacctcaaccttgccatacttgacatttcttttgctttcaataagctcagccagtccctcaaataacctactgatgtgcactggggagcagccaagaagatacttaggtatctcaaggggacaatgcatcatggattacacatacctccaaccacttatctaactttgattgacttttctgatgcagactgggcctgctgccagatgatagaaagtctattgcaggctattgtgtattcttaggagatgctttgatctcctggtcatcaaagaaataaacagtcgtggctaggagcagcacaaagtctgaatacagatgctcaggtagctgcagaaatttcatgtatccaagagccactgaatgaactcaagttcaaatgcacctcgcacctgttatatggtgtgacaatttgagtgcaagtgcattggctgcaaaccttgtctatcatgctcgaacgaaacacattgagttcgatgttcactttgtgagaaataaaattttagagaagaaactacaaattagatatgtcccctctcatgaccaggtatctgatagcttaaccataggacataccccaactcagtttcaatttcttgtcaacaaactcaatgtgattcaatcaccttattgtttgaggggcggtgtcaaagaaattgaattcaatcatgaattggcataggagtagtggcagtactgaatgagagaatcccaaaattttacaatcattgtgtaatcattatccttttctaacaaacttatcgttaggccttgtttcctgtataattcctctaacaagtgtaatgcttttattggtctctatttttctcttgtaatatcttactctactatataatgaaatgctgatcactcactcattagctgagatttctattcaacatattgtttctttaaatctacactaccgacatcattgataaattatgttcttgatttagaactgagaattattaagacttcgagtaattttaagtatagattttttatgttagtaatattttaaacgataccaaaaataccttttgtaatagtataaattactaattatatataatgcatcgctatttatatattatg

SEQ ID NO: 5033 - DNA, 1550 bp, Cannabis sativa
  modified_base (288)..(288): a, c, t, g, unknown or other
tcgtagtaataccgaaggagaaatatactacaaaaaaaaaattagtgacaaccttttagtcacaacataattttttttgtgaataattgtgacttttagtcacatcaagaagttacttgggactaaaacataatatgtaaatacaagttgtcaataatttaattttagtcacaacaaatattatgactaaaaacacatttagtcacaacaaattgtaatttttatgactaatacttttagccaagaatcttttcacatgcatacgaatgataatttataattagtcanaacttttttacttttagtcacaaactttgttgtgactaaaaataagattttttgtagtgacaattgagaaaataactacctaagcccagtaggaactaaattcgagcggcgaaagccaaatataatgaagacattattaaaaaaaaatcttcttcagtttttttgttggttcctcttcatttttttcgatactcagagctagaaactttccagacaaagaaaaaatatttataataactaaagttcaaagggggagttttctcttcgattattacaaatttaactgaagagaaagggtttggatccttgcatttggtcaagggaggcgaacacccttgatctcttaatttgatcgtacacctgtaaattttcgacattgtaaaatattattctacattataaattattttgaattttctaaaaatttaaaaataatcctaaataactacaacatacatacgtaaccataaatttttttctttaaaaaaaatatctctggtcgaaatagataaaaaatatacaaaaacaacccttttaaataatgtatcataaatataattttttccattaattaatacctatatgaaagttcttcaactcaagcaatggattggcatcttgacaatatatatgtatatatttatatccacggatgatcatgatgatatatgttctttcactgaattttgaaagaaaacaataataataaaatgtagacgagtatttaatttattagttttcctgaagagtaatggagatcatgttgacctaatattaaaaagataataagttaaaataaaaaaaaaaatggatggagttggattggatatatgtatatagggatatgattttgtactttcaccgaatgtattccgcggtacattagatgtgtctcagggtacattagatgagtgtcaaggtatgtttctactttttaatcctaattacccctaaatcaatctcagccgtcagatcaaataactctctcatctaacggctgtcgtacatcacagattacaatccgtgaaagtacaataacgggacaaaatcatatccctatgtatatattgatgggaaagtccaaagaagaaaattgtagtagtgtacgtataataataaaacaataatattaataatgagactgacaataaattacataattttttaacatttataataataataataataatgcatactgtgtggtgacacataccgtgtggttccattctcacaagcactcattataagaacccatacta

SEQ ID NO: 5034 - DNA, 601 bp, Cannabis sativa
tttttttgaagaatgtatgaaaatgaagtaaaaattaaaaaacactcacttaattggtcgccaacgctgaagtttttttgttcattccatgtttgggtgtaataggcagcatttggtggaatggtccagcctatgtggtctcctacggtatgtattgctgcagctgcagtctctgtaaagatgaccaccgtaaggacgaagcagcagatcaaaccagttaaagctctatccattattactattttgggcaagtagaggaagaatataagattcgttgctttttatagagaaatttggacaatatctgtttttgtgctaaaaatatcatggatatttcgctagctacgtggatggacctaatcctatatgcacttcacgacatggaatggtatgtgagtgaagcggtggcacaaaaaagatatatatctctccctctctctcgaagttactctgtttataggaagtaaattaatcagagaactaaagattggagaaaggtgataaaaatggtattataagcataattatagtgcctagattgggccagtacagttgtgtttgggaaaagcaacaaaaaagaacggcataattatggaaaaat

SEQ ID NO: 5035 - DNA, 678 bp, Cannabis sativa
aagatagaagttgttcttcccatcaacaatagctaccattaattgaatatactaactagagcattttattatgttaacattgaaaccttaggggttccaagctaccattattcgaccccctttgttccaagctatgtttgatgtaaaataccatccagaaaagacattatcatacaagacccccaatcttggggccttaattctcgtctcgaggagaccaacaatcccaactctttgtaactggaagaactgtctcactgtgctctgtttttgttgattgttgattccccagatgttccagctgagtatactatccatttttaagaggaggtactccccctcctcctttgattctctcttcagtcacttcctttggattagcagaacccttgtttgatggctcccctgcatctgttgttgctagtgcttggaaaacattgccagtttgtattggtatggtctgttggatctccttaggcttccatcctatttggacagtttggaaaccttcaaagtcaaccacatgttcttttttcttttctgcaacatcctctggttttttctcctttaccacccattcttgtttcttgcttgccttcttcctacaattcgaagtcgaatggcccataccttgaaagtgtccacaaaaaatgggtttccattcgttgtgtacatcca

SEQ ID NO: 5036 - DNA, 1149 bp, Cannabis sativa
tatatatttttggtgtgcgtttgaaaaactaagagagaataaaaattaaatctaattagaaacaattacatagttttacgtgtttatatgattacgtagttatactataattgtataattagaataaattgagattattgatgaattatactcttcaattctcatacctcacgagaattaagtataattacattgtgtaattattaaaaaaaatatttttcatattaagtactaaatattatgtgtaatttctaattatttgtaaaaattaaaatattaatttcatatataaacaccccttatattacacaattattttcaaaacacctttagtatttttggtatataggagataaattataattatatttttttaacatatgcttgcatacaatagattatttaaatcaaatttcgacattctatttttttttaaatgtggaaaattcaacctatatacattatatattatcatatatatatatatatacaattataatttattatttatgtaccgaaaatattaaaacacttaataagtagtgattaatgcaatagttaggataggtatacccatcgcaaaaacttgttggatacaactatagagaaagcaccaggtgttggtgagtgatcatagtcaaccaattaatcaattaattaagtatagttaattatttataaatataatagtgaattatacatgatatatatatatatataatcccttttcaaaaatataaaataaaattatacatcataataattaaaggcaaagaatatgtgagccatagtggatgtgagcgattgttaagagtgtcttcaataggattgttaaccatatttatagtttttaaaatacacatatcattttgaaataattttttttttgttttttctttcatttacataagatttaatatatttcttacaaaaattattttaatagtgcttaactccaaaagttgactatcatggtctccacataatactttttaattaaattttttaattatatatattttctcaaaaaattagttagtgatgtaacttttttttaaaaaaaaaaataaataaataatattacatagtcattattcattttggacaatgatattcataaaattattttaaaacaaaaaatagacacac

SEQ ID NO: 5037 - DNA, 778 bp, Cannabis sativa
tattaattaaaataaaaaaaataattagatcattcgattatttttctaattttataagtaaaataatgtagtttttgttttttttatttagcaaaaaacgtaataaaattttatttgtgattattttttattttaaactcattcatttctccaattaattattctaatttaataaattagtcatttaatatttattatgcaaattaattaatcacatcaattaatttaattctctaatctcaattattttataataataatgaaaaacagaagtatagacttcacctgaaaagttttcctccggctccggttactcctccgaatcaaatcggcggcgactcagattaccatccagaacttccgagtccgaatcaaatcaacggtgagtcagattatcatccagtccttcctggatcagataactggttcagttcaagctctgctgatgccaacataaccgaaggaatagctggaaccagtggcggcgccgcctcatcctccgccactaccgtcgagaatgagaacgaaggaagcgacgtcgttaatgaagctgacgacagtttcggtggatggtttgctcaaggctgaatcactgggccaacatgatgggcctattgggccgagatcgtgctgtgtaataagtgggctggcccacatgactttcttattttatcaataaaaaactttttagttttgttttcttatttcaacttcaatcaaatttcttattttctctttcttttgcttgataatttatttatttagtaatttttttttt

SEQ ID NO: 5038 - DNA, 1219 bp, Cannabis sativa
aaaatatgatacaagtttgaacataacacgaaaagatcaattcacgaactgtgtcaggcttaccttacaaaatattgacacgatacagtccatatttatttttagattgacataccacaacttatattattgctgatttttcaaaataaacctgacactcatatttatagttatactcatgtctcatagtttttctttctaaaaaaagagagtcatagttttctttattaaaagaaaaagagtatcatggttcaaattgatatacataggaaagagagagcaaacctagtccaaattctctagccaaacatcacatcatgctgtcacattttcctcttccaactccaatttttcccaatcacttgatatgaatccatggcgaatcccacagcctctgtcacatcataaaacataagagcatcaccaataccatcaaactaaacgttgccaaatattccaatctttcaaaaataattaattaaaactaaacggcaccataattttttatatttctctctcattcacattattttagcaacttttattctaaaaataattcaaatgctcagcaattctaaaatcattatttttgttctctactttattatttaatatattatatataaaataattaagatttttatccctcaaattttaacatatactaaattatactctttcaactttgaagacagtaaaaaattctccttaaattattagtattgttagatttaaaaatcttttgtctaattttaataaataaagtctaacatagatgaaagttctaagagcatgattaggtagatatcaaaatttagaagtataacttagtacatgaaccatcaccgaattattttaatggaataaaattgaacaaaaacccttaagtttaacaattttatcccaaaaaaagaaattcaaaagaaataatttagtacctcgaaaattctaaaccttatatatgttaataagtatttatcttttcctttgaaaaaaaaaaaaaaatcaagactacgaatacaatgctggggaggagcaatagtagtagcctttcaaattctgaggccaccattagaagcagctttatcaacacctaaacatgggcaacggagctgccctaaggactttactaccgctgataagagactacaaatgggaggagaatcctattttccctttctcacattgactagggttgattcataaaaaaaaaaaaaaa

SEQ ID NO: 5039 - DNA, 1951 bp, Cannabis sativa
gatttatgagaatctcgagcttggggacttttatcgcaactttttgagattggagactaatttgtatcaaagtgaattttttggagatttatgtcacaatttaatatcagcacgtaatatttttgggagcaattaacaaatctgttaaaatgaagaccaatatacttacaagaacctcgagcttggaggttattatcgtaattttttgaagtttgagacttatctgcatcaaaattatctttttaagacttatgttgtaattttcttagaaaaaaatattacttatctccattaaattaaactttttaggaacctttatgtctattgtgttaaaaatatttcttatattttatagtaatataaatattaataataatataaaaaaatgattctagcatcagtaatgaagttaataatgtttttaatcaattacttattacttataaaggtattgctattatatattatggaccctaataatattaggttgaatgcatgtgagtaagtgcttctctcaagctatgtttggtatgaaatagatgataagtttagaaatgatggtaagtaggaggaatgaagaaaatagttgctctcttttatatagtttagtgttcggagtagagttgtaaagatgaaaagtaaaataaatattaaaattattattttatttttttgaaggatgaaaataacatttaatatagttttttatctttttttttttagattcatccatgaaaattgagtatttggaaggagatggtctccctccatttctattttcttttcttttttccctcttatcaaacaagagaattcatcaatttccctatccctttctccttctcattttctctcatttatagaacatagtgttaaatatgatgatagattaatttttaaagaaaaaataaataaataatataagtttagatttcttctattgaaatgaagattcaataaagagtgggatgaaataagatttttctttattattattattttatttttttatgaatttctttgagagaaattaggcttttgaagagcatagagagaccatgtgagaaagtgtgatcaaaactttcataagctcttggaaattttgtggtacatcttaaaagggtattttagtagactcatttcagttttgatatctaattttttaatttattttttttttcttgatcatgtatgttgtagttatttaagactacctgtaaatttttaaataataatgaatagtttgcagtgtcaaaaatataagaataagaatagaaatgagaatgggaacaagaatggaatgagaatctcatctatttgcctggtatgtaattcccaacctgaaattactgttcatgctctgcttaactaccctcttgcttcgcattattggtcaaccttgtggattactttgaatatggcattaccatcctcttttggcagctggctagaagagatttttcacaagcttgatgaggaacaagtatgttatgttgtaatgatgtgttgggctttgtgaaaggtctgaaatgctactgtttggaataaaaaagcatcctctcacattgagattctggcatcggctagaacaacacttgattattggtaaaaaagctcaggataacacttgtttatcctctttattttttaaaaaaacaaaggtgatggcactgagctttggactaaagtgaattccaacaacatcaaggtcaatgtcgatgctgccctatttgcacaggaaaattcttatggatttggaattgtagctcgtgacaaccatggcaagttaattgaggctaaatcttgttaccaaaaaggtgattatccctgcagaaattattgaagccattggtatcaatgaggctcttaactggataagaattaaacagtgacaaaatgttcagatcaagatggataacatgcaaccgtccaaagtattcgcagcaatcaa

SEQ ID NO: 5040 - DNA, 602 bp, Cannabis sativa
tggccaccgtcatgggtaatgtctgattgttgagactgagatagtcggtacttctttctgggtggcaatagggatgagagcaagagttcatgtgtgtttcccaattggacaaaccatgggttaatgcgctttacattctttagaaaatttccatcatcccaagtgacctgtagaaacaggaggaaaaagtgcacgaaatatgtcaacaagtgagtggagaaaatatcaaagtcgtcaactaaacagttcttgtatagttcagaacatattactaccacaaacaaaacaagtccctcccactaaatgacaacaagtttcagataatatggtcatgataggacaaggtggtcatgatgaggataaataccatatgccatgtttggtttaatgtaatcttaatcgtaatgaaattactattacaatttcataatttggtttggttttgaaaacattgtaatgcctttaatcaccattacactattcatatgaataaggaaaacagctaatcatcattattacactatttatatacaaatatagatacctatataccctactcattaccatcattattccaaaaacaagtgttaaaacatgaacaa

SEQ ID NO: 5041 - DNA, 2495 bp, Cannabis sativa
agcacttcaaaggattgagcttcaatttgtattatcttaggatctcgaaacactcctttaagtcttcaatgtgcccttaggccttcttagatttgaccagcatgtcattgacgtatacctccatgttcctccctatctagtctttaaacattcagttgactaacctctgataggtagctccggtattctttaaaccaaatgacatcactttgtagcagtataggtcgatgttcgttcagaagcttgtttgttcttgatcagatggatgtatacttatctaattgtaccccaagtatgcatccaaaagtcaagatttcatggccagttgtcgcatctaccaactaatcgattctagggagggggaagcaatccttcgagcatgctttgttcaagtttgtaaagtcaatgcataccctctaggtaccattgggctttggaaataatactaggtttgagacgcagattgagtagaaggattcttgatgaagttatttttccaaagtttttccacctcttcctttagtgccttagctctttccttgttgagtgatctccatttctactggaccgacttgaagttgttgacatcgatgtttaaagtgtggctaattacgatggggcttatgcattccatctcttcatgtgaccaggcaacaacatctctatttctactggaccggcttaaagttgttaacatcaatgtttaaagcgtgcctaattacggcgggacttatgccttccatgtcttcatgtgaccagacaaaaacatcttggttctcccttaagaactggatcaaggtggatcttatgtccttagggagttttttatcgatcttgattaacttcgatgggtgtttagggtctaatggtacgtcctccaactcttcaatttgaccaacccctgtatcggtatccctaaaatggggatcaatgtccttaaccccattttgggcgagtcctcattgttgagaatcgcctattgtagccttgagggatttgtatgccttttccctggtcatgatggataggctgtaacactctcgtgctactagttggttgccctttaggcagcctattccaccttggtaggaagcttgatgaggagatgaaagattggtatgaccgcttttaggtcatatagggtcagacaaccaatcatggcgttgtatggagatacgatatcgaataccacaaataatgccatgacagcgacattctcgggggttgctcccacggtcaatggtagcctaatgagcccagccgataccataccttttcctgtgaatccatatatgagatattcacagggttccaaatcctttgcccccaaacctatcctcttcaatgaggacttgaagaagatattagttgacgacccatcataaataattattcttgctacaatcatattggcgatctatacttctaccacaaaggggtcattgtgtgggtagcgaacatggttggtgtcatcctcagagaatgtgattgattcatattcatactgatgttatttgggagttcgctcctacactgccaacacatcctcactcaactcatgtctatgggatcgagcatatctttctcgagatgtttttggaattcttggctaaatgaggtcctccagatatcacgtctaagcgacttgcgatggggggaggtaatttggtcatccctggccacctgctgttgttactgagggggttgattgttttcatgacgtacatacctcctccaatgggggttgttttgtttgataatgaaatctatctcctccttcagattgttgcactggtctgtgtcatgaccataatcattgtagaatcagcaaaacttattcatgtctcgtttgttgatatccttcctcatgggataaggcttacgatatggcactaccgagtgagtggcgttgtagatattttccctcgtgttaaggaggatgttgtaggtagtgaacctgggggttggatcccgcttggctggctccgtggtattgtttggtcgcttgctgtcattgttgttactaccaccattgccggtatttcctctctttccattgttggagccattcttagcattgtctcactgggagctttggccacttgaacttgctccattcttccagcctttagcttggttgaagcctttagcatttcgctcaacttcttccaatttaatgaaatcattagtcctgttaaggaaatctcgcatggagtgggttggtttctgccttgtgtccttccataatcgatttcccaccagaatgcccccatgatagtggcctattttccatcatcacttaggtttttgaccttagtttcttcatacataaagtgttggatgtagtctttaagcgactcattgagctttttcttgatggcgattaagtcacctaattctgtcggtatctatcaggcttaaaaaattgggtatagaatgacccttcaaactcatcacaggaggtgatcctccttggggataatttggtgaaccat

SEQ ID NO: 5042 - DNA, 918 bp, Cannabis sativa
ccccgaacctcctgcaggtactgaccacaccagtccacaacatctgcagctctcggcaccttgccgacatgcttcgtattgttccgaacataccacagttgccagcacaagacaagaaagaattcaaacatctcagtattcatacctttggatatcctcatgagaaaagagatggtgtcctccttgccaagccgatgccttacatccttaaaaccactcaatttccaaacttctttatttactctacagccccagatggcatgaaagccagattctctcagcccttttgaacatctttggcattcaggatcaacggcaactttccttgaagcaagtgccgagttagtaggaagtcatccattagccaacttccacacaaagtgtttgatcttagaagggagctttaatttccacattttagtccaccaatccattgtaacgttctcatccgaggtggccacttctttcctgatttcagcagccatacgatagccactacgcaccgtatattctccattcttactataatgccacatgagtttgtcttccacaccatcacgaacatgagggagactcacaattaaattagcatcatcaccattaaaattagcccgaataaaaccctcatcccaatctccattaggaagagtcaagtccaccacacacaattgagccggtagctccggcttatcataaattttgaaactccgtggccttggtagccatggatcctccaagattcgaacttgttgaccatccccaattctccaccgtgaccccttcacaataacctccttcccccaaaccaaacttcgccacacaaacgaagcatgtgaaccacacttagcctccaaaacccccttcctaggaaaataactctccttaagcaccctactacacaaagacaatggctgccgg

SEQ ID NO: 5043 - DNA, 1035 bp, Cannabis sativa
  modified_base (169)..(170): a, c, t, g, unknown or other
cacaccctcaagaaagaagatcagatgttgataataataggtgaaatgctaaagcaagcacacgtgttattattgttgtaattaaatattgagcattgctattagacactagtggtgcctaacaccttttcgacatgtcgcgttgcgattagctagcgatactccctannagctattatattaaattatatgatcccttacttagttggactaatagcacgtaagagggtgctatttagcatttctcttaaatattagatcgacacacaatttaattcgctaatcgattacaatgcgctaccttagtatagttttaaaaatcatatgttgctgagaaatattaaaggcatcttatagtgtcaaatactataaaatataatatatcactattaatacaaattattattaagtttcacataataaaatttaataaataatataaacctgctaactaatcgcaatatgctatatctgtacaatgttgaataccgtatagtacttaataataatgctctaataataactctcaaaaatgttaaaaaataccttatggtggtgacaagcaccacaacatgagttacattgacattgatacatattattatcaagttctacatagtttagtttaataaattgatacttgcaccaaagtccttttaacatttgttattattacacatatcactataataaaaaaaaaatttatgattttgttgctatcgtattttttttatccatcaagtctcaacttaaaaacacatagggcttgtttggcatggctttggaagagcttttgaagtctcaaagctacttagtaacaccattcaaaaaagaaaaaatatgtagtagtatatttttttaacatatttaatatgtagtctattaacatatagtcacgtatttaattatatgtataacaattataaatattaaaaaaaaattgaagtaaatattttttttaataaataatataaaaaactgctaactaatcaaagctgcaccttaatagcactctataaatagttggagctgaga

SEQ ID NO: 5044 - DNA, 522 bp, Cannabis sativa
atttggagagtttcatgttagttttttctgtcatttgtaacagtttatatcctttgccctcattggtttctactgtctattatacctttgtattcacactctatattcaataataacagacaaaggtattttcacaaaaatggtgggttgtactacctcttatcagatttggcatacctttggaaacgcatttcactactctcaaatccatgccgatatttccctattcaaatcagaactctccttcaatcatccaaagacaaatccaatgtctcccaacaaatatcttccaaaaataaaatacgatattgaccaacttgcttgtgttgggatatgttatgactattaaaaaggatgagcaaaaagatataatctaagactataatcaaaccatttaagctcatctaaaacaatgcaatatcatcgtatttaagccatcaaaacaaattatgaaaaatagtcttaccttgtaataatggtaatgaattcctatgcctcttttgtgcttttcatattccttca

SEQ ID NO: 5045 - DNA, 559 bp, Cannabis sativa
aaccaatcctcaaactcaccaactttcaacctcacgaagtgatccttgaacatctcaactcactgcacctcaatgtcagcagttaatctccatgctcagtcaacaattgcaacccacaactgatgcatcaacatcagaaggaccagcagtcaacaactttactggtaacaaaaattctcaagcgcctcatttttgggtaatagatagtggtgctactcaccacgtttgctgcaacattagatgtttttctcatatcacaatacccacaacacacaagtctgtcacattaccaaatggtaatactgtcaaaatagaacttgttggaaccatgcctataaactctgctataactttgcacaatgttctatttgttcccaaatttcaattaaatttactctctattacttctctaattgatgacagccaatatcatgtttctttcacacctaacttgtgttatattcaggaccatcatcagaccttgacgattgggactgctagaagaatcggcaaactttaccacatcaaccaagatgcctcttattaccaagcatatagt

SEQ ID NO: 5046 - DNA, 879 bp, Cannabis sativa
aatatatatttatgagcatatattcttatcgggtactattagtgtttagtattttttataaattgtgctttatgattggttagtaatattctataaaaactattttcttaaattatattttaccaataatacctttaacaactctatatttatataaattagcattttaggccaattttaatgaaacattaaaatgtcaaatttaatgaaattttacactaaatttattctaaccatactttaaaattatttaatttataatattgtttatagtgttccactattattagtgtgatacaatagaatacactaaatttttttttatattagttttaatatttaaatattatatttatacttaaatttgttgtgtttttcatgtaataattcttttattatttgtgtatatttataatttagtaaaatagtataataataaagaatataattttaatgtaatttttagtattgtgcttgaaataaaaagagaaattaatgtcaaaattttattatttttatgttgatttaacattaaattaacatttagggagttgaacaaataaaatagaaaagtaggaaaacattataatgtatagaaaatttctgacagttgttgtttgaaactcaaggcagtactatagataaataattttttaaagaaagaacactttgactgacgtttacataaattaatgtgtttttgctttctttgttttttcatctagtacgttgaaactcgatttggcagtatatatatatatatttatatatatatataataggcagttgtctcatatataaaataatatcgaaagtaagaattggacaacattatcattaatgccgcctctttagtctcttttttctttttttcttttt

SEQ ID NO: 5047 - DNA, 1170 bp, Cannabis sativa
acttttaatatataaagattttatagattatccgttttttttatttcttagagttgatgcaccctctgaagttgttttaatgtttatttaatttatatattataataaagttgttataaagttgtttgttgattgttgattgttatttagttgttcaattagaaaaaataaaaaattatacatatatttaatttttcatggtatatatatattaagattgttattatgttatttatttatttattcttaggtattttagattgtcgacacaatacttagtttagaaaatgggaattaactaaaaagatatataagtatttattttaattttgtttaaacaactaaatataggaatgacacattaactctgttataatatgcaaataaattaaatatcaacatatttcatcaaaacttaaaaataaccccaaaataaccttccaaaaaataaattaaaacttgaaaaccaccacaaattgtccatatatcaacttattatattaacactatagtttttccattggtgagttttacttgttttattaagattgtgtgttgttttttattttttgtttctttggacttatctacactatttattgatgtccaattgatttacatatgtagatagtgttgttatgccaaaaaattttaattgttattaagttttttttttaataattaacttattttatcaatacaaaaattagtaattatttgtttatggttattacttttaatttttaagattatttgtgttgttaattataagtttgttttgagttgacataatttgttggtacctaatttatttttattttataattgagttattgtttagttgttattattatttaattgtttagcttaaaaaaaatacaaattttatcttttatgggtatacatagggttgtttattggactaaatctaatgtttttaggtctatccagattcaatccaattatatatttgatgttagattttactatccgattcaattcaattaattttattttgtgtcaaatcgtattgactcgttttttatctgcatctaattttcttaatcttaacacataaaattcgtctagtgtatgtgtgtagcgtcgaaacctattttgccacccgtgagagagaacttgttactcctaattacccctttgtcaattaaa

SEQ ID NO: 5048 - DNA, 659 bp, Cannabis sativa
ctctttggagccaaaatactcaacagccaatgcattggccaactcagttttgccaaccccggttggacctgtgaataagaagcttgccattggccggctggggtctcttattccagcacgagctcgacgaatggcacggctaatggcctcaacagcttcatcctgtcctataattcgtttgtgtagtgttttctccatgttgagcaacttgtttgattctgagggtgatagactctccaatggaattcctgtccaggatgaaatcaagtgttgaatatctgcctctgtaaccatcacttgaccattggtagttacttctgttttgtgaagttgagctcgggaaccagcttggtcaatcaagtctattgctttatcagggagaaaccgacccctgattcaaatatttgaaatgaaaccacaaaaacaaaacaaaataaaaaactatcactgatgttgaatgaaaacaagtacctgatgtactggtttgacaaacgagcagcagcagtaatagcctttttcgaatactcaacgttatgaaagctctcatatttcttcagtaaacctttcaatatttggatagtatcatcaactgatggttcaggaacttcaactgcttgaaatcttcttttcaaagctgagtctttctcaatatacttctt

SEQ ID NO: 5049 - DNA, 1368 bp, Cannabis sativa
aacagtgcttctttgctgggattgctttcaatgtatacagacatgtgatctcgaagggagagggacctttccatcccatcatatgatagaaagacctcaaagaggccaaaactctatatccatttgggattaactggaaaggggcaatccctatgaagttacagaagtcttcaaaataatccttgagcgaaaggatggcctcggctcagatgtgttgtatactcgaagccccaatacgagaagaatcactcgtactacattcaaaatccctattgaagtggacataggaaagcagcttctctcatcgcgctcaacagatcggcatataaaactatttccttattttatgtcgcgcagtgttagaaagggcccgacatatgggacaatggaggtgacttttgactgaaaattttttgcctcaaattatacaaaggggtcttaggataacctagacttacgacctttaggggccgtaatctggaaatctagctcacatagcaaaaaaataacagtaacaggaggcaaaaaataaaggctcaccaatggatacttaattagactatgcaactcaggccaagctgcatctcgtaaacaactgcattttctctcaatgacctcatctataaaacgtttataacgagcaaaagtatttgttcgatttaacctatcgttatattccctaatcttttcgtcattctcctaaagtatcgttttgaaattcttgcgtctcgatttacaggaaaaaacaggtaaataatggttttcatgctctaaaaattttgggtttacaaattcgaattcaggtagaggcattttcaataattaaattttgaaaaatttaaagaattaaaattctgaaaaatttgaagaattaaaattcaggaataataaagatcaccaaaaattcaaatatttacctaaagattaaatgaacctaataaatcgtcccaaatgtagaaaataaaaatgataaataaaagagaaaagtcgaaatacgtactggtttttgggatgaatagtaatctggaagaattcctcactagaaatttttgataccaggggtatggtatataacgtcttttgggttggaaaaaatggttgttgacactcgaagaaaatagacaagaaataatgaggacatgcaagaatgagagagaatagagaaagaaaattattttgctgtgaaaactctcaatgaacgaaaacggcataaaaatgaagaagaagaggagatggatctttataaaagcctcatgggactattggatcttaataatgaccaatcaaaggtgatcaaacaaatcatagatcagttgaggggacgacatttaaatgtctatatgacattttctcgataacacaaaactg

SEQ ID NO: 5050 - DNA, 2431 bp, Cannabis sativa
tatcaaatttccacccaagaatacagcatagccaccagtagacttacggtcatcaatgctggacgcccaatcaacatcagagtaggtctgaaggtccaatcttgcagcaggttgaatgaagagtccttcatggatggtgccttttaagtaccgaaataattttgcaggcatcccaatgtgtggttgtaggagcatgaataaattggctgagtttgttgacaatgaaagctatgtcgggtcgagtaagtgtaaggtattgaagggctcccaaggtacttctgtatagtgtaggatcgggaaagggatcaccaacatttaaggataatttgattgttgaactagtggggctgggacttggtttggctccatccattttgactttgctgagaatatcaacaatatatttggactgagttaagtgcattccaacagaggtgcgatttacttcaactcccagaaagtaatgaagagatctcagatttttgacatcgaattctttgttgagttcattaatcagactcaaaattaaatgcttgtttggacctgtgattagtatgtcgtcgacatacacaagcagtaggatttgttgagcacctgaaccagagaagtatagagagttgtcagaccgagaataagaaaatcccttgctgcagagggtagatttgagcttttcattccaagctctaggggcttgtttaagtccatagatggccttgtgtagtttgcatgcatgagtagggtattggggatcaataaagccaggaggctgagtcataaagactgtttctttgagagtaccatttagaaaagcattcgaaacatctagctgagtgatgtcccagttgttagatatggccaaagtgagcaaagttctgactgttgtaggcttcacaacagggctgaatgtctctgtatagtctatccctggagtttgtgagtatcccttggctactagtctcgacttgaacttatcaatagatccatccgcattgagctttattctatgaacccatttatttcctacaagtgtcatatttggtgagtagggaactagtgtccaggtatggtttttctttagagttgtatcttccttctgcattgatgcaaaccagatggggttggaaagggcctgttttagtgttgtagagatttttggtaaggtggactcaggcaagggatggagggtagagtggtatgctttgggtttgtgaatgcctgatttggatcgggtctgcatttggtgtgtattggtgatgggaatctggtgaggagggggttgctgtgtggtgtttggtgccagttctgcagtagcaggtggggcagtagaggtggtattggtagtggtggggacaggttgaattactggtgcagaaggaagtattgaagcagcagcatgctcagtgttgggcatcatttttgattcagtggttgcagcaggcattgcatcaacatgtgagttagaaaatattggagatgtaggaaatgaagtggttgggaataaagattgtgaagaagaatgtacctgtggtgtactagtggaatgaaaagctagaaaatcttcttcatcaaagtctacatttcttgcgatataaactttgccatttttgttctcacataagtagcctttatgattcagagagtacccaataagtatgcacttttcagatcttagagccaatttgtgactgttgtaaggccgtaggtatgggtaacaagcacacccgaatgacttaagcatagtatagtcaggaattttatgaaagagacactcaaagagagataagtcaccaagaactttagttggcattcgattaatgagataaacagcatgcttaaaggcaagccacctgtaagataagggtagaccggcatgagctagcaatgtaaggccagtttcagtaatgtggcgatgttttcgttcagctctgccgttttgagcatggtcatgagggcatggatgttgaaagtggactccatggtgatttaggaaagatgctagggacctatattcacctccccaatcagactgaacagttttgatgaggagatcgaattgcttttcaacaaaaatcttgaactgtaagaatgtagtctaggcttgggattttgtggatagaggaaaaatccatgtatagcgactgaagtcatcaataaaatggatataatatctatgcccttctttggactgtatatgagatggtccccacaaattagtgtagattaattgtaatagttttgaggccctagactcggatagaggatgaaattgcttgtgacttttgccttttttacaagattcacagaaccttaggcttttaaagctggtgggaatatgcaaagtagataaaatttttgcaagaatttctggtgtgggatgaccaagctttgaatgccaaatgttgacatcattcttttgaacaagaaaagataa

SEQ ID NO: 5051 - DNA, 753 bp, Cannabis sativa
aaataaataatgtattatttgattttgaaaaatagctagctatagtagataatattcatttgaccatttaaatattgccaaatgcaacaagatcgacaaacaaattaaatgaagatgatatgatgatgagatcaaattaataaccgttaaaaacaatttgaaaaactagcttggaaatagtggatatattttcattaatgaaaattaataactgcctagtttcactagatttattattaaggaactagcttatctctagatatataaatatattgtttttctttaaatttgtaccgcgccaaaaaaacaaaatattactatatcacaacaaataacaaatttatataaaggcaactactacataaataaatattaatacatagttttttttttatcaacaatattactacttagtgaatttgtataaataattgtatatatacaaataaaatatacatatatatatgtgtgtgtgtgcagacttaagtactgtaaagagtggggttactttggtttgaaaagggacgttacatgggacggaatagacaatatctgaaatgagtgacagagccccacagctactgtttcccctactaataatatatacactctactacactcctccctacctactcctacgctgctcctgcaatcgctgcctctgcctctcctctctgcttacatatatatacatatctatggcttcatctgtactagtactaccactgcttgttcatagtacacatatacccc

SEQ ID NO: 5052 - DNA, 1029 bp, Cannabis sativa
tattattatttattattttctaaaggcttaattagcaatttttcctccgaactctgacatgtactaaatcatgtactaaaattagacaaaaatctttaaatttaacaatctcaatatatagatcaggagaaatttttaacagccaaaaaagtttaggaagcatgatttggtatatgtcaaagttcggggaaaaattatcaattagtctttctaaattatcttgtttaaaagttgttagattaaattatatgagaccctatataactatattgacttgtagaaagatgttaagcaccctgacttttgactattctcctatataaattaacaaataataatttagaggatttaatagaataataaaatgtttgagcattgctaatattgagaactggaatgtacctaacatcacatagatatatatattgcgttattatttattaattgaatattaatttatactaataatattatatcactcttcgtaatgcttgataagtgttcattagcattttctcaaatatttatatataaaagtattatgcattttatataatattgagagaaacaaagcacacatgcaaatctgcttcgtattgcgcttgaattagccatgtcaaaaaataatctacgctgaataatatgctagtatataatataatgaaagagcatacaaatagttataatttttatttttataatataaaagtgtagatagtagatatttagaatattttaccagagatttaataattgactgtaccaaatacaagactatatattcaaatatcttttgtgctcgtcctgatttattttatatcatgtgtttgtaaaatatattgtttgaactttatttatttatcttcagttcttcaaaaatttataaatatttaaataattatgatacatattattatataagaataccaaaaaaaaaaaaatatagtacttataattaatggtttataagtttcaaaggaaaaagaaaaattagagagagaagagtttagtacttaccggtactaacac

SEQ ID NO: 5053 - DNA, 1247 bp, Cannabis sativa
aaatcacccaccgtattctccgacgaaatcactacctgaaccggccccaagctcttctccatcgtcacgttcagcagaagtttcgtcggccgccgtgggctggtcaccttctccttcgccggcaaaaaaaatctcccagtcggtactgaaaggattcctccgggacggcgagctaagtcgacggagtttctctccggcgggaaagagaggagcggccactcggagcccggctgagccgccttgccggagacagatctccgaggataagaaggccgcggaatcatcgagaagagtatcttcgtggtttgatagttttatttaaattttagattattaattttaaaaataaataaataaataaattgttgacagttataaaagcaggaaggaagttatgaagggaatttgatttggattttgtgaaatgtgagattagaaaaggtcgaaatggaaacaacatatagagaaagcgtgaagcttcggagaaagtaccaaagtacgaaaatgccctttaacttcggtttatttacctaaaattaattgcaataacgtgccacgtgaacgcttccggtttatgaaagcaatcactcattagttatttatttattttcttttaaatgtggggcttgatttttatttttttttatgttgttttgacataattttaaaaaaataaaataaaattttattatagaatgaaaatcttagaaccaaccatgcaacttttttttttttttctaataaatttgtaattttcattaatataaaacagttcagtacaatttattacctaacaatgaatggtggaattgcactattccacactaattttttattaagctctaaaacctttttagctgtgaattaacattaaactccctaaatacatgtttaagaataaccttagggatgttagatagagagttataattaaatatcaaatataatgtccgatgatacaaaataatccctcttagcacaccagtgtaaagcatattttagtgctaaagtctcagctaaggtgaaatttgttatttctgcaaggggaatagacaaaccagccactatactttctttccagtctttaattatgttgggtttgctcttttattattgggcttggaccaataaaggctaaagcccatttgtaattaaaaggaaacaaaataagaaaattaaaaggttgatggttgttgtcgtggacaacaagtgttgcattaaacaattgattctcatctattttaact

SEQ ID NO: 5054 - DNA, 518 bp, Cannabis sativa
tactaaagcggtcattacagtatcattagtagttgtttgcgacaaagtcactaatcgaccccccctttaatttctttttaatagtgaataattaaataaatatagtcctcgtgggttcaacccttaattacgattgtcataaaataattggaagtattggaattaaaaaaatagtaaatttattgtggcttacgacacgcaatggttatctaatatgagggtcttactataacagttgcatagggtctcctagttcaatttgaggatatattagtggaatttagtaatttatctatattcatatttatttgtagtattaacaattaattaacatttttttttgtaaatttaattgttttaacaagtcgtctattatatacgacacacagtctgcttcatacgacaagcagtctaaaatattgaaagcctgtattttgtgttttagccaatctggtattttggataggacgtctattttagaagattagttgtcatctaccgtcctttaattgtgtatg

SEQ ID NO: 5055 - DNA, 1425 bp, Cannabis sativa
ataagagaatctgataagtttgtgtggtccttgtacttagtttcttatttgttttaaaactattttttggttgtaatcctaggtggcttaagtcattaatgacctttcttgattcgatattagaagtgtactgatttttcagtaataattgaattcttttgtgtgtaactataaaatatttgattccattcataaattttattccctatgagttttagtctcaatcaaactgtcatcttactttcgtgtttgttggaccccacaaattactttttactcaaattaaccaagcctaactttgtttgattttcgtttgcaatgatagacataaacttagtaggaatatctctcccaccgaaaattcgatctggaaaagaacatgaaactgtagtaaaattatgagtaactctgttagcagaatgataaacaaaagagagtacaacactgcttaattcagcaaaagactttcatcaatcatcaaccaacccaaatggagagatcaaaaaactttgtttgattttaataaaaaactagagaggaaattcattgattcttgtgtattgttgtctacctagactcattctaatatctaagataagtgtatcattgccctttgaatttaatatatgtccttggctatatttgttgttttcatgcagattggtgtggttgttctgcttcagctttgtacagcaatctccctcaacaatgcaggatggctaaagatactcgcaatcgcctacttcttcggttcatttctcaaccacaacctattcttagctatccacgagctcagtcacaatctcgccttctcaactcccgtctacaatcgctggctaggcatttttgccaaccttccaattggggttcccatgtcagtcaccttccaaaaataccacctcgaacaccatcgattccaaggagtagatggcattgacatggacatcccaagtcaaaccgaagcacacttagtcaccaatgtaatagctaaatccatctgggttctcttacaactcttcttctacgcatttagaccactctttctcaaaccgaaaccacctggcttatgggaattcattaacttctcaatccaaatagctcttgatgttgccatggtttattttcggggatggaaatcgttggcttatctgatcttatccacatttgttggaggtgggatgcaccctatggctggtcacttcatctcagagcattatgtattcaatcctaaacaagagacatattcttattatggtccactgaatcttctgacatggagtgttggataccataatgaacaccatgattttccaaggattcctggtaacaaactccataaggtgaaggagattgcatcagagtactatgatggtttagactcatataaatcttggagccaaattatatatatgtatgttatggatc

SEQ ID NO: 5056 - DNA, 1746 bp, Cannabis sativa
cttgaatatgttacttatccaacttaacaataagataatatacaagtatatatatctcatttctttctgtcaattcaatctcaaagcctaactatagtcccaataaagaaaactaaagaagataaatcatcctttattaggtttttgcttttcccaagttttgatattatataataaactaattttgaactaaaaagatttatcctttagtgtaaatttggaaaaaggaggagaggcagatggcccaatttactatggtcattacacgtgagaatgactcagcttgaagggacattattaaatgaaaagtattagaataaaatatatatatatatacatatggatattagtggcatcaatacaattagttcaattaaaaatgaagtttcatttattttaatttgataaatattataagagtagtgttattaaatattagtggtgctcaatattttcataagtattttacgattagttagtgatattttttaaaagctattttcttaagttatatgaaatctgatactaaattacactaataatagtatgacaccgagaaaggtactaagcacagtgatacttttgaagacatattataaagacatattgaaggtaccagttgtgtctaacattcttcaatatatcatatcgctattgatgtaattaagtattgaatctcatataatttactataataatttttatgaaatattactaattaattgtaatgtatcatatttaagtgatgataggtactactagtatctaataacaatatcgctaattcttcacgagatgtcacctcgtaatagtatcgagcatctcaggcccaatcttgggcatagacatgctaggtctttgcctaaggtaaaaatttccttctaaaattacatattttttttattacttttaataagtaccacacttttttttaaataaaaatttaaaaatatttttttctagacccattatatttcagggccggctctgtggcacccggtaacaccaccaatggtgctcattgctctaaaagttttggtccaaaatatatataatctcaaactcaattctcaaccactatttttgatctcttttttcttttcagacaaacaattttcaccaactcaacaattattatttactatatacccttgtatatttgcaaaggttaaaaccaaagtctagccaaaaagtaacaatacaactcaaacacaccacaagagaatatcactatgcatacatataggttgactattagtatatattggttatatatatctttctatcttttgaggattaatagtagtaattaattattttctttctcaaaaaggtagttaagcttactaatagagattctaatcaaagaatgaggtccctactattgttagtatgggcggttaagagactaatgagaatctagatcatgattacttggctttgttatataagttaagtaatcatactcaaccacccattactttattattggccttttttttcttccctaatactaaagaatatcatgaatgatatttgaaattaaaagaaatgtattattatgtcataatagcaaaaaaaagtatataaggacatatgtcttgctcttgttggcttctttttctaattagaagaatcattaagtataatataggtctataatagaaaatgacatgtcatttgtggtagaattatcatatttccaaaaaagaatttaaatagaaatatatgatcaaattttgagct

SEQ ID NO: 5057 - DNA, 1410 bp, Cannabis sativa
caacactcgaaatcacctacataggagacaatgcgaggtgagcaacctgacaaagctacaaacaaaggtctagtcaaatatacccaagggtactttctaggtaaatcacattgtacaaggttgggtatcagtaaagtaccgtcttaagtacacttacttagacaaatagtgagtcctaagttgtgcacttgactataatggactcattaccaagtcttatatagagttcccaagggaaccacacataagattacaattgtatatgcctacaatgttgtaacgagaccctagccgaggttaaaagaggacgaaagactagccgcccgcttggaaccttagccttggtcggctagggttcccaagccttaaagggtcagccaggtcccatgacccagccaagggccggctaggaagtttacttccaggcataggccgggcaactcttagggtaaccccctatggtcggccagaccacatggtgaacatctatggccggccaagtcttaagtaagacctccatggccggccagggtatgcgaaggatccaaacatgtgtttttcaagaactcgaatgtgttcttcgtgacttaaagagccaagattcacaacaaaggttagaatcatatatttttttgtctagaaatcacacattacacatcctaagactaccatgcggattgaaataccaaaaagattacaatttaatgtgggaatcaaaagacattaaaagcaaagaaaagattcatgcaatcatggtaaaatcaaccaaatcaagtaaataacgggaatagaaagcttacccactacaagaaatgtttgatgaagagaataagaagcttgtattgttaaaatagcataaaaattccaggagatggagcaatatgggtttcggcctctagagagaaggaagagcttttcaaagttaatttttctagtgagcgaatgaaaagtgaaaagtgaagaggagtttccttccataagacttatatagtttctgtgggaccacttcttcacttgccacccagtgttcaattaaaaagcatgtggaaatacaatgcagttaacttactgcaacaaatgagatcaaacagtcaagagcagttatttcaaagactaaaaatgtagcaatatttactcaactaaggctacatcagtcccaactaagctagaaagtccttatccacatagacgtccacacaggaacttaggaggcaaatgttatctcggtttttgcccacctgacgtggcatgtctacgtggccgatatcaatgccacatggcagtacaactcgccaacaaaaatgccaagtcatctactcaacacttcgaccaacgggaagtctcgacactcaaatgggatgatgaatgacagaccaactatctctaggaggctggctggccctatggcca

SEQ ID NO: 5058 - DNA, 625 bp, Cannabis sativa
atatatacatatatatattcatataaatttaatttggaaaatattttggaattatttctttttatttctttttagctaataacttaattttgttgtgtttgagtgatcatattataatatttattaaattaatttttgtttaatttcatataaatttaatttcgaaaatgttttgagtatttagtagttatttctttttattatacttaaaaaataatctcactttttattgaatgaaaaatgttaaaattaaggataccactacaaaatactatatcctatacttaagtatattaggttttgtatattttaactaattaaataattattatagattactgttaattatttacatttatagtaaattttaacactgcttaactaataacaatgctctaaaaaatttaaggaggattagaatctcccataggttgttgatcagtactataacaaaaaattatttattactaatttagttttatttataagtatttgactaaaaatacattaagttataataaattattatttttaattgtaaattttattgtaactaaaaataaaaaaatttatagttgagatcttttgaattgttttcgagtcatattataataataataataat

SEQ ID NO: 5059 - DNA, 845 bp, Cannabis sativa
tattaattatttttgtccctacaggatccattttaagaatttaacaaaattataaatacttaattagcagaccgcttaataacataaagagacattactaacatcggccaacaaagccttacaatctaaaataatatggccataaggagaagccataagtttattcttttttacatcattaatcactctaagacaatattcagactcaacaatcacattagtccagccagtactcttgatccaactcaaagcctcatttattccaatagcttctacctcatgggactgaaatgtaccaaccttattcatattttttgtgagaataattgctccagctgaagacgagaaactggtcctacaccgtacctcttctcactagcaaagagtacaccatcaacatttactttgatttggttgaaatataaatataagccagtagtacacaccccgcagtattgcatgtgctattatttattgattaattctaacaactttatgatagctaagatctgatcaattggcgaattagagaacagcctaacaacatgccatccaagcacaaggacacgcaatttagacaaggcagaaatctcttgtatgcatgtcgcaatatttctattcgtcttcgtgcacgtaagcgcgaagcacatgttgtttttgtcgaaaaaatcgtagcacccattaatgagatcgttatttagcattaatctactactctcactctcctttagcatctccatcgcattattaacaatagtaggacgatgttctatctgcagcccagtgtcgcatgttcccgatcgccaaataaagcaatgggtatcggagactccgtactggaacag

SEQ ID NO: 5060 - DNA, 1113 bp, Cannabis sativa
gaagtaagtgacggggcaatgggactgggttgcaatttagacaaaactgagaagaaaaaaatagtcaaataaaaatctcaaaaataaatatataaaatgaacataaaaaacatacaaacaggttattaaggttctgcacaatagtttgaaataagaagtcaattctagtatctattagggtcgggaaaaactgactttttgtctaaaaagatagtgatattgtggttgaaggtgtgcctgctgctcaataaaacaagagaatctgccataataacaatatgagaaattttaccaaattaatttattggtctgtagtgagcaatcatatggttcgttcagtgtaaaatatggttgatatgatttttaacaaattgatttttttctttcactaaaggtctcctaaataaataaatttttagtgatgttctaactgtgagaagactagattttaccacatacagtctatcttaatacatgcccttaaacaggcatgttctggttttgaccatctctaaaatgttttcatttaacaacatctacttgtgagacaaagcatcaaatatgctgcattttcaaaatctaggccaatttgatgaaaacaaattgatcatgttgttgtggactgctaaaaatatgtcaattcatgatcaatatcattattccattaagtaggaaatattatagacatgccttgaaaaagtcaacaaactttggtatgtctttagcagactccgttgtattcattttcttcccttgcttttcagagatgctcagcaaaaattcttttgctcctgcatttatttagatagtgtgccaaagtaaacagccgagaaatttgacatacaaaaaaggaaaaagactgaacctagctgtgcaagcaaaaacatcaacaattttaagcttataacagattccaactaaagtttttccacaaagaaaatacaacttcttctttaattacttttcaggaatttcaggaaaagttaatctttattgtcaggataaattaagaagtacctttgtccataagcccaatcccaagctttgactggtatatagctctcattgacaaaacaattttgctgtcaattgtttcttccacaagcgtctttg

SEQ ID NO: 5061 - DNA, 1014 bp, Cannabis sativa
gaactaaaaggacaatgatattggtgacttgatatagttgttggaattagtttgttgggaatgtagttatattctagctaaacctttgggggcgtttggtatgaggtttaaaattttaataaccaaggagcttgtgtttccaaatagatcctactttttaaattaaaatggtagtaatgttaatctcttccaacacttttacatattctctccaagtctattccctctaactctattatatccacacataacaaacaccccattaagtgtcatttggttggaagaaatggaaacttagctagaataagaatgacatcaacaaagaaatggaataaaaattgctttctttccattccatttcatttcattacctcaaaccaaaagctgccttagctatataaatatcgattctatgcataataggcattagggtattgaggaattcaatccctagctaattggattgccaagagtggaaagtctctcgaattactttcagccattggacctgaattttgctaattaatacagaaaccctctcatttctaaatcatatttctcttccattttcagaacttagtacaaatgactatactcaatagtaaaaaacgcaaatttgaaaatcttttcattttcttttctcggcaaccaaacagagaagagaaaacacatatatcaaatacttgactactactgaataaaaataaaaaaaatgagtaaccttcatggatagaaagacctcgttctgtctctgaaactcgacaagaacagagacgagatcggacttgagtaagcgagagacatgcgagcgtatgaagcggtcgagtttaaatgagtccgatcggattcgcttgagctccttggcgacgatcaaaccttccttgctcatttccttcttccgccgccatatggagaggctagggctcgaactcgaagccgccgaatacgagaaatggcgccgcaatcgggtttcgtggtgcgattgcggataaagaggaagattattggagggtg

SEQ ID NO: 5062 - DNA, 2113 bp, Cannabis sativa
ccaaagccaccaccgccatggatgggtctgagtcagcagagactataaactcatgcggcgacgactcatccaaaaataataataacaacaatgataacaacaacaacgggggagagagtagccgccgtttcgagtgccattactgctgtcgaaacttcccaacatctcaagcccttggaggccaccaaaacgcgcacaagagagaaagacaacacgccaagcgagctcacctccagtccgccatggttcacggcggccttactgatgctcacgtctacggactaatcaactaccgcctcggccactcagcagccgcggctccggcttatccttcttggaacgccaattctactacaacaaccgtaaatagcggttctaggtattatggtggccacagctcgtatggtcaggctccgttggcgacccccataaatgggagcccattgggcttgtggaggattccggcgggtgtccaaagtggaccgactataagccggtcgatccatgggcctgtaatgccgttattcgcaggtgaagaaatgaaaacgacgtcgtcgtcgggtttagttgttggtgggtcaagtagtagtggtcatgttattggttctcatcagagccggtatgttaattatcatgactccaaatcgtctagtgtacaagagcatgtgagtttggatcttcatctgtgaaattaaattaattaattaattaatcttttttaagggataataaatatttaagatttcaatctaggcggagctaacgcttagcatatgatgaggcaattctattatgttatgttcatgattttttcctttttgttagaaaaaaaaaaaaaaacttatgtttagttcgatttaataattagtttgtaaatgatcgaaaaagaaaactattcattatattatgtattgttttacatgttaattaaccaattttacatagcctcttctcttctcttttctctctatctcagtagttgtaatattaattaatggatgtggttgctgctaaaattgaagaaactgactactacacaatctcaactccactacatatatacaaacaatatagtaattattctcttgctagtattcccttggttccgttatggggtcatttcgacacgtgtgatcaggaatatagtatttatcagttgggtttccaaactttttgtccatttatatatataatacactcatacgtatatatatgtacatatatgtatatgtgtgtgacatggggtagtccaacttgttcatcagacatacatatttatgcggtcaatttaaatttttcttaaacccaacagctagagagattaatggtttagatcagagatgagaatgactgatctctctcccttaaaagcgggcagaaaagaaagtggtgagattccatggcattttcgcaggtatttatataattaaatatatatttatatgtgtaaacataaactatatattaatgatatgtatttcttctcttctcttatatgtattactctcatcagtgaacagtgatcgaattatagtgcaatttcacacagagaaagtagttatgatctacagtatatatatatgtgtgatcataaaatcaaagatgtgtgtatatagtacagactagatatatttctaggtcaatgggaaattgtgtgtttctttaattcgaagaagtacactagtatgttcgattgattaattaataaaggtgtagatatattaggtgagttacttaattatttagtacttaaattaattaattaactaatctattgataagaaaaaccaacatgtgtatagatttctggagctgaatttggctatatacaaaatacatattaaagtagtagactacttgtagtgtcacaatccgtacttctctagacttattaataattaatatcgatgagggttttatatataaccctagaaattcactacgtgtacgaacacaatgatagttttgagtttggtatttatatatatatatacattgatacattgatcagttgtccggtttctgttttttgtttatgaatgaacacacttgatcttactctttattcggagaaaaatggtaccaacgattttcaacgcttttcaaacattat

SEQ ID NO: 5063 - DNA, 694 bp, Cannabis sativa
aattttacaaataaaaatacgattttttaggttttaaaattatacaaatactattttctcagcaaatacgaaagcaactcaaaaataatgagatatcaatcacacaataactataaataaattataatataatataatataatatctgcaatttggtcacaagcaggtgtgtgaagaacataaagttgcttgttgacgaccctttctcgaacaaagtagagatccaattcgatatgtttggtgcgggcatgaagaatgggatttgctgccatgagcatggtgctttgattatcacaccaaatagtgggtggcttgggaattggaactccaatttcagcttacagtgcctgtatccagatgacttctgctgttgtttgagctaagctgcggtactcagcttctgtgctggaccgtgagacagtcctttgtttatttgaagaccaggaaacaacattggagccaaggtagacacacaaaccagatgtggaacgcctatcgccaaggtctgaggcccaatcggcatcacaaaatccagtcacagtgagtgatgcagacgttttaagaagcaaaccaaagtctaaggtgccattaagatatcgtagaatgttcttgacagtcttccaatgggcctcgagaggtgtttgcatgaactgagacactctgtttacagcataagaaatttctggtcttgtta

SEQ ID NO: 5064 - DNA, 613 bp, Cannabis sativa
taatacttttatgtgcaaaatcaaaaataaagataaaataaagacccgtgtctcttaacgggtcattagtcataatcaaaaactaccatctttttatattagttttcttttttagatgaatctttttcattagttgaataataattataataatagtgagctttaatggtgttttgatatctaccaagctgtatcgataagagccacactttcacctaactttgacttagaaaatctcaagatctacttattaattttcacttggtcttgagatttttaaattatgtatttgcagacttaaatgtaacggctactcttttgtacataactggcgctgaaaatattgctttctttctttgttttcatttctttttacattagtaggatttagagactaagaatagtgggaacagagacttgggaaaaatagaaagcaatccattgcatacttaactatttcatgcattgcatgtagaccaagtcaaatttttagtcttatttagatttaaagagcctcacttgagattttgttcttatatatagcactatctctccataaaagtataagggcaataaaatgggacagacacataacacgacttgaaatttaaat

SEQ ID NO: 5065 - DNA, 971 bp, Cannabis sativa
acagtttaagttgtcaaatgagcaatatcctaagtctaaaatagagagagaaggtatgaggagaataccctatgctatggttgttggctatttaatgtatatcatcttcagtattagacctggtatagctcactctctaagtgtattcaacatattcatggtaaatctagggttagaacattagaatgcattgaagtggttaatgagatacttgaaaggaccaataaagtatgacctaatcaacaaaagagactcatcaaatttgagattagatggctatgttgatgtagattatgcatcaaatagggacaatatatgatctactatagcttatgagttcattgttaacaagagttgcatctgctgaaaatctcaacagcaataagtagtgacacttttaacaagagaatcagagttcatggccatcactgaagcttttaaagaaggaatttcgctgcagggaattctacaagaactacaactacttaagaataaaagaactgtatattcagatagtctttcatcaattcacttgtgtaagtatcctgtttaccgtgagaagagtaaacatattgacattaaattatattggattcgagaaaagatagagaacaaagttttagatccggaaaaggtacatacaagcaataatcttgcaaacatgggaacaaaggttctcactttcaataagctgatgcattgtctcagcttgctgaacattggtacttgttaaaacttttgagagtataacatcatcaagacttgagtgaaatggggttgataatctacttttgaggatcaaggtggtatatgtagaagttaatcctctaaaactagcttacaactaacttaacctatttaactaactataacagttagttaagagtgttacagtcgtaattgattgcactatgtttagttgtaaagctatgatattaaatagctcctttttcagagagagagagagagag

SEQ ID NO: 5066 - DNA, 1437 bp, Cannabis sativa
atgagaattgttaaaagagattataggtgtctaacatctttttcggtgtcatactattattagtgtaattaagtaccaagttacatataacttaaaaaatataacttttaaggaatatcgtttatcaatcataaaacgctacctataaaaaatatttgacactactaatattcaataacaatactcttaattaagtgggcaattaataaattttctttaaaaacatgtctggcctgcccttttggtacaaattcaatcatcttatttttgacttctttttcatacccctatgtacaataattcatttcattaaattcaatcatcttaattttaatacaagaattaaaattaaacaagttgatattagtgaagtcataataaaaaaagagaagaaaatgaaaatggtccaatatatagtttataaataatttgccaatggatggcatcatgatttcatctgtggttggtgttatcttcagaacccttcaaaaagctactgcaaaagagaaaaagaaagacactatgattggagatgtttggatttgggattgttcacacatttatttattattaacactttgctatgcttacctttttatgcccattttgtaagtaattcatttaccactttagcatactttaacaataagatttagcccatttttttttctttctttttttactttattgcttaagtaaaagttaggctatgaatttacattgctcaaccaagttaaagattccatctttctcaaatataacacaaaaccaaattgtgatataaccaagttttttttcaaaacaaaaactaagaatattattaagagagggttattttctcaagagaagaaaattattacaaaggattttgacaaaatgcttttttgggtcaaaaggaggctgagttttctgtcatcttttgcttttcttatttatttttattcatattagtagaccatagaaatcatgttgtctactttgagttggaatgaagagcttcctataaaaagtgggaaagggacagtgatagtgatatatatatacagtcacaattaactttatggaactataagtaaagccttcaaccctaaatttaagctcaattgtatacatgatcttaatgctgttgaactttgaaagagacattaatggattcaactttaatttgcaaattgcaactagtgatccaaactccaattttaagagagacaaggtataaagtttcaatctttatgttgcatcataattcaaattttaacatttaatcacactttgctttgctgggattttctttcattatggttttgtgttctgtatctatctatatactatctggtaacagatagatagatcacgtgcatcttcagataccaatcagtgtttgcaaagcaaaaaatggtcccaactcacgccacctttattattaataataataat

SEQ ID NO: 5067 - DNA, 746 bp, Cannabis sativa
agaaaaaattaatcaaaatttcaaaagaaaagttataaacatgaatgggaccaatataggtggtaattctataaattaaatgtactcccaaatcgttttagtaattggataaaagttatattaagtgtgattaatttgaaaaaaattataaattttatagatttttatactatttgtatatgtacgaaaatatagcattggaaaaatcaaaataaaggtaaccagttaccctattttaagaatttttacctttaaaccatacaaataaaattcccattaatctaaaaaaaaaaaaggaaaactatagtagaatatttatttataaatatataagaattaaaattaggtacgcaccgtgaagatgatactccaaggtgttattaggaacaaactcataaaccaacattctctgtccaccggcaatacaatatccgacaagtgacacaagatgtcgatggtgtactctgctaatgatctcaacctctgcctgaaactctctctcaccttgaccacttcccgattttaggctcttcaccgcaacttgtttcccattaggcaaaacccctttgtgcacgtacccaaacccgccttgtcccaacaaattctcctgcgaaaacccgcccgttgccgccgcaagctcgtcgtaagtgaaggtgcttttgttgaacccaagagccagtgatggagaaggaggcggcagtggtgggtgtcgtggtcccgagtaattcgagctcatctcaccgcta

SEQ ID NO: 5068 - DNA, 765 bp, Cannabis sativa
ccacacaaaaacatgacacttacagtatataatagctttgtatgtgtttttgcatgtacttgcatgcacgtttacgtaataaaatcaaactatgatgatcgacctttgattttcgggcattttaatttgttttaatttgaactgttttctttttttttaattaatctctttttttctttcttttataaatctcaattttaataatttcaattatatatatataacgtttttacaatttttttgcaatttttttataatattattttttttcctttttgttattttataagatttataatatgatatgctatgaagatagaaatggcactacaataaaaaaaaatcacttttgccaacataatttgtaactgcgctggtgaaaatcactttcccagtgcatctcgcgaattgtgctggtaaaagggtcatagttttaccaacacacatatttactctggtaaaacgtatttttataactagcgcaactcatatttgcgctcacatagctaaccttataaacactattcccttgataatttttacttgtgtaaaagtgtgatgtcaaaaataagactttttctagcgcacattaacactggcaaaagttagactttcgctaacgcattaatacgctgggaaaagtcatttttgctagtattttttattttgtgccagtaaaagttccaacactaacacagatttgccagccctcttagccagcgcaaaaatgcactggtaaaaatcattacaaaaaactgttatttt

SEQ ID NO: 5069 - DNA, 2017 bp, Cannabis sativa
tgtagttttttatttagttaatagagtagctacatatccattttgaacaaaggtagatcaagttcagctcacgcttacagtctaattaactagatcacaagaactccatatttgaatttttactaaaatatatacaaatctattaaaaaagtacttgcgttactttttattaagaatttaatttaacataggaccccgtaatttcagataagttaagctatttaattttcattttattaaatgaagtaactacgcgtcggttttgaataaaagtaggccaaactcacgtttacactatatttggtagagggaagagaaagataaagagaatggaagggagggattaaataatttatttgtttggcaagagaaagagaaaaagagataagagatgaatcttaatccttctgaaaatggggatccaaaaaaaatttaaaaaaattatataaaatatttattttgtcctttaaaaattaatatataattgtattaaaataataaaatacttattttactttaaattttactctcatatcaaacaacacaataagagaacaactatcctctttatctttgatactccttatcatttttaaacttttcatctatcttatatatttttcctccttcctatcaaacataaccttagagtccaaccagatcctaataactctaaattcaaatttttactgagatacatgcaattctatttaataaaaaatattcacgataaaaaaaattattatcaagaatttaatttaacttagaacaagccctaatttaaagacgagttagagtaagatctaatctaactagaatccaactatctcaattatgctaaggtcattcatttcaaaaaaaatttaattaaattacattcaaattttatttacaaaattaccataatgaaatacattaatgactaatattaatttctgtttattctaaaataattacacaatccaactcagcaattacccaaaatttagaaagaatcaaaatccaagatgttgaagtacaaggcaaatccagttaatatatttttattttattgtctaaattaaatttattattaaaatatatatataattttgtttgcatttaattggggtccacatctccattttcttgattttggtgtcctcttcgtatatatatagcctcttcctttggtttcgccttttaccgataagctcacacaaatcacagcaacaaaaaccaaaaccaatcgtatacaaatccacacacactctctctctatgagtcagttatgaaaaattaactcgaagaaagaaataatggcatttcagaggaaaaaaaagttcaaaatacaccgtcgaatcgaagagagagtagatttctttgatggcttaccggacgatatcgtaacgtgtatcctcgctaagcttagttcctcagcttcttctccttctgatttcgttaacattcttgttacgtaagtttttattttttttttctggaaaattttcttgtttggatgaatagaaagtgagtttgatgaacttttttttatgatgtagatgtaagagattgaatcggttaggtcttcatccgttggtcttatctaaagcttgttcgaaagtgtttgatattaaagctgaaaagtggtctgattctgctcaccggtttttgaaagagtgcgttaactccggtaacgctgaggcttcttatacactcggaatggttagtctcaattaacagctttactctttttgatttatttatgtatttatttataataataattatttgactttgttgttgatttttattttgttatcagatccgattttattgcttacaaaatccagggagtggtgcttcgctcatggcaaaggcagcgatgaaatctcacgcgccggctctttactcactcgctgtgattcagttcaacggtagcggcggttcaaagagcgacaaggatcttcgcgcgcgagtagctttgtgtgcacgcgccgccttcctcggtcacatcgacgcactacgcgagctcggt

SEQ ID NO: 5070 - DNA, 1072 bp, Cannabis sativa
  modified_base (529)..(535): a, c, t, g, unknown or other
aagtccatcataattagatacgaagatagggtagataacacgtgatagggaaacgacaagtcatcattgaaatgtagtacgacgacataattcaaactacgtaacgtcaacaatttattacaagagtgattatatatatatgttaaaatgacaattacaaggaatagctgtttgttgaaaacggcaatgtatttattaggaaacgtaagaataacattattatttaacttaatattcgaaacatcccccaagaaactacttgattttgaaaaaacgctccaaattttgtgtttttttttccttaatgagtgaagatatttacttttattttttacattttttatttatgttttgttaaatattctgttaataaagttggtcattatcttgtggtgatcacaatttcagtgtgagctcttctccctctgagttgatgtctattataatagatgatttatctttttaatgaaaatttactttattcaaaataataatgtgaatagctttttattaaataataataataatnnnnnnnataataataataataatgtgaatagcttcatttactattatttaagattctttggttgcataaacttcattttgacatgaccaaagatgcaagcatatacacctgttttcgaaatttagaaatctttgcccgagctatccacctaagaagccttggaatcgtggaggcaaaggttctccattccatccattcctttatatgagaccaacaaagattgctcaaatgacgttcaaagaacaaatatatatagtcttttgtttctttgttcattccacacaacaagcattgaatcttgaactaaattaaatctcaacaacctacctttcacttgtaatctgtccaacaccgagtttcacaaaataaatatgtgcttcagtataaagattctatttcaaacttccttacactaataaactttcggttgagttgagcaaatgagagcgtacccatcactgattatatacttcccatttatgaaagaatgcaccatactaattgggattgtttaagcccaccaatccttatttataatttcaa

SEQ ID NO: 5071 - DNA, 716 bp, Cannabis sativa
gtattttattaattcctaacttagtagattaacaatttattataaattaatttatgctaattaattaatttcattttggaaaatacaattattagaatagtaaaaaggcaaatagaggaccgagtttcactaactacaagtgtcggaagcagcctaattttattcaaatgtggatattacttcatgaaatttatttaagagctcatgaatgtggtaaatccaacactttggacactaaggtatatatatatatatatatatacataatcatttggcaacttattattttaaatactctttatttataaccaactaataatttttctcattattgtataaatttgaactgtacacacctaacgaaatcagtatagtttgggatgaatgagcaaaacttgttcatgacgaactcagtaaagacaacatcgcattgaaacattgaaacttttttgagtaggataaacttttgttattttaattagtttcggtatctataagtatagtattttgttatattcttgttactaagtatactacttatatacttcttgttatagttaggatattgttgttatttaatttttgtttattttttataaaatgagaattgttatagaaacatgtatgttacattttatgctaatcttgaaatcttataatggaggtggagaaattgataaataattacaattttctcactgacaataatactgtgt

SEQ ID NO: 5072 - DNA, 615 bp, Cannabis sativa
gagaaagtagaagtagaagaattaagagggtgaataagggttatagggagggagataaggtgggaaagagaagggtttttggaatggtgtagaagctggattatatagaacaaggaatgcccacttgctcccaataaagtcaataaaaataataatgaaactaaaattaaataattataataataataataatgttgtagtgtcgcttccttagctagagtagccatgcattttatttaatatttttttttaagggagagtactaattataatttttttattaatttttatgctcaacattatatgtggaaatattttttaattttttttcagctgtattcttaatagtaatatcattttctttataaatatttgaaaattttaaaaagtttacaatatattccgcctgtattttttagtacggagatttactaataaattataatggaaagtcgacggtattttttttttgtaagaaaatttatttttttaaatactactagtattttggaaaaaaaaaataatactctcaattgacacagtagtagcagtaccctattctttatgttggaaattacttagaacggtctgtagtgtttgattaatacattttga

SEQ ID NO: 5073 - DNA, 1215 bp, Cannabis sativa
ctacatagccataataacaatataaaagggtaatttagacatttgaagttaaaaggcgggaagaaagaagaaggggtcattcactcactcattcatatcatttcatttcattttgaaaatcaaaaaaagcaaagagaagaaaaagagagaagagaagaatgtcgaagttcgagtacccacgactttctcgatcggagattgttaatattctcgccgaagctcaaatcatcaccatctccgacaacgatctcttcaaacctaatcccgatttcgttaaagacctctacactcgcattttgatatacctcgattttatccacgagtaagtaataatttacactagcaagaacagattatttgatattgtgattgttttgtttatctggttttgagttctttttttttttagggaagatcaagaacaagttgaattttctgctcttgtgcagcttgagaatcctgatcttcaacaggatacggttagtctacttaagttgtttaatagggtgaagcaagttgtggcttcgttagcttgccctaagagatttactctcaaagatctcatcaaaccagatgctgaacgcactgagtatttcgtcagtgctcttctcaatttctgtcttcacaagtaagttatttgtgtttttggagatgaccaatcctaatatttgattttgggtattattattatgtatttgacgttttgctaatttgctatgttagagagacaaaaatggcactcttatcgccaatggtcaatgaactgacacttttagaagatcagcgtaaggattgggaggagaagatttctcaggtaattttatagatattgttggttcagcccacacttgactattagccacttgttcttgcaggtgtttctttaatcaaggtctgttagttgagttcttggtttggtagttttctattatgtcttttaggtggtgtttagttttaggtaatgaaatggaatgaaaaattaataatttttattccattcatttgtttggttagattttaaagtattgtaatgatttttctatcaatttggcagaatgactattctattttattaaatggaaggaaagaccattccaatgcaagatgataaaaaaattaatatatgcattttaaatttaattccatttttatttatattcctattttcattcctatgttttcaatttcattcttccaaccaaatgccaccttagt

SEQ ID NO: 5074 - DNA, 679 bp, Cannabis sativa
atgaattttccctaatcctcatttatcttattttgtgaaattaagagaaaagtccaaaattggaaaaaaccctctccttcccttctttctctcttcgaaccagcctagagcaaggagtttgctgctgaactttgaagattaagctaaggtaaccctagttctttgctagttgtgttttctcaagttttttattggtttcaagttgtgcttttggtagttaggggctgttaggtttaggtatgcttagggttcgaattataagcttaatttgagttgattaagggtcctagcagctggttttagtgtgtggtgttggatttatgcaagttggaactttgaactcaaagctttgctctttaatggcaagttgagtttcatttgatttttctgtgaaatactgcctggaatatattgtatatactctaattaggtactctggaaggtttggtgacgtttggtggagttttgagcaagaaatgaaatttcttcgatggactgctgcaaactgggtaactggttttatacgtacgtgtaaaaccggctagccagttttggcagggttccccgggcctttcatttcctcaaatctcgtcttttccgtgccatgattgggtgtttccctatttctagagttagattaaccccttaaaagtagaacagaacctagggttatggtttt

SEQ ID NO: 5075 - DNA, 934 bp, Cannabis sativa
gcttgatctgacactatgctcgttttcagaaacttttatcgaaccattgggacactgttgccctcattttaaaacattgaaactgaaccaccatgctcataaatacccaggcatggatcctgctgaggagaatgttttcaatgcatttgagattgaaattggtaaaaacttgccgggattacgccacttgcaacttatgggaagcgtgatgactaacatggggttacaagccattcttgatggttgtcgtaatctcgaatcacttgacctacgccaatgtctgaatatcgatttgaagggtaatttggggaaaaggtgtgctgaacaaatcaaacttgttaaactacctcatgattctctcaaggatattcaagtaaggaattggactatgatgattttacaaggattagttactatgaagacttagaattagatgatttctttaatgatgatgatgatgatggtttcttatttgaaattgtgatcatcatatgggagaggggtgacaatacaaggatgaactatctgtgtttagcctttcgtttctggtcagtttctatttgttaaatacaatttgaaagtagtttgaaatttgagattgaccaaatctctctctttttgtcagaccaaatgaaaatttgttgatacatatttccttcaacaaatatcctaatgattacagttttaatgttaaacataattaatgagatttaatggagattaattgaggaaaatttactgtgggggttgaaaaatacggaaaaaaaaaaaaaagagaaaaggattttcgacaaaagataatttagtgagatttttatgttttcttttttacaaaaatgttttctagttgggttggggtctagggtttgaggtttgagttagggtttcaggtctcaggatccaaagtctaggtcagggtctagggcttgaggtt

SEQ ID NO: 5076 - DNA, 788 bp, Cannabis sativa
tatacattcacaaaagttaaaaaggcattgttattaggtattggtagaatttttgttaactttctaactcgagtaatctgtctaaattaaactaagataattcgacaaaaaattcaacggatatataatttgcccgaagtcagattgaaaataatatcaacccgtctaatcaatttgaactaacttggctaactcaattaagagaatttatatatatatattatatatttatatattatataatttatatgataatttaaaaatataaaatttaaactaatatgtttttttttatgatgattgatttgaatgatttatatatttttctcattgttataattaattaaaatataataattgaatgtaaaaattttaaaaaataattagttcggttaaggtgggttaacctgaccaaaccgaccaattttggacgagttgtacttaattttttgtaacacaatttttatattgagttgaataaaatgtagtaaaaactgatcaaattgaccgatgtacacccttaggtaccagtagtgcacagcactttctataggtggtgtcttacgattagttaacgatattctctaaaatttattttcttagattatatgagacatgatacttaattacaccaatattagtataatatcaatgagagtgctaggtactagttgtgtcttttagtatttttctaaagggcatctatggtgtctagcatctaatgttattattggtgcaatttaatattgggtgccacttatttcaatttaataaagattatagagaac

SEQ ID NO: 5077 - DNA, 1404 bp, Cannabis sativa
aaaaaaaaaaaaatagtaacccgtttaatgagttggtcgatttagttgggttaattctttcaaaccaaccaccaatagttatttttttcggttcaattttatattttacttaaattttgtaatgaaaaaaatataggtttaatctaaaatttaaattaatgaatttaaatttttttttatatataaatctatttgtaagggaactttatatataatatataattatgtataataaaaatatataaaaaaaaaaagctcttaattaagttagtcgttcgggtttgttatgtggattggttttatttttcatccgcatatatatagattgggtaagttatatttttgtctttgttttgtttttttgtttgcatttgttattgggtagtttacaaaaatttatataatgggaaccaaatttctaacacttagcaagttaattctgtgccatgcttgctgagtattgatgaaggctaaagtgttagaacttagaatactgatttttggggaatttgtttgtatcagatcttaagtaaatcctaaatatttatacggattgatgacatggcattcaatatactgcattgatgaaaggatcgaagagataattgagtgagaggaagaagaaagttattgatcaagggaagatgggctgtgcttattcaatggatttccaaggtgttctccaccaattcattcaaagactttgtctaagggaaaagtttgttatgtgtaattcatcaaaagtccagttcatattgtaacatatataccattaatatagtgaagatggaatccccattcatgaggagtagctccaaattggaaaatttctgtgttatataatttactttaaattttctgcacttacatttattgatcattttttttcattaattccatgtactgttcttggttcgttttgtatgtttgtaatctttttaggtttactgatcaagtttaaggtagttgtcaacacaacacatctccattttaattgcaagcttctcagctagctttaattaattaagatataaatgatctcaaatctggttacttataaaagtagactctgtattggccgtgtggtgttaattgttagtaggaaaaatttatcaaaaattaattcaatattgatgttaaaataataatatatatatgtaggtataatccaatgcatataagtctagaaagtcaatttcaagtctaaaaagtcaatatatatatagaatgttttttcatgcaatgtatttattcaatgcatgtgcaaaagagaaatgatcatatatagtttataaattatacacacaagcttttcattctggagttagaataactaaatctatatatggtagagtacaaaacattaatatatttctaatatatttattgtgaaaatttgggaac

SEQ ID NO: 5078 - DNA, 1670 bp, Cannabis sativa
tttttttttttgtgattaaactttgttatagaaatatgtggagttttcacatagaatgagtttataaatcttaaaattactaaattcaacttatcaattgaatataatgaagaaaaattaggtaattacattaagaaataaaacaaatgatagttgaggatcattatattcttagtttttctgattgtttatttcttccatcgttgaatttttgttttactttatttattttcctcaaactttttaattgattaaatagaaaaaaaaaatatttaattaattggtaattaataattagttttttggtctaatacttaatcttattaagatttattacaaattgtgatggtatgacttgcatagccatttaattttcgcagcagaaacaaacttagaaaattataaattcaatgacaacaaattaagataaagtatgtgttgtaactgccagtgaatgatactgtatcttcaacagagcagactagcgaggagaaatttctgtgattgatgcttcattcacagattctctctgaggcagctgattgtggttcacacctcccgtgttactatgcatatagaaagctggctgtgagggtactgggagagaaacagagttgctatttaacatgagaacaatattattcatggttggtctgtcaactaaatttgtttggacacacaatagtcctatgtgaatacatctcattatttcacttcctcgtctacctctcatcactggatctattatttttgtagcatttccttccctccaatgtctccatgtctgtaagttgtaacaacaatattgatattaattataaatatatagatagtgtagtactcttgattcttggtaaatggtacttacataagttaaaaggttttctgtacgctcatgctgtccttcaaggacacaatttttctgtccgcttattatttctaaaatcaatactccgaaactaaatatatcagatttgactgaatattgtccatgcatcacatattcaggggccatatatccactgaaacacaaaactatagtaattagtatgagtataattttttaataaataaaaaaaaaatctatagttttgctaattacttaattgcatcaaaactttaagatttaagaaattaatagctttgcaatacacaatatgctattagaaggaaactaatataataagatgcattattagtaaaaaaaaaaaacaacaataaataacattattagctagttttacttactatgttccgactattcgactggtactgtcttgagtttgatcaacaacaaaatgccttgcagttccaaaatcagatatcttaggatgcatttcttcatctaaaaggatgttactagcttttagatctcgatggataatttttaaacgggaatcttcatgaaggtaaagaagtcctcgagccacaccttctattattttgtaacgcctatcccaatcaaaattctcacgcttcgctgcatctgcatattatatgaatttgtcaagcataaaacttcaaatgaattgtataattatgtaatgtacatatttttactatcttgatttaattatgttttggagcacactaattatcataggaatgcaaggttaccaaatatgaaaggatcaagacgtccgttcttgacaaactcatagacaagaagc

SEQ ID NO: 5079 - DNA, 1176 bp, Cannabis sativa
cgtaaataagtcatgtaaagaaacagcattcagtcaaaagagagccatgatcacattactagatgagtacccaaaactgataaaagcacaattaccttatcatggcaataaggtaaggaaggcggagttcgaaatggactctgtctgcttgctaccttacagttagttgtgttggttgtagttctactaaaatctacatcctcttctgggttaacccttttcagtcccaccttattcaaggataccgatgatcttgtcaaagtctgcaactttagtcattaacataattagcttatttctgtcaaaacaacagaataaaccagcagaatcaaaactaaactaacgaacatgccttattaacagtgcactgttgaatggttgaggagtttttccttgaagattctgccaacatcctcaccatctccggcattcgctttgaaacagcttgcaatctatcgttgacgggagatatcttccaagtgatctcatcacctccatcgtcctgactctgctttatcaactatagccacatagatacaatcgcttaataaccaacagaatatacatagatatgaagtgattataagatcaactaaaccagtagttaccattccaggagagaacttgaatcgtttcagggacgcagacttagaaatctccggtgatccatcgattaaaccgtcctcaatctcaagattctcttttttctcctgagacgcattagccaaacctttaccattctccttggattgaatagtcgtagggttttgagaagcagaagcagcagcgcgatcattaccatcgtcatcttctatctggatagggttttgggcgagggatttagggggaacagtcttggagttgttctgagaagctgagaggacgttctgggaatggcgttcgaagaaatgttgtatgccgaacttggaaggttgctgagactgattgttctggttcgatttcttggaagaagaagaagaagaagtagtagatgacgatgcattgggcttcttccttggacgcattgaattgaaaattcggagcttttcagcttccgatttctgcaactttagagagagaaagattggcgttgtgtgatttcccgccaaaacaactacagtcagaacttcactgtgagaatggaaaatgaaatattgagtttcctttaaaaaaaaa

SEQ ID NO: 5080 - DNA, 1123 bp, Cannabis sativa
gaaatgttgtctaacactggtgtaggcagtcgatttattaagtaaacagttgtcatgaaggcatcacactatacttaagaggcatacatatgcttgagcaagcaaggttagtctcatttccacaatatgtctgtgttttttctaagctctaacattttgagctgaggtatggagacaagagtgagtgaaatcaatgccactttctgcaacaagatttgagaaagcttggtattctcctccccaatcagtttgcaaacttttaattttcctactgaactgattttcaacaaaggttttgaattgagtgaaggcagagagtgcgtcagattttgtttttaaaggatatagccaagtgtgcctactataatcatcttcaaatgagatgtaaaacttgaaattagtatttgacatgactggggaagggccccaaatgtctgtatgaattaagtctaagggaaactgagcctttttagggttttgcttgaatggcaaagtgtgtgattttccatattgacatgcttcacagaaatcacactcctcgttgttaatatttgttaaattcaaatgtttcaatacaagacttaacacaagatttgatggatggcctagtctcctatgccatctatctttgagtgaatttgaaaaaggcacactcttagttcttgactgagttacactttgattgatagggaaagataaactacaaaaacaactatgcttagtttggacagaggaggagataagagcattgtgagtattttgagtagtaggcttgacacaaactagttcaaagagtcccttggagcaccttcctctttgttagtttgtccttcacacaataatgattagatgagaattcaacaataacatcattatcacttgttaaccttgaaatgctaataagattttttgtaatttctggaacatgtaatatctcttgcagcatcagaacactattatttttagtagacagagtgatagatgcaccatgtttaataggtaattttatttccattaccaacagtaagaaaattcttaccattgtatttttccttctgattcaggttgttcgcatcagaagcgatgtggttgttggccctactgttggcataccaagcaccat

SEQ ID NO: 5081 - DNA, 1809 bp, Cannabis sativa
ttttaaaagagattttcaactcattaaaaacccaaacaacaatgaaaatgcacttacaatttagaagtcaattaagtcaacaaacacctaaaatgggccactttggctttagaataaagctattgtatacactttttaaaacccattgtctccaactcattacaacacctcatgtgtcatatgcttttattcatcttatgatttatgatgtgccctttaaatgggtcccccatgttcagttataatacattttatgtacttgtacaaagtcgttttgctagttttggcctcaaaacatgacattttcacaagtagtgatacgatgaaacccacttatgatactcttccctaacattttatatagtctatatatattttgttatataaccaaattaaggttaggttagtttaggctaggttaagataagatgatgaagctataatttgtctctagctaaaatatatatacaaataatccaaaaatccttctgtttgaataattagattagcaaagttagacatatacgcaactaatacaatctctattttttcttcttctttccataatctcaaagtctaatcaaattctaacttttgacttttatatttgattgaatatcatttaatggtgttttactacaaattaaattatttattaaaaattaatttaacaagaaaaacacaattaggggtttctcagatatttttatacaaacaaatttgaccaattataaaagttctatttggtgccaatttttatgggctcagtctgagttagtctagaacaaatatggttttatttatttttaattttttaatcagtttcaacaaatgatgatgattattgtggtccaaaaaagtgtacaactccaaccatgcacacctagaattggacccaaaattaaaaatctataattcttttcttttcatttattattttacaaaacttgtttggccatatttctatgtctctttcatattatctaggggagaagttgatcattatagtcagcaactgagttttttcagcagaatacagtatatataaacaagtatacataaataaaaataaaataaaaataaaatgagtttgaagaggtccacataattttctatcccaattgcactattgtttggccctatatacaatggaattaagaatatagcttcaccccaatttggattttgtgctcataaaacagcaccaactaccaagtccccccaatcaatttttcatgcagagttttgaaattaacttgcaaggtgattttttttaacttttataacgaaagtgactgacttttattcaattcattttacatgattttgtttgtaacattttattaaaaaaaaaattatattgataatagtaattttagacttaagtggataccagcttttgtcactaactaaatgtatggacagatgattttttttatatgtttttattattattaatgcttatatttaaacactttaaaagctcttttataatctcatgtgttatatcacttaaaaagttaaaagggtgttaaaaattatgagaaaaaaatagtccaaatttattttttcattttttaatacaaaagattgtgaacttctcaccaatcccaattaatgtatggtcatttgcattataaatttatagttacctttaaattagtgtaaatggattttgtttcaataaatagccatataaatttcaataaaatcaataacttttctttgaatgttattcagcaattttcaacaattagaattagaattactctcaattagtgcaaatagaaagtctttctaattaaatgc

SEQ ID NO: 5082 - DNA, 2059 bp, Cannabis sativa
ttttttaaaaaaacctttaaaatatcaatggcaactatatatttactttttttgagaaatatatttattaatattataaaaataaaaaaaagtatatttttataattttttttaataaaatcctaatttttgaaaaattcttttaaaattgaaactcaaaaatatcacatgttcattattaaaaaaatgtttataagaaaataactacttataaaaaatattataaatattataatttaaatctttttctaaaaaaaactaaaaattataaataaaaatataattattacttaaaacaaactaattaaacaacttattgtgcaaaaactacaatttaaaaatgttaaacattattcaaaaaaaaaaaaaaaactattacaaataaattaatgaagtataataaaaattataaaaaaaaattagcttttcgataatattaaagaaattaatcaagtgtacttttttttaaaaaaaaaattaaattatcacatattactattatttatgtatattaggtgagtattccacgtgcattgtgtagttcttcttgttttattttatttatatttttgtttgcttaatttttattttataaataattgtaaaaaaaatttatataatgtaaattttacatcttaattatatatagtacaaattacaatatattttattattatattggaaataagagggtaaggataaatctttaaaatgggtattatagatttttaaactttattttcttttttctaatttttttttattctttaatcttttgtaatatatctttaataactataatgtgaacaattatgaaaaacacagttaaagaatttttctaaatgttatagcagtaaagggtctattggtgcacctttttttaagggttacaccgtagatactttttacgatatatactactactaaattcttaacctatacttatttaaattaaataatataaaataaaaaaaacttagagaaaatatgtagtacaccacgaaatgagtattttggtaaacccattatttgttttgatattttggagagctttttagtcccatttttttaatgattctctatgttgtagttatttaagaccacttgtaaatttttttaaaaaattttaaataattttaccatgcctaaaaatatgttgtagttgcttaacacatgtataaaaaaaatatcgtcatgcgtgcaacaaaatatttaatttttttagcattgtaaactattctaaattttgtgaaattttagagaagttcttaaatatattattaagcttaataaaaatggtgtctaaattacgtcaaaaaaaaaaaaatggtgtgtctaaatttgcataataacaattataacatttttaattacaattttattacgaattattaattttaaaattttgatacatatttctttttattgcaatattatctttaataattattaaatatttaatttattaaatattatttttctttttcatgctaattttcatttaaaaattttattgtaaatattgtgccaataatatttatttatttattatagatgaagttaacaatatatctaagtctaataatacaaataatataatccaccatatttttttaggctgtatatatcactatttttttaaaaaatataattttaataattaccttatttaagcaacttcactccaaaaaaaaaaaaacttgaactttttaaataaacaaatttaaatttttttgctaatttctatggatcgaaaatgtactatgtggattttattattattatgataatacttatatttatgtaattagaaaagtagagttttgaaagaaatttaacttcaatttatgattgtgaaggtaatgacaaaaaagaaaatagaattgtaataaaattaaacttgtaagactaaaatagtcatttaaaaaaaacaagagaatgatctaatacttatatttatgtaattagaaaagtagaattttgaaagaaatttgacttcaatttatgattatgaaggtaatgacaaaaaaagaacatagaattgtaataaaattaaact

SEQ ID NO: 5083 - DNA, 1347 bp, Cannabis sativa
ttcgtttttattaacttaaaatttcattaaaatgagagttaataaatactaatataggtatatatttggtatttaatgcttaataaatactatctttataaaaagagaaatggattttttaggtgattttgtaattaaaatctggatagtctacaaatctattttatttttgatgctctataattacaaatacaattcgatagaatttcctctaaagtagagaataggtcgtcccttttacaatgtgattaactgctatattataggagtaggatagcaattatggttgatctaaaatccttaattacaattgttatgaaatatgtatattcaccacatttcatatattttatctaataggttggaaatagcatgcaactgcttttattttaaatgatataactgtgtcttatttgacttggtcttcttctctgtaacattcagttgtcgaggcacttaattgtaaagttttcaaaaaattcatcaacttttagatacatgccttaggtacatactcctcaaataacacattatttgtatttctaaggtgataaataggagcaagcttaagtttattaagcctctcactgttaacaatgtcaacaccaggaatatttctaaatgtcttgacaagctagcttagcatccccgggaatatattgttgattgtctttgcttttaacgttgtaaatatttatttattttgagaagaacatgcatgagtttcatattgtgattcgagactatcatactttgattattaaattcgtcgagttaatttatcctctttgttgcacatgtgccatgtaactaagcccattattaattgttcgaaatatgagtgtaacaattgtctgctaaatggtacttttaaatttttaagagaatttttaattattatctagataattgaatcgtcctttgtatggagttggcagcgcggctaccaataacctcgcatgcggcagttgtagaaagttgaatttgaggctttctgtagccctctcgccttggccataagtcgtgctccccacagtcacgaatattagtcgcaaccaaagtattcttgcttcgacctttcttagtaaaacatgcataactttcacacgaaagctctaaacgagttgattcacaatgcgttggaaagatgaaaaagagatctaaaagtgctatgttttgactttttccaaatctgattagaacaaaatcgaattcaggcttaaaatttaagctttattttcttgcaaaattttatttatttgatagatcaccgtttttcgaaatttaacaaatttatacattttaactgtcgatacctgaaattaaaaaattaagcgtaattctatt

SEQ ID NO: 5084 - DNA, 962 bp, Cannabis sativa
acaagaacttgatcagtatgagatatactaatcagttgcttgttgcttgatactatatactatttgtcttttgtctccaaaagagcagttgacctctcatccacagttaaagtagtcttttcaacaaaaagtatagtcactagtgtttcatatgattttggtaaagaagctaacaaaataataaatttatcttcttcatcaattttgacatctacacttaataataaaattatgcacttataaatctatttatatgatgcctaacattatctcctttaatcatcttcaactcatataagtatttctttaaatataatctatttgttaaaaaaattcacaaataatttttttttttttacttttttcaaaagtcatagtaacatatttcgttcattacactactttaatttaattaggagctaaatttaaatgaatagtgtttatcgctttcatttgcaactactttcaatcttcatcagtcatactcttatgatttttattttatagtgtttttatgagcttttgttgtacgtgctctgccataaattgaaattgttatttccatcaaaaaactcaatctcaaattttgtagaagacatcatctttgacattttctatattgctctgaacgttgactatgataccacttgttggaaaaaaaatgataaaattcaggcacaacaaaataataaagaaatgaaataaagaaattttactcaatttggtaaaattaccaaactcggaaacagagatatattttacttataacttcaaaagtatatctactcactatctcaatctctccacccaaatccaatacatactttgattttttctcactcttaccacactacaaactcacactcacactcacacacactcatttttctttcacaactcactaattttccacatcttctttctcacacacaaaacacatatataggaaaaaataaactttt

SEQ ID NO: 5085 - DNA, 1012 bp, Cannabis sativa
taagacttataagagtaattaattatcaacctatattaactagaaaatattttaattccttttaatatctaaaacaaatgattaaattgatggtacgtaaagcatatttatagatagcccgtggttgattatagcaaaactaataatatgaatagtgttaaaaaaataaaaataaaacaataagtaatggttgaaaaattaataataaaaaatgcttattctatatattattcttttttttttataaatattttatttatttagtatgatagactcataattatatttttttatataaatatacaatataagtctatgactatagtacattttttctaaggagtattttagtagattttgtatttgtttcggcatacaaaagaggtttttagtctaattttttttatgatcatgtacgttatagttatttagaatcacttataaattttcagaaaattctgagtagcttacaatgcctataataaaatttacatgtattattattttttcttatatgggtagtaagtaactatttaaatcttattttcgacataataaactatttaaaatattctaaaaatttacaagtggtccaatatagctacaacgtatacgattatgaaaaaaaaataaactaaaattattttggttgtcgaaacagataaaaaatctacgaaaataatgcgtagggtctcctacaaaagttcaaataatattattatttactataaaaattgaacattaacattaactcacattttattaagaaaaaaaaaatatttttagtatttattttaaaatactatatatttcacatgagatgcatttcattaattatacacttatttacttaattacatataaatttcagagatgagttttcaactcactttctctctattatatacatataatatatttgttttaatacacacacaaaaaaaaaaacaagagcttttatttatatatatgctaattataatagtgtatgtaggattttactactttaacc

SEQ ID NO: 5086 - DNA, 918 bp, Cannabis sativa
aactttgtttttctgtttgatatcctcaatatttattgaagactctgcatccttcataagttctaataacctagattgcaagtcatcactggattagtaaatttacatctaaacctagaatcctgattatttgcaatacatgaaatttcttgctcaaaatgacaacaaaatcaatgttataaccagaaattgtaaaattttaaagggacaaatagaaacctcttctctctatcagcatctaatggacaatgttcactgttcgatcttttggaagtaggatcaactataacagccttattaagctcaacatcagctgaatcccgtttcaatcgttttactgatccaaacctctcattatctaaggtgtatagcttatcacccaatgtgttgttttcatcatccatggaaggattcagttcctctctatatgtgttatttacttctgctttcttatagatacttgatccaacgggtaattttccagtaatcgtcccaccatgagatttttccaaaggaagaattctagccgtagactcaattttcctttgacctgccagcaactctgatgtctgtttttgcctcttttctccaatactaatgttcctttctttgacagtgcatttcattttttcaacaatgggaaacttcacatggttcctcaacggagtaccaatattctcatcaatctcatgctctctggacagaagatagtagaaataagtttgcaagtccttccaatatatcatgaagaaaaaaaaaagccatgtgtaaagagcacttacaagcaatatataagaatacgtttattgggtagtaagcctctccaggcccttcttaatatgcctttctcaggaatgtttttaaatgatattttcctaatacaagtaactcaagcatcatcaatccacaaaatccaca

SEQ ID NO: 5087 - DNA, 1034 bp, Cannabis sativa
cccgccgctaatgaggttttataaaaaaattaacgatttaattatataatttactatttataaatttttttatttgtataatttcttatttatattatttatataaaatgaatataaatataataaatttatttaaatcaataaaatatattttctattatttatataaacaaatataataaaataaatataaaatattttgagcattaagttaattattattgtctacacataattaaaaacttaaactaattatactgtccacacataattaaaaacttaaactaattattattgtcttcatcaaacacattatttaaaaattttgaaccaactttctagttgaatggggttatttgtgcattgtcccgagcttgtagtaatggcggtgaatggtaatacggttgctgcatgcgaagttaataactcaacaaattgtcgagtttgttgttgtgggcgagtgagaggttattgttgtggtcgagtggaaggttgatgtatcggctggcattattactcttagaagaaaaaaatattatgacttaattagtatgaatgtaaactagatgaacaaaaattataattagtccaaatgtaaataacataatcaaaattaacatcattaaatataccatttatgtaattattacaaatatttcaacatcagtggagctaataatcactaccactctcatcattttgagaaataatatcgtcttcacatcgatcaactaacaactcatcttcttcatcggctatttcatcgtctgattcgtcatctacaacattttcactaacttgattaacattcaaattttgtgtattatcaattgtcattgccagctctagaggttgtagaattaactttcctagatccatagtcatcaaaaatttgacgaccttgtatcatgtatgacatattcatcaagttcatcctcaatgtcccaaaattgccgatggtttacatcttcaactattctaaaacacgtctacgtttcacacctccaaactgctcatgtttttaggaacttgca

SEQ ID NO: 5088 - DNA, 2883 bp, Cannabis sativa
aaaataacagtaaaagtcgcagtcaaaatccactccggggcagaattgtttccaaggagaaagatattggtggtattcttcttgactacttcaaagatttatttgcttctaagggctcttcgtcctttgaaggcttagaatctttgattcctaataccattacgaatgatgagaacttaatgttaatgacagtacctgacatggaagaaatcaaagctacagtctttcaaatgcaccctcaaaaagccccgggaccggatggcctttcgggttgtttctttcgaaggtgctggagtattgtaggagaagatgtggtctcttgtattcaacagttttttattactggggtaatggaaccgggccttaaccacacacatatatgccttattccaaagggcatcaccctgataccgttgatcgcttccggcctattgctttatgcaatttcatttataaagttctagccagaattattgcccaaaggatgagaaatgttcttcagcgtatcattgctccttttcaatctgcttttcttccgggaaggtggattgcggaatcctctttactcactcaagagatagtgaatgtaatcaaaaagaaaaaaggcaaaggaggcttaatggctttaaaaatggacatgaacaaagcgtatgaccgactcgaatggggatttctcaaagaagttttgacgaggtttggtttcaattatcactttatcaaaatcattatgagttgtgtctctactgtttcatactcatacttctcaacgataggcctctcaagaaattttttcctgaaagaggtattcgccaaggagatcccttatctccatacctcttcttgctgtgcaatgaaattttctcacggttgttatcttttgaacaagagaagggtcttttccatggcatccggattgctagaaatgttcctgagatatctcacttgatgttcgcggatgacaccatcatcttctctagagccaatctcaatgaagtggaagtgcttaatagttgtattaagagattcgaagactggtctggtcaaaaatgtagtaaacagaagtcgggactcctcttttcgagtaatttcccccggtccttgaaagactccatagagaacagtttgaatattggaaccatccgcgatgatgaaaaacacttgggcaatcctttctttttcagccgaagtaaacgaaaggatttcaatttcctcaagacgaagcttcatgatagattggagggttggagacttaaaacgctatccaagatggggagggcggtgtatgtgaattcggttgcacttgctctaccttcgtacactatgtcaaattttcaactccctatttcttcttgtagagaacttgatgctattgtcaaaagattttggtggaatggttctcccgagtgcaagaattattgggctgctatctcttggaatgctctttgccaaccaaaacagagaggagggctgggctttcgtcgttttgaggatatcaatcatgctctccttagcaaactggcctggcaattggcgagtaaaatggacaaaccgtggtgccatttgttcaaaggaaggtactttcgtagggagtctttttggagtatcagtgagaaaaacagtgacagctttgtgtggagaggcattttaaatgccagaaaaaccattgctcatggggcttgtactattatcacttcgggggaggatatcgatatttggtggcaaccttggataccttggttgggttatgatgaattcagggatttaatggaaagtattagatccaaggcgcctagccttagatgtgttgcagatttgatgtatcgcagaaacagaatttggaatattggctatcttcgctttctatttggtgatgatttgggtgatcgaatagctggaattcaaatagtcaagagtgaagaggcggacatgcttatttggaaagattctacctctggtagttatagtgtcaaaggagcctattgggttgatcaaaaggctagatttggggtttgtaagcctctctggaagtggatatgggacccaaaaattcaccccagagtaagcatgatgatatggcgctcttgcctgaaaataattcctactggtgataagttcagtcctagtaacacttgccctgtatgtctctcggttcctgaatctcctatccatctgtttgctcgatgcgcctttgcctctgtaatttggttttctggtcctctttcggtcagaattgagtcaattcctgggaattgtatcagttctcttattactaacctttgctccaacttggatcgttttttgagaaccaggatgcttgtttatgcgggtgtgattatggaaagtatttggaagcatagaaacctgatcactcattccacgggtcctcttcagagtatcgaatcggttcgcctggagcattaattctccgctcattatttacccacattcctcccatacaacaatgataaaaaaatataattttatacttgttatcccaaaaattacccaaatgatatggcaatgataagatgatatggcaatggaaaaggaggctagactacacataataagttcttaaaagtcgaataatggacatagcatctagagaatatggagatattgcataatgtataattgagactgtttggttaaattaataaaatcgtattgattaaattttattttatggtattaaatatgtacaatttaaaaatatgaggtacaaattaagtattattagaatatcaaatatatttttcataaaaactttactaaataaatatattccctttttccatattctggacttgttatatatgtatccaatttatcccatctaatctaaacattcctttaaaatacaaaggctaattagtaattttt

SEQ ID NO: 5089 - DNA, 1028 bp, Cannabis sativa
aacccatccctcatcatgacaagcaggtcacaaaatgatcctatcaactcttaacagatgttgccattaacattgctgctgagaagcttggtttaggagctgttgttaaagactggaagggttctgttattgctgggttgtcaattcctgttaaagcaaagataaacccgttattagcaaaagctttagccctcaaagcaggattactctagcgtcaaaatgttcattttccacttgcaaaagtagtttcagactctcaactgttggtgggaaaggtgaactccaggatgatggatctttcagccacttcggatgttgttcaagatgttaaaagctctttgtctactttctctactgctgttttggaattcttgcctaggaattttaatgttcatgctcatgatatggcttcgacagcactagggcttgagaaggagtagatctggcgagactaatctccatattatttttgtaacttgaactgaattgcccatctgttgttacattcgtcaaaaaaaaagagcaaaagatttgttggagaatatcataatatagtgataattatatttattttatttcttagaaaggagtggtaattctatttaattgtcgatttgatgagaacagtcgaaaattattatttattgattttattttgtttttttgaaaataattatttatcgattaagtattgttaattttacaataagaaagtattactgcagctttaaaaaaaatatggtgataggaatagcttagtagtttcacacatcgtcccaagttcgaatcctttaactgtaaatttcattcatctaaactaactcggcctcaacaatattagcaacatcaaaagggagattatactctgaaaaaaatacgatcaacatataaacaagatgctctagccataagatgagcagcctgattagcagaccgttcgacaaaacgtaagaaatatccctgaaagaagataaaaattgtttacaatcctcaacgacaccatgaaaagtggatgacaaaacattcaa

SEQ ID NO: 5090 - DNA, 1219 bp, Cannabis sativa
tgtgtgcactgtgatttttcaagcccttaagtggaaatttcattttggatttaaagtgaaagcagctttttaattaaggctgacatattaagattaaagacagatttttcaactccaaaagcactctttggcaggtaaaaaggaaagactgcttaagatattcgacggctggtgtgagaatgtgatagatctaatagttgccacagatgaagatgtaattcttcgacgagacatatatgacagaacacctactttgacatggggaaaggggcgtgtcaccttgctcggagactccattcatgctatgcagccaaatatgggacagggtggatgcatggccattgaggtatgccttgttctgttgttcagttcaaaccctttaatgtccttaataaacaatggcttatgtttggacttatatattagatgatcaagagtttgaaaacttgaatcttttgccaattacttcatcattgcaggacagttatcagcttgctttggaacttgataaagcatgggaagaaagtcagaaatcaggaacttctgtagatgttgtttcatctctaagaaagtaatgaaccacatttgtaatctgttatgaatcacatttggcgaactagtaactattctggacttgttaccattcatttatatattttctctggtattttctagatatgagaatgctagaaggttgagagttgccattatccatggaatggctagaatggctgcattaatggcttcaacatacaaagcttatttgggtgttggacttggtccattatcggtatgtatttcacttctcagctttacactaaattaatgatatttcatcccaaaccatttggtagagtggtagggatgcttagaaaaaacatcccctcaatattgagtcaagaatttgaatccactcaagtccaacttcacaataagtggttacaagctcaacgcgccggtggtgtgaagctcacaatgcaacatttgagcctttgtagggatccaactcaagtccatgtagttggttgttgatacttgtgatttacttatataagagtaacgatatgtgcactcaaattatgcatcaaaatattagatacaatggcgtgacaatttcttttaaccaatcataatcgttttagataatacagtgttacgtcattgtgtgtaatgttttggtgcgtattttggatccatcttaagtagcgagtgatcttgc

SEQ ID NO: 5091 - DNA, 688 bp, Cannabis sativa
tatcgtgtaatctctaagaacacgtttttttggtcaaattttagttaaaattttaaaataaaaagctattttttatccaatcgctacttaatttagttagtatttaattattataataatattttataatttgaatttgttaaatataaattaatttgataaaataataaaaaaataatagtgtttttgattaaaataatattaaaaatattagcaaaaaagtaggggctttcacatttagggctcgttttgtacactttgttgcattgtattgtatttgtattatttaatacaataatatatttgatattgacttgtattaataagttgtgtacaattataccatctttactataaactcgaccccagacccatcccctgacttcgaacccggaccttcgaccttcgactcggattccaatctggggtccaaggtccagggcttgattcagagttcgagtcaggtctgggatttgaggctgaggtcaggggctaggttcagagttcgaggtctgagtctagagttcagagtcctagtcttggtccgactctaggaaagaagacttagtccgagttcgaagttcgaggtcctagtccgatttcgggaacaaagactaggttaaagtccaagttcgggatccaagtctgactcctagtccaaggttggatctggattcgagacgggatc

SEQ ID NO: 5092 - DNA, 1272 bp, Cannabis sativa
aattctttggatttttccttttgaattattttgttgttgttattttctttttgcatagtgagacacatggtgtgaaaggaagaaactcacgtctggaataaagagatgcatgaggggtcgcgtgcgttgttagatacttcccaaaagcgagatgagaagtatctttcttagatccgaaagggtgtgagggagagactcttatggttaacctcaggatacacacctaaagagcctaaagtggatgttgatcttcactaggtgtcgcggatgtcgactttttccatgcgccaagtcatcaagtgacaattgtgctttcctaacagaataagatcttgcccctacagttgaacatgatagtgcgtgcatcgccaccatctatttatcaggcgaacaattcagacttctatccacaaagaaacgagctttgggtggcacgtgtcctttgattttaaaggttaaatctttgcatgacacgtgtctaggtagcactaagtgatccccattaattggttgctacacgcacgggcataaggatgcccacgagatcaaccaattagtcaactctacattgcatgtattttaccctaatagtggaattcgagcagagactctaggtgggtcatggagagatccataccaattgccaaagctataaatacccctttcattttcatgcaaatgggacaagccaaccaaatagatagcaaaaactctgctaaaatcatccttgatcctcctcttctcaagaaataaattaaggaaaaagagttaggattttttgcacaacattgtaaattcatcaatatcgaccaatgaggctaatagactgactcgtggattagggtttgttcacacccaaatcacgtaaaagaaaaccctctcttactttttgccatttattatttcttagctctttaatattttagtttccaaaaatctcggtaaatattttggtactttcattgagagccaaagaaagacaaaaaccactaatactatcatggtaaccacacaaaaaatagtgaacaaaaggaatcctcagggtggcctcgagacggtcatggaggaagtaaactccctctcattggagcacacccggccgagtgacgcgggaggcggggatacgtccaacgtgaatgttcacgagggggacctaaacaaccagcatgaccatgtcgacaatagcaaagatgctaagaactacgaagaggaagagtacggtaaagacgattatgtcaaggacgggttctataaagatggctaccattatga

SEQ ID NO: 5093 - DNA, 2704 bp, Cannabis sativa
tgtatacaatattaaaatttccccaaaaaaaaaacatagatacattgttgaaattgctcgttctctttgttgcatgttttgttcctagtcaattttggaggggaggcagttctaactgcagtttccttaattaatatgatttcgccttctgtcacgggtttgcccctttttgagaaactatatggttgtattcatgactgttgttctttaggaatctttagatttacttattttgtgcttcgtcctagtgtagagcgtacaaagttgtcgtcacactctactttgtgtgtttcttggttatggagaaggtaaaaggggctatcgttgttttgatccaattactcaaaaattgtatgtatctcgtcatgtagttttcttgagcatatatctttcttttctattcctggtactcctcataatttgacaaaatcagatcttattcacattgacccattctctgaatctgaatctggatcatccactactccttcaattatttttcctcttcattactcttgcttgcatcgtgttaaaagatctcaagaactagatactggtacttcgcaacctaaaatcactccgtcattagatactggtactttacaacttgaaatcactcatccattagatatgaatacttcgcaacctgatatcgctcctccctatccttctgcaactgttccagatcctcttgagattgtagaccctcctcgctatcctcagcgcattcgtaagtctactcaccgatcaaattttacatgctcttcttattatgcttcttttactttgtttttagcgtctattcattgtctttctaagcctttgtcctataaaaaggcaattattgatctcctttggcaacatgctatgagtgaggaactctttgctttgcaagagactcatatttggaacttggtacctttgcctcctagtaaacatgctattggttctcgttgcgtgtataaatcaagaccaagtctaatgtgtctattgaacagtaccaggctcagttggtgactaagggttttttacaacagtatggtatggactttgagaaaacttttactcctgttgtaaaaataactattgatcatagttttatagcggtggcatcagttcaacaatggactatatctcaaatggaatttaggaatacctttttgaatggttacttagatgaggaagtctacatggttcctcctcctggtgttcctcataagcaaggcaatgtttgcaagctacaaaaaacatggtcttaaacaggctcctcgagcatgatttcaaaagttctctactgttattttgtctctttattttatttcaagtgatcatgattcagctttatttgtcaagttcacatctccagggtattctactttccttattgaagtgttaaagtccttatcagtttgagatgaaggatttgggttctttgtgctattttcagggtattgaagttgctttttccaaaaggttatcttctttctcaatcaaagtacactactaacactattgagcgtgcttgccttactgatactagagttgttaacactccctctaagttatatagctctcctttggaagatcctactttatatagcaccattgttggcactctggtttacctcactattactcgtccagacattgcatttgttgttcatattgttagtcagtttgttgcttctcctaatactgttcaccgggctactgttcttcgcattctatagtgtcttcggggtaccatctttcagagcctactacaatcttccacctcttctctatagttgtgagagtattgtgatgcaaatcatggtcgtaaccccacagaccgaaaatttgtcgttggtttctgtatctttttgggagattcccttatttcttggaagagcaaaaaacagtctattgtttctcaatcttctatggaacctaagtatcgtgccatggcgtctactacaaaagagattttgattgagatggttacttgtagatatgggtgttattcactcttgtcctacacctatgtattatgataataaaagtgtcattcagattgcccacagctcggcctttcatgaacgcaccaagcatattgaaattgattgtcattttactcatcaccatctaaattgggcaccattactttgccttgttccttcttcgttgcagcttgctcacttttttactaagtcacatacgatttctcatttttcgttttcttttaggctaatctcgatacttcttacaacagcatcatgagtttgagggagagtgttaaataattatctagggttattattatgttagttgtctatataaggctttttttgtattcttttactattgactttgcaattgaatgaaaccctaatttttctacatctctttattataaattggtttcagtttaaaagtttagttacccatacggagttgagctggctctttggataatttacaaaaagacttttgagaatgaaaaatataatttaaaaaaaactctatttgcacctcatcaaataataagtacacctcaatatttcaaaaaaaaaataaacttaaaataatttttaaaaatcactcttaatatcttttttaaataaatttctcatattattttgtctcaattgaaatatttattataattttattttcatagttttttttaaaacatctataaatttttttttctaataaaatttca

SEQ ID NO: 5094 - DNA, 1911 bp, Cannabis sativa
gtatttgcaatgactaatcttatctcgtggtataagtaccttttagtattaattttctatccatctaactttttatcatcgtggattcaattttagattagccttaatttctcagcttaccactgtgttatttaacttactgaaacaacattaacatagtcctcatactagagacacaagcaacaatgtttcctttgtagtattgtaagttataatcatccaacttgattacttctttttcggtcctcatgagccaaagatatcaaagtaccaggaggtttcctacttagttgaccttttaccatataattcttttcaagatgatactacaaggtaagaccataatcgtcattatactcaaatatatttgttgcctaaaattcatgtcttttaagtaaagagatactttaagcttttttgataagggtataattctaactctgcaccgtacaagtagcataacaaaacccacacataataaaatttttggagtaagtattaatttgagtgtcgggtaatccttttcatgcagttttaatttttgagaagcataggcaacaaacttgtcatacccctagagaattcctcctatcttgtacttgaagcattagtggatgcaatatagggttcctcaatattaagcatagggagaacaaattttgtgttcaatcttcacttaaattcatagaaatctccttcaccattctcatcccacacaactttactttattccatgtctactttgtcaaaggcataacaattagggagaaattctctacataacaacaatagtagcctgttgttgtcggaggaattttgacagcaccaaatataaaataaagagttgatatttaactaaaaaaacaatgagtactcaacctaaaatagcgagtattcaaatgaggttgcctacacaatagaaaagtaatgaaaataatgaacacaaggaagtatagtggttcagacggatcacggtctgcttagtccactgttgcaagggattttctgacctcaacaaacccatcttctctggcttctttcttcgacggtaacgccttatatatctatggcttcaatacaattattagtgattctccaagttatgctttaaatggggcttgctaacccatgatcaaagcattttctttgaatctccaactttagttaaagacggcaaaggtaattttcaccctatgtatggcgtatggctaagaagtgatgcccaagaaatatccacattttccacacctttggccaaatggttgcaggactgggttctccaaacgcgtctaggcaaggatctcatcctccgcaatcaaatgaaaattcataaggcaattgaaaatagcgattctgatgaactccaagaatgtcacatgaaatttttggcaaaatgaagagtcgtcacggatgatgatggtggtgccaaggatcccttgtctcgacaggttattagagaatttgccccttttagtaataattcaaaaacggtatacacccaagacctgaaagatgctatgcccattgatacagggacttcatccaataatattgccagctccaatacgtcctataagcataatgactcgtaacacaggcttacgaattcgaaggtgattgagacttatgacaggagttccttttctgctgaaacatcgaaagctagtaatttgattctaagggatattggctcgaataagaagaagcttacaaactagtcccttccaaccccaatcaattctgatgctaataaccaatcccgtaatccaactattcatactgctacgtctaagggccctaatacaccctacactgtgtcactgcttggtacccaggcccaaatcgtgagttggccttccaaggaatgttgggctgaacctaaggcctgtgacttacttgtgggctcgctta

SEQ ID NO: 5095 - DNA, 1618 bp, Cannabis sativa
tttcctctcagctctaccattttgggctgaagtgtgagggcaagaatgagtgaagtctatgccattttcagcaacaagattggagaaagcttgatactcacctccccagtcagtttgaagccttttgatctttctattgaactgattttcagcaaaggttttaaactgaatgaaggcagtgagagcatcagacttagctttcaatggatataaccaggtatgcatactgtagtcatctatgaatgatatatagaacctaaaattagtgttggacatgattggggcaggcccccaaatatcagtatgcactaagtctaaaggaaattgagctttttcatggttttgcttaaatggcaatgtgtgtgcttttccatattggcatgcttcacaaaagtgacactcttctttgttaatattcttaagatttaaatgtttcaatacagaatttaacacaagattggatggatggcctagtctcctatgccatctatctttgattgaattcgaaaaagacacattctcagttcttgaccgagttacattgttgctgacatgagaagaaaaactagagagaaaactgtatttagacttagcagaggtgttgtaagtgttttgattagaagccttgacacaaactggttcaaactgataaagtccatctttaagagtcccttgaagcaccttcttccttgttagtttgtccttcacacaacaatgatcagatgagaattcaacaacaacattattatcatttgttaacctcgaaatgctgacaaggtttttagttatttcaggaacatgtaacatctcttgcagcagtaaaacatcattattattagcagtcaaggtaccagatccaacatgcttaatagatagcaaatttccatttccaacagtgagagattccttaccattgtactttgttttctggttcaggttgttcacatcagaggtgatgtggttgctggctccactgtcagcataccaagcactatcctcaagcatttctggtgtggcaatgaaggcagtagcattttggtttgatttgtttccatcagagttgttgtttccagcaggtgcagaccccatgtaggtttcatcatatcgattgtagcagtgtgcagctgaatgtccatatttcccacatacttggcaagtgggttttggaccatttgatcttcctcctctgcccctgccaccagatctgcctctatttcctgtattaaagcctcctctgcctctgtttccatgctggttaggactgtagttaccactgggaacatttttgttagcaacattagcagtaggattagacatattggaggatttattgttaccagagagagtgcttaatctatcaagcttgctgtcaaagcttaggagtatctcctgcagggtttgccaagatgtcctttctcttgcttcaacctgtaaaacaataggcaggtactcaatatcgagtcctgaaagaacattggaaaccagaagagcttctggatatgggtcaccagcaagggccaatacatcagcccattgtctcttttgtttgagataatctggcatagttgtggctccttttctcactgtttgaatttttgttctatactcatccattttt

SEQ ID NO: 5096 - DNA, 2740 bp, Cannabis sativa
aaaaaaaaaaaaaaaacctaaactctttgttacaattcaacactatttataaatgtaaattcactttaacaagtaatttgattttaaaaagttagaactagttcatggattatggcatatgttggtcttggagctaaaatagaagtagattttgttctcatctcaacttttcaaaatatcgtgaattgttccgttttgagttttattgagaatattatattaaagagaaatttgcgactaaatctatttatgtttcatattttatacacttaaccttttttttttgttggtaaaactacttaagttcacttctagttgcaaatccactatttcttctattttactctcttaaatgtctatgtggccaatcctaatcactatattatcttctatgacaaatataatatccatggcaaacaaaaaaaataaatataataaattataaaaaaataaaactttaataataaaaaattccttttttttttattttataatttattatatttaattttatttgccatgtggatattatatttgtcatgtaggataatatagtgattaggattggccacatagacatttaagagagtaaaatagaagaaaatagtggatttgcaactagaagtgaacttaaggtagttttaccactaaaaaaaagggattaagtgtataaaatataaaacataaaggagtttgttcgcaaatttctccatgttaaaaaactattagaatgagcaacaaaaattcaatttttaagttaaagtttaattagatgttttgggttataaatatgacttatagttcgatgagtgggacttttcatgaaggtttagagacctaaaatcatagaatcaagagaatcacaagcaagaaaaatgattgcactccaccatttatgggacattgttttatggtttctaactatctatagagtagactttaatttatcttttttttttttttttgaggggaaactttaatttagaggttaagggcaatttcaaagccaaagctgtaaacataacttttaggtttaaataatactccttgaatttatagttccaattatcaaattgtttaatgttttgatcattattttaaacttatttagatagctattaacaacttggaatttttattcaactggtagtttagaagtttaggatttaagtgatataattgtaattaaggatcatagtaagttccatttagatttaggcccaacagaataagccacccctccacgggctgctttagagaagagtaacgtacaaaaatactaatttttggctcaatttttacaaaaatactgtcacacggcgaaaattacttttatactgtcttggccaatttttttgttcttttatactgtaaacaaaaaaaaaaatgagacttccatcttccacacccacggacagaaccaccacaggaacactagaacaatcggaaaacaaccattaattctgagattgagaaaaaaaaaagtgagatcaacgtcaaataaataatcatggtaaaataactgtaaaacaacactaaaacaaatcaaacaaaagaaagaaaaacatgattaaaaaaattaaaaaatgttctgtcaatacctaatgcaataacagttatatttgcaagtccaaccttaaaaaatcaaagaaaaaaactactaaattacacaaaaacaaatgtaaaacaataagcagatataaccacttagaaaaacataagaaccacacacatcaaaacttttttctagtgagctcatcaaatgtatttttaggagaaccaaaatagaaaaataaccacaaaataaccatagagaaggaagaagaaatgtattttatagcctccatcttttacacccactgatagaaccacctcagttcacgagaacacccagaaaacaatcattaattctagcaagatggagcaagaacagtgaaatcgacgttaaaaaaataaattatggaaaacaaccgtaaaaaaacactaaaacaaataaaaaaaactaaaaaataaacacactacgtatactgcagtatgaaacttataaaaatacatagtaaaaaagtaaattctaccatgtggcaatatttttgtaaaaaaaataacaaaagtcaatataccatgtgaatttttctaagagaactcaaagcccaaattctagaataggtcttagataagtaacaatttcatgaaacttacatatatatactaaaatagagtaaaatttaccaaaatactgtgatatatggaaatttacatttatcctgtcctaggctaaatttttttatatatatataaatattatgtctaggccaaaacgaaggaaccctgatcattctcaaaagatggaataccaccgattaaaatattcaataatgcaagtcttttcttttacatgcaactaaagatcaaataaattgattttaccgcatatcctgttggattttgcaatcctaatgctatgatcaaattactcaattgctggcactcaaaacaattggcagtaaacacacagaatataaaaacagagcattagttcttaaccaaggaatgaatgaatgctttctttgttgatgattgaaagtgtgtagattatgtgcattgtacaatgttaaacctatttatagacataggctaattaagacaataaggaaagggcacttaagttagttaggataactaacttaactgtcactgttcaaagtaagcaagtacttgtgcataacatagaatatggagt

SEQ ID NO: 5097 - DNA, 1620 bp, Cannabis sativa
  modified_base (645)..(675): a, c, t, g, unknown or other
gaaaaccacaagtattgataagtaaattctggattttaatatagtaaataacactataaaatcaaaaaatcagcagcaacacaatcaattaaaattttatatttcaacctattataacactataaaattatcaatcatcattgtcaaacatacaaaattatcaattatacatactaacaacaacaacaacaacaacaacattaacaacaacagcaacagcagcaacaacaacaacaataattataataataataaattctatttaagagcaaagaaattaacagtattattaatccaatatatatatatatttaatggatgatatatatagcaactatataagagtattgctatttaagattgtaaaagctcagattgtggcatttcatatatacctgatttgattacttttatgcttttgtcggtcgaagaacctgtttattgtttttagtattatatatctaaatgtatcgaaatgaaaacattacatatataggcctaaccaggatattaaaattcctaaaatacccttacataaaatacagttgactgttgacctctgagtacatgaaccaaattataccttttgaatttttaaagtcgttaaaaatgcccttgaactatattgagattgttggatttaannnnnnnnnnnnnnnnnnnnnnnnnnnnnnntaacatggatgaaagttcaaggggtatgatttagtatatatcaaagttcgagggacatgatttagcagatatcaaagtttgggaagtattgtttagtacataaataatcattaaaatagtaaaattaaatgaggttaaacaaaagtctttaaatttaacaatctcaatagttcaggaagaattttaaacatccagaaaagtttagggggcattggtacatgttaaaatttaaggagtgaaaatcctaattagccttatatatatgcccatatattttacatcgtataccagagactagtgaaaagtcttaaaaaatatcatatattaattttttttttattttatctcacacttttatattatgtaccaataacgtgtagcaccttttatgagtgacactctacgattagttagctatactctctaaaagttattttcttaagctatatgggacccaatacttaattacactagtaacagtgtcacactaaaaaatgtgctagataccagcagtgtcttttaacaatcttttttttacattacactatacattaacttttttattttttatatattattttatatattatattatactaagaaattttttaaaaaattaatatatatttttagcttaataaatagtgattctttataaaacatgtagagaaatattattcaataatgaagtaaaaagtaatatagcccaagtttattagctcattatttttcctcatattttagaaaatgaacaataattataatctgattttttttttttaatttaatttacatgtgtacgagatatatttatttgaatatttctacacaacaacaacaaccttttcctatacccatttatttattgttttcctgtatatatggcattattatttatcattattcatctatgcattttcaatatattataagttatgactttgt

SEQ ID NO: 5098 - DNA, 1078 bp, Cannabis sativa
aacctttctttaatttcaacaatggcactcacaatcacaagagttcttcctctcatctctagaatttctccactctactcttctgctctctttcacttgcttcccattcccatacccatgtcttcttcttcttccattgcttcaccttctcttccactccgactagccaccatttccaccgccgtctcagcttcccaaccccaacattcaacaccaacaacagcaccttcttactcaaagatgacgagtcagactcggtggaagcccatgtgtttgtacttcacacaagggaaatgtaccatggtaaacactaaagatgacttttttactcgactaaatatctgaaccactgatcttagcttatgtgaaattgtgttctgtgtagttttctatatgggtttttacttaatttgccttttgattgtaaagattggattttttttttaaactgtatagttcttgtttgttaaaatgtctcaatgaataaatatatggttggtttgagataaatctcaattgaaagttagttactggttactaattaatcttgagtaaaaacttctcttattgttgttcgactgtgattgtactttgaagattgcttcaatgaatacagaaatggaaatggtggtttaaaactggagtaccacgtgttgtgtggtgtagtgatagggatgcctttattgacgtccttccttgcttgggtgaagggtttgaatcccaccacagcccgtcatgggaggaattatggttgcccctttgggaggctagtttgttatgactgtgccatccttaatgggatgggaaccctcgaggtacttaccgatgacccaattaagggaagatgaggtataaggctcctatagctgacacgtggtcttcggaattgtctaagctaccgaaggggtggggaagagatctgcaccacgtgatattcttttttcatttatcaaaaaaaaaaaaaaacctggagaaggagcaaggcttacatagctttgtctctaaagtctgaaccagtataataattgtgcttgtttcttgcacttattttttgttctttaattgtttgtttaatgtt

SEQ ID NO: 5099 - DNA, 1882 bp, Cannabis sativa
gagctggttgaaactctcaatttataggcaaggagacccatttaaatattaataaaatattccaaaaaaatatatataaaactctcattgtatagacaaggggatctatttaaatattaataagatattacaaaaaaaaatatgaaatattcattattggatgatcttgaccattgattgagatctagtggttgagatgactcatgttatttgtgtttttggagcagtgatgtaagcacttccaaagtccactattagcgaaggcatgcccatccctaggctatcaagttaataactcagcccatgagcggagtcaagctatggcttcgcttccaaatatgcaagcccagttacatacataacaaggtcgaaccactctagttcggaggacgctgtctggatcagaagacaaaaagtctgctaggattaacctggataccctcatggggtaatccgggtgtgagtagtcaaagatatatcctgacggttcccagatatcacctcccatggtgcctaccagacacagggccccactgtgttacgattttgtctcctacttagacccgtaaagtgcacaaaccaccaaaaagagatcaaatttttgttcaacgccatatctttaagcgagttatggtcattttactaaaggttgttcaacaccccgcacccacgttgacaatcctgcgattgagaagttgttcgatgtcaacttagctaattttttggttatggtgaaatcgttcactagttctcgaaggttttgccttttcacaaaatcgtgaaactcgaaactacccgatttgtgactatcactttgctaaagcagtaaaatatcaaagtgtaaatttgacttgccataagttgtagatcttatttatgatggaaaaataggcagactctcgagacagaactagaatcggataaccaaaacccatcgaaccaagttgagtgtcaacccgagcgttgggtgcctatttgtgggctttccaggagtcgttttggcacttcaatgatacttctgtcaggaaacaagggctcctccccccattttggacctagataagaagaattttcggagcaaaatttccatctgagtgatggaaatgtgcacaccaagttgaatgtcaacttgggcgctagtaccagtacctaggtcaacctaagtactgataaggtcttttggtccccaaatggttgtttgcttcttgaaaataattgtatcttaattgttgatgaaaacagagtatatgtccagaaaacttcgttagaaaagtcattggaagtggcctaagttgacaatatatattaacctaggtgcggtgaccaggcccaatatcaacccaggcgctagttagtgttctggccaccagatgactctgtttattttttgaaagtacttgtatcttcattttagacaaaggcagagaaaatactcgaaaaacatcttttaaaaagtaaatagaagcgccccaagctgacaatatgtcaaagacactggagctgcacaaataacccctaataagtacactaatcaccaactgaaagaataccaagaacatcactaattcgttgtttaacctcctcatcagtattcttgctataaaaatttgaagacttaacaaaatttaccttttaactcgacactcgttcaaaacaattcaatattactggctacctcactctcatgaaaataattatcatcaacaaaaattatatgggaaatagaagaccccaatggtgatccatggatgtgagttttttcttttggagtcatgcaatttaaaaatgaattattagtataaataatttaatgcacaataaaatcataattattttcaaaattgttactaatgtaggccaaataaaacaattgaatataaca

SEQ ID NO: 5100 - DNA, 1587 bp, Cannabis sativa
tatttaccaataattttgataatattaaagactattgggaaaaggaaacaattgaggtactgcattagcattttatgtttttcatatacaaattaaattttgattgattaagtaaagtttcaaagttaaataaaaaaggctggtccttttgatgaatcattatcatgcattacatcatttacaatttttatattactttattcatattctgcactagctactttgttaagcaatgtacatgtgtgctaagagagataacattatattgtcaaatattataatttatacgtgaatctgtgtcaagaaaataatattgtatcttataatataataatgaaatgaaattgtaaggttttaaataagcatatattttggatttcgatttgttgtaatttatcattcaaccagtgaattttaaaaataccatttcactaaaaaaagaataatgacacaaaaagttatacatgacattttttttttaaaaaatgaaaaatcacattttattaactattaactttggttaccaatataggtaaaaaacttagttggaacagactctatactaaaacaacgaccaaaatataaaataaaaattttagcaaaattatgaactaccctatttactgatcgtttgacaaagacaataaaaacacttttcaaaatagaaatcaaaactttacagtcttgaattacatgactaaatgaagaaatcataactattagaatttgctacacaatttagtctataaatttctatacacttgtagaaaaattatctaagaactataaagatttttagattagattaagtctagaatatactagttatgttgaaccctaaaaactagtaaaagaaggatctataagaaataattctaaccataaagtgtaaggggtgagtaaatataaatactccttctagggttataaattgtaaccaacacccaacgaccaacatccaaactatcaataaagcttattaccttctcatacaaccctctcttttaagtctgaaccattctcatatactaaatcaacaactactcatcaacatcactacttcaattaccataacaatcattaaacacttattcctcatagtcacctattcaaatctaaatcaatacaaatttattctcaaaccatcaataacaatggaactacgtaaacttgaacaacacccaaacaatctgtttccctccatgtccgaactctaccatcaagcttcttcttttttattagttgtaatttttgttactatgcataatttagctatatgagctctcctctgtaaatttccttctgttgtgcaagacccttttgtttatcaatgaaatttaaatattttcattcaagctttattaaaaaatacaacagaccactaagtcaattgcccccaattcacttttacaaaacaaaaaactaaaagaaagaaatttgcgtctgccgggagtcgaacccgggtctattgcttggaaggcaattatcctaaccgttggactacaaacgctgagatgttagccttgacacttataattaatttcattataagtactaattcacttgactaatctttttctcaagctg

SEQ ID NO: 5101 - DNA, 1379 bp, Cannabis sativa
cattgaagttctcaacccatcattcattttttgcattttttttttgttttcacgatatcgttaaacctcgctaaatgtcgttgaatcacaacatcgctaaatctcacactcagggttttacgataattagcaatgtgctttgcattttttggtctcatgtcacaaatacatggctaaaatcatcgctaaatatgcaaaacattgctaataatttctaaattgcatccctaacttcatatttggtctatcattgcaaatacatcataaaatatcataagaaactagaaaaccagaaaaaaaaaacttagagagagagagagagagagagagagagagaccgtgagagaagaagacggcaggggctcgtgattggggttctggatctgggtttgacggcgagggttatgggttggagctcaatgccagagagagagagagagagagagtttttgaaatgcaagggtatttttgaaagaaaaaaatattaaaagtataaatattttatttctaattatgtggtatattaaaagatcaagttttatagttaagcatgctgccaaattttcattataatatgtatataattacttatgcaatggaattaagtacccctctctcccatattgtttgaaaaaatcattactcaataaatgaacatttacttagttttaataacaataacatttgctaatgaaacttctttgttctgatttgcaaagatggtacagactgaaatagaaagagaaaattgcaggccctcatttcagggtaatttgtctttgtcttaattttaatttaatttgtagttgaattaagctatatattatatgtaaggtttgtttttttataagatgtatagcataatgtactccaaaaatttgttgcataaaattataagtttggtgtcgttattatgatttttgatgacaattggccagacatgcgtacaattcaagcctcctctgcatactgtaactattcattaataaccttctttacaccaaaatataattgataataattaataacaaagtaaagaaagggtcccttctattattaaaattgtttattgtttttattttatttttcaactttgattgattttaaacttgtcttttaggtaacggacagtccaagtttgaactattcaactaaattaataagagactaaaaatggtgataacattattgcaatatatgaatgatataggtcttctataatcaaaaatctccctgaagtaatttttcattttttttttctttgtaagattaaagtaaattgttcttatttcaactgaaaatcatcttttatttttggtgtgataataattcatcattccctttatgactagtcaaaaagttgaataatgaagtaattg

SEQ ID NO: 5102 - DNA, 548 bp, Cannabis sativa
tggactctccatgatgcagagatagatatactcaattcatgcttaactcatttcttcccttactcacctatatatagaacatattcttactcacaaaactaccctcaatacaatgactcaaataccattttttttaatatattaatattctttcatacttgcattttaccagactagtattgagtgagtgtggatccaaaactgtaatcgaaatggaagtgagggatttgctgaaggacaaaaagttttgggtcgcctccttcctcattgcctgggcagccggtctccaggttcactctttttcattttaaaattatctcttttcctcaatctaagttctgggactttgctttagtgttatttggcttggtgatatttcaatttcaattttttttaaaaaaaaaatcttggtttttcaggggcacatgatgtggctgcaaagacaggactccttcaagcaaaagtttgggaatcccagcgatgacaatgatgaagctggtaaataaggcatgcccttcaaattttccttgaaattaacaattgggttt

SEQ ID NO: 5103 - DNA, 625 bp, Cannabis sativa
atggtatgtcaagttcttcaaatttactgtctgaagattgttcattaacaacctgttgagagtattaaaacaaggaaaaaaatataaaaattcaaaaagagagatagatattgaaattatgtaagggggtgtttaaattttgattttattaggtaactagatactaattatgtaactagattttcatagtcctatgtgaaaattgagtgtaattaggaactattattcttttgagtagtaaattaataaataatttttttatgtaattattaattatttttcaaccaatattgttatattttataataaaaattgtttttatacaatttatgcataaatatgattttctttcaaaaaaatatttaatgagaaaaagttttattttttaaaatattagaacaacagtataaggtaacttattaccctaaattatttttctcatattttttaacttttttatttttccattaattttttttttctattttcgaaagaagctaaattgttgtaaactttacccaaaaacaaaaaacaataaaaaaacgaaaattctcctattattttatacacataccttaattttcttaagagtggaacagaactagggcttgagatgcattttgga

SEQ ID NO: 5104 - DNA, 909 bp, Cannabis sativa
gttcgaggtgatgtgtcatatcctggtatgttgcagaatattaatttatttttagtaaaaaaaatcttaaaatagtttaaaaaaaatgtgagccaaacacaattaaatttttaaaatgacaaaaaattattttctattctcacttttgaaaatacaattctaaaaactcaaaactgaaaaacacaaccaaacagcctcataacttccaattagtaatatcacaaagaaaaaatcattaacacaaattttaacatagaaacatcattaagaacatcacaattatcatctccacgattttctttttcctctaaagaatcaacttctacagacacacaccgttaatttgggatgagaagatttaaactctgacccaaacccagatccaaacacggaacacggaccccggacccagacctagacccagacctgaacctagacccgatatcgagacccccaacccagactccagaacccagatccaaaccctaagtttgactcaagctcagactgggacccaaactcacactttaggcccggactgcgtaccagactcaaacttcagacccaaactccgacctgaatcgggactcgaaacctagactcagaccacagacccagactctgacctcaaatcaaaacttagaccccggacttagaccccgaaccctgacctcgactcgaaccctaaaatgaaacctaaacgttagaccctagacccggaccgtagacctaggctctgacctagactcagacctcaaaccctagaccgagacactggcctagagccaggatccatctaggtcaagggtttggggtttggatttgagttcgtgttcggggtttgggtcttagggtctagggccaggtcccgaggtctaagtctgaggtgggatgggttcatgtcttggt

SEQ ID NO: 5105 - DNA, 1102 bp, Cannabis sativa
atagacctggatacaccactgctgctttcagaagatccagttcatggaggttataaaggtactgttgacttaagttcatcgtgttaagaaatagtgaatctaaatagcaaagatagatcaatagaagttgacgcctgaaaaagtctgaaagcttattaaagccataaatatttttcatttcttaccgtaaacttaaatgtatttcaaatgacattgaaagattttttatgcttctctagtaacaatgccgacaaagtctctgtagtccggaattcaacattgtattgtacagtgtttcactttttatgttagtgtcattgttttggcatatgttcgttgaaaataatggatcagagaaactgaagacttatatctctcttcttctttttttcgaaaaaaaaaactgactgagcagtttctggtgctgtatatgagtttacaaactccagaggccatggcgggttccttcactgggatgaaattgcttgtaagtgacaatttactctataattatatgatgcattacttcaagaggttgggagggttaaggccaagaaatggcttccctaggttagattttcaaaataatttcttgtacaattcaatgactactgtgtgaggctctttgaagaagctatttgtggataagaaaaagtgcatagaaagtggtataaatataatttataatgactataatcttagtgctaattgtttttcctaaacatatgagatgttaggaaaatttacaaaaaagaaagtaggccaaggcaacgatattttacctagtacatcgacttaaaagtactggagtgtggaaaataaatattgttattgtacctaatattacggaatcatttttactttcggcttaattgacaactcctaagaatattttgtacgagtctccctctctatgcattgtctcaaaaattaactacttttcacagcttgtgtttttaaaatcactggactattatctgcagaaatcaagatctgcgagcaatttcaaagcttcgcaatgacaaattttataagctccctgtaattggtcatcacaataatgctgaaaagcatctgattgcttgtgtaaacgaatttatgg

SEQ ID NO: 5106 - DNA, 624 bp, Cannabis sativa
taatgtaaatggcatgggcctagtactgatcaatcaccgtctagatccaagcccaccagcaagtcatggataatgatatattaggtagttggacatgaacaatgttatttttattaagaaaacttgactgaattcacccttttattaatattattttaatcacaatctttactatttcttgatgccacgccattgcgttagatatatgttgacaatagttggaatgattttttgtctatgaaattgatcattatggtagaactgtggtgttggttctaataccaacttaagagcatggtacatttggaaatatttcactggctttgaagaccgttatgttagttgcttcttaatattctactatgtttgcaagctataaacagagttctatacatatgatttttggcagagagagagagacaagtgaggaagaatgagtttcgtttcaaggcttatttagtgttcagaattcaattgtggtcttgtatactttttattactccctcatctcggagaagttaccttttttgaaaagttttaaatagaataatttttttaaaaaatggagaactctctaattggttttatgattgtggctctgtgtaacacaatttccatatatgt

SEQ ID NO: 5107 - DNA, 990 bp, Cannabis sativa
  modified_base (269)..(297): a, c, t, g, unknown or other
ttgattgtttcgagtttgtaattagatctgactaaaagtgattaattgttttatgtcaactacttaggagagtgattgattgtttcgactttgtatgcctaagtctctgttctccatatctttgccacctacatatgttataaaaaaatagtttcgttttttacatcaatttttattattattctccaatacatgtaaattttaatacaaatttgaatatattatttgatgttcacttaataatttattaaaaaatataataataatannnnnnnnnnnnnnnnnnnnnnnnnnnnnaataataataataatacaaaattaaacgtaaaatttgataatataataataatgtaaaggaatatattagctaaaacttaataataaaatattaattaaaaataacataatggtaaatataaaagcatagcaattattatgatgttaattttgcatcatagtatattgtgatgtaaatttggatcacttttaatcatgtgaaatttttgcatcataatttagcacaccattggagtaaacttttaacaaagtgagctatgttttacatttgcattttttataaagatgctcttacaattaatcatataactttacccgttgaataaatattagtgttggtgtgatgtcttataaatgtttagtagtgttttttataaaaaatactattgctaaggagctatatgacatcaaggtaccttaatttttacggatttgtttttaggcaccttcctaaaatgtttcattagatagtgtccatccttaaatacgtaaggtccttaatatttttaaccaatatgaaactttaattatacacttaatagtggtgttaggcactatagtgcctagcaatgctcttatatttgttaaaataaaataaataaaatctaattaatatatatatataattgctgcacaagtaataatatgatatctcatagtggtattagacactataagtaccttagagcattt

SEQ ID NO: 5108 - DNA, 888 bp, Cannabis sativa
atatattttaagtcctagtaataatagcacaatagtgttatgtaatcctgctttgaaacaattcatgtttgcatctgaattgggggtatatgaaatgcaaatgactgtttacactatgactgtttgaggccaaagaagaagatcaagtagatttcatttctaccataaggtattgctgttttcctattagaacattaattttgtttttgctatcctacttttaggaattcaaactatgtttttggacaacattgctcaactgggaaaacttatttcctatttttctttctactttggaatgttagaatattgttattaggcactagtggtgctagatatggcgcattgtgattgattagtgatactccacaaaaattcttacattaaattatagctagttaaagatttttacttctcgaactttgaaatgtaacaaatcatatcctgaacttttaaggtcgttaaaaatctcccgtgaactattgagaactatagagattgtaagatttaagaatttttgagtctaacataaatgaaagttcaggaagcacaatttggtacaaatcaaagttcaagaggtataatttgatagatatcaaagtctagaaagaatttagtacataaacaatcactcaatttgtaaaattaaatgaaattggacaaaaatccttaaatctaaccatctcaatagtttagggaaattttttaacagcaaaaaaagttgatgaagcataataagtttaggaagcaaaaattcttaaattatataggacacattggattacatggtgttttgattggtgtcatgagcatttttctgaattatcaattggtgaaactcatacaaaaattgtgagcacataatttaagtcctagtaataacatcgc

SEQ ID NO: 5109 - DNA, 794 bp, Cannabis sativa
aattgtgattaactattatgatattaatttgtattatgaatatattacacataataataattttatgtagatgatattcatcgttggtatgcaaattagagagaaaaggaaaagggaatgtgatatcatgctttttcgaaagccatcaaattaaagttatatagttgaatatgtagagaatatatataattatttatttacatatatagactatagtctatatattgaccattaaccaaattctaaagtaaagcattaatactagtatagtactagttgtgcataatcccactgcatggtgctgatgaaattagaaccacacagcatatagcaaaatgtatatatttatttatattagcatatatgtactatgcgtgcgcattaataaaatatgccttaatacagtatgttattccttcatattttttttgtaattctagtcatgtattagtgtataccttacataaattgctcatgattcattttggtactagtagtagttgggaattgatgcactactgcattaaatcatcttcaatccacaattccactaccccctcttcataatatttaaatgaatatataataatgactgattgtgacttaagttatatatatattattttctttttccatattgtattattgatttcatttcagtcatatatagaattaatagtactgatgtaatttccacttaaaattatataatatagtttaaaactgtttataatttctctctctctctatatatatatgtatatatgctgagagtccttataatagggacaaaa

SEQ ID NO: 5110 - DNA, 909 bp, Cannabis sativa
ttgatccttttactatgaataaaaataaatgatcaataactaatgcaaattaaataatgcacatggaaacatattgactctacctttcttctcctttttatcgatcccatccaaacagaattgttcgattcaattcaagcttatagactctttaaacttttctaaccattatatatatatatatattaaaataaatttgttgtaattttcaggtacttatttataacaaaaaccagtactccatataggactattattaagagatcacacacaccatgatcagtaaccttaagcttggagtagaagtagtgagtgcacacaatttattaccaaaagatggtcaaggctcatctagtgcctttgtggagctatacttcgatggacaaagacaccgtacaaccattaaagagaaagatctaaatccagtttggaacgagactttcttcttcaacatctcagacccttccaatctccattacctttctctggatgtcaacgtgtttaacaatgtcagagccaccaactcacgctccttcctcggaaaaatcagcctcaccggaacttccttcgtcccttacacagacgccgtcgttttccactaccatctagagaaacgcggcttcttatctcgtgtcagaggagagctcggtctcaaagtctacgttacagatgaagccaccgtaaaatcctcactcaatactaatcattccggcacccctgtcgatcaagcaggtaatcacatatatatggatcgatgatataataataaatttaattaaacatttattaattcctactttctcaggtcatgaaaacccgactcggaaagtcgcgtctcggcatacttttcatcatttacctaatcaaactcatcaccacagtgatcactcgtcttcctccgccattgtc

SEQ ID NO: 5111 - DNA, 553 bp, Cannabis sativa
tcatataattaatatattttatagtaaaacaataattatacaaaatttataatataagattattagggttaaataaacttaaccctaattgtaaagttttccaatttactagttcttgtttaatgcttaacttgaaaaggttgttcatatacatgatgacaaggtcacaatcgtttgcaattattaataataataacaataattttattgatgataatatttaattaataacagaatcaagttccatttttattaattatttattgttgttagaacaacttattattagatataattattattttgcaaatattacataatgtaataatattaatgaaatgaattaaccaagtcttggaatttcaacaacaatgccattttcattaacccaaatccaaaccctctcacagttaatgtccctaggtgtaggactccctaccaaaatcactatggccttcttcacattctcattctccatttctatcgtcttcgctgcttcttctccattctttcctactaattccggccatgaactcttacctatatatatata

SEQ ID NO: 5112 - DNA, 590 bp, Cannabis sativa
aacaaacagtcaggatcattaatgctcttaagcttaaacaatttttctcttattctcggcctacttttgaactgctagccacatgataaagctacgtttgggtatgtatgttaaacgtccctaaacttcttggctctagtggaccctttgctgagaaggaacaagcaacttgtatccaaaaaaaattgttgagcatccagtagagctttgatttgatctttaacaactaccacctgcttccagtacttgctcccttggacaggggcattgtagccctaccaatcttcatttatgatatatacactgtgtatccacttaactcacaaattttcttctttattagcaatcgcccgtacttacttgaacatataactgttttgttctattctgctatcctcttcaggccaagaccacctcttgactttgtttgacaaacataatcccaagctattaaaccagctccatattgagtgcatgctgctctttccataagtatgctttgcaaattgcttcaatgtcattaactacctacttaagtaaaaccataatttggcttcaataaaatacacagtaatcaaaattgaattcac

SEQ ID NO: 5113 - DNA, 568 bp, Cannabis sativa
aaaattgccgttaatggctataaatacgaagacaaaataaattaaattaagaaaagatggagacgaaacgtgccatttagacaaaatcttgaaccctattttattatttttagattagattactcagcaatccgaccaaaccaagtaaatgactgttatatccaggcaacaaatttaaaataaaaaaaaaaaagaaaaaaagggtagcagagagtagaggtggagccagagcctgtagcaccacgcaaaccacgcccaatattttcaccttctcgtccgtgcacggagcggagcttacaaggtcaagaagctcacccaactaccatatattataggcataataattttgtgtcgtactcaaatttgtccctcgtacttgcctatttttcttaaacaaattacttcattttcatattcaggcttgaattcatactttactatttttttttaatttttttttaataaattattgaacaatacgtatattttataactttagttatatttataaattttttcaataatattttacaataatcacataaaaaaataaataacattattagaa

SEQ ID NO: 5114 - DNA, 1179 bp, Cannabis sativa
tgctttggtgtgttaaatctccccgaaacctcattacatatatatatttgtcttatgttagtaactagtttgttcaacatgattaaaagtgattattaatgactttttatgtgaatttgaaatttacttaacttgttactattcaaaaaatatatattatttagatatatatataaatgaacataaaaccagtttcagatgttgtatcttctctatcactaaatatttctcttatcttgttgaaaaaccaatcccaagagtcatcattttctgagtcttattttctgaatgccaacatgaaaatattgttgtttacatccattgtagaagctgaaaataacgtcccgccaaatgatgtttttaagaaggttccatctgtgacaatgactggtgtacaatgtttccaccctcttattgaatttttgaatgctagaaacaagtatttgaaacaatttactgtatctgtttctaagtgtgtgattgttcctggatttgatactttcagcatgtgtaggtacattggtggttgttgataagaatcatcttgtcaccctctcgccaattctaatgtttttctcttgctctccaagccttttaatatcccattgacactccataatcatatagtgtgtccattacaatgtctcttggtatatgtattgttctgatatccaggaatttttttttactatttctccaatgatcactataataaatatgattttccataagacatcaatataactctattaataaagtattataataagaatatatttatgtaacaaaaaaatttccctctgctctgctctctccctccatagcgaggaagaagaaggtaggtcagaaaccagtcacgcgcatccctgtagaagaagtattcattggaaccacatcggaggtggcggtggacgatgattcacactcgacggagggcctgcagttgatagatgagatggttaatgctcatgacctaattgaaacagaggaaccaaatcatacacccaagagtcgatcccaaagttggggtgaagaggttgatgaagagctttcgaagatgggagaacacccgcaatcaccaaaatcgcctccgaaattctaggagaattttttgaaggagaaaactctgaatcgtgatcaaaagcttcttttcacatagccaatgatcagggatggatt

SEQ ID NO: 5115 - DNA, 1029 bp, Cannabis sativa
tcgaccaatttcgaacaaattaacatatatatttttggatcattgggactgtcaaatgaggtgatgatcagtgtcaaagacttcctcattccacatatagtttgccactattgttattgttaaccgcttaaagcacttacctattcaaatagacctattcaaatagtactattgaagctattactattgaaaaaagaaatttgattttttattaatattatcggttaaaaataagaatttaaacctaaattatttaatattggtagtataagcacattttattgtatatttcaaattatgatcccctctcatttgaaaaaaactacccaaattttctcagctcttttctctttctctttctctggttctcaccaaactctaccaccgaaactatcgtcgaacttcggtgaccatcacccacgaccctccctctctctagctgtctctgttgcgtgactgagacccacgaccctccttctctctgattctctttggtgcgtaattgatgacccacgaccattactgtcgaacgtacagacaaacgatatgtagtttctttgtattttttagtaaaaaatcgagttttggtgaaatctgcattttttgtgattttttttgtatgtggtatgatgaggtacgatagtggttcgatgatggataagatagcagtgtaatctgaaggttagggttgaaggtacgttacagtacgtatatgatagtggtccgaaagttgcttaaaatttatgtcatgataaaagtatgatatgatccgatggtagtctgatagttgataaatgtttgaatgatatggtccgatagtggtacaataagtgcttaaaatttatggtataaattttaagcaacaacttaaaccatatcgtaccctatcataccccatcgtaccactatcatactttatcacctatagtactactatcataccatatcgaaccttcatccctaacctccagattacgctactatcgtacacatcatcagaccactatcgtactgttgggttttatgccc

SEQ ID NO: 5116 - DNA, 767 bp, Cannabis sativa
ttttataaatagccgcacgcgaagtgcagtctctttactaatttaattcatatatataattttttttaaaccgccgcgaagcgcgggttgtttactagttttactatacttatagaatgatgtaaactcttctagtctaaaccgtgatgtgataaaatatgactaacaaatatatgtatatatattaattaattaattaatacttataaaccttataaaaaatgagagaattaagtagagaatatattgatgtatttggagtgattttagggttttatgtcaccgttccacgactgctatgcatcaagcatccgagaatacagataatgcccattgtctaccaaaatttgagacccaatcttgctgatgatgggagtttgaattaccaagggattgtgatgaggaaaatgcaccatcttgggatcctcttctgtaaaggtaataggttgatccataagacggggcctttacgccgggagttgattaacttcccatacctcttcatcatgatctatagctttagcgtaactcttcaactcattccttgtggttcatctattatgcgtccctcttgagatcatgaccaccctccaatttggtctaggaggctgtgtgggtttggatggtgctgaggaaggactcatggagggacttggacattcgggacttgagatggtgctctgagaggccttggtgctcttaactatccaccattcatgtgtggtaatatatctttcatccatttgtataagtgacctagctttatt

SEQ ID NO: 5117 - DNA, 741 bp, Cannabis sativa
gtaattaaataacaattaattaaaattttatttttatttaacaattgaaaaataattttttgaactaactaattaaaagcgataatagaacaatgaaaacaaataaacaagatttaatcaagaaataaaatattaaaaattaattccaaccgcttccacttcatatttcaataatgcaaaaccaaccatcttctacctagtgtgataggataataattaacaatgaaaaactatgaaggttcttgaagaaaatatgaataacaatggaggaaacttattgctatattgatcttaacatatgtgttacaaggcttgattttccaaaaattctttttccttgtggaagttggttttatttatagtggcactattagccttgacatacatgtggtcccaaaagctaaagcatgccctgacttgtacttataagctcaacactcaaagggagtagtggaagtagtggtagttgggtatcacatacattatacgtggttttcataccttgtatcttcgtaacttgtactcttgcaccttgcatcccgaagtttaccatgtgttaaggtatattagctcactataaggtctttggtgaggggtcagtagtgactctcgcatctaatgcttatgaaatggagcccgtacaagtgagtggatgtgcatagcaagggacacctcgtgagtgggtccctcgcttgatgatcgaagcagagggcagtgaggggttttcccttacgaggtgag

SEQ ID NO: 5118 - DNA, 628 bp, Cannabis sativa
aattctcagtattggattttttttatggaaacaatagattcatttaaatttgtagatagtttaagtgacattttcaatttattaagaggtttagaaatatttaaaaataataatctaactatgcggttaattagtagttgtcctaaaaaaataatagtcatctttcatcttttttaatttgaaaaaattagaacagcttaagttttattttcttgaaatatcattattcaaaatttccacaaaaatcattaccaacaataattaatgtatgctttggttattcatattcttattcttattgaatcatcaagaattttcttcggatctataattatacacttatataaatattatatgtaatatatttatttataaaattaattttaatattatatattttataggtgataaaaaaatttataacacaagcttcagcccagaggagagagaaccccacttgtttagtaagatttaaggaaccttaaggtgcctaataattaatttctattccaaaaaatcaaagtgtgcacgtgagggatgttttctcttctctcatctttggccagtaagatataatgtttatatatcggtgattcgcacggtgcaacattaataataataataataa

SEQ ID NO: 5119 - DNA, 774 bp, Cannabis sativa
atttttaccaaaagaaataaacaaataagattgtagtgtagcacattttatggtatagaaaaaagttgggtgtttgaagtttcaaccaatggtattgatgatatcattatccatttcatcatgctcttatggctatggacatatttctactactcttacctacttccacagacctaacaccttccttcttccatggcttccttaacttgctgtgtttacatgatcaccaaaaatatctccaattcaaactccaacaccaatggcgcctcaccatcaccatccgactctcttaaatcgctaactcaacagaataataagccccaaaacctaaaccccaggcggcgtcctcaacagccctccgttatcgaaatcgaacgcgctatcggggccggaagattccgcgacgctgatcccaggcatcatctgatttctttttcttcactgaatttggattttgtttaggtagtttgtattttggattctgaaaatttgatgtttattgttatgtatagggaattggaagaagataagaacacgaaattcgatgtgactatgatgaatttcccgggaaagtttgaacatccattacagaagaagattcaagagagtgctgagaggattactgaacaatctgaaagaacatttcgtttgaatggtaatatcattttcttctcttttcctttctaagatcaaactattatttgttcataaagtaattacttgtttgattagattattggtaccaaactaatcaaggattaggttaaccactct

SEQ ID NO: 5120 - DNA, 2025 bp, Cannabis sativa
agatagagaagatcaccaagattttgtgatctgctgccaaacttattccaattcaatgagcattctcaatattgaatattaaagtagaaaataagattaaaaaatttgaagacaataatagaagagtagaacacatagtgcttgtttatcatttttcaactattatttttttaatgcactacatataatatatacatacatatacatatataaatacatataattacatgagtttcatcttgaatgcattaattcctctttagtttcagttcatcaagccatcaaagctgttgtttttcaatctgtctaacatggcattacatgtcctctttgaagaactaagcctctgttaaaaccatttattagtatatataaaaaccaatcaataatttgaaacaattgaaaatatatcactaacgatcaacaattcatattcaagtattgttttgcaagtaataactttcgttttgataattctttgcaaagtagtcttcctgactcacatgacatcttttcaggaaagttatatgggattcgccacttacaccaatagcggtataacatcaaagagagtgctacgcacaatagtactctttagcaattctcttatttattacacacagtgacgtgacactgcttttttataagcattttttcatgcatgccaccatgcaaatagatttggtttaaggttattttatcatccctagtttacattcattggattttttgggacaaattgtgtcttccaaaagccaaggaaataataaatttcagagatatctctattttaaccaagccttcttgttaaagaatcataaaagttctaattttgttatacagtcttaaggtctcttagggagttttcttagccatgaagcgggttggagatctttactttggagaagtctattattaggtgttgtgatttgtgagtttactgaattcggtgaccaagacactaaagcaattgttacgtaggtactcagaaaggactcgaaattcaaactttgtaggaacaaaccatatgcctgactatctgagctatccaagcgagaaaaatgttcacttacaagtatctttactttggagaagtctataagggttgtgatttataaaggtctataagctctttcttcatgttttactaaactcagggactagacactaaggcaattgttatgtatgtacttagaaaggactcaaatctcagactttgtaggaacaaaccatatgtctgactatttaagttatccaagagagaaaagagtttactcacaagtatttttactttgtaagagtctattagagttgtaatttatgaaggtctataagctctctcttttcattttactaaactcgtagaccaaaacactacaacaattgttatgtaggtactcaaaaaaaatgactcgaacttcagacttcgaaggaataaaccatatgcctgactatttgagctattatagaaaagggttcactcacaagtatagaaatatatataaatctaaagtacaaaagagaaacaaagaaaacaagaaaaaagcttaccttttttttcccttgaaaatcagcaatatgttagctaatggaggtttcttttgtcctgtaattatagctagtactacttccaacagcagaactccactgtggatgtagttcttgacctattataggtatagaaccagaattcaacttcttcttcttaatgttatcatgtagagcactgtaatccaaattctgcaaaataaatggaagttctttaccatcatccttgttaaatttatttcccgtttctatgtctttcaacgattcagtaaactctctctcgcttgttgtggtaacggattctgaaagtgcatcatcctcttctgtcgcccatgctcggaaatttatcattgaaggtgggatcctagtgcacatgacttctttaaggttaccaaatatccccttgttaaaagggttcttcttcttatcatatcgatacctgaaattctcatatgttgtctgcaaaagaatagtaac

SEQ ID NO: 5121 - DNA, 1315 bp, Cannabis sativa
tttttttttcatataagtaaataaaaattatataaaagaaatagagagagagagggagatttttcgagcagcgtaaattatggggctttctggggtcattctcttctcttctcaataaaccccgaacttaacggcgttaatcacgggacacaatcaaatgctctctaaaactccaaagtccgtgacggtgtgaccagaccttttctttttaattaacgtccgtcgaaaacgacgtcgttcctctcttgggtgggtcctacgttttcacgcgttcgactaaacctttttcggtatcgagaaacagaaacgcgtacgatgcacactgccactgcatgggaaaggaaaaggactcaaaaataaaataaaataataaataatatgctctccatcttcggtgcatgttagtgtgataacattgggtttagctattgtgcactgaacccaaatgaattaatggtgtgagagtcgagagtggagtaagggatcccaaggtggttcatcgatgatgatgatgcagtgggttcttaaatcttagtacttgccaatgccatatatacatatatatatatatatatatgcatggagtgatcagtgcacgtgaccttttcgttttcgacatccccatatgtgtagtgtagcatatcaatcagcgtacagtccagacaacctttgctatatatttacatgttattatatatgtacatattatatcactttttacttttccaatcagcctattatatgttacattttataataatttaaaatataaatatttcagtttaattagttattgaagataaatattgaagttcaatgtaataatatttaatttatatttttttatattaagaaaataatatttttgaaaatttttgtaaacaaagactcaataatactcccatcctattactttagataaaacacacacataagaaattatttgagtctattattactcaaggccgaccctaactcgatgtttacataaatctaacattatgaagtttaagtttggcatgccgtataaaaggttaattatagtaaataaggattgcgtttagatagaattatgtacttattaagatgataaaatttaatacaatacgaatactaaagtcaaagacccaggttagggtcgtgatcagggtcaaattaagtccagtttaaggttagggttgagatttagggtttgagttagtgttcgggtccaaggttggggttagttgagtgggtcagggattgcggggttagggtctagtctcagagattttgccaagggtcgaggtccatgttggtgttcaaagtcggggtt

SEQ ID NO: 5122 - DNA, 698 bp, Cannabis sativa
aagaaagagaatagataccacatcttaccgaacaatattccacttttttttaataaaaatatttggacaaaatcctcgtattttaaggaatatttgattaattttgtaaaataaaagtaatgacaaagtttttttatttaggggggcacaagtcacaagtcacaactataaaagtggcataagtcaagctagccttgtaattaatttccacttgacatttttttttctatatataaacattcttaatttttctttcggcaacaaaatcaataaaaactaaaataatgaaataatgtatcatggatccaattttatcgtatgtcctcaaaaaataatacaacatccacttccaaatggttgcttcatttgttaaagttttggattatatattattttctttttctttctaaagtaataaaaatttaaattatatgatatttatctttttttttttctgaaattttgtattaaatatatatttataaagaaaaattataatcaaattctaaacaaatcactcatatttttcaaattaaatgttacaataataatgataataataaaaaaaagaagctattcacatgttgatcaaagagagattgaaaaagatacatctagagctgctgcactacatatgacaaatatacctaaatgcagttctgctcaacttacatagacaagtcacaagctaataataa

SEQ ID NO: 5123 - DNA, 703 bp, Cannabis sativa
aaaaaaaaaaaaaaaaaaacgcgccttccttttccttccttaatttactcttttctttcttgcccgtgccacaactatctgaagccctctgtgagcaaataatcgtcatcaccatgacatgatatgaattaatggactaccaatagccacactcgcattgaaccaaaaccaaaccggccatctccccagaaattgttactttagaaatatatagatatagataaatattttataaaatcttcatctaaaaattattattattttacacataactaatataaaaaaacagctcatacaaatttatatatatattataaaattttacaatgcaccacttaaaaagaatttgtttcgggagaattttcttttaattttcttacacgaatagttatttaaaacatctgtcaaaattttaaaaaatttagaaaaacttaacgcaccaaaaatatggttcaagaaatttattacacatgcctaattattttatacgtttatgaaatttttcaacattaattttttattgtaaattattttaaatttttaaaattttacatgccttaaataattataatgtatataattatatataaaattaattaaaataaaaaacttcatggacgccgatagtcatagagattggataggtgaacccttttaggggcctaccgtagaaacaccttattttttaatttttctttttttt

SEQ ID NO: 5124 - DNA, 638 bp, Cannabis sativa
agagtgtcatagatatctacaactacacaatttcttttttccttaccatagatcatgttcatctttattggcacagggctacttagatcctgaatattacatgacgcaacaactgactgagaagagtgatgtgtatagctttggagtgttaatgttagagctgattactgcaaggaaacctatcgagcgaggagtgtacatcgtaagagtaatacgagacactatcgatgagaataaagagttatacaacctccatgcacttcttgacccagctatgggtgtgggaacaaggatgaatggttttgaaaggtttgtggacctggcaatgacatgtgttgagaatgaaagggcagagaggcctacaatgggccaggtggtgaaggagatcgagagaatttcgaagctggcaggtctgaaccctactgatgattcagtatcaacttcatcaatcaattgggaatcaagtaaagtaacctcctccaacctttacagtgaagagtcatttgctataagtggaggttctgcagaaccaaagatcgaatcttgctaaaaactgagtttatctcataaatttgtagcagacttggcatgctctatgtttgtagttattagtacaactagtcacttgtgtttaatgt

SEQ ID NO: 5125 - DNA, 1011 bp, Cannabis sativa
tctttggtatctctcaaaataatggaaaagattcaagttaagccacaaggcatcattttagagttcaattacacatgccatgataccgataatgtgggtcaaactgtaccagaatattctcaaatcccagctgatgtgtttgaaatgtgtaaaggtctaccctgaaccgttcccatgagcatgccattatcctacagcccgaaacaacctcaatcaatgttaaacgtaccgctatgcctattctcaaaaagattatattgaaaagttaatgtctaacatgcttacggtgggaataattcaacccaccaccagtagcctcgttcttcttgtcagaaagaaagatggttcgtggcgattttgtgtggactaccacactctaaataaagtgacaataccagataagtttccaatgcctgttattgatgagcttttagatgaacttcatagtgctctaattttttctaaattggacctcaaatctggttaccatcagatccaagtctggcaagaagatataaaacaacgtttcacacacatgatggccactatgaatttctagtcatgtcgttcgaaatgaccaatgctccagccactttccaatcactcatgaatgatgtgttttgcccttttctacacgattgcgtgttggtattttttgatgacatattggtgtatagcaagatccaagaactctatcagtagcacttaaagactagtctttgagctcttctgaaagcaccatctctatgctaactgaaaaaatgtatttttggtcaattaaaaatagagtacttgggacatatcatttctcagtaaggggtagctactgacccccaaaaattttctgccatgtttgagtggctaacccctaaaatcatcaaaggccctcgagggtttctcggtctcactgggtattattgcaaatttgtagctaattatgcccgtacatcttagtttttaactaatcaactgaagaaagaccaatttaatggggtgttgaggccgagcaag

SEQ ID NO: 5126 - DNA, 589 bp, Cannabis sativa
taatgagtaggagtgtttccagtgcgggtggtgtagtttatgatcatttttcaaaccaatagttatagaggactaaagtttttgacagttttattttagttatagattatagaaataaatttttttttttttttggaacaataaaataaaaattcattaaaaattattataaataatgtcaatgtttcccaaatttattgaatttaccattttaatattacacttacaaatactaaaataatttcactctctcacccaaattgtaaaacttggcatacaaggcaacttagatgaacaaaaaagtaacttcatacaaatcaatggttacccaaacatacatagtaacttacccaaaattaaacaccctgaatagaaaccatagtaaattcgagtcaatactccaacagtatatggatgtttctaaactttctataaattcttacattaggtagataataaagataaacaagtgactttcttttcaaaaaataaaaaagataatcaagtaaaatgtctagcctggaaaaaaaaaaaacactagaatgtctagccgaagtttcccaaaactacatttaatcataataaataa

SEQ ID NO: 5127 - DNA, 1795 bp, Cannabis sativa
caactcacgtccccaaatgattccctgacaagttaaagaggggttgtgtccatgaggagcatgtaggaaatcattatgaggaaagtaatgacttttgagtaattggccaagaagcgaatctagtttttccaacaacctccatgcttgctttgccaacaaagcttgatcaaattgttcaaaagatcgaaatcctattccaccatctgttttagatttacacagtaaattccaagctctccaatgtattttcgaaccattctcatttgacccccacctaaaattagccatcatagattcaaggtggttgtaaacatagattggaagtcgaaagcagctcataacacaacagctttgagaagcacttcaagccccccagtcgaaaatattttctcgttccaattgttcattaggcgccaaatcttctctttaatgtcactaaacagctgttgtttgtcccggccagtgtatgatggaagacccaaatatttttcacggcattcacaaatgggcatggaaagatgtctgtgaaaaaagacatgtgacgccaaggtggtatttggagagaaagacattattgatttatcatggttcagaagttggcctgaggctcggtgataaatatccaaaactgtctttattgtaagacacgaactttcgttggcatgacagaaaaggagactgtggtctgtaaatagcaagtgtgaaatcgatgaggcatgtctagtgagcttgaaaccaatcaactgtcccgcttgttcttcgaattgcaacaaatcttgaaaggccttcagaacagatgaggaacaagtatggagacaaaggaaagccttggcgcaagccacgagttgggatcaaggatcctgaaacttctccattaacagtaaaggagaaagtgtttgttgagaggcaagtcataataaggttgatccattgctttacaaagcccattttcctcattacttcttcaataaagcgccattcaactcgatcaaaggccttactcatgtccaacttaagagaagcaatccccttccttctcgtggttctatttttaatggcatggacaagttcaaatgccactaaaaaattatcgatgatgagacggttaggcaagaaggcactttgagtttccgaaatgatatgcgggagaacaacctgaaatcttgcaacaagaaccttggtaatgagctttgaaataacattgcaaaggctgatcggttagtaatctttcatgttctttggctttttaattttgggatcaaggtgataatggtacggttcaatttagtagggtcagcaccttcattgagaacccccagcacagctttggagactaaatcccccactaaatcccaatgttattggtaaaacatcgctgacataccgtcgattccggggcttttatcaggactcatacttttcagcgcttcatcaacctcagctctagtaaaaggctttgtaagatcatggttcatatcagtagtgaccattgttggaatggttttaagaacagagcacatcgctgcatcatctgtggaggaattttgaaaaatattctgaaaataatcttcaattacagtgactaggtccgagcgggagtgtactttgtgtccagaattattgatgagaaatttaattttattgttggagtgtcgtgctgaagctttcgcatgaaagaaatttgtgtttcgatctcccaaattcatccaatctacacgtgagcgttgttgccaatacatctcttctagttctaatacatcatcaagaattaattcagaggttttaagctcttcca

SEQ ID NO: 5128 - DNA, 1501 bp, Cannabis sativa
ataataatatataaaaatatagaactatttatgtttaattatgaccctcgtatatctctttcatatgggtatttacttatttcatttaattaatcataactctctaatacacatcctttcaatatatatacccatgttataatatacatgagtaatgatatctgcaccaatgttatatatatataaatattacttatatattaaatgcctgcttgcatgcatattccataccataccccatatatttgtatatatatataaatatatcatgaccagagaattaacaatcatcaatatgtttttgtgtatgtattcatctatatcctccatataccatgcatttctggaaaagtttggtatgatgaaatttcaagggaacatctcagttagaagtgactaaattactaagaaataataataaatatatacaatatttaataattataggataccagtataaagacatctcagctatatatatatatatatatatatataaattttaggacaataggaagtaaggaatattataatttgtcctcttttatgttttacttatttagagaaataatagctcaaattttttggcagtgtattacattatattttaaataattttccataaaaaaaataaatttcaatatattcaatcgcatgcgcatacaaaattaaaaataaagacatgtaaattatatgtttgaatcttatatatattttgatcaacgtaaattattttatgtttttaaaaaataggtaaaatacttgctataactacaatttatacaattacataaaaaatttatataaaaattcttctaagtactaaaaatagaaatattctacgatttggaaagtatacatatcagtgagttagtttaaccaacaatttaaagtgagggaggtgtaattttttttttttttcaaacaaaagtaaaaataaacttaaaaaggaaaaaaaaaaatgatcttagtaggatttgaatatcatatttataattatcattttgtattataaatatatgtcataattaactaaaatagatatatattttttttctatctatggatcacatatggatttaattaaatgattaaaactgtcagtttctattatctgattgtccttgataatagtaatttattttacctgtctatactggtgatatcgtcactgttgatagaagttaagccaacaaataaaaagtagtagttggtatctaattaagaaatgatttttaaattaaagcacattttaacacatttttttatccttaattaatttacatttacgtagttcattatatttcatatatatgtaaaatattattatatatgtagagacaaaccaacaatttttttccaaattgagattgcttaaaaatctaggcatatattatactaaaatttccactatgttgggcataacggttgagaaaaactaaaaagaagtcaccaagaagctttagacatactgtacgtgaatgatatatatatatatata

SEQ ID NO: 5129 - DNA, 2362 bp, Cannabis sativa
  modified_base (1978)..(1980): a, c, t, g, unknown or other
atctctagatgcaggtataggataaggtagggtagggtacatacaggtataaggtgcatatatcatgtcctattatcctatcccacccttatataaatttatatctatatatatatttaaatattatgcatttactgtacatatttggaaattacataaaaattatacttttatactttattattataaaaatataaatttctaaaataagaatttactatctctatactgtatttgtaataaccgtattttagagtatgcaattagtaaagataattaacattaattattggtcatgtgttttataattatgtatgagtttactatgttttgggttctattatcaaaaaaggcattacagttataaatttttaattatggagattttattaaattctagaagtattatttaagttatatatgcattatgtaatatttatgatttttgatcaacgacaacgaaaaatgcgatgagtggtcgtttgagtcacatggataagtctagaacttttttcttagtagtataaatatttgagataaatagaatactaagtttggacgaagtatggcttttgaccattttactcctaggatttgtattccttaagttataagttataagggcattataattttgttaagggattaggtggcctcctctttgtttggcaactggccatttatattgtttcagctaagtatagtattttatttgaggaaaattaaaagaaaaatagaaattaaaagaaaaaggaagaaatccaattttctttgctctctctctcttgttgtagtagccaagaaccaagggttctttcttctttaccttgctgattctagtaggaattcaaggttaggaggaagctttggaagagggaagctaaggtgagccctagaacaaatcttaataagattttgttgtagctaaaaataagatttgttgtagtgagtgtatttacattgatgcacattatttaatatgatgaataacatattacataatttcaagaataaagccatcattacattattacaagtaactagtaactagtaataactacttaaatatttttcctttgtagcaaggataaaatcctcctcaataataatgtcatgatttattatttcattaaataaataatatcttaataataaactccattcaagtccttcaaaacatgtaattaattaagcttaattacaatttcatcatatcaatatgtaagcttttccatcaggttaatttactggaaaataaatccttgacataatctttatttgtcacagttttgtatttgggaggattttgttgagtaatcaagcttgaggctgggcctatatcacaatctaactttgtattaagaaatgtggcaatagagagtctttcttgcttagggtttactactgctctatgctcaatgctaggatatagtccattatttgttaaataaaattgcatatatatatatatatgagatgtggatgaataatattgtgtttacccaattactaaacttctatatgggattaaggcttggtagctaaagatttatataattttgaaaaattaacaatgtaagacacaacatatatatacacaagattgactatgggctaaaacggggtaggcccaatccaatgacaccctctatttgtcaatcccacttgctacatacccccaattcacttattagtcaattttgatacaacaaaagagaaaggactttaaagcaatgaaaaagaagaacatgttgcttctaaggtaatggactcattttttctttattttattaaaatgttcttaggtttaaaaaaattcagggccaaccctgcaaatatactacaagtttcttttttttttctttttcgatagctttaatttactacaaaaaaatagctacttttagtaataattttataatcacaacaaaaagttacttatgactaaacgtatttggatacaagttgtcactaattnnnttttaatcacaacaagtattgtaactaaaaacacatttagtcataataaattgtaattttttgtgactaatacatttaactacagactttttagtcacaacataagaatgatgatttttaattaattattacttttttatttttagtcacaaattttgttgtgactcaaattgaaattttttgtagtgattgcaccaaacataatatatattcaattaccaaaatatccaatcataatgtatgataaatactaattagtagttatgagattattacctccagtacatctcctgcattgacagtgaaagcattttggagaggtttcacaaggatccacttaacatctttcttgacttgaagaccttctacttagttgcactta

SEQ ID NO: 5130 - DNA, 3608 bp, Cannabis sativa
agagagagagagagagaggcagttgacagggtttgtaattgaagcctaaaatttttatatgcatactaggttttccttacttatgggcctactgtgattgggccaagtttttttttaatatccacttgtgtcagttaggaactgacacaaaagagattttgtcgggttttaaccgacgcaacctagcatcagtttcaaattgatgagagttttcatgtgtaatttcttgtgtcaatttatattttggttgttgaccaatgtgttgaccaatgaacaatgaaatttttgtagtagcaggcactcactggatcaatagagctacattttttgtaccatatattgcttgtagagaggaacaacaattggttcaatttttaaaggctctgtgtagtgattttaagggacttcatggttctatattgaattattagcatatgaaatttatctcaagtctgagtcagggaaagacactcttttagtaagccaatcttttgttttagtattccctccaactactgttcactgggctattattttttgcattctttggtatatttggggtattattttttagagcctactactaccttccacttctcctctcgagttgtgagcttactatgatgcagatcatgcttgtgatctcatagatcgaaaatttatcattggtttctgtttctttttggatgattcctttatttcttggaaagcaagaaatagtctattgtttctcaatcttctgccacgacatctactactaaagagattgtttagctaagatggttacttgaagatatgggtgtcactcactcttgccctgcagttaatgtgtcattcagatcgctcataatttagtttcttatgaacgcaccaagcatattgagattgattgccattttattatatagtcaccatctgaagttagacactattactttgcattttgttccttcttcattctagctgactgacttttttactaagtcgcacacgatttcttgttttcgttctattttaggcaaactctcatcagtgtttcttgcagcagtatcatgagtttgaaggatggtgctaaataattatttagggttattttagtcttttatgttagctgcctatttaaagttttcttattgattgtactattttaatttttattttacaattgaatgaaactctaatctttctatttttctctgcatctctttattttttattagttattcttctcaaataattatcatcaagcatcattagaagtggcatactactattggtgtattttaatatcggatccccatattttaatttaataaatgatataaaagatcgttaaataattatatgatgtcacatcggtgtgatgttgagcacgttaaagtgtctaatagcaatattatacatatattagaaagatagtaaaaagtgtagaattagtgtattttatttttgttgaatgacccatgcatgtaattaatattttattgtaatctatcacgatgagtacttatttcttagttctttttttaattttattttcttattattttgaactctttgttttgcaaaagatattgatcaaactttctattttactttttgttaataataaattggacccaataatttttataatagtagaaaatagtactttgaattcaattttagtcactttaattttttaataaaccaacttaaaaataatttctagcacgaacaaataaaaaaaaatgtaatacgttgctcatagaacctcaaaatcaaattattattaagtgttatttttacaaaaaaaaagttaagggtattatttttggagtttattgaaaaatacatcttttatttctcaattaaccaaatctacctctaattttatatttaattgaaacatacctctttttatatatattgtacccaaaatatcctgacataaatgagtcacatggagagtatattgaggtgacagaggtaaaataggtaaagtgtttaaaaaaagaagtaaaaatgataaattttaaaaaagaaggtaaaaataaaagaaaacaatataaaaagggtatagactatagagtctaatttcctcattatttttcaccatttgaaaaatataacatttgaattgtcatttcacaaaatagatagatccaatggataagttttagtatctcgtaatatttttgtgatatctcattggagtaaaagcttgctgtctccatgtgttaagtttgtttgtgttttgtcagtttatccttgagcaagtaaaatagccagaatttcttcattttaaaaaggagaaaatcgttttcaggcgaacctttttttctttttatatatataaaatattatcactttaaaacattaagcttacaagctgattttaattaatctgtaaatttttgtatctttcatataggctatatagcatatagtattatatgttactaatatacaagagatctcatcttcatattgtaatctccggatgaatataaaatatgtgcttagtcaataatcactatgatttttatataaatccaaagtagttcttcttaattataattacaaactagatagaactttgtttttccacgtactcgtgataattatgtttatgctttgctcacataacaaaagtgaaaaaagcaacaccttttctttatataaaaaatgtattaatataataaagtgttgaaaagtaataatataaaaatttgcaaaacccttttcaccatcctacaagataataatgttgatatatatgcgttggcatgcagcaaaaaattatataattaattaatttctccgatctaggaaacagatcaatcaccttaattgataggtatatttatatagctcattataattgtcgtctttttcactaaaattacatatacatatacatatatatatagacgtaacgtcaccgttaataatcatgtaaccctagatattatgtatatagatagcaaaaagattatattattgggttcaatattgtaagtaaaacgatcttgtttaatttgatatttttttttatctgttttggtattttcaagagttttctttgcttaatttttgtatgtatgctataattatttacaattatttaaaatttttaaaaaagttataactaatttataatattacttaaaataagatttaaatattttattgaaagcatgatataattttttttttctacttatagctagtaagcaattatttttactttaacaccataagttatttagaatttgttaaaacttcatgtatgatcctaaaaaattagaacatactcaatcattaaaaaaaattaactaaaagattctccaaaatactaaaagtgtcttttgtgagaatatatctatactacagattttatatagaagatgagattcgcgagaataggcatgtcaaaaaattcatttagttggatcaggttgaagtttcgatccgacggatcacttctgattcgaagcatttaaatacttattggattttccgaatcagatctgatttgatccaatttcaatatgttaaaagaatcttaattcaagactcgaaccaggaccccctggcacccataactcgaacctgaacccagactc

SEQ ID NO: 5131 - DNA, 1866 bp, Cannabis sativa
tatatatatattttcttaagagccttttaagctgttatataactttaattgaattcagttgaactcaaattattgtctttatggcatttataaatataatttttcttaattggaatttttcatatatttatttaaggaataaaataaacattattacttttttgaactctaatcacttgtgttctgtgcatgaccacattcatatatgtggttagggattaatttagttgtaaagaaacaataaactacacttccaaggaaagatgaaaagacttatatataaatatatttatatgtacgtatcagcgctcacttttcatgttctcttggaataataatttatataaatatacaatattatatatttgtgaaaggatatctttttgtattcacattttcaaataataattataagataataaaaaaactataaattatataattaaaattttttaactacacttataatataatgagaaattaaaactcagaaaaaaaaaataattagaaacgctaaaaggtatgagtagtatttagcactttttaaaatattttattgctattagtgtaattaattatgttatatataattttttttttttgaaaaatatcatatataatttaatttcaaatttgttaagaaatatcactaatcaaatgcaagtgtcatcgataggtagtactaagtgtaagattattatttggacttacattaatttttattaattttaataaaatatgatttgattagatagttttttattgtattagccattattattagtcatgaatagttaatgaacttagcatagttatatgtgtgtaaagtctagttgaaggagaaatatgagcttttctagttaactgaagcttttgatgtgtaggccaaatccaactagggtactcctccctataactttataaatacatattatctcatcacaattgtataattttgataataagataaataaaaactacttttgatttagagatataaggaggaaaacttaattgatagtattacactatcaaattattacaacaattcttatagatctatcaagtatgcatacttaattataatctaattgtgttctatattatatacaaatttatttgtttctacgattattttaattttccaacatgtagtattagatttccttttgtatttgaattataatttataattggtatagctattaatatgtatatgttaattatccataattacaaattaatttcataatacaattagaaaatttctattattgaatcttaaaattttatgagttatgatatattatttgcataaaactattgtgtagtttgtgaaaatttcatgtttaaagttttaggatttatataattatattatgaaatcaaatttggatttttttcattatattgattaatgaatgaaattgattgtgtaaatctcattaccaactaatttaaaatatatttacatgatttaatttgaaattagttgagataaatgtcataatcaggtgtttttgtttttagattatacatgctgatctcagatttcagccaaccaacaacaaagtcgtatttaatgctgatgtttaccacgtgttgcacaataagactagaagagtaaatgagacaagattttataaaggtttggtccccttagttagtgggtaaaaacctactccccttttagttttattaatacaagagataataccaactcagattacaagggttatggaatctggagtggctctcttaagattacaatgtgagaattaagttggcaaattttaagtgcgagagagtgcctagggcatgtgagagagaagtgaatggggtgtttgagtttcagacttagagctt

SEQ ID NO: 5132 - DNA, 738 bp, Cannabis sativa
aaaaaaaaaaaaaagaaagaacatggtgtatttttattactttttaattttatttgtataagtttaatataagttcaatgtttgacatatagatcgtcattgaaaataaaaagaaaaagtatttataagaatttcatttaaaaaaaataaaaataaaaattattattatcattattctgcaaccaaaaaaagcacccaaaagtaattctcatcattattatgtttcataagtttttttttttggcaaggttattatgtttcataagttaaatctcccataaacacatcacatttagcagaatgtataaacaacttaagatttaaccaaatattattaaatttataataattatatgtaatatgaattaatatttgttgtgctctagtaaaaaaataaatctattagtcaaaacttttatagcttttttaaaaataaaaatgggataatgaagtttatacacgtctactttgttccgataagaatccagttgataatatttttttataatattgtatgaaaataatttcattttaactgaagttttttttttgaacaaatttttactaaaagttaaagtactcgtgtaataacttttatatcttaagaatattgtttgaaaattataacctcttaagaaaatattatattaagattgaacaatcaaacaaaattcaaagctgaaatggtcttcatttcaaagtatgcttaattattgttaagttcaatgtttgtgaaaa

SEQ ID NO: 5133 - DNA, 571 bp, Cannabis sativa
aagttgtgtgaaacaaacaaaataaatcctagaacttcaattattattattattattaaaaacataatttaaaagattgggttgggtttttgagagtttatattctgcatttgaaatttgaaaatgattgaatattataaaataatatagagagaattaatgtaagacttattaaaggaagagaggtggcccaaaatcaatggatgttactacttcttctatttatttatttttgataaatataataataattaaattttggtagtggatgttgctacttggtgggcataattctaaattaattaattaattaattataattaataaaaaagggtggtttagattggagatatgatatctcaccacgttaacaagagcgcgtgaaccaagagtgggactctgtccccccttgacttgacagagccgtacgccgtcgatttcatgccacgtgtcgatccacagtgcaatccatcaagtcctctgaatctcatttggccgtccatttcggaccaaattaaataaatacataaatagtaaagtgttctttcacaattcagtccttgaatttata

SEQ ID NO: 5134 - DNA, 1024 bp, Cannabis sativa
atatatatcattaaggcatctatgaaaaacgagcgagcaaccactcaagtacatcttgaaagtccaggccactaaaccatagcaacatctaaataaagtgtcaatttagcaaaattatgaactagctagccgattacaataaacaaagctaaaaacatttaaacttttgtttagaacaagagcttccaagataacacttccaaattcagcaattaaagaattgttattagaaagagtggcacaaacacgaggttctgaaatcccaaggaagagcaaaagatcaacccttgaagagccatagcagaagtgattcaatttctaacttgtagtaaatgtcatttaatatttctcagtgctggtaattaaagagaaataaatgagtgtacaaataaaactttatatatatacatattttaagacaagtacaatatttatataccttagggtacgcatttatatggattatagcattaaataagattgactagtcattgtaattttctttttctttcaaatccattgcatatataagtcgtttttgctaaaggacaagtggtttgtgggcacaacttgatttgtttgtatgagattgttactaattattgactactttgttttggtttggaggaaaggacatgtatagaacaaatatattgctaagaatagtaataataatatacaaaaagcttcgtatcatcatcaattgtcatttttctatacttttcagttttcaaactattattaatggcatttttctatttgtgcaaaaagaatcccacaattaatttaacaaatagaaagacatagaaaaagacccttttggtgccaacttaacttagtggtgtgtcacactattattttggatggtcatgctgcctcattgtgaaaaatctcttacaatacaatatatgagatattataaggagtcccgatatatagtacttttacctacaacaattttgaatatatcaagtatatatttatcttttctaaacgtgttttttttttttttttttggtttggt

SEQ ID NO: 5135 - DNA, 3169 bp, Cannabis sativa
  modified_base (1188)..(1195): a, c, t, g, unknown or other
atatatatagagtataagtagtagaagtagtagtagttacgtggttggaatttcaaaaaatgtctacgtgtgtgttttagaagcaagaagattcatgcataattccacgtcaatgcccttttttgatcctttaaatgtgctatacaattataatataatatttatacatacattatatacatacaattttgtaattaattatatatatgaatattactactaaaaaattaattattattattatttattttgtgcacatggcatatggtatatatggtagtaggcattatctaaggccggccggtcaagcctatatataattttgtttgagaattaatgaaataaaataaataaataaataaatattattgttattaattattattattgttgttgttgtgttatatatatatttgcttaaaatggatcaaaaccgtccaaattaaaatattattattatcaactaattatgtgtttttgatcaatggaatgtgatgaaaataaattattattactcttctaattataatatacatgtgacccttatatattactaatataaatattaagtatgaatttattatttaatttaacttggttgttagtgacactatatataacactgtatatatactaattatatactatagttaagtttccccaagtagaaagtcaaccttgtccaaatttagttgacgtaaaaccaaacttgaacactcactgactcactcaattttacagatagagatcacagcagtcatcattatttattattattattattattattattattattacgagaattattttttaatttttttaatttacggtttaagttattttaatagttgttttggtagttttttatgatgtcgtttgctatatagacttttgtgatagtgagtagtttcgtgatccataagaaaaaatactggataagttgtgcagtccacactgtttggagaaggtcaagcgggatgaatctgaggctgtataggtataggactatatagttaaacatgacttaaatagattgactggtactacctatatcaacaaggtacatcttgttttctagtagcccatcacgaaagaactccacaattaagcgtgcttgacctagggtaatttcaagataggtgacttcttggaaaattttcctaggaagcgtgcgagtgaggacannnnnnnntggaaacactcgtgttggtttgtggggccagtcatcagtacatgaagcagccggaatgatgtactcttgtataagagtcattattctgtgggtgtaagaacccaatagaggcttgaagcgggaatgttacaattttatttacgatttaagttgctcagtcagttgttatatgtattgctatgtgaatttcgtaaaaatatatataagaaaatattttgaagtataaaaataaaaaaaaaaaaatcctaaatatttatatactacaaaatctcacttttagtcataacaaaacttaattataattaaaaataaaaaaattgtgactaattataaattattttcttatgttgtaactaaaaaatctgtaaataaaggtattagagtacaaaaatcacaatttattgtgtagatatttttagtcacaatattttttgtaattaaaaataaattgataacaacttgtatgtaaatattatattttagtcacaagtaacttttgttatgactaaaagttacatttagttacaaaaaatttatattgtgactaaaaatttatcactaaatataattatttttttaataataattggcctattttttatatataatgcaacgattttaccttataacatcttatgatatgaaatataaagaagaagaaaaaatgacccaatataatagatattttgctattatttttttgatctatataaaaatatatatagatatatagttgtatttaattatagataagagatttaaatgaatagatttggattgatgtatagactgtagtgtgcctcatgatctcattcaaactatatatataggccaaccaattttgttgaattgaataaattcaatcatttactaaaacttagagatatgtccaattatatttggagtggatatatatatataataataaagtatataagtgtaattgattgtttgaaattaaatcatgtgttcgacatagtgtactattaataaaaaaaatccaaaaattattgaacatttgctatatatatatatgagcttaccaaattatttataataaatagaaaaaagaaaccaaacagcaataaaagtttaataaattaataaaagtaatttttgtcagcacgatagtaaactgcactcacaaaagtgatttttttttttatagtgtgtatataaaatataaagtatgttatagatttctaaaccagatatatcacaatataaatgtaatttttgtaactaatatttttcattacgaatttattagttgcaacatagaaacgataatatataattaattaaaaaaaatatttttaaccataaattttgttgtaactaataataaaattcaatgtagtgagatttgattattggatgtaaaagtttcaattgaatgagattttagaccattaatctcagatctatatatattgacattattattaaaaattcatcacaaaaaatggtaaataatatatcactataacttatcatgatataagtagccattaattaattaattaagcctaactaactctaaccataaaaactgcaaaatattaatatttaatatatggcgacattattaattggtatatacatacatattaatattaattattattattattatttatttaattttatcaagtagggaattgatatatttgagaacatgaggaagagtttaccaaagggaaaaacagaacgtgatcactaaaagattagatgcttatcaacccattacgtcacacatccaaataaatttaattaatttaattaagaaaaaacagtgaaaattatatatatatataaattaatgttgtggaaacacatgagaccacatggatttatattgacccatatctaattaatcataattatttcccaatattaattaatcatcattatcagaccgttaacaacataatagtcaaaattatgggatcatgttcttaattaattaattaa

SEQ ID NO: 5136 - DNA, 997 bp, Cannabis sativa
acttcagaggatgtagctcagaacatcatgtattcgcttgagtgcgagttcaggcggtgttcgtatactctcggattgggggaaccaaacctcgccgggaaaccgacactggagtacgacgccgtttgcaagcctagcgaggttcattcgctgaagaagagtccgtacgatcatcaattggagagcaactacgagagccagacggtgtacaccacgcaacagatccttgagtcgtggattcacacggccggggagcccctccgtcgcgtcgccaaccgaatcgattctagaagcttcgagaaggccgcgagcgactgctacttgatcgaacggatctggaaacttctagcggaaatcgaagatctataccttctaatggacccggacgatttcttgaggctgaagaatcagctccacgtaaaatcaatggatgattcggaacccttgtgcttcagatcaaaacggctcgttgagatcacgaagctctgcaaggatctgaggcacaaggtcccttacgttttgggagttgaggtggaccccaaaggcgggccgaggattcaagaggccgtgatgaggctgtactcggagaagtctgagtcggagaagattcaccttctacaggcgttgcaggcgatcgaatcggctcttaagaggttcttctacgcgtacaagcaggttctgatcgtggtgatgggaagtttggaggccaaggggaaccgagtcgtgatttgtcccgactcgtgtgattcgctgagtcagattttccttgagccaacgtatttcccgagtttggacgcggcaaagacgttccttggaaatggtttgaatcaggaccatctcgccgggttggatagaagaactcggcggaagcagtaaggttgacaagaggaggtcttcactctgtccactcttacaatttttgggaaatttcatacttggatggaagaaagaaaagaaagattgttatatttaatctactcaaaaaaaaaaaaaaaaa

SEQ ID NO: 5137 - DNA, 1509 bp, Cannabis sativa
ttcataattcttggcacgattggaaacaagtacccaccccattcgagttttttttaacgcccaaaaggtcccctgtatcaactactacacaattaggtacatccatattttctgaacaggtgttattttttacattacaacccacattattcttcggcccactaatatccacacaactctttcttcttcttttaacctctaggaaagtcaacccaacatttgaatctccctccaaactttcctcgtttatctcctccatagtcgagtccccaatatgaagggattcgccttgatggatgattggtacagggtcgacgccatcttgattaaacctcattaatgacgatcccatgttttcctctacctgtcgactacccccaaccacgcctgccgtcatcggaaacacaattagagcaccaaaaaagttaccagcagcaccatacatggtagaaccttgccttgtcatcagtcccgagcatagccatcttgacccatcagcgtagttgtctcggggccgtcttaatatctaggctatatttttttatgatttgttccttcggagtatcaaacaacttcacacagaacttctccaaatggcctaggatcccacatataaaacagaaggtgggagatcttcatatttaaacatcacatgacacacacgccctccttaaattactaggttcttcttcttcttcaaagaaatgttcacagatattttgacgcgaatgcgtaaacagtcacgccaatctcttgataaattattaggatctaatttgacgaagtggccaagaaaattaccaataccactgattattctttcagacatgaagcctatagacatattgtgtaattgaacccaaagttctaaccttgttaacggaacaagtcgtggattaactctcggtttcacacgttcaaaaataaacggagccgatcaaaagtccaatcctcaatcacccgtcactactacaaaatagacttttggtgtcggttcaagtgactatttttttaaaaaactgacactaaagactaccccaactctttggtctcagtttataattgacacttataatgactttaagtgtcggttagtaaactgacactaaaagtataactgagaccaatctttttttttgaaaaaatatacatagaaattgagtataagtgtcagttcataaccgagactaaaagatcatttgggatcttttggtctcagttataaaccgacacttatagcaaattaaaaaaaaaagtttcataataaaaaaataattaaaaaaaagggtatagaaacaacatttggaaaccctaattctctctctctctctctcgttttcctctcttctctgtcgagcagcaaagccaggccaaacgttgggcgttcttcgctcgtccttgcttaagtcgatgtctatggattttggtgattattggtttgattatgtttgattggtggcattgtgttttcaaattaaataacaattaggtttgtagtaatttaagttc

SEQ ID NO: 5138 - DNA, 1417 bp, Cannabis sativa
caaagcagtccttgattatggatgactttgagcctttttctagtaatgtgtcccatccttctatgccacaagctgacatttgcattgtcactattggttactagagatgcttcacttgctactatcttgccaatcaaataatacgtcctttaatcaccaccatagaacccttgctaatcttcatgattctttatttaattttatttatgtaccctgcatcatcaagtgagccaacaatatttatattcttggttaggtttgctacataccttacatactttaagatcctaacggttttgtcaaatattttgaaatgaatatttccaatgtatttaactgcacatgtattgctatcactaagaattactcttccaccatatgttgttctgaattcttttagtaactctttgttgtacgcatgtgaaatgtgcagcctgaatccaagatccaatgttcatttggagttgattgagacttgtgattcagtttttttattgaattaatttcaataatctttcttataaatctgatgttgattcctgttcttgttgaagtaacaatctctttcttaatgtcctacttttctacatgtataacatccttttctatctttgtttgaaccttttgagtacgatcttcctgtattctttgagttgttattgattcttctattgtgattggttctttgtggttatctttccctggtgtagtgtgcttctccattagttcttgacaacttcctactgttctttcataacatagtcttggagtagatggcaccaatgatttcctccagcaccaaagtgttctttgcatacaaaatggtatctttgaattgctcatactgttgtggcaatgaattgagaagatagatagcttgatcttcttcttcaatcttcacattcaagctgaaaaagattagataaaaattttgtaaattcgttttagttttcattaatcgatttaccctcatccattgtaaatccatagagtttgtgttttagaaaaaccctgcttagtagtgtttttgtcatgaaagtcgattcgagtttcttccacatgtcagtagttgtttcttctcaaacaaccatcctcaagatttcatcttcaaggctcatcactatagtgtttattgtcttcttcagaatctcttctttcttgcagtcctttaatgttgcagacattttctcttcccctttgagagcttcatccagtcccatgtttccaagatgagctttcatcttttctctccaatgataaaagttattcttgccattaaacttttcaatgtccattttggttgtggtcatctttcttgatcactctgtgataagttcttgatctttctcgagcaagtgactgaaggcacaactcaaacaccttctgaactgtttcttgatcctttgatttcgcagat

SEQ ID NO: 5139 - DNA, 1564 bp, Cannabis sativa
  modified_base (584)..(594): a, c, t, g, unknown or other
tataccaattccagaggcaccgccagtgaccagagctgataatccgggcttgagctccattgtatttggaagaaggaaaaaaggatatgatctggtctctgtgtctgatcaatatgaagataagtttcgatctatgacactacgacaatatatatatacgtatatagatatatatatatactgggtggcatggcaacatcgttacatacgccggaatttggttttgtttttccacgacacgagaagtgatttttgtaatattattattatttattatatgaaatgatatgaattatattgcgtaataatgtcatgattttgactttatgatattgtaataataggccggcaatgtgaatcaatagagtatctccatttatttagggaaatttatacagtgtactaacttttgttatttttttacaaaaatactgttagacgctattttttacttttttactgtgtttttttataaatttcatactgcagtatattgtgttaaattttcattagtgttctactgatgttttactggtgttctactgttgttttgagttgttctgttttgtgttttactagtgttnnnnnnnnnnncagtatttttgaaaaaaaaaaattgtgtgacagtatttttgtaaaaattaactaaaatttcagtatttttgtaagtttccctttatttataggttatttctattttcactttaaaatattcttttatatatatttttacaaaaatgtacgtaacaattaacaaatcaattaaaatgtaaatttaaagaaaaaaatttagaaaatagtatttaaaataattttttttatttatttattttgtgagggtctaattaacaaatcaatttaaaaagcaaccaaaattcatatataaactatcagagcaatttagattgtttgagtccgggtccaggtcggggtctgggtctgggtcagggtccgaggtctaggatcgggtcagggtcggggtcctggtccgggtcccaggtccagattggagattggtgttgaccacgaatcctttgtaaatattataatacaagttaatacaaattatttgttatgtattaaataatataataaactaaccaataagaatagaaaagaaaaaaaaaaataacagtagcagcaactctcaaatgtatatatttgaaaagttaaattttttttttgacaatgagttccatttttctgacagctacctccactagcaactccattggagttgcacctcgagatgctcttatggtatcaagcatcacaaaatcacaaaaagtggcatgtcaatattagtgcaaattaatatacacaatttgatttaataaataatgtaagaaactgttaactagtcgcaacgtgtcacatgagtatggtattggacatcatatggtgtctaatagtaatacttttttacttacccatacttaattgcactatattacactttgaagggtgttagagcatcttcaattgagtgccaaaaatataatgtatggctatattttagcacacttaaaaaattactagtccaatgatattctaaaaagtgtgc

SEQ ID NO: 5140 - DNA, 740 bp, Cannabis sativa
tttcatacatgctcaaaggagtttaagtttcattgttctttgtattgaatgtcctttacattttagattttctttcccttccctttttgctgtaatgatgtgctcccaagattttctgtaatatacagaaaaaaaaaccaattaattattgataccttttggtacacatatgttcttgctttctgaaaagatttatgaggatgtatactcacaggatttcatttgatagatttaggacttcgacaacctaggttggaaggagaagagtatctatcaattgttgatgagttcatggaagctgttttcacacgttggccgaaggccattgtgcaggtttaattctctgagaagaatggctttcatttttaagttctgtttgtgtttgctctgttgacctgatgtttgttcatttatcagttcgaggactttcaaatgaagtgggcttttgaaacgctgcaccgctaccgtaaaaagttttgtatgttcaacgatgacatacaagtaaattcctggctatcatcttatatcttcaatataactaagtagagtcaaatagactgttctggataatttatgtgttactcaacagttctatattcttcacttatagggaactgcaggagtggcactcgcgggactattgggtactgtaagagcccaaggtcgaccattatctgactttgtgaaacagaagatagttgtagtcggagctgggaggtattcaaacttagcaacttaat

SEQ ID NO: 5141 - DNA, 629 bp, Cannabis sativa
agggtaaaaacagaataattaggaaattagaaaaggcggggacaattctcaaaattttaaactgattatccattaaatcaatcattgcgcattaatgacacatgataatattttttggaaattgattccacgacataagaattcgaactgaaatagtcacaagctcagattccgtataaccaaggggcaattgtaagggagaaaaataaccttaggggtaaaaacctaatttcgaagtgtttaaataaagaaagagatgatattgtgatgtggtagatatgtaaagaaattgattggttcatttaaaggggagcagaatgcagaatgcaaaaggaaaagagaagcagagttcaaagaagaaaggatctgaagcaaaactcgggaaaggaaagaacaaaaccttaaggagctatgaaagcgagaagaggaaagcgcgtaaaggagcaaaagagaagaccccctcattcgaaaaggaaagctaaccatcattcacgcatataaatagaagaccccctcattcgaaaaagggacaaattcttactcacactaaactagtcgaaactctgtcggaatacatcctcaagaacacttcgagtatgggaagcagacgacccaaacaaaattgagtg

SEQ ID NO: 5142 - DNA, 1270 bp, Cannabis sativa
tgagcagcttgtagcacatgcttatatgatattcttaagctgagaattggatcaaatccatgcattgatggactttgtctttgatttccacaatttttctctagtaccaagtactttgggttgtagccttgtattgccaccactcgccttcttgtatgtagacattgttcacccatttgagccataaaatgtcttttttgaagcgattatccagacatatttgatcattgctgatgtgttccaggttgctatctatctgaaaccaatcccccagttattttagtttggcataaagtgttccatgcaactgcacctagacccgaggccttagcttgacctttccgaaggaaggctcgacatatactctcaatttctgcaatagttttctttggtaaaatcattatttgactccagtatgaatgtattgccaataatactgagttgactaaggctgctgtacctgcaaaagagaggtttctggtactccatgctctcactctaactgtcatctattctgcaagagtcttacattctccaggtgaaatcttttttggacaaattggaacaccaaggtacttgaaaggtacctcactcctggtgaatccagagacatcaatgattctcttacattctctgtcatccattccactacagtaattagctgatttagatttgtttagttgtaatccggaggtgtctgagaatagcttcaggccttgtagcatatagtatatgcttttgaaattacctctacaaaataatagaacatcatctgcaaagcttagatgattaagctttaaaggatcaaatctatcatgaaacctgaaatcagtcctccttcccactctttgtagtattctggtcaggtactccatgcccaatataaagatcagaggcgacatcggatctccttgccttaatcctctagtagatttaaagaaaccatgctggttccattgaacataattgagaatttgggtgtctgtacataagtcattatcaactttataaaatcttgtggaaaattgaaagcttgcaacattccttcaataaatccccattctatagtatcataggccttctgaaggtcaaccttaatcctacagtttggctttgatgatttccttccatagtgtctcactaagtcctggcaaatcaagatgttatgagctataaatctgccttttatgaaacctccttagttctatgctactaactcaggtaatattagcttcaaacgggaacatatgagctttgtagcaactttata

SEQ ID NO: 5143 - DNA, 746 bp, Cannabis sativa
tgttctaccacgtgagcccatacttgaggaagttattccttctgatggggcccctgaagttatggttttagaagatcctcctcacctaccacaatcaaccggagttaatatggaaggagtctttaatgattcagcagaggagttggtggtctcacccatcaatggtaatgttaataaaccaaatgaagatatagaagtattgcgtaacaactttttggagtccatgtccctggaacttgaaccggactttgaactaacagctgaagttgttaactctggtgtactggttagttttttgggtggaaaaggagtctccaggtctagactcaaggatattttgaaccagatatggaagctgaaggggttctggaaactcaagacaatgaaaccgggcgtttggggtatctttttcgataaacaagaggactgaatggccatcctccgtaatagaccatggatcattaatgggaaactcttgatactcagggaatggcctgctgatggggattggtataatatggatatgggcttggcagtgttctgggtcatggcttcgggactgcccactccataccttaatgccgttaacactcgaacgatcgcttcgaaagcagggcgcttcattggaggcgacttagcaaatcaacgcaccattacgagacggggctttctaaagttccaagtggagataaacacctcttttcaacttatctctggtttttttcttgatataaaaaggggaagga

SEQ ID NO: 5144 - DNA, 955 bp, Cannabis sativa
tcgtaggtacaaaaatttaatatatgagcaaagctcattagatttatgtttttggtgagctagctagttcccaaattaaatttccgaaattgaccatgtcaaaagacatatatataatatcaattttgtaatctttttcttctcatgcatgtatacaacatacataatatattatctcatcactgcttatgtcacttgtacatgtgtccatacattattacaagaacgtacgtggctgtatactgtgtgttaaatacataatagaactatatatataatatggcaaggtacgtacaaggcattattaattttgtgtttgaatagaggggaaaataacatagagagatggggagcaatattactgatgatgattgtaatggcaacaaatttgagtactcgtttgatgtgaagatgcccacaataaaattcaccaaattatttattaacggagaatttgtcgactcagtttcaggtctgctcttatgttccataacattatttatattttctacatcttcgagtttttattctttttcatttttcacatttaatttaaatattttaagagatgttcttctagtactcatcattatttcttatgtatttccgttctctttaaagttaaaaagattacatctaatattcatatttttcgtttactagttttacttaaatttcgatcgtggcttggaagaataatatatatatatatatatttgttacgtacatatgtatatatgtacttatgaattacgatcaccaccataaccccaatcatttaagtatatatttttctttaaacataatccattaagggaaatggaaaaagtaattgtagtcgtaggctaactactactagtcattgccatgccaatataataccttttacgcctatataaattgttttaattttttttaaacttaattcgtgtatataaaagcgtaatatgtagtt

SEQ ID NO: 5145 - DNA, 697 bp, Cannabis sativa
ctagattctggtaaaatattcctaccaccaatagcaacaaaaacaacaaacagatcaataatcatcacacccgcaacagcttcctactgcccttccggccatcccttccttcaccttcaattggcctttgtgtcctgaggcaattgaggttttcataaaggtggtggatgccaacctctatctcaagaggcatcatgaccaggaagtggttatcgcctaaaagaaagaaagcatcttgtaggccaagaggaaggcagagatagctgatcgtgacaaagggaagaaccctggtctagtcttagattgcctggctctgaataagtttttgactcccacggtgggggataatgtggcaccctttgctgcagacgtaatagacttgactgccaacaacatatgcgagttaacggtagataaatgggaagtttcctgcagcactgaccccgttatgttggcacatgccaccaaacaacaagttgctggagtaaggtttgcatttttagtttgttattttcttcttatggtttacttcatactaatttttccttgtcctcatgtactagatggctatactcgacgagaggacctcaagagattaactccatggttgttgagctgaactaagttaggggcgagaataagacattgataaaatatatctgcattttttgttgtgaggttacccgataaagattag

SEQ ID NO: 5146 - DNA, 569 bp, Cannabis sativa
acgtgcgaacaagacaacaattttatgttgatgaattattgtcatttgcagagaagcagatgagtctcgcctacgagaagtttgtgagagttttctcggacctccaactgggatggctgaatccacgtctttagatccgaagaacttggcttgggatccttttgtgcttgtgagttgacatgacatacttcctttacatctggctcccgaaacattggatttgatcggttttcttttgaactctgcagggaataaggaaacataaactcttaagggaagatattctaccggcgatggcaacaaatagaaaagttcagcgtttgctcaatgaatttatggacattctctcggagtatgaaagtgttgaagctgacacacaacgaaaaactcagattgctgctccacaatgtacaacagccgatccaatggactatgtaccatcatcagcaacgaatcgaatagattctactcctgcaacaacagttggagtcgagattcagactcttcctactaccataacaaaagaaaaagacaatacaacagagcaagaaaattatgctcgaaaaaca

SEQ ID NO: 5147 - DNA, 1070 bp, Cannabis sativa
tactcgttctcttacagaagctgccggtcgaatattcccgccatcttccaaaggttcaccggtttatcctcaacccgccagttcagccggatttccgtcatgaagcgattgaaacctccagttgttccggtcattgcccaggccaaacgaagctcttctcctaaagaatatgaagtcgctacttgtaagcttaaatagtttagatgaacagtttactgtgtttaattatttggttttacgtttcgttatattcagttcagtagatattacttcaaaatttatagttttgtttttttgttaaatgttttagctgctgatattcaatttgaggcaccgctaagaatcgtggaatatccagaccccatactgagagcgaagaacaagcggatagaaacctttgacgataatttgaagactttagttagtgaaatgttcgacgtaatgtacaagtgagttttttttttgttaactcttgagcaagaattttgtgtgtttagggatgttatgagattaaggaccgagcagagtatggacaattggaattttgaagtttagttttgcagatataaatttgttatccatgtatgttttaaatgaatttaattgtttttaagtagatttatatacatgtatatatttattcatatgggtcttttgggatcaaattggcaagagggtctgcaatatcagtttatgatgttgttatgctgtgacccagaagagtcaaactctgagctttttcgttttggttttaagtacaacttatagagaattattgcaatgtacaggagtgtgaacaatacttgttgcttgttggcttccttttccacagaactgatggcattgggctctcagctccccaagttggaatgaatgttcagcttatggtgtttaatccagttggtgaacgtggtgaaggagaagaaattgttcttgtaaatcccagagttaacaaatcttcgaagaaaacggtgctttttaatgaaggttgcttgtccttcccgggaatttatgccgatgttagggtatgcatagatactactcctatattcattcgatatacttttgac

SEQ ID NO: 5148 - DNA, 1062 bp, Cannabis sativa
aatttatatttttcttatattctaatttttttcctgtattttccttatatttttctttgtaattcattttccaaatataaaataatttatattcaaatttatttatttatttcattgtaactagctaacccttatgatataactagttaccttatatatagatatcttataaacttgtgtgccttaaaaattacaaaaataaaattgcaggaattcaaatttttttataaaattaaaacccaaacggaaaacaatacaattgctatagctataatgagcttacaactcattaagagacaaacattatagccaaaatcaaagtagaaatacttggtacatttgaaaggcaatactcaaaagaaaaatacatatttatatatataggaactttcattagttgactttcctacaattggtcctaatttgaccttgagagccagtaagagggcttatatttcccatcttcaccatagccgcggcgaaatcagatttgaaagtggccgcattgctattataagtgttgacttgggaattcgttgacccgccactaaagagttgctgatcagagtgaagcaaccctttattggcaaccaagttcttaaaataggcattgtcaaaagtgttgggggttgtgacatcgagcggtgacaaagtattgtcaccgccagaattagggcaatttgcttttgttgaggtagcgaacgatgaatctatgttggcttcgttgtaaagtcgtgccctaaaagttgtgcaccttgcttgacctattgtatgggaacctaagtagaaaaaagaaaaaggattaattataccaaaatataattaaaggtcttaattgggtttagagattaattaatgattatgtacctgagagagctaccaaatctttagtagataaacctttgttagagaaagaagaaataagagccgttagattcaaagtaggagcaggaatgtctgagttggcagtgctttgacttgctgttgttgagtctcttctacccaatgccaccgtccaactgggcccacccaactaataatacacaatcccaaaatatataa

SEQ ID NO: 5149 - DNA, 714 bp, Cannabis sativa
gagagtaaagtgggtttaattaatattgtgttgatgggtgcactggatctcatcaaaacttcgcagttaagtgtgcttggaagagagtagtattaagatgggtgacctcctaagaagtcctcgtgttacacctaaaaagaaattaatattctgttgatttttcaggtttgatgcattaaaactactacaaattttgagaggaaaacgtttgatgtttgtaggagactctgtacaaagaggccaatttgaatcattggtttgtatggttcaatctattatacctaaagacaaaagatccctagaaagaatccctccaagaaagattttcaaaatcaaggtacctcaacaatagaatagatgaaatgtaatcactcctttgacaaaccatttcggcccgagatgagcttgttctcgggtcaaaatagcactactatattgaatatttcattatcgaaacaaactttcaggaatacgatgcttcgatcgagtactactgggcaccatttatagtggaatcaatatcagatcatgcaacaaagcacactgtaatgaaaaggctggtgaagcttgactcaatagctaagcatggtaaacattgggaaggtgttgattatttggtgtttgagagctatgtatggtggagatacaagcctactatcaatgcaacgtaaattacccttatctctattatagcactaatataatattctacac

SEQ ID NO: 5150 - DNA, 1494 bp, Cannabis sativa
aaaatcaagtttgagaaagaatcataactaaaaaaaattatgcctataatttatttaagtaattaagagtcttaagacactggattctccaagtggcctaataattgtaagcaatgagtttctgagattttttttttcattaacatacagaatcatttcgggtttcagaaacgctagttcgtgtttttcttgccttagaatcatcaagatagttctggtaaatgtaagaggagaaaccccatatcgccataagcatagcaactatcttaacgccattcatcgcgtcatgaaaaattatcacagaagcaattggggtgacagccaaagagagagtgctaataacattggagaagagagaagataccacaaatatcagtccaacgacaccaaccgagcaaacttgccaagccacagctatccaaaccaaagtattcacataagcaaatcctcctttaccaaaaccctgcatttctccatgcaaagtcttccactccccgctcgcgaaaagaccaacgagagcagcacaagtggctaccaatgatgtatagatttgcatttccagtactacagagaaggtttcccgttttagaactttttggaatgagagttgcattagagaaagtaaaagagagtatattgcagaagctgccagtgtgcaaatgaaaccgatgatgtactttgacctcgaaactcctgctggtccaccagagtcgtcattgacagcaatgagggctgcagatagtgataggacaaccacggaattaagaatcaaggcagtgaatttctgagaattgatgaagtacgagaaaacagcgttgaaagctaattgggttgcacaaatgagggagtaagtagaggctgagagatataagagtccaatggaatataacatattgtcaccagctataagaattccaagcaagaagtaaatagaggcaagtactttaatagaaggtgcagtaaaagtggatgaaggatatcgagaagaagaagaaagaagaaaaagcgggataaagaggagtggaaaggctgcagtttggactaaagtagccaaccatttactattaccaccttggtcataataaaatcgaccaagtaaaacagcagctgcctgaccaaccagaaggaatgctatgttgatcgctaccaaaaaccaccattgccagcgcttaagtttagcaaattgtaactgtggcggtgaaggttcatctttggataagattggcccttgattatctgcattgaacacaatatttataaacatatgaatcactgtactcatctaccatttcaataaataatttcaaagaagtttgcactcagaaatacattcatgtcagagccatgtgttaagaaaagaaaagaagttgtatttttgctttcatcttatttaggaacatcgaataggatatgctacggtaggagttagcacacctccgaaaatgggctacaatgcacaggctgttaatgcaaatgtaaaaaccattcacaacc

SEQ ID NO: 5151 - DNA, 831 bp, Cannabis sativa
aactttccatcttcagatggcttcatctgtggatatccagcacgatggcaagtgaaatcccttcttgtaattccacgaccaaccccatccttgccacgagtacggtggcgtcggattgaaaagccacattgctttccaaagctgcaataaaattcatatgctgcttcttgagatacaaatctttggccaataaacggaacaaggtttacagaagtctgccgagacaaaattgtgtcatcagatgtttctccagtcgtgcttacatcatcttgggataaatctgtacagttctcagaagattcaattacaagactggttccctcagacatacttcctttaaactcctaacaaaattgtccccatagacactgcaagaaaaaacttcataggctcaatagagaaatgtcccaaaacaaaccaacaataggaaaatccataaatgtcatgaagcattgtatgtttgtaacaagtacattcagtcttctgcaagctctgtgacaaaatgatgaattttctttccctatatacttctaatattcattattcgataaagatacaaacaaaagtttaaaagaaccaaagactcttacaaggaaattaatattctaacaacagtttagaatgaagtatacatcatatttatatggtaaaaagtacaattagttttactcacaaaaccaaattatataaacaacttaaaatttacatttgagtgttaatttatggggaaaaactaacttttaccattgaaattaatttatctatcacatacatttatagaataattattacaagcaagaaagaaaacaatacccaacagcttgaataaga

SEQ ID NO: 5152 - DNA, 1787 bp, Cannabis sativa
aatttttttaaaaagtagaatagtcaggttatttttgaaacaatattttgagaggggtactattttgaagcacaggggtaggtaacctattgataacataacaagctatcctaataacttcatcctagtaagttaaatgcattgaggcttgggcaagaagggtcaaatcatcacccatatgcacctgctcagaaccaaggtaaggctatttttgagtgaatttggaagcatctggagtacagtgagatgtaggaccaaaattagggtaccagacataatccattacagtcttagcagtagccagattagcagatggcttggtgacattagcagcacccacaccaggaaaatcaatgttaaatctctaataacactgagaggcaatgtggccaagcctggagtagatttggaaaataggtctaactccttgattcatgggagatagattgaggggaataagaagcaggagaagtggacgaagaactagcacgaccagttcataaaaggagaattgaggattagattgtgatgttctaggggcacatcaaattgattctaggtggctcttcctcgactaggaggaatagatccaagatcagagaaggaacgattgttagactgaaaagaaccagtgcgttttccacaaaatccacgattagtggctagattgacacaatcaagatccttatgatgagcttccatttgatgttcttgagacaaaagtaatgtctcaatctcagcaacagagtatttatcatttcttgaattaattgagataacaaaggtatcataatctgcaggtaatcctttgaaaatagctgctacaatatgtttagagattttatgaccaacagatcctaattgatcaaccaaagtatttatatgaagcaagtagtcatttaatggaaagagaacctttctttagattttgaatttgtgtagtgtgcatatcaatttttgtagaggtctgagtaacgaagtatacctcaagagttttctaaatttgagcagaggtttttgtaccaacaattcgagtaagtatgccattagacatgaaggagagaagccaagagtataagagctaatcttgaacttcccattatttgaatctcggattgacaataccacaaatttcatcttcatcatgaagaaattgtcgctgaggttgaatcatatcacagatataatcttaaagacgatggccacgaattgcggatttgaggtcgccataacaaaaaatatatcatcgagtttgacagagactttgaaagaaaatgcaactggattaaaggcaggagctaaagcagaagattgagcagccatggaagatgatcaacgagaacaatcaagtaacagagcgaagatgcggaagcgaaaaaaaaaagttgctataataccatattaggaagaataagaatgagagaaattaaaaatgtgtatattattcattcacagaaaatatgagcatcgaagctctataaatacaatcgtatagttaggttgttagagaagaagactaacaaaattaattacagagaaagttgtacaaaagaacaaaaataactaattagtcctaactaacaactgtacaaaaaggcctaactaacatgatgtgtgattgggctaagttaaaaatgaagagtgattgtagaatataaataatacaaaaggatctttaaactttttcaaaagaaactgaataatggtattattcaaaaaaaaaaagtattaattgttaaaagaagaagatgaagaaacaagagataactgtaatataataataataa

SEQ ID NO: 5153 - DNA, 556 bp, Cannabis sativa
  modified_base (251)..(266): a, c, t, g, unknown or other
acacctaacagtaagtacaaatgcatcttttttatgaccggtaacaagagcttcatcatagaacttctatctcattaatattttactgaataaataatatttaccaattgaaatttaaaatagatcttcaaaaaaagttcagcgaaataaaaatcttcaaaagaatatatataatattagacaaattggtaaaaaaaataccaaccaaatccaaagtagtaaaagacaaaaaacataataataataataannnnnnnnnnnnnnnnaataataataataataaaaagagggtggaaaattcatacatcacaaagataatagctggcagtaagacaaacaattgttagaaaagaaaaaaaaaagacgaattgtttaactaaaaggctatatatcccctcttaggatatatattgaacaattattgggtagtttttaatcactaccgggtacttttagtatttttggtacacctcattttttttagcttaatggtgcataatgtggttacaacttacaagaaacctcccaaaaattttcaattttttttaataattta

SEQ ID NO: 5154 - DNA, 1041 bp, Cannabis sativa
tcgtgtagctatttttaagagcggatctccgaacatagttacatttgcctttgtgatagatgtgtttcaatactggaagtggagattgttcctcttctagagcttatttccaattattttgcctttaggtatctgaaaagaattttccgacagttgccatataaggctttgtccttattttcgataatgatgaaggattcaagtttttctgttctatatacttcaataaaataaagctatttattggcttacaattttaactgtctttgcccctttcttttcaattcaattttataattaactattgaaaacttaaacaaaaggtgttatttttgtattctgaatgtataactgtttctataataaaccggttgattagaatatttaaatggcatggattaacacatctttgttcaacattttactatgaatttatcgtagcagcaaaatttacacacgaaattgcatagtttttgtttactttattctgctttcaagtttcaaactctttattttttgtaggaggacgttagtttggtaattaattgtacaagattttgtaatgaaatagaaaatggcaaagagcttatgttataagaatattaccgagcagatgatatagcagaatctattactatacacaagaatatgaccattttatctaaaatagaaaagaaaagtaaaaatggttgggcataagttggcaacaatagacactgacatctcgatctaaagctgtcagagcagacaaatgtgtggccattttaagatatggtagctcaaagtatttgcctgtcttattgtgaatgtcgatcatgatttttttcatacccattggaaccaaatttcacaatttacatccacataatatttccttctcatctcaattatggaatatggtacgtctctatcactatgtccatatgccgacgttttcgactgttcctgtggtagtatatgtatgtacctacctttaggtgtagtccgaatgatatgttccctgctattgttatctttcaaaactaaacaattaaattatat

SEQ ID NO: 5155 - DNA, 753 bp, Cannabis sativa
accaagtaaggtaatagacatttaagtctcgaacaaattagcttggtggctgccttgtagattacattacaacatgctatttgcctatagtccttcactgtattggggcactttgacttgggcacaagagttaggactctgttattgatttctttcagcagctgccctgttttaagaaagctgataatagtatcaactatctcattacctataaccttccaattttactagtaaaaggagctaccaaaaccatctggtcctggagctttgttaccaggaatagcgaaaatggcctcctttacctcttatcggctatactctttcataaggaaatttgcatgaattttggttaacagatttccttctttaagtatgcaatgctgtattggcctcctcccctgcatattgaaacctaacagaccaatctaatattgaatgaaagcctcaataatgtctcttggttcctctactctttccccttctgcattaacagctgtgagaacctgattgtgtctccttctttctcggatactagtgtgaaataatgcagaattttcatctctcacttttgcccaatttagttttgctttctgctgcaaaaaagaaaaataattcttaaaaatggcagcataattggacctagcttcctgttcttgctggtgcagtttatcatttaacggttactgatacagcagattttggcaatcatcgagttgaactcttgcttgcgcttctttggcttgaatatcagta

SEQ ID NO: 5156 - DNA, 2081 bp, Cannabis sativa
tgtgttgttgacaacttgacaaaaaaattgagcttttcattgtggtaatatttgagccaggtattatgcaatttagcatctgcaatgattagattattatagtaattctccttgtacgagattttattacttataatctactagtatgtgtagattatgtttgtctaattatttatttaacagccttgtcatggcatgtgcctgttcttaaataaactcttaggcagctttttgcaactagcatacagcccttttatattgctgagtgaaacaatagaatacagtctctccctggcaaatctgtaaggaacttctgccactctgaagaagtttcaccacacatttctcaactcaaaaccctactatataagcaatttttgagatatttgaacttttcaatcatcagtctttgttatggccttatattattgtaacagaagttagtatggcagctcttccttgatgtattactttcaacctgtaaacatattcctagttcccctttagtagtttaatcaagtgtcgtcatgtgactgcatataaacataaccaataaaaatggaaagattagataaatagatgcaatctggacagtgtatattatatcgtcatgtatttatttctgtagtcctttatgctggaaaagaatttttaggtactttaactagcattgttttcaacttttcatgcatgatgggggctgtggctatggtactaatcaaatttattaggcaggtttatcaagtcatatggaacacatataatagtagggatggctgttggaggtcaagacttagtatgtgttcgacagaagtcttcatcacctattcctccggctgatttaagaggacacttggaggatctgggagacattcttttctcagacagcagaagcccttccttaatgcagagaaaaacaggagatggcaaacacaaagtaacacttaatttcattctgttttttattttattttatttcacatgtactcactagttgatgagctgaattcatttctgtaggtccctgaggtgttcagtcgcatactgcagtcaagcacaatgcagctgaccactatttcagaaacatcaagcaaggatgtaagcaaaacacctaagaacaatatataaagaaccaagatttatgttccactttaactattgttctaactttgttttttctatcagggtctcactatcatttgttcaaaaagaggaggggatgtgttcctgcacagtcactccagttggctgcaaactgtggctgctaaacctgaagctattcattttaagtttgtacctattatttctcttcttactggcgtctcaggcagtggctatcttagtcatgctatcaatctgtacttacgctgtaagtgtttacatcctaataacaatactctgactattggctttgagagtataaagtgtcttttagtgtacgagtccaccttggtctgcccatgtataattgtgcttaaattgtaaaattatactgtcaaatattcttggatgctgtttgcctggtatcaaattgtacttattcattattatcttttcagacaagcctgctcttgaggatttacagtacttcttggagtttcaagttccaaggcaatgggcacctatgttttgcgagctgcctctccgacatcaaagaaaaaagcctgtttgtgcatccttacaatttagtttctttggtccaaaaatcaatgtcagctgcactcaggttgctttctctctctctcacacacacatatatgtgttccatagccactgtgggacagatatctacacacttttaatacaattttttttttgatctctttctctcattatctatgctttctacttttctatgagactccactcagttaacacatatattcattaaatgttttgtgcattccgtgatacccatcaaagaaaaataaaaaataaactattctcttggggcttttagtttggaaaaaatgtatatgctattattgcgattgagtccgtcggaaaattgatataagtgctcactgctgagacactaactcattacttgcattgattttagatgaaaagtaaaaagttga

SEQ ID NO: 5157 - DNA, 1210 bp, Cannabis sativa
acaaaatagtaacctagtataattaatattatcataattcaatacattttattcaaggtcaactacacaacttgtttgcacacaaaaataataataataacaataataattttattttatttttttattatttatttataatattttcaagataggcaactactataaatataaccccaaaaccccattttctttagtactaccaacagtcctcacattcttaatttctctctcaaaactcagaatcaattagtgaaactcatcaccatcatcatcatcatgagttcctatgaccaaaagtcaacttacgaaaagttcacggcaccaccagctccggcgccggagtacaccccaacagggattccggtgagctcctccgccccatactacagcggcgacggaagtgggtacagtacatctcagactgggcaaccctttcctcctccacggcccagagatctggtcccatggtcaactggtctctgcgactgcttttccgatgtcaaaaattgtaagtgttttatgttcaaaacggcgtcgtttcttatctaatctaaatctaattaattatgtcttaattaatttgtattaataatgaattattaggttgtataactatgtggtgcccttgcattacctttggccaaattgcagagatcgttgataaaggatctacatgtaagttaattatattttactattgtataaattatttatgcattaatatttttattttattacacatgtatattctttttgcaaaatatatctctaaacttgtcacaaaaatggtggactattattcacttaaaagctctcattttttaaaatcttattattattattttgacatagaaaaaacttttcatagttttcaaaaatactaaataagagaataacaaattttgtatttaatatctcatgaataatgttattagtgttggacttggacacacacctaattttttttaacaaaattttacttttaattttgttgaattgtatcaaatatttctgaaaaagagcaaatggtttatcattttatgccaaattgatgaattattgagctaacctaaatttttaacaccctgccaaaaatcaaattccaaatattattccttttcaaaaatattatatatatataaatgatactaattactcttgataataatttatatgatcccatcatagttatttatttggacttgga

SEQ ID NO: 5158 - DNA, 1076 bp, Cannabis sativa
tatgtgttttgggaaaagaggattgaaaaataaataaaataagagattgattgtagtattctacaaagtacaaatgtaggcaataaattttagtctttgtaaaaaaacttaatgtaaatcgttatctacttgaaacaaaatttgatgtattatgtattttgttgatgtactttggtttctaataaaataaaattgtttgatcaatctattaatctaataataacaacaataagtgaaaaatgatttagtcttagtaatagtcatagttgtaaatatgtacatgcgtgtggtgccaacttgatttggttagtatgttaaaaaatctgccaaaatataagttgtgttgtgctaaactataagaaattgcatgttgtgtaaataattttatagggtaggtctgagtcatgttttacttgggttgagtcgtttttcttaaataaactaacttattattttcttatacggacttaaatttgtgcttcacgttttctcatttttattataattaatgacctaaccactaaactatatatatgcgtgtgtgtgcttttttattctaattaataagctaactactaaactatactttctttcattctttattataattaagggtgatcgataaaatgttaaaataacaaaaataattgcattacgcaataggaagataagattcttccatctaagaaagttcattgtctattcaaatatatagtatatactaaactaatttatcagtgacaataataaaattgcaacttacataaagaaaatatacctctttaaaaaattagataataaacttttatatcaagaaagaaaacttataatgtctttttcgtcccaccaagaaaatatctacagaaaatagtgaaaagaaatgaattaatatgaaatatttaataaatatataataattttcatattaaaaagattcttcccacatgaattttattttatctaaaactttatttaaaacttcacaattaaataatttttacaaaccaaactttcttctaagaaaataaacttatcttatatattgaagtcctttgaaattaatgcttttaaggaaa

SEQ ID NO: 5159 - DNA, 575 bp, Cannabis sativa
cacattagaaaataattaaaaaaagtatacttgtgatattaaggcaattatctgtgatattactcctaaatctctatatcgaaagtcaataatgctaataagaaacgattcagagaggtctctataaagaactcatcttttcctttggagaaacccttgtcgcccctttgaatttgaaattaagtctgattggatgagttgaacgataaggattggtgaccaacaacgaatattgttaaatccacttgaatctaggcaacgcatccctcccaattgaaacatccagcctcaaatactgagattccaatctactctttgcaaatcacaaaaataaaaaaaaaataaaaaaaaaagtgggatctactcatccttaatccttgaaaaactaccttagtggcaatagggtgtggcatatagaatcccatcctccatggccacatcggtcaaagattgatccttcacatgatcaaggaaacggcgatcgaaaacaaagaagaaagcatttaatttttttttcaacctaagcaggacattcagggtcattgcttttgaagacagccaatgcaccgaaaaga

SEQ ID NO: 5160 - DNA, 1841 bp, Cannabis sativa
aaaaaagaagaacatatttgaaattaattttacttgacaagaaaatgacaataccattaataatagtttggtcaaggaaatttgtgtttgtgaagtgaatttttcattcgtgagatgattaatttttactaaacaagatttacttctcaaaaaaataacatttaccttattagtattgattattattattattccaattgatatatcatttatccacctttttattagcttgttgttatcacatcaacttagtttaaacaatatgattatgattcatcaacatgacattacatatagtttaagtgaatatgacattatattatctttaaaatttaatgctttgtttattttttctctggcaaattaattacttgccaccaaaagtctaaattgtggtagtattcaaagtaatttcctggtatttcctttttttgttctttcatataattagtatggtgtattagtttgcaatatatgattggtttatatgtaataataattaaaccttacgagttatgagtggtttaatgatctcactattgatttgacaaattttttattggaatgactaaattattattatagagtttttctcaaccatcttgatgaagaaatttttaaatgactgcttgcttttttttttttttttcttttttgatagttagaactgaaaaatgagacagaatacatctagcttctacaatctatattgtaaacttatataaatataaatatatataataattataaagtagctgcctagagaatgagtcttatgaagaaagagtatagaatatgactattccaaataaatatattatatagtctaaatgattttataaagcatacgtatcttatcatactaatgaataaatatttatattcttttactatgtctaaattatataaatcttaatctgtatttgcagccttgtgtgactaataagctgccaattaagttggtagtctagttgtcatatatatatatatatgtataatgtattgatgctaatatattcttcatattgtatataaatatatatatctgtcaaagtccaaacttttacatggacaaatggacaatacaatatagaatatatgcccacatcagatggctattaatttctctatctgggattctctctatctggttttctttttaaatataacttattaatttatttatgacactacatttgtattcattattaactattaaaaatccatcaacgttaacataaacataagtcataaagtgggccacggcaaaatcagtttctaatggaccatcaatgcttatagattataactcatccaccatattaatttttagaactacacactaaaattaaattatgttaaaaataaaataaaattcattacatcttataataatgatatacattttgtgatagcacatgtatccatgggaggtagtgtattttcggcatgcttttgctattaagaaagaaattgttgaacctcttcataatgaaatatataagtatatatacagatggtgtgtattaaataacaagtaatgttatgtttgaataaagtattgtattattatattattgtattaattattataactatagattttaatacaatgtaaatcgtattattcaatacataacaaatgatttgtattagtttgtatttaatatttataaagggtccgggaccctaactcgaaccttgaattggacctggaccccgacccaaaccctgaaccttgaacccagatccgacccaaaccctgaacctcgtacccgaactccgactcgaaccctgaacctggccccagacctcaaacccaggcccgaaccctaaactca

SEQ ID NO: 5161 - DNA, 957 bp, Cannabis sativa
caaataaaccctaaaatgtaaaatatatcataatgaggtaatgataatcaaatgtacataataattctcatttttttcttttttattacaataagccatgtaagaattttgtcaaacatacgaaattaaggagaaatgaataaaaaaggtctccccatttcgttaaggaatgacaattagtaattactttgtaaatggtactttttttctcaataatttaaaattaaaaacaaatatatccttagaaaatcttttacgcaatatcaattaatttttttagttacgtaaataacataaaataattgtgatttctcttttgattaattttacgttctcttcttcctgagagtgcagccaaccgtctttcttcagttaggtccttaactttagttacttttgtcataaaacgactaatataatctttcaattgctctctcagtaatttttttttatctcatccaggtcttcaaggtgagcggggagttgtctaaaggaggataattaggtgtacaactatgaggcaaaggcgttccaggagttatctagaaataccattgctgggtggcctctgctaacgttgctgggaatattcgacacctgacatcaccctttactcccttcaaatccgtctgtatctcaaaatatttgatgtgagataatagatcatccttctcgatgtatatatatcttcaaagtcaatattttgaactcggaagattgagagaattgatctgtgtagtgaatggcgaacctcgagtcttattaagctccagattggtgagttttaaactggttaggctttgtataaggcttttaagatgatctagttgggcttgcacccttggtcagcttgtgctacatgttgactggcctatgtagtcatcgactaatcttggactgctaagcataaaattatctctctagttcgagatgaaattatttagattgatcggttgg

SEQ ID NO: 5162 - DNA, 723 bp, Cannabis sativa
tatatatatgtatatatttattaattcaattttaaagaaagtgtatgaataatgaaatgcaggattggagtatttacacaatggctgcaaaccacctatagtgcatagagatgtaaagacttcaaatatattaataacagataattttcatgctaaaatagctgattttggtttgtcgagaatttttccggtagacaatggtactcatatatcaaccgttgttgctggcacagtaggttatttcgatccagagtaagtataataaatattaagggaatttatttaattgaaacaaatttatatatatttataaagggaaagaaatacatagctactactaatatatcattataagtctctcaaatataatttcttgacttacattcaggtattacattacaaatagattaaacgagaaaagtgatgtttatagttttggagttgttctacttgagattattacaagtagaccggttataagtggaacccatgataagaggactcacctcaaagattgggttagtgtaatgatagcaaatggagatattaatgatattgttgatccaagattaaggggacattttgaaataaactctgtgtggaaagcagttgagatatcaatggcttgtttagcacattcatccattacaaggccaaacatgaatcaggttgtgtgtgagctaaaggagtgtttggtagctcaattatctggaaggaattgaa

SEQ ID NO: 5163 - DNA, 654 bp, Cannabis sativa
cagacttggcttcgtcatgctcttaccagaaatatgcaactctcttgaacacccctcctgatccttcaccaccactttggggacccacgacttgtcagtcttagatcccagtcgcacactagctctcgagacaaaagctttcctcgagccaagcaaagacccaccaccaacctcagcaatattatttccccccaccggcacctaagaagagagtaaagccggcatcctctccttagcaacaagccttttagccttgaacgattcacgagtgccaaagcactaagtttgccagagaagcaacaagtgtaagaagagtttgactttagccatggaccatacagcgggtatttgataccctgagattcctcaatggtgattggagaactcaaagaacattccccacgttggtgtccaaggcatccacataaaaagcaaaagttaccaatattttcatacttgatttacacccaacaattatctccattaactattttaaaaaaacaaccacaaaatagggcatgtgtacattgatctctacctaaacccatgtccatttattccaagtaatcggtctagactcatccaaatcaatgaaaatcaccttacctgcctgagctccaagaacgttagcattagttcgggagaaatagtggt

SEQ ID NO: 5164 - DNA, 2814 bp, Cannabis sativa
  modified_base (640)..(640): a, c, t, g, unknown or other
  modified_base (2226)..(2246): a, c, t, g, unknown or other
gaattattataaaatatcgataaccagagcagacccaaaaaatcttattagcaaagggcaaaaatttaagagaaatactaaattgtactattagtgtctagcactttttatggtatcatacgtttattggtgtaattaaatatcaggtcgtatataatttaagacaataactttaatttagtaaatatcgctaaccaatcgtaagatttcttttatagaataagtacccctgtccaataacaataaaaatgtgctcaatattcaataacgttgcccaagtctgcattttgagattcaacattcttaagacacacaatcgtaatggtgcctaatagcaatgctataacttatcttatataattttataatgttatttaattggttaattataatttttacccccaaactttaacatgtactaaataatgctcttaaactttgaagaccgttaaactattgagattgtatgatttaaggacttttgtttaattttagtaagaaaagtctaacatagatgaaagttcagggactatgatttggaaaatgtcaaagttcgaggggcatgttttggtagatatcaaagtctaaggagtataatttagtacaaaattgaatgaaatgagacaaaagtccttaaatncaacaatctcaatagttcagggctaatttttaacagccaaaaaaattgaaggaacataattttgtatatatcaaagttcagggacaaaaatcataattaacctatttaattttactaaatggatggatttctttggaatcattaatcaacctaattaaaaaaaacaaattgttaaactaatattaatagttgaccataataacaataatatatttatataaatatatatatatatatatatctgaatttaacttaacactataatattttcaatctcaatgaaaattcaactatttaaatagtattctttttttgcttgatgaacactcacctactttaactaattatcaaaagtggtggctcagaaaaacgacaacaaaatttaaaacgacaacaaaattcaaaaagtttctatataaattgactaactttaacacatagttccacaaaaaattatttaaatatatgattgaattttcaaatttttattcttcacaataaaattcctttggactcaagtaattggatatgtcctaattgtataacataaaatattattatgctaattattataatattgattaataataatagataattttcactttagtcacactaaaatttatgattgagaaaaatatattatgatatttatatattcacttaaaaacacttgactataaaaacaaattaaagtcacacaagtcataacaaatttaattattatatttatatatccttaccaaaaaaaatattatatatttatatatataaaagctactaaaactacattattattatatgagtattttttttggttatacacaagagaaatattttattgtgataatgtgataaaaaattaattaatttttttattttttcttagtgttgttaagaatatatatataatatattaaatattttatatatatatgcattgtatgttgaagttatattagtcaattcaatacaagactttaaattataaaatctacctttgaactttcataatatagctttttgaaccccttttattaatgtttatttttgttaactgttagtcaaattaaaatattaataattatactaacgctactaattaattaatattaattattatgtaattaaatactttaatcagtttaaaaaaaaaaatactttaatattgggtagcacttaagtttcaaaatttacttagtattcacgtaacgtaataaaacagtcaaacataataatatttttttaaaaaaataaaccatgtataagaggaaaattttctttaaaaaaaaaaaaatgtataagaagaaaaaataaaaaactatgcaatcatatcatgagtcttgaggtatatattcttcatcataaattataataataatcgcaatttttttttcttttttttttttagttgagtataagaaaatatttgatcataaggaaaaataataataataattatatatccaatgttttggccaatatggctttcaaaaaaaatgttttggccaataaatattgagaatcaattaattaatattcctttttttccctaaatatatatgtatttattattattattattnnnnnnnnnnnnnnnnnnnnnattattattattattataaaagaattgactcatatgaagctgaaaccaatgtctcataattgagagaatataattaatgtattcattgaggatgtataaatatataccaacaattttggtataattgacctaatcctataaataatcctataatatattatagggtaaatttatagggcacttcttttggagtgtttaagtagatcctatttattttgatattcatgatatattttggtatatataaagatatatatatatttttttgttcacgtacgttataattatttagaatcacttataattttttaaaaaattttaagttacaggacaaaaaataaagtttacatattttgttgtatgcgcgactgtttttcttatccatttggtaagtaattatttaaaccttatttttaatactgtaaattattcaaaattttctaaaaaaattacaaataatcttaaatagctataacgtatagaattataaaaaaaaatgaactaaaaaacttttctaaatatcaaaatagataaaaggtctactaaaatttcttatattatatatata

SEQ ID NO: 5165 - DNA, 1699 bp, Cannabis sativa
gagttgaattgtaataactaggggacctgagtgtgggaaccgtacatttgctgcatcttcaacaatgaagactattaatggttcttcaggcttcacacgcttgaggggctcttgtgcaaaggatgattcttaatttttaacttggtttatataccttttttttagcactattgctatttcttgcgagatgcgaccctctagaaataaccaggatgtcctcgccctcaactgagagaggttgtacaccttaggtttgatactggttattgagcaggttttgttcattctctctatttcttacatactgccttagatagcctagggaaatgagtcctttaatctcttcctttaattagtgacattctccaatggtatgtccaatgtctctatggaattgataatatttgtttggatcatgcttatttctttagtgcttcataggtttgggtctttgtaaagccacccgattctcgtttgcgggatagatattctcacgagactcatttagctctgtataaattgagtaaattggaacatacttctcgtgtttcttttgtttcttgttatcctttgatgggtcttttgattcatctttcctttttctattcaacccattctggctcgaattcctcacttttgttattacaatacttgcagttgcaatactcgagtcgcgtttacctcccaagcctaatttaagcatcttcatctcgttttatgcttcttctttatgcatgaacactaatgctttatcattgaattaattaattgttctgactgggcgaccttgcagatcatcccacaatttgcctcttgcggttgacaaattaatattccagcctgaagggatgttaactgaatgcattgtttaaatttcttacttttgttgctcctatactaaaataacttatataagcctttaaagacccttttggttgttgtttgatgttcgtcaacaaggatgcctctgaccttctctctctcgtgacctggaactgtttcctaaattcttcagataactactttcatgaggtaatggagtggttggtgaatttatcaaaccaattactcgctgccccagttagagatgttaggaataatatgcaacgcaagttgttggaaacattacttgctcgcattatagtgtcaaaattattcaactatgcaactgggttggttgttctgtcatattatgcgacatgtggattcttgaatccttaagggaattgggaattaagtatatcaggtgaaaaggttcttcctcctcatctgaatcataccctgacagtttcccatatttcccatcttggtattgcttgaatttattgtccaactaaattattctcagttgaattggatccatgtctggctatgctcaacttgttgttaacgagctgtgttttgatttagccaatcttaaagatctgggacattacggttcagatgctcgcgtgagttgggtcacctacgattttagtgttcatgaagatcagggtcgcatcgccctttatttctttggttgtaatttctaaccgaccttgttctagagtaactttcagactggtaactctgacagttactcatactctcttgttcatcttgatattggcaacgtgtatcttccccactccttgtttgcctttcacgtccatgggttctggttgatctactttgaccatgcgtccttgatctcaaccca

SEQ ID NO: 5166 - DNA, 1363 bp, Cannabis sativa
tgtgtcttcagaagcccacttcaagatcaatgggtgtgtcaagtttataaacaaccttattttaattgattccatgaaatggatatagacatatatataatgagaaacacactatactaattaagtactaacaaagaagaaaagaaatagtaattaaactctacgtacgtggtggtccaaactccaaattgtcttaattataataatattatatatttatatttatttataattatgtgtacatatacaattaatataataattgtaatctgcgtcgagtagcttctatttcccacttattatatagttgtggtactactttattaatttcattgagaaagatttagataaaaaggaatatcgatctacctgcacttattaatttgtataatgatcaaactaatgagtcagaaaatatacaagtactcacattgaaaatttagtttcctcactcacatatatatatatatatattatatatgtatatgcgattgtcttttcatgaagaatatgatgaatctttttcttttgaacatatatatataataatactatactacttgtgttctatgttgcatccactaggtagaatcatttttagtgttagagcaattagtttgtttacatatactctaaatatgtacatgtgagcatggagagcacaaggtccaggaaccaacacccaagttggtgaaataataactcaaactcaattattaaatatatataatggatatatatgttgatggtggtctggttgaactaagcataatggtgaattttggggtcatatatatattttgtcatgggtatttgaaacataatatagagaagattgggatagcaaattgtactacaaaccactcaactcagcaggtgttgctgagtagtggagataaacctttgttctatatttactactgtactctactgtgtgttgtggtggtgatactaattaatgcatttcaggaatatatatatatatatatggacgtgtactttgaatttattccagtctctctatagctccaccactagctaattattataaaaattctattttttttcttttgatctgatatttatataaatatatattattattatatatcatatatatgaaatccatatataaatcttgctcaggccaagcaaattggtttgtcgatcactctgctataatattaatttgattttaaaggatcggttggattatctcaggtgggtgtggtatgtaaaagtcaacaatgtcattagacagatttggacctttctttcttttcttgtcttcagtttgttctatactcttctgtctcaatttgagctcgaactctctctctagtatttattattattattatta

SEQ ID NO: 5167 - DNA, 1850 bp, Cannabis sativa
aattactataaactaataaactaacacaaaattatcatattgctagtatagactatagagcattgatactaaactctaattatagtgacatttcatgcaatatttatttacactaataatagtttaaaaaatctcaataggcatctcgagccacatggcatcacatgaatggtaaaagattactgctcgggatgcccatagcattgttctaacgatatagggtgttggacacctagggtgctttttaatattatttctctaaatataagtggggaaagatcagatgcatcaaaaccatctcaaaacacaaagataaaaccaagctagtaactgagatgtatcaaaatttggagtttacaaacattaataatatgggatataaagccatatcataacatcagaacactatttcagaaaactatgcaaaccaattcttagaaacagtgtcaaatgtctcctcagacatttttatgacaataaaagattttactctgtcagtgtagatttaagctctccattgtctttaagctccagaattatatcacaaccacctatcagttcacctttgtaatacagctgaggaaaagttggccagttcgagaagactttcagtccctgtctcacttcctcgtcgcttaaaatatcaaaagacccgaaaggcacaccatcctccttaagggcattaactactttggagctgaaaccgcatttgggagcatctggtgtacctttcatgaagagcattactggtgaagaagtaaccaatttctttaaccgatcttcaagactctctttctggatgatccctttctcggctaacactttcctgagttccccacttttctgcatctctaataagatgtctgatccaccaatcagttcacccttaacatatatttgaggataactggaccagtttgaataaaccttaagcccttgacggacttcttcatcggaaagaatgtcgaaagatccaaaatccaccttttcttgcttgaggatttcaactgccttatgactgaaaccgcatttgggttcatcaggttttccctttataaacaccataactgggcttgaattaactatacttttgagccgagaattaagggttgcactcaagccagtagattccgagatgccaccctttccagttccagcttctttaaccatttcggattcagttgactgaattccatggtctctaaaaacatcctttagttcaccactttcgtgcattgcgattacaatgtcacacccaccaagaagctcacctttgcaatagagctgaggaaaggttggccagttggagtacttctttaacccctcacgaacttcattgtctgacagaatatcaaagcttccaaaattaatcttctcttccttcaagatgtcaacaacttttcggctaaatccacacctaggctcctctggagttccttttatgaatatcataactgtgttagagtcaatcaactgctgcaaccgcttattcaaagcatcattagtgccagtttttccttggttgccaacatgggaagatccattatctttcgcaatatctttcacagcttcaagaacagtagatcctgcagccatcccaaggctggcaggagcagcaggttctccaggatgtatgaacccagcaactttagcaactttattggccaaactagatggatccgcaccctctagtgtatcaaaagttttaccatcctaacaaaacagaatatacaatgatattaaacaccctccccctcctctacaatgaagtaacacgcattacaagaactaatataggttatagctgaacaaaaaacaaagaattgcaaaacaacaaaacaataggttta

SEQ ID NO: 5168 - DNA, 878 bp, Cannabis sativa
taagtgtgcactttgccacttgctgaataaatggaagacttttggttagtccaatgttattattatataatgaaatactatagcagcacttctattaattactcacacgagtgacagactagatattctttctcacattttagtaacatggcttttttttttcgttattttcacattgatcaaatgcatttatttactattcacttaattataattttatataacatgcaaacagcataagtgccccatatttattatctggttgaaaaaaaacccgcatggcgatgcgttactatttactgaccacgatgacattatatatttatataatctatatgattggatgaagactcatgcatgcgtgtgggtatatatatatatgggcagaaagaacaaagaagtacgtagaagaaaaatgtaattaactcacccaatcatggcatgaaaccatgaaatgatcagcaccattgctggcattccaaaatggatacttattggcgacaacactaacgtagtcattcataagtctatagagtcgatctcgattgtagtcagatgggtaaataacagggctataaataaactttattatgttggcaacactaatgggcataaaaaatgtgtgtgcctcctctggatattttgccctgaaaggactctcctcactctctatttcttccatgaattgtccttcaaccgcatagatgttactcattggtcccatgtggaatattggtcgttccccttctctgtagctccacactttaaacctcttcaccatctctatatggctcctgaattttcccccacaaaaatatattacatatgttaaaactgaaaaacccaagtggaaatgttcaaaaacacatagcacttat

SEQ ID NO: 5169 - DNA, 966 bp, Cannabis sativa
gtgttatggcacttaggtacatcatcctccaatctatcgaagccaacgctctgtcaaagcggggctctttcaatctgcatcctccccccgcgatattggatttttgaaaccatgtgaattgaccaccattggaccccaaatcaattacttcagttcttgcaaccattcggcagagatcgaaggattatcgagtcatattcctccagttagaatagttgagattttcatgatctgcaagggtgtcattgaggtcaccaataagcacgtatggattcgtagtgttcagcaataaatcaccaattctattccaaaaagcctttttgccaaaaaaacttcgagggccgtaaacccacagtaaattccacagagtacctagcgggtcagattcaatgatcacatttattaaattcttgtcatcaggaccttacatttaacccccacttctctaatagagaccaaatccccctgccattccaataggaggaatgtaagttccttcaatgaaatgcaacttcaggcaaattctatgaaatttctcctcggccaatcttgtttcaaacagaataatcacatcgggatttgattgacggatcagcgccttcagctgtcgaactaccacagaattcccgagtccgcgacaattccaagctaagatcttcattaggtatttggagacttttttgggcaagtctccatagccccaaagcaaaaataatgcttggtagtctccattcgatcattggtaatgccattattcatctgtaggtgttgattttcattctccgagatctcctcaatcacacacttacttggtgcatttgtatttttctcaataaccacaaagtgattttgaagatcaattgctagctccactgaagcagtattccagatgttacagtagtgtttaccaacctttttcgattttctattgcttccttcccttttcatgttgggaattattttacc

SEQ ID NO: 5170 - DNA, 1812 bp, Cannabis sativa
tggttctcatgatcaagtgactgcggccaatgacccacctgttgcaccccaggttactatagctccccacatatctcccactaccaatcctattctcaataacactcttgatcaatccttgagtcccactgaaaacaaccataatacacaaccttgtgctactgctactaccccctcatgcacacattctatgaccacaagatctcaaaatgggattgtcaaacctaaatcatatcttgccacaaagcaccccttacccgaatcactacttcccagtgagcctaaatcactaaaagctgccttaagagatccaaaatggttagcctccatgaactctaaaatcggttccctcaaaaaagcttgtacatggcacttagttccatttcgagaaggtatgcatgtgattgggaacaagtgggtacaccgtgtgaaacttaatgtggatggctcattagatagatacaaatcacggttggttgctaagggatatctccaaacaccaagaatcgattttgaagaaacattcaacccagttgtgaaacctgccacggttcaggttgttctctctatagcagtctcaaataattggcctgtgcagcagctcgatgtcagtaatgctttcctaaatggtgagttagaagaaacagtttatatgtcccaaccacaaggttttgaagatgaacggtatccaactcatttgtgtaaacttgacaaggccatttacggtcttaagcgagcaccccgtgcttggaatgacaagctcaaacatactctattacagtggggatttcatagcagtcggtctaacacttctctattcatacatgggcaaggctctaatcttgttattttgcttgtctacgttgatgatatactcatcacaggccccaactcatcattaatctctacaatcatcactggcttgaacaaagagttttctttgaaggatctaggcccggttcattatttcttgggtgttgaaattttcagagatagttcagggatgtttctctctcaatcgaagtacataactgatttgcttgtcaagctacacatggaaggagccaaagccagtccaaatccctcaagtgcagctgccaagttagctttaaatgatggggaaccactcgaggacatcactctttatcgtagcaccatgggtgctcttcaatatttgtccctgactaggcctgatgtcgcatacataatcaataaactcagtcaattcttgcatgctcctacttctacacactgggaagcctgcaaacgggtgcttagatatctcaaagggacattatctcatggacttcacattaaaccaagttcctttctctctctcacttcctactctgatgcagattgggcaagctgcatcgatgataggcattcgacagggggttacttagtctttctcggtgacaatctggtgagttggtcagccaaaaagcaacatgcacttgcacggtctagtacagaaagcgagttcagggcactcgcaaatgctgcagcagagatttagtggctcaaatctcttgtgtctgaactgtatgttactatgcctcactgtcctatcatttaggttgacaatcaaagtgccactgctctagcaaccaaccccgtatttcatgctcgatcaaagcacatcgagatcgatcttcactttgttcgagatcaaattctggccaaggaactctcggttcgatatgtcccagctagagaccaagttgttgatgcgttgacaaaagctttaactactgatcggtttctgtatttgaggtccaaactacaaatgggaattaccccatttcgttt

SEQ ID NO: 5171 - DNA, 1091 bp, Cannabis sativa
agtaaatacttccattctgttgcaagttcaaggaagaggaataatagtatcagtcagcttatggacaataacggtgtttgggttgactgggagacgggtcttcaaaatgttattacaggctattttcatgacttgttccaaacctctagtatcaatttgggttcaatattgaatggaattcgtccctccatatcttgtgatctgaataatgagcttttggtgcctgtttcggaggatgaagttaggagtgcactcttccaaatgcatccggataagtctcctgggccctacggtatgacttcggccttttagcataagcattggagtattgtcggggctgatgtagttcaatttgttcgggatttctttgactcgggtatgtttctggattcaataaacgatactcatattatcttaattcccaagaagaaaaatcctacccaaatgagtgatatgaggccgatctctctttgcaatgtgctttataaaatcgctcaaaggtggtggcaaatagaatgaaaggtgtcttgaaccagactatctctgaaactcagagtgcgtttgtgtccggtagactaatatcggataatgttatggtggctttcgaagcgatgcatattgaagcggaagaccaatggaaaaaagattatatggcgctcaagcttgatatgagtaaagcttacgatcgtgttgagtggggcttcttagaatctatccttcgagtgatgggtttcagtgatcggtggatcggtttaactctaagttgtgtgaattctgttcgctaccatattatcaacaatggtcagaagctggggccaattattcttactagaggcatccgccaaggctatccgttatcaccatatttattcattgtttgtgcgaaaggtttcttatccttgattagacattatgaggctacaagactcataacgggttgtaaagttgctaggagtgcacctactatctcccacttactcttcgcagatgatagctatgtctactgtcaagctttggaagaagaagctagccatgttcttctactcctctagacttttgaaggcgcttcgagtcaaaaagtcaatctccac

SEQ ID NO: 5172 - DNA, 505 bp, Cannabis sativa
tatatgcatgcacacaatttttcttacttatacggcaccaatgtgtaacattaaaaatcatgaaaaagaaatgagagtgatcttgttttagctagaagagtctaaattgttgaacatgtcaactttaaattacaatgattaattaataatataagaggaggtagactaagattgctcatcagaaaaatcaaatgattaattaattgtaattgttataaacttcttattcagtactaagaaggaagtagaagatagaatttggatgcacgataattattgatatataataattagcattttagatgaagaaaaaaggaatatataatttatagaataaagaaagaattagctagccaggagaatattataacttttacttaatcattatcattattttcttatttatatacactcataattaagattataaagtagctttttccactttccagattattattaattaggttttgatataaatccacagccattccaactcgatttt

SEQ ID NO: 5173 - DNA, 2935 bp, Cannabis sativa
  modified_base (1918)..(1931): a, c, t, g, unknown or other
tgaagagaaagatttttcgatctttcactaagaaagggatcgtcacaacaactaaatttgcccgaattttcaaaaactaaatttaaataagagtttgagtctagctaaacaaataaaaacaacaatttttatgtatctaattgaatttaaaaactcttcaaatattatttgggtaaatactattttagacattgtattttacaaaagttactgatgacactatttattttattaaatgtcaaatcaaatcttatatatatattttttttaaaataatacaaaataatactttgagagtctgagctcaatttttgtcaatttttttttatttttaatacaagcacgaacaaatccagaaaaagtaacaactttggtcataatacttacaggttaaattattattaagttttattttgacgaaaattgaactcagatactaatttatactatttcgaaaaacatagcgtctgaattatcatttaataaaacaaatagtacaattagtaattttgtaacgtagagggttcaaaatagtatttatcatcattctcttaattttttattttccaactagtcacaaaatcaattttttaaaatccaaaaacattaaataatactacaactaattttttagagacaatattgttagatttttattaggacttatattaacttttattgatttgactaaaacttgatttgatttaatagttctttgttgtattagcttatattgttggtaatcaatagttaatgagcttaacttttatgtgtgtaaagtctaggtgaagtaaaagtgtatgctttctagttaactgaagtctttgatgagcagatccagtccaactacggtgatgtagctaagtcccctcactaactctataaatacatattgtctcaacacaattgtatacttttgataatcagataaaattaaaattgcttctaatttagaaatctagagaggaagacttagctgatagtattgcactattaaattgacataattattatggatcaatcaggtacataaatctaagtatctatatatatatataaaggaatgcacaacgtggcattctaataatcgatttctcaatattttcttttttgctattttttttgtattttttaattatctttgttaattttgactcaataatagagaattttttaggataagcaaaaatctcacatagtttaaaaactattaaaaattaaaaatgttgtatcataggctacataaaaggtgtttagtaatttttataaatgttgtataatgggtgattaatagtattaatctaacccacatagtcattttttttaataaaaatatacattattttattttctatcgtagtcaaattttaaaattttaaaaataataaaaattctttaaaaatctaacaaataaaaagaatattattttttttttcaaaattatagttttttttaaattacatttttttttattgttgacaaatctatatatttatatatatatactaggttattgttacgttcatttcacgtatacctagttatagttttagtttttatttttgttatgtatatttttaaaattttataaattaaagcaaaccacttattaatttactataataattatattaatattgtatattgaacaatatttgttaatatttatattgaacatactcccaatattaaaataacaataaaaattaataatgatataaataacatattagtatttatttatatttaaattaatttaaaattgatataagttcaattatcctatttttttttttcaaaatttaagttttttttaaattatatgtttttattgttgataaatctatatatttatatatactaggttattgttacgttcattgcacgtatacttagttatagttttagtttttatttnnnnnnnnnnnnnntttaaaattttataaattaaaataaaccacttattaatttactaaaataattatattaatattgtatattgaacaatatttgttaaaattgtatattgaacatactctcaatattaaaataacaataaaaaataataatgttataaataacatattaatatttatttatatttaaattaatttaaaattagtataagttcaattatcctaaaacaaataatattaatatttatatatatttaaattaatctataaaaaataatattaatatttatatatatatttataaaactaaccttactaacatcgttaaatttaacggaatatttttatattcataaaatattctgttaaacaaaaaaaaaattgttagataagcacatttaatatataaaatataaagaaatgtacaagacaatgtgatgtgatattttaacaatctattcctatatttttttttttacattttttaattaataattttgttaattttgactcaatattagagtgttctttaggaggaaaaaattcaacatggtttagaaactattaaggatggtgtattataggttatataagggtgtttagttatctttgtaaaagttgtgaaatgggtgattaatagtatcaatctagcccacttactcattttttttaaataaagtacatactatttattttctatcttggtaaaaatttaaaattttattttaacaaataaaattattttattaattttttttaatttaaggttttttaatgttgccaatttagttaaaacataaacattaaaaaataaaattctttaaagaaaattatttgagatttttataaaattggcaaattatgatatgataatttttcttttttatataaaatttgaagttcacacaaaataacgaaattaaaaatataattataagaagtatgagaagtcaattcatcacttcaaaattaacaaagtataaaaaactactttgaatatatatatagatatatagata

SEQ ID NO: 5174 - DNA, 1309 bp, Cannabis sativa
atgaggtacccgttttaattcagagctttagcaaataacaaatagcaaattcaaaagcttaatccactggtgtcttctcctaccaaacattccagctgaaatttactgtttttttaggcaaaagttgaattttggtgaaaaaagaaaaagatggaaaaatgtaagaaagaaaaaaagtagaaatttcttattaaaaaaattgcataaaaaatactctgttctacaaaatttctatatcaaatttaaaaatatatattttttttttttgttctctacacttttttcttacactttttttttttcctgtttacttttttttcgctaaaatttaactttcaaatatagccttacagtacagaacattgtagagcactcattatttattaacaaaatatctatttaatatttgcagttatacgctatatctttcgtttgtatgttttttttttaaataattaggaaataactcgcggttcgcgtgcagtatgagaagattttatttaactttttgcaagagtgacaaaacttgtcattgtattatgtttatgttatatttatttgacatacatctatattttgtattaggatttcaagattcaatttatcacaaaaagtagtaaaattctaaagttatataaatgatataaaattctaaatgagttcaccaaaattaatcatgagatattaaagggagtcaatcacctcacaaaatttcaaaatggtcattaatttcatgaaaatctcaaaatgatatttttacctaaaaaatttaaaagtgcactaaaattcaaagtcataataaattaaaatccaaaaagagatcattcatctcttaatcaccaaagcatcacaacatatgatctaagttcgatttgttcccatttgagatacgtaagcaactaaattactaaaattaggtaaaatcacaaattctcaaaatctcaaacgaagtcattcacctcatcaaatcccaaatgaggtcattcacttcaaaaatctcaagtgaggtcatctacttcaaaatattaaagtgagttaattctccacaaaatttttgaacgtttggaactacgtttaacttgattccaataaaagaatacgtatgcaccttagttgctaagactaagtgcagtcaccgataccgcaaaaaaatataaaatacaagtctcaaaattccataaaatttcatacacctagaaatttttctaaacttttaaataacaaaaaattcttgaaagtggtcatatacaggaatctttatattcaaattttaaaatgccttatcccgaactacaagtggcttgatcct

SEQ ID NO: 5175 - DNA, 2195 bp, Cannabis sativa
cattattaacatcaagttgatgcaaatctccatgcaaattttcattcattatattaatgtctttataaataaatataaataattatttatttatttattttctaaaataatttttttattaatctctttattatatatataaggaaatatatttcaattcattcaattttttttcttaaattagagtcaattacttcattatcttttcttgaaatgtcaaatcactaattaaataattaaatgtaacaacacttaacaaaataggtaaatttctacacatgtattatatttaggtgtatttttaacaagtcgcatattatagtaaatattatttggtagtttcataagttgagacttaagagacaaaaatactaattatttttattttattagtactttctttttatcaattcctttagtttgtttttcttttacaattagggatgcacatttctcctacggggatggtcccgcggggacccgcccctaatggaccgagaatttcccgtctaaatgaggaacgaggcggtgacggtgattattttttgtccccgaatgttaaacgggatgaggacggggatcacactctccgcctcgataggaatccgtttattattttatcttatatttttagtaatattttataatttataatttatgtttgcattttttagtatatttgtattttttttctataatttttaagttgtgttttagataataattagtttattgaataataagtaatgtgtaatattttaatttttatgtagtttaatatttttgtattttaaaaattttatggagacgggagaagcactccccgctaattttctgccccgtgtgcatccctatttacaatacacatgtatagaatatacataaatatattttaaacatgtgcatttcacaatttaaatatttttctttaaaatttgaattaaatatattctttttgttgaaatgaattgactaatttaatttgttaagtaaaacattacaaaaattaatcaaaactaatataaaaatactaaattaaatatctatttaaaactaattaaaataaaaaaaaatctaaaagaaaattgagaacaaaaaaaaaaaagatataaacaattctatggatcagtaaattacatcttacatacatatatatacttatttataattattaatcaaatcaaagattttgaattgtctttttcttttatatattcaccaacttttgtcttacatatcatatgttcgtgtaaattttgcttattatattttcatttggacactctatacagcttgtaggttgtatagtgagatttattaactccctttatctatatagatttttttaaccattcacaatatctattaacatcttcaatatttggtccaaaaccataatttttaggctcctcaacatcttcttcttcaagaattttcagtatatcacgatcaaaatactctgataatggcttatttttatgattggagttgaagctaaaatctaaatttggatgagtcggtgaacgtggtcgcatgtttgagtcttctgttggaagcttgtaagtcattgaactctgcatcctctctagtgtagaagtagtagaatgagaacttgatttgcccaagagtagacttgtgtcgttgtcttgtaatcgcttcactccggctttatatttctaaaaagaaaaggataaaagatcttagatgaaaagatcatagaggagtaacaatacatcatctaagagcatttccaaaagttaaaaaataagtgagaaaattacattatatatctcttttaatttgatatttttaatttttactctctattaaaatctattacggttacccttttttttaatcattctaccaattttacttttattacttcacaataattttcattattctctaattagaattttgttccaaatttcccacaaatctacattttcatcaaagaatacaaatttattatgtttgaaattacgtcttaattatgtgagtatgtgaggataatttgggtaatactcataaaaaaaatatatttgagttaaattttatttagagataaatttaatcaatctataaaaaaaaagtattcttcaacttctctcggcgaaccaaagtacaaagatgaaacaactaacaactgtactagccaatttttacacagtcaaattcttgtactttaagca

SEQ ID NO: 5176 - DNA, 1087 bp, Cannabis sativa
gataatataaggtgtgatcatatcggtataatattaagcactccaaataataacaacgccctaaataaaatattatagtttctttgacttgaaagtaaataggtaacctgaaataattgccacaattactcaatcttttttaaaaaaaaaattaaacacgttactatatatatataacatatatctgtcttatttttgaagtcaaccaaactataaactatggagctatatatatataatatatatatatacacaatacatacatatatacatatttatataagttgatacgatctgtctctgatcaggagctatatagatcgtgtatcgtatgtctgaatacgatccatgtacgaaggaatatgccatgaagtttttcaacgcgtatatatatatacatatttatatatatattgtgttgattatattttagtgaatataataaagtgatgagataattaatttttgtgatttgacattgcagttttcttcgaagatgccaagcatgatatagccaaagatgacgccgtcaacaatggtggtagctagggtttattatatatacacacatatatattaatatattataaaaagaaagaaagaaaggaccgtacacgtaccctatgaagaagaatatctgctttcctttatatatacgaatataatctcacaaagcaacatcttgttataacacaaagcaataatattattagctcaacttttatactaaactattttcttcaatctctaattagaagaagaagcagaaatggagaaaaagactattgattacatgttagttccattagggctttttgctatggtgacttaccatgcttggcttctctatcgagttatataccaccctaccaagacgattatcggtgtcaacgccatccatcgccattcttggactcgtgctatgatggaggtaagaaagtagggcaaaaacatatgacactctttaatgacagttttaaactgtcgttaaagatttcgtgtctatatatgttagtcgttaaagtctaattattaaactgttgttttgtttgtagaatttacacaataatggagttgtgtctgttca

SEQ ID NO: 5177 - DNA, 1711 bp, Cannabis sativa
actctcctcaattaaaagtcatattattttggtaactatattattacacactcaaattaacaattaattttaaatcattctaccctatacgtactgtataatataattacacagtgatattaatttgtattgttaattaatatttgttagattatttggagataataaatcatgatcttgttgaaattgttgttttctttctttttactgtatatatcatagcaatttttttttcttttctaatatttttgcaatcaatttatattgtttttttttttaataaagactactaactaaaaaaaataaaaatacattaaaaatacatgtcaaatacatgtcaaaaacatgtcaaaaaaaaaataaataaataaaaataaagaatatatagaaagtttgtcactttgttgtgaagattttgagacaaataatttgccatagtaaatacattattttaattgataaatctattatgtatatctgttataattaacacttctaaaatatatttattaatttgagtacaacattaccgtgaatttatatttttttttaatgtaaaatatttatatattcgtttcttatgatgtattatcgtgttaatgtaattttctttaatttttgtatctctttgataaaatatgattgataattgatttgaaattaaaaaaaaaaaattcatagaccaaaaatttaaatttttttacagatatacattaacatagataaatttttatttttatgaatttttttatttataaaaaatacagacttcaataaactatttaataattttttatttaattttatagtttatttatagttgttaattttttcattattttttagtgtatattgttaatagatagttgttgtgatgttaatttcttgttatttactttttactaagaaaattatatttttataattttgaaagtttgaaattatatttttataaataaagattttacgttgtaaaattataaataaaataatataaaacaaaatattttttccttagaaaaccccttaaaattaattgtaaatttgactaacaaattctagttttacattaagttcaaatctcctcctccaatattaaaaaaaaaaagaatgtaattattttaaatagaatattttatttaccaaaattataggacttttaatgcagatataatacaatttttttaagtaacttcttatcgggtagtattaattagagagggtattaatattaactaagaagagataagaatatcattgttaatattatgttatgtatatagataatttatctaaaataaatggggacagcttattttttctacattatacctacactacacctcttctttatttatattgttttttcatctgaagacaatcatttaatgacccatttatattattattattaccataaattgctttagttttttttttttccttgaaggattttttggttgatatttatgtaatttttataacttcaaatgattttatccaccaccacttcatacttgggtacatgatcagatgctcttattgccatcataactttataattgaaaattttgagcaaaaataaaaaatttagaattgaaaaagaatgaaaagtggttgaatttgttcaagtcacaccacgacttgacgtgagaagagttagctgaaacaataaaatacagtccaagtcacacctctgaaaccttagcca

SEQ ID NO: 5178 - DNA, 780 bp, Cannabis sativa
gacttggctttggcccctgaaaatatattaagatttaattatttattattagtctccactatgcaaacaattattacaaacaaacaaataaataaaaagaaagtcttttaaaaaatgggccaaactacaatatgtataatattaatgccgtacctctgttatttgagttcacgactgtggatttagaagaagtggtcaaaactcccattggcacacctttatctttattccattgtaatcgtataatgaaagctatacgttgaaaaaataaaccaagaagaataaatggagaggatggataatgattcaattcacaatacggctatggaaactataaactacatatatttccctccttgattatgctaacgaatgtttaaaaggagagaaagaagaagtcatttctgttcttcaatggaaaaattgggattaacagtacagaatgaagctacagaaatgaatgagtgaacgaatgaaaaagacagatgatactgctatttcagaacactcacgtgaaggtggataacctctggctgattcgaaccagcgttcggcttctcgggcctcccaatctgtctcggttcgatcgaaatcgaagaaacgagccgcatcaaactcgtaattcatatcagtttcttcatacaagaaagtttctctgacgaactcctccaattcttcatcttcttcttcttcaacttctgtatccatggctgtaaatcgaaactggcctattttgtttttttacgctataaccaaacagaggaagaccgtaaagtatta

SEQ ID NO: 5179 - DNA, 730 bp, Cannabis sativa
gggttgatttttctttaattttttttattactatttttaattgatgatgggcaccaagagtgaggttcatagtaaaaaagttgaattaggtgatttttaactgagaataatgaacttttacacctaataatatgcatagtatgcttacacttcattttttgttggaaaaatgcattttggtaatttaaaattatatttttgaaaaattaaatttgtataattataaaagaaaaaaaaaagtaaaaatcgtataggtgtaaatgtaaataaaatataagaaaactaatttatgaaaaaactccaaaatttttacctaatacacttaaaatgtgaagaatttaagccactaagggtggaaaaaagggagagagtgggtttgaaccttagactctaatttattagttgatatgtaatgttattacgctacactaaaaaaataatattaagaattttttttaagaaaaaacataacacagaaaaatatattatttttattacggtttgaacttttttttttttacaaaaatatgatcgttagaaggataaattgttcgatatttttttgagttattttgtagtttatttatagttgtcataatgttgatttctagttgtcacgaggttgatttttagttatttcttatagttgttttttcacacttttttttgttttttaaaaaatgagaattcgtatatttgtaattataactttaaaattatatttttgaaa

SEQ ID NO: 5180 - DNA, 1071 bp, Cannabis sativa
atttatttgacttaaattttcaagttatatatatcattagtagctagatcataacccgtgaatttgtaagctataaggtatatttaatatttgattaaaataattaagtttcattttcaaagcacatcaagtcaaactacgtacctatagtttaggatgtagttaattttccacaactatgtttagtatatctattttacaccaactcaatagattgattaaaagacaaggacgtcaaaactgacaatcagtaattaaaaccttaaaagatggacaaaaagtttttttacctgttaaattattggacttgtagacttgaattattttgtttggcaaaaatatcactcaactatagcacttgtagacttttgtctcttccatttacaaaattatgtaacgtttggttagaggtaatgaaatagaatagaataaaaagaaaataactttcattctatttccttgtctaattacgttttaaagtgttagaatatcattccaatagaatttaatttctattattttagtaggatgactattctattttgaaagatcatttcaatgtaacataaaaaaattaggggctcgattggtatatcgtgatgtattgtatgtaaaactataaattcttaacaataaacttgatctcaatccccaccatggcttggactcggacccagaccctggacccgacatgcccagataccagctttaagagaggcacaaaattaagttattatttaggaaaattatcacaaaatacttaaaattatactgtttttacgttttttttaatatatttttatgagctgttattttttctttagagaaaataacattgtgttcatgataccataattaaggtatagttacataaggcactatttttttaagaaaaattacacttttacgttttaagatttatttttttatatttttagattttctataaaaataatacgaaaataacaaaagaaaatacataaaagtaatatttatatgaaattaaaataacaacagaaaataagatagaaataacaaaaaataaacaaaaagttaacaagagtacaacat

SEQ ID NO: 5181 - DNA, 2729 bp, Cannabis sativa
  modified_base (1396)..(1403): a, c, t, g, unknown or other
gtaaaatttcctttaaaatagactttatccaaacctcaacaacaaaattttaattttcctattaatgaagaaaaatcaaatttctttaaccagtaaaatttcttctccaaaacttatcactttgtttattttatcaaatcatgataaacattactttatatctcttaattccagcgtctcgagttaattaaggtaatttttttatttaataacggtaaattttgtctaagttagaatttatattaaattctatttttaagaagatatatcttttatactatgatatacctcttattgtttattcatttccaataatttaattattgttaggaagataatttaacgatctatattttcgaaaaaataagcaaagtaacataatataattagagtataattatgaagccaaaaaagattagagacaactatagttcttgatttctttatataaatataattatatgaaaacctaacctaactaacaatgtgggagaagaacctttttttctagacacaatgcacttagcactagttttcactcttttaactttttatggcaccaaagtatagacttttaactttttctaattaggttaagttaattaatcataataattataataaattaaacatataattaatcttagccgtaaaattaaagcttggtaaaagacaacaccaaaaagtttataaagaaagtaaaacaagtagtaataatattaattaataattaagaaatattaatcaaagtttgtgtgggccctcttctacgaatattcccatgcaaaaagagcttctcttaagctttaataatcatcattagtacttacttaccactactacactactaacttaattagtaggtgaaagtcaattaattattttgttaattacttacacctctagctgtttaaaattataataataataataatagtaataagatttatcttgtattttatttggagcattaatataaagtattagtagtttagttttaagaattttaaactattaacttaattagtaggtgaaagtcaattaattatttgttaattactttaatgtataaacaactctctaatttgtttagagttgtaatttctagattatataattttacggcctataacgtggttcaattggcacttgcctgtaatataattggtatggttgacttctcatctataccagataatattttatgtaataaccgtgaggtctaatttttttgttgtttaatatatttacgccgttttttttttcaaaaaaaaaaaactataattaaacgttgtaattattatataatatgatataaatcttttaaaaagtgaagaacttttttttttttaaaagagaaaaatcaccacaacaaaaaattttacttttagtcacnnnnnnnnttgtgactaaaaataaaaaaattgtgactaattataaattattgttattgtgttgtgactaaaaagtctgtgactaaaagtattagtgacaatttgtaactaaatacgatgttttagttacaagtaactttttgttatgactaaaagtcacatttaatcacaaaaaattatgttgtgactaacaggttatcattaaaagtagcagtttttttgtagtgcataatagaaattacgaattcaatattattttgaattaatttttatatacaacttaattaatatattaatttgaatacaattttgtgtaaataattgaattaaaaagaacatatataacacaaggatactaaagaaataataataagtatattaataattaatgcatattacataaaccttttctctaagtcaatattattattaatattgtacaaaaataatattacaccattgtaccccgacaatgtgagcagtacacatttgaaatttaagtaattatatatataaataaataattaattaattatacatatttatatatatgaatatttatagctgtttacaacgaaatctcatatgcatatattttttatttttcaaactcaaaatcttcacgaaatattattcaacaaaaaaccaaaattgacattaaattcaaagtgagaacgcgttacaataatattacttgttcaaaaatataatctatatttttatatatgtaaattaattaattaattaattatataaaaattcatattgatctgcaacttgtcacataagatttttttttattttaattttcaatttctaccgacaatcgatgaaataataattcacacaaaaaataaactttgagatcataaaaaaaatattaaatctctgacaaaatttaactgctcctcaataataaataaataaataaaaattattgaaatattttaaataaataaaaacaaagacttattattattattattatttattatctttaatcattaatctcaactctgcaaataaatgattccttccaaactttgattggaagacacttcgtttgttttcttacaaacaaaaaaaaaaacttagaaaataatttgttattaaataataattttttatttattcaaagaatctaaaaaaattaaaattagttagctatggcagagacataataatatattaatgaataaataaaaagagtcagatatacatatataaaaataaagattaattaattaaacaagaagaaaacaaagtaattaacctcgtaaactgtgtcattacccaataatatattgacacgtgtaaaaatgaataattaagcta

SEQ ID NO: 5182 - DNA, 826 bp, Cannabis sativa
ttttgccatttaacaggaatagagcccttatgggatcaagttgtgggccactttcttgaggtattttcttctatttttcttgtacttctaggtccatctgcattctccttgacatccttctgtgatttacagcttgcagataaacctaaccagaatttacgaaacatggcactagatgcattagatcaatctatatgtgcggttttaggttcagatcacttccaggatctgtcaaccagacccaaagggatatcacagaatgtgagaactctgtcttcctaataatttgtagctgtttaactagtgaaataagaattgacatttcttatcattgatatattctctctctagatggaaaccaatcaaaccacgcttagagaaatgaaatcacttgaatgtgctgtcatttctccgttgagagttctatatttctctactgagagtgtggatgcacgtgccgggtctttaaagattcttttgcatgttttagaggtaaacttatattactaactttttaaagttgcttttcattactcatataaatgtaacgtattatttttgaaataaataaattgcagaggcatggagaaaaactacactacagttggccaaatattcttgagatgttgaggtttatcttattttagcttcagtgctcaatttttctttttcctttttttttttgttggggaacgtacaataatatggtaaacttagtttctttaaatattatatatacatatcaccaaaatgtggttttgtttttcatctttatggttttctttttctttccatattatggtaatgttaattttttttttttttt

SEQ ID NO: 5183 - DNA, 511 bp, Cannabis sativa
tggggacatctttgatttctaattcccattttggtgtcataacgactcacacttagactatttaagaaaacacttagaaatgatcatgtcaaggtccacttgttcttctaggcattggggcctatgcccagattaccttatgaggaggtgatgctatttgctttgggtttctgagactagggttattttttttgtgccactggttaaaaaagttgttcacatcatcaaaccaaatttctttaggtacaaatactaaaaaaacatatcatattcaattgttagttttaagggcgtctaattacctattaacaaaactaaactaataacacataccaccaaaatgaaatattttatagcttctttattcaaatttactaaacatatctttaattgatattcacaatatgcattccacattcaagacttatttgaattgcagcgataatgcctaagttagtatacttaaagacctaagaattacaaatacaaaaatataagtatactaattaac

SEQ ID NO: 5184 - DNA, 1049 bp, Cannabis sativa
ccgaaatcccatatcaagcaaatggtcagcttcatcaagaacaagcactttcacacccatcattcgagttgcaaaacctgcggtattctccatatgatctctgagcctcccaggtgtagcaacaagaatctgcaaataaaaaatatgtaatgtgcgccattaaatctgcttgaaacaaacattgccattattgttttagtagcttcacagatattaaaaattcaacccaaacacactgatccattgttaagttaataagttaacaaccaattcacaatttgaggtgaaagtaagaaatgaaacagctggaacgtgactttgcaaaccaaaagtttggtagcagcccacaatgcattactcacaccctttgatgtttcatagtgataaaaaaaaacataaactttgaactattgttttgctgtgaagataggacaaacctgacaagggtttgcttgcatgcgcttctgttccagagcaagtcttgtacctcctattacgacttgtacaccaatagaaggatgatacttcaacaatgtattggcttctgcagcagcttgacatgccagctctctggtggggcatattacaagcacaaaaattggggggatcttttggtcacggccaataggagttgactttacaacaacttcaattgatggaagctgagagagtaagcagagaaggaagaaaataagatacttcatgattagtagactgataacttggatatacaaaaaaataaatagagaaagcaaaatccagataaacctaaaggacattttctgattttcacataattgatatgtacaaataagagagagtatgagagccaaggaattaaaagacacacttttcatgttttaagtttcttctaaatttttcattgactttttttttttaattttttttaaaactacatgatatagaaagtttaggattgattcaagatgccaaagactcaaagatggaaattgttgtggagcaagttctactattaaactctatcaaaacaagccaactttaactcactgagttttgcatatgaagca

SEQ ID NO: 5185 - DNA, 577 bp, Cannabis sativa
aatgtttctactaatcaatacatatgcatttagactaattaaatatgcactttttgatgcaaaattactttaaagttttataatcaaaccatatctttctcaataaaaaaatatagtcaaattaatcattcaattttcttgagatatagttaattgaaagtgagatttcatcagttttaatattgaaaaacttctttattcatatacaggaacaataattagaatcgggtaagcaattcaagtatttggctaattgtgcttttctataattcaacacattaacaatcttttttcttttagcaacaacttatgtcacaacatgataaattatgatataaatcatacttgttaagacttgaaatcttgtcatgcttcattaaattgggtatgatttacacacaaaaatttcaaataattttacctttagactttgagttttgattcctttataatgaacatgtcaaaactaatgcaatctaatttaagaaaatatattatgttattaattatatgcactccaaaatttatagattaattctaaagttttaatattcattacgagataataaatatttaa

SEQ ID NO: 5186 - DNA, 565 bp, Cannabis sativa
tgtaccataaagacatgaagcatcgaattccaggcattaggagctaaaaacacgcaaaatataacctcagaattcaacctgggcgaatagggtttcacccagcgcctaggttggcaacctaactaaggtttcaatttctgagaccatcttaaatgggtcaaactttgcattcggtcatgaactaaacataccacgaaatatttgaggcattagaatatgatttgtagaactttcatttttgagcacccgaaacaccttgtgcctgggcccttagcgcccaggtttacaattttccaacctgggcaactttcaagcatcaaacctgacatccgacgcatgaatcttcttcgtcttcctcaaaaaaggggaaacaaatgttttcaaggaagaaacagaccaacttggggggtcaaaataagggacaatgcgaatgttaacctgggccaatttcgaggagttttttcaaaaattcttccagacatattctcctttttaatcaaagattaatattcaaatatttctagggaacaaacagaacttccaagatgcctgaaactggacccag

SEQ ID NO: 5187 - DNA, 553 bp, Cannabis sativa
ttaatctgttgagggatttggcttgaagatcctcttgcaacactgttttgcaaaataacctccctctttccttttccctttttctaatacgatgggtgaaaaacatagaatattcttattgagcttttactggacccagtcagtatgaaaaaattattattgactcaagtccagttgacctcgaccgttcttttcccattgcaaattttcacctttgagaaatcacaattctgagcttcaaatcaatattaaggtgcttctgttttgatttaaccttctaaatttgaaagcccactgctgaacaacattttaacttgctaaagttaaaatatttgttttttattattttttttttggtcaagaagttaaaatatttgtttgattaaagatttgagatttttagtaaattaaattatagggaagataaaagtttcattaaagagcatgtcacaatgcaaaataacagctgtaaaatgctgtggaaataaagaattatcttttaaggttaaatattaaaggaccccctatatgttgggcttaacgtatcataaag

SEQ ID NO: 5188 - DNA, 1803 bp, Cannabis sativa
aaaaaaaaagttacctcttcatcgggtgtatcatcatgctgctcggtggtgttatgattcccctcgtctttggtccgatcaggcagttgaatactgtgatttttctcagaatcagccggcctccacatttgctttcgctggccgtgctttgcctaaggcataaaaacaacaacacaaggttcagttccgcttattactgagactgaagttgaggaataagtaagggaacaataccgcttgcttcagaagcttgaccctcataccgcttctccaattctgttcattgttcagagtagccacctgatataattttcaacagaaagtgagttgtcctccatttcaattactcaacttttagcaacaaaatcaaatgcaaattcagataaggactcacagctttctcggcagcctccacagtctcgtactccacgagtgcataaagctacaatagaataaaacagtaaaacatttaaaattcagtctcaagttttcacagcagcctctattacagcttagaaccttaatcctacaatagcttccatgctcatatcttgtgtccacaaccattattaaacaccatacattagttataacaacagagcatttatatccctcgaatacaacattcaatgtgtgattcgtcaaatgtcataaagtgagcttaatgaaatcaatgaagtaggaattgtataattatccaagtggaagaaccaaatcatttcacaggttacagacagaaagaaagactagatagaaaaccgacggcacttataattacgttagtttggcttcctaccttattactgataaacttctcggctctgtctcctttagatgaagcttctattgcatgtggatcacgtaaacaaatattctttatcctgaaagatagaattagaaaaggcaatatacgatcttaatacacgattagaagaaagcgccagtaaagtaacaataagagaagtgaaaagggagcatactttccagcctctccaaatatttgctgtatgttctccactgaatgatcctcgggtagattctctaccaaaacagtatataactagggtgcacaaattagatgaagacaaactttagaagaattaatacaaacacaatcaatatcaagtaccccacaagttacctttgaatctttggtttcagcaagtagaaaaggatgaagtcgcttcaccttctttccatctgaattgacaacctacatgaacgacgtacgaaaattactactacttgaagcgacttcataagtactaaacacttgaaagagaaaataagaagatttacaagagaggttgattccctcaatgcagtcgctattaatgcatagtctctgataagctttttcattttcctaaaggaagcaataattgctataggaactgcagaaaagattacgccagaagtttataaataggatatcatacagcttaatcaaatgtatatcacacttcacaatacaatacgtaattcacatatgaagactatctcatagacaattgggatcagagacggtgccagctaaggctttattgttcttgaactcttacacttctttttatccagtcatacagaccaaatggtgggaaaaataataattagaacggtacaaataacttctcaagtatttttctaaatcatgtatcaaaattgcacaacaaaaactcaagctgaaaacattagaagcaacaaaatgtaaggtacagcaagagaatgcaatatgctttagactttagctttacccttaaacttcttggccaagacctaataagctaagatgattattatgca

SEQ ID NO: 5189 - DNA, 1960 bp, Cannabis sativa
gcaatagctaaggggactactgctgcacttccatttggcaccattctagttgttcttcttttatacttctttcttgccatccctttgctcgcctttggggggctaatcgggcatcgtttcagatcagacttttcagcgccttgtgctacaaaaccgtacccgagagagattcccccattagcttggtacaggaaaacacctactcaaatgttcatcggcggtcttttacctttcagcgcgattgttcttcaattacaccatttgtatgcaagcatttggggatacaagatatacacattaccgggcattttgtttattacgttcgctatcctcgtcattttaaccgccatcttaagcattgttttgacatatgttcaactttctgctgaagaccaccaatggtggtggaggtatgttactcgccttttctcgttcgttcttttagagcactcacaatagctaatgtaaaataactacatcaaggtaaaaatatagcgaaaagttaaaaaaaatgtagtcaacaaaaatatgcacatactatagatgagttattatagctcaaaaatttaactcgtgaatagtctttagctaaatgtagctacaacttttataggttttacttttagtatatagttataaaattttataatttttagtgtcttttattgagtttaaagtgtaaaattagttatagatataatattttaatattgtgtattataaatatattatttaatgatgtacaaaatagagagtaatagagtagagaaactgatgggtaccttagacgatgatatgaacaatttatcacacttttccgaacccgaattttcttttttgtagtagtgtttttacttttcctaactctgtaatccgttgcactctcttatgcagatcggtgttgtgtgggggctcaaccgcgattttcatgttcggttatggcattttcttctatctcaggtcgaatatggacggtctcatgcaactttgctcctttataggttacaatgcatgcatatgctacgcgttcttcctcttgctcggctcagttagttttcgtgcttccttgatctttgttcgattcgtatatcgcgctgttaaaagtgaatgaatcatatgaaccaacaatttattctacctttccatttccatccccttaatatgctcacatagagattgtatagaagagagagagagagagagagaaaattagctttagcattctcatggcattgagagaaagaacaaaagaaacagaattttgacaatcaattatataacttttaaaatgcataacacacattttcatttgtgaacttggcatttttgttttttgtttgatgattgtttagtaattattatgcatttaagctattcataataactattgaagttgctaatgtggatgttattaatacttgagaaatcattaggacaagacaaatattaactctaccaattggtctttctatggtcttttttaatcaataaagtttatctatgataataattttccagaaaaaaaaaactatatataataattagggttatgtgcggtgaaacttctcgttctttttatttttttttggtagcgaaacctctttatttttactttttattgcaaatttgagatgccaactgaatatcatcgttaaatactaactgaattattactgtattgacttcgagttttactttcatgtatacacagtggttattcaattggtacttagtgttaatatttaaatgatgtctcaaatttgtaaagaaaagtaaacataaaggagttttgccactaaagataagagattaaatgtataaaaattaaaatataaagaaattttgccaccaattactctactaattatgataacaaaataaagagattaaatgtataaaaattaaaatataagatattagtaattgggtaaatgcagtctttggtctaatttatcagaaa

SEQ ID NO: 5190 - DNA, 1149 bp, Cannabis sativa
tatccacaaaatccctgatagtatggaatttcttatttttctgcttactctcttatgaaatttggattctttatcttttggcatttgtgtttgtgttatcataaagtaaacactagctattaattcatgtctagaataatactaagatctgtatagaattcccttaatcctctagctccctcagaggcaactaggtatttggcctctatggaagagtttaagattctgcatttgcttgcgcttctccaaatcacacacctccactctaaagtaatcatcatcctagaaatagatttactgtgatcgacacaagcctgaaaatctaaattggtggtatagtctaaagggtcactcttatagactaacatataatttttagtcctctaaaagtatttaagaatatatttgactattcttcaatattcctttcttagttagatatgctcacaaggagatgtttggtttagtgcgcaacgtacaaaagactttctacagctagtgtaaggaattcttctaatattttctatctcttctagagttattagacactgctccttagatcacagtcttcccaagcttatcttgacgtggacacccatagcttatgccacgtcattgtttgacgccacattaccattggccctctccctgtggtggtaacatgacatgtctagtggagaaccaggacaacatttcttataaaaagttgggttgtgttataattagacaaacataggaactactctctaattccacgagttttcaatagttaggtaaaaaagacataaaataaaagaatctgccccccaaaaaataacctcattgatgaactattcaatgctatcttcatgtaataaaattgtaatgtacttgattctattattttgtatcacatattcaaaacatttcagtagttgatacttaagaaaaaagtgcaagttaggcctaatagatatatataatatcaaaatgtgggcaaacccattaatatccaactttactactgtaaaacttgaaatgtggatacaagcattaattgattatataaactttatttagctataacgtgtttcattccatcttggccagttggccctgtcacaaaccaaacaaaaattaaaatagaaatacatacacacaaacacactt

SEQ ID NO: 5191 - DNA, 1118 bp, Cannabis sativa
tttttaattaaaaaaataaaaacttatttaataatgtgttacccaaatacatcttatattaatttatacatattaattagtaagtaatgttaagaaaacaaaattaagtgattgttttaacttgctatgaattaattttttatggaatattaatttagttgattctttatatacatattataatcaatcatatacgattattaattgctgtgtgtgtttatagagatgagatggtacatgttggaataatagataatttagtttttgattaatatgaattgaatttgtcttgtcatgggacaaattaatccaagttcatatgctacatattcttttgtgtggaaaatatcaaatgacaaatatatataatatcaacagggttgtgatgcatcaatattaatcaactccacatcaaacaagccctccgaaaaaactgcaggtccaaatttgactgttcgagggtatgagctcatcgacgaggccaagagaaggctcgaagcagcatgtccttcaaaagtctcatgtgcggacattataaccttagccacgcgtgattcagttgttttagctggtggaccaaactacatcgttccaactggcagaagggatggacttgtctccaaccctaacgatgtcaacttgcctggtccaagtcaatcggtcacctccgcttttcaatctttcagagccaaaggcctaaccctaaatgaaatggtcgttcttctcggtgcacatacagttgggtttgctaattgtaatttcttctcaagtcgactttcaaattttcaagggacaggcaaacctgatcctgccatggatcctgcgttggttaccaaactaacacaaatatgtgcaactggaagtaatccaaaagcgtttttggatcaaaacactagtaatattttcgataatgaattttaccgtcaaatacgtttgaagagaggagttttaaagatagatcaagaacttgcttcagatactacttcctctgttcttgtatccaatttggcttcgaatccaatccgattctctcaaagtttcgcaagtgctatgattaagatgggaggaatcgaagttcttgtgggaagtgctggtgaaattaggaagaattgtggagc

SEQ ID NO: 5192 - DNA, 1931 bp, Cannabis sativa
ggaggtctttagaagtatcaaagagttattcatatattgaaagaggaaggcaaatgcagtgtcaatgtggtctacttgacttgaacttcatttatttgctgcttgcaaacccatcaacacctaacacttttacatacataatttatgatcttagttgaacatatcaaacaaaagcaaaaatctttaaaattaagaatttaactatgtatgagtcagttatattacacctttatgacatttatattacactagtaactattcaagccaaatgctactttagtagaagaaaaaaacgagccagttaaaaaatctgacactcattgtttagtgatgaaaaatgtaagaggggaaaccttcattttgaaatccatgaagcaagaaaattaacaaaaaaaatataatggagaggactatatgaacacctcctctctctccttatggtcttcatgattaaagtatttgaagcttaactcaacattccatgaaattcttatatggagatggagaaacagaacaaaatccaattggtgaacaaacaagcatcattttaaacaaaagcattagtagaattcaccatgaaaacaaatacaagcatacacacagaacaaaaaaacacagtcaaacaaaagggatacaaaatccaaaacataagatttgtgtgatatctgcaaaatgaaacaacataagaaacaaactactaaaataaagagggtattaaacaacacaagaaactacagtctcaccgatgaaagttcgtgcaagggatccaaaagacaagaattgaaagccaagaaagcactcctcgattcgaaaaccgaaatctgcaaaaaaaacccatatgagttttgaaaacaaaaaagcagtattgagaaagcaaaattgaaaaagatggaaaaattaccagaaagcgatggactttggaatgtgaggttgaaaaggtgtttggtgagaggaaaaagaaagggattctcatagaaacaaacagattaaagattgaatgggaaaatgggaatgagttttggaaaacataattgctacattgatttaaacagaataaaacacactaaatttgaattgtttatctaaattggaaaacacatgttttggtcaaacattcttaagcttcttcatctttgaaggaggccattttcccttcttcctgagttttctcttccgaacaagacgttttctcctaagcctgattttcttagccaatttcatcttcagcttctgctccattctctcctgaagctttgactccaatggaagtttatcaactgaaacttgaacctctttgctttctgactcattactactttcagtttcaccacttccatcagtagtttcagaagaaactttcaccactacaaaaccccccctcttcatcaccataggcatttcattttgaactccaactcctccgtacatcatacattttgggtgcaaatcaatgggtttaatttgaagcctcgaaactgaaaaaacaaatcaaaattacattacgtctaactgtttgatgaaaagcctgagtgggcatttgttctctgataatttaaacattaataaaatcaatcaattgaaatgaaattgaacttacaagtgggaatggaggaggttaccgaagaggaatatgaggaggaagaaaggagaggtgaattgagagaagaagaggagacgatgagagcagccattgttgctctgttaccttagccgaatggagtgaaatggaatttgtatggttttgttggttttcttacttttaggataagctcatttttgtaagattgttatgtggtccttcacttctgaatatttacctttttaagtttgtgtctctcatttttacccctatattttgatttcttgtcatttataccctctttttcagtttctaatatttctatgcctatttcatttcaccatctctattt

SEQ ID NO: 5193 - DNA, 1034 bp, Cannabis sativa
taaaaatcttcaggaagaaaaaatcagttctcatagacggtgccaaactattttgtccaaaaatggtgagtcctctttttaactaattatccaatcattgtatttttagtaggttttttttcttcttgtagttcataatgcatgccctttctacgtgagtttttactttttaacatcgtacatactctgcatgcatggttgtgttgtgcttctttcattgcttgtggctgacacgcgtccttgtcattctgtaaatgcttgtggttaacacacgtctttatgagctgtcataattttcttaagattaatgtttttccttataaatttatgattatctttttaaactctcttttgtcttatctgtcttggtttcgttacctattgagttgtagtgtgccttgttgatgttttccctattttaccttagtcttatctcgacatggtgttgttagtgtcgtccttggtcttatctgagtacggtgtcgttcttggtctatctcggcacggtaccatccttggtctatctcggcacgatgccatccttggtctatctcagcacggtactttctttagtctatctcggcacggtgtcgtccttggtctaggtctatcttatcatggtgtcgtccttggtttagtttttagtgctattagttccttgtatctcgactgaagctttgcatgtcttttgaggtatgaactttccttacaatcttatttcttttaccatttaatttcttatggatttttaggctgtcctttctcttctttcaagcttaaatcttattcgatctattagactttttatattagaccttgagggtttttatctgtatttatttattttatttttttgttttttctctcctaacacgcaccacgcagtttaacaaaaatacaaaccacagttacacattaaaatatttcaaactgtatctgttatgtagtatggtttggtgcaaatggtttgattaacaaccctaaatagaattacctacaaaagtagcataaaatatcaagatagcatatatctt

SEQ ID NO: 5194 - DNA, 884 bp, Cannabis sativa
agaaagaaagagaagataagacatgtatgcacaggttcgacaataattaaaaagttatgatttctagctccataattgatattacctgctagcagctggagcaaagccaattgtgtaatatgttagaacaacccatattcctgattctataaaggacaatgggatcttcaatacacaaacaggtaagctaaatgcccatgcaggataaaacaagaaatccctttgtttaaagtaaacaggaagtttaaatatggtcaaagccatttctgccatgccattgaacatcacattaatcaacccaaaaaagagggcaccataaaacttgtttccatcttctaaactacccacatgcatttttgtcttaaggaacactgtcatggcaattagtgacatgattgttatttgagtacccttgaacacatagacaaaagaattacgcttcatcaacaaccactcccttgaaaaacatgcttttaacagttccatagttgaaataccatatttctctttcaccaatgctgcagggtggactcttgacttgtcataaggaacatttaagtcagcttgaagttgttgtccaatgtggaaagatttgaagccttttacaaagtcattaactggaatgaatgtataagtttggtccttgtttaaccaatattgttcttggtctttcatagaagttacttcctgtagaaagtcagcaactcctttcctctctgggcatttaaatcccatgtactcaaaaaactcaaggacattttctttaggaccttggtatacaatctgaccttctgaaattaagataatgtcatcaaaaagctcaaatgtctcaggtgctggctgtaagagagagacaaccattgttacatctgagatatgaacca

SEQ ID NO: 5195 - DNA, 4111 bp, Cannabis sativa
  modified_base (3250)..(3252): a, c, t, g, unknown or other
aagtcgctcgcttcttagatttcttgactgagagagtgggactacagagcatatcttcaagatcgaggtccatatctgcgagaaaaagaaatatatcaatacttgttcaaaataagcaaaaagaaaatggagaataatctccaactcaaggagatttaccatagctatcagatgaagatgaagaactataatacttactaaactccctagaaccagtgatcatgaagagatcaaaagtatttagaggagacaaatcccaatcttgatggcttgccctatcaaagtgagtaccgtattgttgggcaattctaaaataagaactgctacaacttaattatacgtggtgcttgggttaccaactatcaaacctatgggctatgcgctctacacaattccaaatataaaaattttattgtctatccttaaatttaactagggaagtgcactcggccctaagtactgtgggagaccatccaaaatattacctcgggatgcttcttctttagcttcctgaggtgttgtattcttcaagaaatggatacgagccacataatccttatcctcctcgtcagtagggacaagaacctgctgccacctaaagtatttttggacctcttgaagtcacaagtagcttttgtttttgctgccaaggagattgcaggtcttcaggttgatctcgttcaataaaaaattagcttatcgcaatccaaaaggaagacctaaaaggattttgtgctgtttttccatctggggagttggaataggcctcttttaaccaatgttaatacaataagcaaaataagtaagtgcctacaattagtaaaatgaaaaactcaaaactaagtttttgagacaaggaaatacttacgtataatgcaaaatgtagttgtattgattggggcgaggccggatgtctagaagaattcgtctttgaattcagtcttgttgggcaacctcatggtgatcctttgatcatttgtgtgggtcctgagataataaaaaccacctgatcctcccttccttgcagggcaggccttcacagagtagaagtataaaattttaagtggggttgggcactcccattataaaatgtgatataaaacttccaaccagccaaaattctgtaagaatttggaatcagttgaaagggggaaattttgaggtaattacaaaattccttgtaataatccataagagggagtactgctctagctcttatatgttcgaggctctaagcgccaatcccagatgacccactagtactacaactttcttctcaaatcaccctttcaggggaaaacaactaaattctcttggagcgacagacctaactcggcatcctttttcgtacttgatgccacaagacctcagtattttgccaacgtatgctcctatggatctaaccttggattcaatgagttctacctcgaaagtaattgtgggatcatgaggggtcttggatttttgagcttttgaagtcatgattttagagtttaagtcacctgctgaaaaagcaacagtgactggatgtaaaaacaatggcctcgctaaaggaatagtagataaattttagggttcaggccaagctgcttctcgcagaaaatgacatttaccttcagttatttattgcaaaaatttcctatatcgacttgaaatttcgtcctggttggttttagtaagatgatctctaatttttgcatcgtttgtctcaagaatggtttaaggaatgtttgttttgggtctgagtggggtggctaaattttgaggacaattcgtttctaagaactctaggattgtaatttttagaataaattgggtcatacttgtctcaatttctagaaaaataagatatgattttacctagaaatctatgaactgaataacctaaaagtttccttagccctagaactatccaaacaaccaaaacaaatttacgtaagaataaccaaacaatacagataaaaaaatatcaatcaagaagacaagactacaaatacataaaagaaaaacattaagaagaaggaagtgaatcagttactgtcttgctgagaatttatgagcaataaagaactttgcaagtgaagatttgaagattgagaagcagggtccttgcgatttctagaaatggaagatcagtcagatattatacgcaagaaaaatgtaagggacaaagaaggcatggaaggttgagaaagatcaatcagaaaaattctttgcaggaatatttgaaggttttaaatgcgaaaatggcgaaataaacttccacctaaaattttatacccaattactaatcaccgtccgatcaaaagaaatttgatctaatggatgggagcattgcaaatgagaacagtcagagcattaaatgctaatgatgtgcattgaagttctaaaccgccagaaacctaaggcatggaacttttcaaaaatgggtttatacaattatacccctataattatttaaaaagttctttttaattaaaaagtattttttagagggcaattgttaaacccaaaattcagctttatactggaggctgacatgtgtcctacggaaggaatatgaatcaactctgataatataataatgatgtgtcactaaatgcaattaaaataactcgtttaaattaattacaagtttaatagataacattcaaactcattggttgcttagtcttatgcatgacgagaataataactattagactgatattgatgagacataaatctgcctcgagataaactcatttacatatgtaagaagaagatactctcctgaacgagcagattaaatgtagtaacacacaatcgccttacgtcacacatagcgagaagatcatctcgcattagtaatgccaataaagggatacgacaagacgaattatcttccaacacttagcatttttaactatcaagatggacaagaagaagaactcatgtctgacaagacacaacctttgaagtcagcaaaaccgtctaatggataaaaataaagaccggttgggtagttattagatattatcccatgtgtggttaaatgaaacatggggattatccacgtttcatgaacaattatatttgaaccaatcccaaaaaaataattgtctacctatgttcctataaatagggatagaatgtatgggaaaaaggacggaaaattggagagagaaaaatattattatgcaaagattgatattgtattctgtactcaaaaaatatccttaataataaggactcgtggagtatgtagatnnnaactacaaaaccacgtaaaatatttggcgtttattaattatatatttatttctgtagtatatttattgcaaagaaaagctatttaatttggttagcgaaaatctacattaacaccttgttcaaattttggtgattctcctacttatcacttttgttgtggtattgagattgttttcacatttttttatatatatatatatgctatttactatattgtgttttgcatgttgcttattgcatatagatgtaattttttttttttttcatttctattattcaacaatttatgtacatattttatttggtgttgtaatattatttaattattttattataatcattatattattttgttttgaattgtaatcttgttgatttatattcgtatagatgcacaacttttttacaatcttcaaagagtttataatattcacaatatattattaaaacaaaaatactcataaaattagctattagttataagtttttcatttattaaaaaaaaaaggattgctcaaaactttttttcttttaaatgttaaatttgtgaaagtgataaaaaataagcaaatatattataggtatggaataacaaggaattggttggggaagttggtggtagtgatgcctggtcaacatggagaagttgataaaaactaaaaagtcgatgaaagcctactcaaattatagattttctttcataatgtaatctaaagtcaacaaaaatgatgaaaccatctttatctttatctttaataaaacatactcacccttttcttttctttaccccaaagttaaggggaaatttcttgattgaaagtaattatacacttttacttcttagcaaaaaaaaaaaaaa

SEQ ID NO: 5196 - DNA, 1461 bp, Cannabis sativa
aaataacttgggccaacaagcgttgtatccataaatcaatcaatgaaacttgactattcattttttataaaatatactttcgtttcgaacaaagagagtacttgcaccgttgacagacaaataaataaattatatattaattgagcaaaaataaattaatattttttcgacctgactcactagttttggtggttacttgtggacccctttaattattttattaatatagcaaagaattattcttaatctaatttattctatcatgtgaatgaggtgaacaaaaagaccaattgtctcactgtgacaaggctcacattatcacgtacggtagtggtgacaactagaaacttcaaaagaatctgatcttttaagacaaaatctatataaataaataaaatataacagtaatgaagggattttacaagtacttaaatagtctaccctaaaaaaaagtacttaaattgtttccataattaattgaaagttccaaattttgcccattacttatacaatcacaattcacaaaggtcaacattggtaatttggcaagtataccccatggaattatgaaactgttagtacctatatataaatagagaaggagagacatcgatcatcaatactcaaaagaaactaaaatcaagaaatttcatttcacatataaagcaataactcctagctagcttattcttctccttctccctagctagctttgccttttattattttatctttcaattaaaagcagtaatataagaaatattaatggatgaaattcatgaataccagaagctccaatcatatggttatggtgatcatcattattccattgttgcaaagtctaacaataattataataagtaccaatatttgttgagaaggactttgcaggttgttgtatcagtcactattttgtcttttttctattgttactcccatggcgtttctttcttccctcattcattcagtgtctacttctcaactttccttttctcattgttcactcgcacacttgaaagaaagtacatgttccttatttgtaacggaatccttgtttttctcgccaaaacctctgtttcatcaggcgattacatctcctcttgtttagaccaaaccaaaactaattcagcaaaaacagcagcagcagcagccgttgtcgttgaagaacatcaagtactggagtctaattcagctgatcatgatgtcgtttttgaggaagaagcgacagatcaagatgaacaagctcaacaacaagaagctgatcttgaacaagtgaaaaaatgtgctgatcaggatgataataatgatggtggtgatgatctgagtcttatcatgaatagtacttctactacattatttgatgatgagaatgaaaacgacaatgatgatgatggtggcagcgactacattttgagtaagcaagaagcgagtaattacgatgaagagttgataagtactgat

SEQ ID NO: 5197 - DNA, 1323 bp, Cannabis sativa
tgagatacattttgagggaataatgcttagtgagaccatccaaatagttgctatgattgagaagctacccgttcatggaaggagtacaaaagctaccttaaacacaaacgaaaacagatgactattgtagatttaattattagattttgtatcaaagaagacaacaaaaattctgataagaaaagttatagtaaagatatgactaaagccaatgtaacgaaacaaggtccaatctccaaggaaaagaagaacttcaaacacaataatataagggtaaagttagaaccaaaaggtggtgtcaccaaaaaaaacaattctaatcacttggtaagtacttaacttcaataagtctggtcacaagtcagtggactatagactgccaaagaggaataaataatcctgaagccaatatagtaaatgacatgtccaaagatgttggtaatatacatctattagcaatggtctcagagataaacctagtcaaatttaatcaatgagaagggttgattgaaattgagtctacttaacatatatgcccgaaaagagtatgctcaaatcttttgaacaagtaaataatgaaaaaaaaaaatattcatgaaaaattctgccacgtttgaaatagtggctcaaggtaaagtgatcctaaaaatgacttccaaaagggagctgactctcgacaatgtgctgtatgtactggagatttataagaactttgtaactagttcactgttgagtaaacatgaattttttttagtatatgagtcggacaaggttgtgttgtccaaaaatataatatatgttggaagaaattatataactgatgggttgtttaagttcaatgtaatgactttttaaaccaattatcaataaagttaataacgcctttgtttatttagttgggtttttcaatgtattacattgtagactaagatatgttaattgtgatactgtacatacattaattaacttaaatcacatacttaaatttcacattaatataaaatctatgttgaagcaaaactctcccttcaaaactattaacagtaataataaacctctagatttaatacatagtgatacatgtaatttaaaatttgttcaaacaatgggagacaataaatattttattacttttatcgataatagtataaaatagtgttatatgcattttttaaaaagcaaaaacgagactatagataaacttatactctataaaagtaaagttgacaatcaactcaacaaaaagatcaagagattaataagtgactgaggtagtgagtatgaatcactgtttggtgattttgtgctatgaaactacgacac

SEQ ID NO: 5198 - DNA, 3333 bp, Cannabis sativa
  modified_base (3102)..(3105): a, c, t, g, unknown or other
ttggtgttaaagtggtggtgggcggtgatgcttgaacagtgggggcaaaattggtattttgctattttctttttggatagaaatgtaaatattggtcaaaactgtttggcgggtagtcaaagtacatttggaaaagtcaagagagagaaaaaaaaaccgttataaaagagggaaaaaaaaacacaagagaaacgtttggattaaaatcccaaaccaaacagttcacctctttttttttttaatttttttaagggtaaaattttaaatagatatattattaattttttttttaaaaaaaaaaatatgttaaaaaattatagtgttaaaaaaaaatattattaattacgtggacgatgattattaataagatgaggcatttatttctgctacttttttgttgtctttttcattaaaattacaaaattacccctggttttaaagacgtggcactatcgatattgctgtggatctcactatctaccacgtggccatgcaactactttcacgtggctcctaatctcgacggttagaatttactccaaaagattaaaagaataataatattttattattaataaagtgacgtgtttgatggggtttgatcacgtgtggggggaagtatcattatcttattgtgtaagtctcatgaccgttagatgagacgactttattggtttcgcttatgtaagtcaacctttgattttataaggtcaaagtcatccattacaattttacaataaggcatgaattttttattactattatttatttattttttttgtattttgattatgggataagagaatttcaatttaggaccttattattttattttatttattttttggtgaaaggatagattttttttttttttctataatgaaaatattataataaacgtgtaacgaacgcaagtccaagcttaaaattataggggtaccatactatatattttggtccaaaaaaaataattttttttaatatatcattttagttgacataaaataagacacaataattgtttcaaaaatgaaataagacacaataaattattagacaaaattttaattcataacttttagctttaaacatactaattaatgatctataataataaattttttaacatgaaatgctaaagtatagtaatgcatgtcaattaatatataaaaatactttttgtccaacttaaatttatagtacgaattcacttaaaataattaggtattagttagggtgaaataattattacttatcacaataattggctcgtgcagctttgtcctcctctctaaatgaacttagatatatattaataagagagtcacaaaaagatattattactctctcctattatttttaatatcatattattcttagtgtaattaagtatcaaattttatataatttaagatacattttagaaaatatcactaaccaattgtagaacaccacctatacagcactactgcaaggccgaccctaagcataggcgggctactaaggcccactcattttagggacctaaataaaaaattacctacatatttttttaataatttttaaaaataccatttatctttatattaaaggcttaatttttttttttttttgcttatatggcaatttcatctcaagaccggtcctgcactactgatacctaatatattgttattggtataattaaatattgaggatcatataatttaaggtaataatttttagaatatcactaactaatcaaaaaacaccatgataatattaggcactattaataccaataaaaatactcattaataatatgacatagatacacaacactaactacctacataaatattatggctaaacctagctagggttgaaaacaatatatgtaaaaattttgtatagtgtgtgtggtttcacttccacattaggtagcataattaaagttaataatggattgatctagctatacattagaataggccatatatatagtgtgtggtgatatatagctataaatttttcttttgagttttaggacacatgctacataacaagtttggtaatttaattaaagttaaatatatagacctatatataaaagtcataataattactacatatattttgtatatgtacacatatttggtgaaccaaaaaagaaaaagaaaaaagagttgtagacagttggccctatatactatatatataattagtggccacaaatatatatatacatgtcggcatatgtgatttaatttgctctttgttcatactaccaagtcttcagagtcatcatccattcgacgatatcatatatatatatatatatatatatggcttaaatcacacacacacactatatttataactagcatctatatatataagagataacgtcttttttgcaatttgcaatttgcaatcttgtctaaaatgaagccaaatattctttgagataaatacatacttaaattacaaatacttattacacacagtaatatataataaatataaataatttatatttttaagtgagatgatataacttttatttatatggttgagattaattatacagtataatgggtaaaaaaatatgtataatttaaatgtattccaattatttttcatatttctttttgattgattgctcattgatcttacttttttatttttatttttagttaattctttacaattgaattatacattataacaccctaactaaacccaatgtacaactcaccaaaaactagtcttgagctcgattttgatactaattggtacaaatcaagaagtgactacgatcattactactataaataaatactacaaaaaatcttacgtttagtcacaacaaaactaattatgaataaaagtaaaaaaattgtaactaattataaattattattcttgtgttgtaactaaaatgtccgtggctaaaaatattagttacaaaaattacaatttattgtgactaaatgtatttttaatcacaatacttaaaactaaattaatgacaacttataactaaatattatgttttagtcacaagtaatattttattacgactaaattaaagacatttagtcaaaaaaaaaaattatgttnnnnaaaaagttatcactaaaaataatattttttataaaaaaatattttacacaaaataatctagatcatattattgatcctataataatgtatcggatcctatcaaaatttcacaattaaccaaacatatgatagtttgttacttacttctcattatttttgctagtactataaacttaataattcatatagttaaggtctatgtacataagttttgtttatgggtggttt

SEQ ID NO: 5199 - DNA, 3235 bp, Cannabis sativa
ctcttcatcaattttggttggctaagaacatgttattttctgttctatattgtttttgagttctttggcctttcaagctttggacccttatccaggaggagttgaatctgttttatgttgttaaactttggttaaagttagcaacgttttgttatgatttctgtgtgcttttcatgggtattttcgtgtacgtggttcttgctaactttgctttgcagggatatttttaaattaaaaaatattttgattatcaaaaggggagagtcgtaaagttttttttatatataatttagttgtcaaaatattatttaatttaatatgtatttttgataaaaataaatattatttttatttattctgtgtttatgactaatttatttttattaggagatatttacataaaagagaaggaattctctttatgggaatatttttataatatgtttatatgtggtaaaaattaatttgttatagcaaattgtgtgatctttttatgacaagatatgaagctatcgtgactatgatatatatgaaaataaaataagattctgattgatctaccacatcaactagtgatgctattaattactgcatatcttgaaaaattcaagactaattttttttttaaggaatgtttttaacagctctaaaatgtgtttgtagttgtctcaaaagtttttatgatttataaatataacctagagagcagtcatacgttatatctcttctattgttataattttcatacttcatatttgcgagaagagtgttctttgtgtaaaaacctagagtgtttagctaggttttaattttgtaatagtgttcttttactgttcatagaataggttgaagagttgccatgaatagagaaaggttttcatgagaacttatcaaagactcactttcagaggaagtgagtatgcacatcaaaacctaaaggaatttcactgtttgatgcggttcaaaggtaatattagacaaggggattacaaaagattgtgacaaatctttagagggattctaaactttgtaatctttgtaattttactaattgattttattattcgaaaaaataatgataccacgtataattctcttgtgtcaatctgtaatttctacaatcattttgctactacaaatagtatttctatgtgatcaagtaactaactttttactataagtcttttccattaccattcagtaactattattgtagaaataaattgttatttgtaaaacacttccatatataaatagccatgattgtaatagacattaagaaaaaaaaaatcacacttgcaacaaattgtttgaacactaattttctttgttagaagagaatattttaaataattataatgtatgaaaatgaaaatatatataaaaaaaaattgaattataattttttaactaaccaaaataagaacaaaataaaaaatacatacatgaaacatcttctaagtcaatccaatatgttcatctttgtgcttatttcaatgacctaattcaaccctattccttgaaagtgatactttgatctagctatcttatatacagctaatatggacaactaaacattagacttctaaatttgagttttcattggatgaaatgaaacaaaacagtaggtaagttcattagtcataattatgaaattataatgtttagtaaaaccactttctttattgatctgtgaatcagtggtctgatcaaagagtccataaaaaatagcataaaattaaatatatagtttaataatccaaacagtaaaattgctcaattaattaatcttatattagaattagctagtaaagtagcaactattctaagcaccaactactgaactaaaatcagaccaaaaagggctaatattttcttccttttctctgcttaatgacacagcttttcttacatacgagaaagaaaagtagtaaagccaaactttgcattccttttcatattaataattctaactcatcatttcaaaatctcaaaactcaattctttcacacagaaaaaaagaaccacctcacttcactttccttactaaaacaaaagaacaatattttctcacttcccctattctttctctctgttctttccttttctttcttaattagatcgatcacaccaccatgtccaccatattctggaagaaaagtttcccactttgcttctccatttcaaaatgtctccccacaactcagtcctcaccaaacgacagagacaacactcaaacgacatcatcatcatcttcctcctctatgccaatcaaagccttcaactcctctgtttatgaaatcttcgccgccagctccaactccgacgacttcttctcctcttcagatgagctctgcgactcagaaatcttaccaccggcgccggcgtttgatctcgccactgtatacgcttcccccaggttcttcttctcctctccgggccagtcaaattccataatcgagtccagtacaataacctcagatcacgcctctaagcctctacggccagtggccaccgcaaaaagaaacacgacggcgacccaattcgccggaggcgtcgaggtcccgaaatattcggttgacccttttgttgactttcggcgttcgatgcaggaaatgatggaagctcgggatgttttggtggatgggagaaccgacttggagtaccttcatgaacttctcttgtgttttctcgctttgaatccaaaagaaactcacaagtttatcattagtgctttcactgatatagtcgttactctgctgtcggcgccggacaaagggcgccgtcaccgtgaaattaagatccgacggcggcatagtggttgtgtaagacgactcagcatgtaatgacaattattatatataaatattatatatttttgtctttcaattattgaggaaaaaaagtaataaaatagtaaataaaataagggaaaaataaaaaacattaactcagaatagttgtgtcttcttcttcttattattatttcgttatatacatttattatctattagtttttgctctgtttgagaaatgctataggatattggtggtgtctatgtgtcagtatagttattggtctaaataagtatcggtatctatataatttaatataataatttttaaagagtatcgttagccaatcgcaacgtgacacgtcgagaaagtattagacattattggtacttaatagcaatggtgtttttgtttgtggtgattgtgagtttaacaatat

SEQ ID NO: 5200 - DNA, 506 bp, Cannabis sativa
acttcaagagctaaataatcgtttcaatgaggtaaatactgaattgcttatgtgcatgtcatgtttgtctcctgctgatttattttatgcttttggcaagaaaaaattgatccaatttgttgagttttatcaagatgatttttctgcttttgagctcttggcacttgatgatcaacttgatacttacattcttgatatgcgtacaagtaaagagtttggagctttgaaaagcattagtgatcttgcaaaacaaatggttgagaccaaaaagaataagatatatcagttggtttatcgtttgtattgttggttgctacagctacagttgagagatcattttctgctatgaatattgtcaagaatagcctgcggaacctaatgggagatcaatggatgaatgatagcttaattgagtacattgagaaagaaaatatgtgatacaatggataatgaaactattatgctacgctttaaaagtatgaaggagaattgtaattgactttatt

SEQ ID NO: 5201 - DNA, 689 bp, Cannabis sativa
gataccataggtaccttttcttttttgcatagttagcttgcttaagccatcaagttctgcaattcatttttattgcctttcattctttacatcgtgaaaattgtagtacctcctttctgtagcccccttatatgtaaaagactaacatatattatacatttgtacataatgctcgaggatatttgaaactttatctatattctacatgattttatgtactcattttatttgttataaaaggtaagccatgacatgtactagtatttcaactttttttgaggttttaatatgaaattacatattggctctgaaaggagctgttaattttgaaatgaaactacgtataaataagacattgatattgatattcaaaagttcttaagttttgcacatgaatttctctttaaacttcctctggatccaagaaagggaaaggtaaagaaaaagtaaaaaaaagtataaaaagagcaaaagttaatgcttccctcaagtttggttgggttgagagaataaaataattataaagacaaaaagattatgcttttcatttgacaatctgattttcttgcctcagccaagatttttgaacgttggttggtatcaataattttctattactagcgccaagacaagttcaaaacattgcaaaagttattctgaccaagtttacttcatcctataaatataat

SEQ ID NO: 5202 - DNA, 1419 bp, Cannabis sativa
tgcagccccttcaactgacccccacattactaaattgatggaggaggagctggcagctctggagcctttgccccaaagaggggagcatgaggcttcttgggtgtctccttcatatacattcactcctgtgaggtttaagaacctcttggctaaaaattcagtcgggggcctcgatgctgacctgtcaggtgaggattaccttgcccacgcccctctcaagaattggatggcatggtccgagctatagccaactattacgggatctgcccaacacagttgactccgaaggggatcaagtacctattttccctcttcgttttatatgcacagatgggctaaccgcaaccttttccctttgagattatttggtattttaacctaaaatctaactttggttagggccggtcatggtacttctgcttcagccgactgggcattcatctggttgggtggcatgaatgatcctcccatgtccaagatcggtggctatgcccgactacttcatggtttttggtgcagagggtgtgcatcatgcattccaaagaatccccacctttgactggctaattcctaccctgagacttagggataaagacaaccatatcctctccttgtcagcttcaagatggattatctgtaagttgacaacaagaaaaaacttcatcaaatatggcctttatccttctgcgggcaaatttccaagttcatttgatgagatttctttgaagaagaaaggaaccaagagaaaagaacccaagaccgaagctccctctaacaacctttttgagaagaaaaaagagactaagagagagagagagagagagagctacttggaagagggttgaccggggtgagtcttttggaaaggcccctgttctcataaggccttaagggtcagagtctgctaggactacccgtccaactgctattgtgggaaagggtaaaggtcttgctagtgaggaaagcgaggagtcttcttcagatgatgatgatgttccgtacaacttcccccgggttgatatttccgagtcggctgagagtaaaaatccctccaacttatacttgaatgttgtctttttaagttattgactagtattttgtatctttggaggtatggcttccaaattgggagagtttgtcaagagaaataccgtgggtactttaggggaagagtccccgtcgaaggtttcccggaaggaggggtcaagctctacccactcaggtcttccaccgcctcctccttactttcctctggccaatcaacccgtggtgagaaacttggaggggcattctcctcttgcaaatagaaaatcaagtaaggatcgccagagacccattccttcatttgttcctcttcgggtagagaaagtaaaagaagttgtccacaattatttggataggtgtttagttcaagcagac

SEQ ID NO: 5203 - DNA, 2914 bp, Cannabis sativa
aagccaaatttaacttaaaatttatatcatccattatagatggtctaagtgtagaaccgttttgtaaaacttgaaagtacattgttaggtgttattatgtatactattttgtgcaaatgttattattattctagtttgaaagacttgagtgctttcatttattgaaaaggacatgtccttaataaatactcagccatctacttcacattatgagtacccatgtaaatgtaatgaacgaaagaagttgaagaataataagtaaaagcttgaaatttggggaccattgttaagaaagagaatacacttgaagattgtgatagaacaaatcagaagtaattgagagactaggacccatatcttcacacagatagaacacacctacaaaagtgggctttggcccttcaaagtggacacacataggaagcttcatcatctattaacatttccattatttttttttgaaataattacataaaatactaaattttgtaaaatatttacatttttagagaattttttttttgatgtatatttttacagaattctataaaaacataaaaaaaaaaaactacatgaaaataacaaaaaaaataacaaaacaacataaaaataatcaaaaatcaaaaataaaataacaaaaatacaacataaaaatacactaaaaaaccgtattttatataaataaaatctaaggaaccgtaaaaatattgaaaactccatataatcgtatttttataattttttttgttatttttgtgtatttataaaataattctgtttttttcttagacaaatacaatagtttcccattcttgctatattgtacttgaaaacaatcatgcttatacattgattaagctatatactattttggatcctgcattttcataaaagttatcgattagaccatctattttaataatgacaattcaaaccctatattttttaaaatagtacaaaatagactccaacttaattttcataacctaatctagaagtattataacaagattagttatattttttttttacatctgttcgtgctaaaaattgttttaggttagttatattaaaaaaaattgatgaaaattaagttagagtctattttatactattttgaaaaacacaaggtttaaattgttatttaacaaaacagaatgtctaattagtaatttttgcaaaacacaaagtctaaaatggtatcagaaatttccatagtagactgtagatctccctaaagggtcgttctagtagaccctctacttgtttcggcatccagaaaagtttttaagtccaattttttttcatgactgcatacattttagctatttaagaccacttgtaaatttttagaaaattccaaatagttcacaatgctgaaaataagattcaaacaattacttaccacacgtaggggtggcaaaacgggtttcgacatggcacacgaacacgaacacgacacgaattttatgggttatggtcggaaaaattagatgcgggtcgaaaacgagtcgacacgacttgacacaaaataaaaacaggtcaaacacgacacgacccgcttaacacgaatgtgacacatttgacacgatttttttaaatataataaaataaaaaattaataatataattatataaaaatatatatatttagtgattcaatgttaatttaaaaatttttaaatttaatttttttaatatgaaattaaaaatattttaatttttttaatttttattatatatataacaaactatatatagtatataagttttctaatggagcttaaatctattatttttctctacaatcccagctttaacaatagcaaaatgggtcacagtgggtcgacacaaacacgacacgattttttacaggtcgggttagggttgagataattagacatgagtcaaaaaacgggtcgacacgcttgacacgaaatataaaagcgggtcacataaaatatgacacgaacacgacacgaagacacgttttgccacccctaaccacacgtataaaaaaaacagtcacgcgtgcaacaaaatatgtaaattttatttttggtattgtaaactacttagaatttttaaaaaatttatggatagtcttaaataacgtacactatcataaaaaaaaaaataactaaaaaactctcttgtataccgaaacatataggatgtctaccaaaacacccactatagacttagctaatgttattcaccctattgattaacataagttataatcaacctaagttacattaattgacaaaggaaaaatatatccattcttattttatctttattaccgttgtatattttcattattcagacaaaggaaatgctgattgtaatatttctcaacataaaaagaagaacaaaagaaaagagaaagaagtaactatgacatataagtaaaggcataataatcaacaagagacataatctctgtacatgcacatgctacattctcttgattgtgtaaaatatttaacagaaaaagaaaacttatacgttcacaaacttgatatacaaaacaaaacaaaaggctctaaatacaatcaagtaaaaaacttgtacattataatttaaacataaacacatacaaaactatttccttccttcttctatcatgaacttgaacactatatatccaagtaaaaaaacgaacctgcaaagcctcgttctatacccgattcggtcgctgtcctgtttgtttgcatagtgatgcataaactgtaaaacctttagttaaaaaagtgagcaaatatcactgttttgccaactttctgagcaaaaatgactcttcccatcatcattattctccttgctgatataaagagaaggatgaactggtctcagtcttagtaacctgcatttccatatcatcaagttttattattataatgcatccaaa

SEQ ID NO: 5204 - DNA, 899 bp, Cannabis sativa
tagctccactttgtttaaagatagtgggcattatttaaagcgaataatagcaacactctcgtatggtctttggtctcactatttttcatctggactccaacaaacacaattaaattattttacacataatattgttagtcattgtagttcgcatgtcaagaagtgaaacatgggaattgggagcctaagagagtgaacaagagagtactgctaacaccttccacagtctctacatatgaagcaaataaagtgaacatatttactgaggaaaataatagctgcaactataatgcatgatctagaggctgctacattccaacaaaagcatgtctcagtgcacaaaaatgataaatacaattcaacgcgtatgtctttttcatctaatcttgggagtaagagatggaaaacaaaccttggcaagggattgctgaacctcgcttacagcctcagctttttcacacagctcagagaaatcctcatacttgatgcctgcattttgggcccagtcctcgagggattttcgtgcaggtacaacaagagctacacagttgctatggaaaggatccgcatgtaacatgatactttccacataattacttgacaatagcgcagactcgacctgcaatcaagttggcacaacaaaatgagcatcctaggatacttaaaattgttgctcagctcatttacataaaattatccagaaataacagggtaagtggtaaacaaacacacctttccgagagagatgtactctccatgctgaagcttaacaatgtccttctttctatcaattatttctaagcatccatcaggatggaaccttccaatatcaccactataaaaccagcggatgcccctctcatcaatctgtatcatacaacaaagtcctaagaaccagt

SEQ ID NO: 5205 - DNA, 2691 bp, Cannabis sativa
  modified_base (2431)..(2436): a, c, t, g, unknown or other
taaaagttcatcagggatatcatctatgctgaaattgtgatctggttataaataagagctacgagcaacacaatgtgcaactttatttgcagaatgcttaataaaagacaaattgacaaagtttagagaagcaaaaagaagcttacaatcttggataacaagaccaaaagaggatggtaaattcaaagaactaaagacagcttgaagtgagactaaggaattggtttcaaactgtaaacttcgccaacctttctaatcaatccaactcagtgcttatttgatccccaaagcctccacaaaggccagctctgcccaaccatcttggcacaacgagcgagcttcaatcatcatacccgaactatcacgagccaccaatccaatcacatacttctttgtagaagcaaaaattgctccattgacatttagcttaatcatctttgatcctagtttcgtccaatgcgctaactctgtacccgatcccgaaggaacaaatagagaacctcttttctttgattgagcatatgaccattgattaatgaccacacgagctgaaagaataacatctgccgcagaagaagacttttctcaccaaatcactgagttctaagcattccacatcgcccaagccaccattgctgcctcttctctcaaaccagacgcagtagagtgctgctgcaacatcttgccaaaccaatcatgaaaatcttgtccatttacgttaccacaattcacgattgaaggggaccaacaagatcttgcaaagtgacagcttaccaacaagtggaaaattgattcagccgcttgattacacacagggcaagtcatatcaattagaacatgtttagacactagttgaaccttagttgtaagacaaccactaagagcacgccatagggcaagtcatatcaattagaacatgtttagacactaactgaatcttagttgcaagacaactgctaagagcacgctataaaaattgatgaactttaggagaaatttttaaatcctaagcaattttccacaaaacacctcatcattatttaaaagaagaacatcatctttatgaaaaaatttattagcttccttaacttgaaatttcccatgaatattcatagaccagtaccaactatcttcagcaacggtatggttaagataaatgttgtagatgagttcttgatctctctcattaaacaagtctgcccgcaatgatttcagaatcctaatttcttgagtctgccatcataagatctgaaactaagcagttatcaagatcaattaaagaagaggtaacaaagggaaaagaggcatcaggaagccatggatcccttagaacattaatgtttgaactatggccaaccgaccgacaggctccatctttaatcaagtcttgagtttcaaaaatgctcttccaaataatgcttggattatttccaagagttgcattaaggaaggaaccctaagggtagtaacgggctttgtaaaggcgagcaaacaagagaagattcattcgttaataggcatcaagactgcttacccaacatagacaagttgaaatctcgcaggtcacgaaagccaaggccaccatgatgtttgtgcacgctcaattgatgccaactaatccaacttactccacgactttgagtcgagcttgagccccaccagaattttctcatcattccttccaacttagtacatgtttcaactagtaacaaaataaccgacatagcaaatgtaggaagagcttgagccactgttttcaatagaacttccttacctgccttttataacaatttgcctttctaactttgaatttttttttccatcttgtctttaagaaaaccaagaataatatttttgtttcgacccattgtacaaggcaaactcaaataaagactatttgcaggagcttctatcatacccaacgttctacacattgaatctttagtgaggtcttcaaactagaaaagatacttgatttggaagcattaatacactaaccagaagctgtcttaaaaacttttaacaacccgataacattccttgatttccgttctgtagcttttgcaataagtataactgttattcgtaaaaaaaatatgtgataaataacaggagcaccattacacattcgacacccatgaggataaattaatcgtaaatattgataatggtaatgataaattgataatagtagtagtaatataatagtaatggtaatggtaatgagaattaatgaatattggaataaatgataaattaacaaaattgtcttcacatccttcaaacttttaagggataattacataaatatcaaattttgaatttttttacaattttacgtttaaagttatttctttatatttttacggtattttacaaaaacacaagaaaactacattaaagtaataagaaaataacatcaaaacaacannnnnnataatatacaaataacaaaaaatgaacaacaaaataacaaaagtgtaatataaaaagatcgtattatatataaataaaatctaaaaaaccgtaaaaatattgaaaaattcgtataaattgtatttttgtaatttttttaattgtttttgtgttttttttattaaaaaaattattcctacttttaatgtagttctgttctctatttatagacatatacttttacttgaatgcgtaagatagagtagttgcgaaata

SEQ ID NO: 5206 - DNA, 602 bp, Cannabis sativa
taatctctgggaaactcacataaataaaagtggaattgggggagttaggttcgttcaattttcagcaaatttcaactgagtttcaaattcaaagcttttttcatttttaaaaagaagaaaaggtaaatgtgaaagagatgatgatatcatggcatcatattataagcaaagcctaattcatattatagaatagaatactaagaatattaaaagaattctttgtctgaacccaacaaccgtaccaccaccaccaccgtcaaataaataattggtcaactcaacaacctttgtttctctcaaacccctttaccttttccttttttttttgtttgtgttgtgtcaatgtttttttaatcctacacaatttatattattatttttatttattgactgtaacactattttatacatccccattcccacccataatattaatattaataatactcctaaatattattaatttagggagccacctccatgtccatgagtgatttgtggttggttgtgttattctaaagaaagacgcatgttttattaaaaattaacatttttatttttccaacttatgttgtcaaatttttttatatcgttaaattttt

SEQ ID NO: 5207 - DNA, 1338 bp, Cannabis sativa
cagaacttaatcggactgtgaagtgttactctcacttaaaaatgtagtgttactgcctgtattacctatttccttgtttctggcttttcactcaaatcatcatattgcagaagttcggatgatttgcgaatactttagtaatgatgttacgatatggacaagtcatttcttgattggtttatctcgatctttatgtcatagggtattagatgcaaatacatatgagaagttgcacagggtgcttgtttcccacttgggaaggtgcactcttttaatttttggggagtttacaatcgttgatgatgatttggcacgtgatttttgctttacaactatcggtgagcatgccaagtcaataaccaaagatcaaatgtacaaggtgaactatatttacatttttatcaaggatttcagagtggctgtttttttaattgtctgatcagttttccgcttgcagtttgctcgtaggttatgctcttctttatttgcactacaagatagcagatcagccttgatcactgatatactaataggtgttatgaattctcttgcccatgatggaaaggtatgctgatactaaattccattgagatgtatttcttctatgtttatggttatatgtttaacacttcagttaagtttagggaaaaaaatgtgtgggtcaagtgatgggtagttgcaaattatgggctttgtgagaaaaatttaagtgtggctcttgtattcattacaataatgttaattataggtactttttcagtttatttattttttatatatctctctcaaatataaaaaggtacttggtagaaaaatagacattggctttgttatttattagtttttttaaggtttaatatattatgcaattaaaaaagtcttaatggctgcaaagaattgaaagtctggtagatatttgaagtagtaattgcttaaagtttattgtagctggtttgatcatatttgtcatatattttgacaaaatctgctatttagttcctttttcactcttattgttacattttttatttatcagaatccaagaaaagtgaatgtcatgtgtgcacttgagcaagatactcatgtactaaatttacacatctcattcctttttcttcattataatattttgtggtatacattgaatgaacatgttaatttatttctctgctatttgtttctgtgcattaatttaaaccatatttctatctgttccagttttttttttggttattgcgttgctgtctactgtgattcctgtcagcttatttgttgtgaatctgaaataatactattctttcatggggttccattttaaaaataaacttttctctttgc

SEQ ID NO: 5208 - DNA, 1582 bp, Cannabis sativa
ggcttaattttcttgtataatatcaccaaaaataaaattaaactagaaaaagtcaattttagagccaaaaagtagttggaaacaaaaaagacgactttataatttgttttgtttttgaatgaatgaagcttttcaatttctaaagacgaatgacaaagtaagagggaccaataattatatattaattatttagacacatttcatgtaacctatacgattaattcagtaaaaatatgtatggcttaatatataatgtgaagagtttattgtatgtatgcaaaattataatttgttcaacgcaagttatctaaatttgaaaatcatgtaaggtgatatgatcaatgactgtagagatgcagaagtaagagatctatgactagtgattcaatttttctttttttgtacaaatgatccttcataatctcaattcatatttaaattatatatatatatatatatatacgtggaccatcccaaactttgtcattattagtagctgattaacattgagttggtcatggaaattagtataatatggtgttttaacacgttaaaaagaaaaagaaaaagcaccacctatctatgactatatatatatatatatatatatacgagctggtgaggctactttatagtcaaattaataaccggcatgccattttagacttcaaatcacaggacaaacagggcagccattatttaactattttatgcaattttaaacacacaccaccccactttgatcatacaaatgatttgtcacattttcatatcttttccctgattacttttgacttaattcacttccactacttatagctctaatataataatcacttagtcaaatattcgaccagctaacctatattgagacttcgaattacttgaacctagctcaagtaagaggatacgtatgtgttggaggttttagattcgacttccaaattatatattgttgtaatatataaacgtttaaatcaaacaaaaaaaaatgtatatttaaacttctgtgtttgtgtactcacactgctacatatgtctcgttaaatctttagtatatttgatcaattttaattagaaagtatatgttgttaagtatatatatataataccatttcttccaacgaaggagatttattacatttgttatccaaatttttagcacaattaggttggcactactaagaaaaggtgtttaggtgtcaattttaaacagtcagatattcctataccatcagtttctaagaccgatatctataccaccaatgcaaaattgtacaattttagtatcagttcttaatattctatacacaaaacttgtgactctttataattgactatgataagtaaaacttagattttttacactattactgtctcaacacatataatatattaatctgagatatattttagatacacaaatagtaacaataatgcatcaaaaataatcttagatccaacaacaataatgctacaataatctcatcagatctgagacgagctgccatagcaccactaccaccaccacacgtccaagaagaaatacaaaatcagagagagaggttgagtgatagagaga

SEQ ID NO: 5209 - DNA, 1243 bp, Cannabis sativa
agatgtaagtattggaccgatctaagtggtcaactttatcaaacacgtcaaagaacatatgtaatacatttaagccagaacttaatcatataaggattaagatcttttgatcaaagatcaactaagtgacattgacttaaaaaagatattacaataagtttatgatatcttttcactatcaatatcggtccagtccaatatatagtcaatacatccgatactagtatacttttttgatgctctggaaaggatattccacatattattgtgtaagtaaactttatcgttggttatcacgtcagtgtaaatctagtgcattgataaatcatgggactgaatagtttaaaatatataattaaaattacctttcactgtgatgacatcactgtaattgtgaataaccatatgttagggatttaatagaatttgtatattaaaaccattattataaaaactacatgtaaacctaaataacttctaatcttctattgatagtaaataagattatattgaaatgagttttattcaggacataaaatcttcaataattgtattaggtctattattttcgagcatggtactgtcattaacaattttgttaatattaataaccattttctttatttttatgagtctttatttttctctcaaggagttgattacaatgttgttttggaagttctagagggggtttataacagagttttttctgcctattttcagttgcttgatgaggagttttcagcccaggaaattaaaaaagctttattccaactttcaggtgataaagctccaggttatgatggattgaatgctcacttcttcataagatttgggttgttttcggtaatgacttttgtaatgctgtgttggttgttttaaataataattctaatattcctgttattaattaaactattattgttttagttcctaagaaaaagcatgttgttgggattagggaccttcgtcctattagtctttgctctactaaggttgttgctaaagtaatttctaattgactcaagttagttcttcataacattatttcttctaatcaaagtatttttttgtttgataggcttatctttgataatatctttattgctaatgaaattattactgccatcaataataggaaaggtggtaagattagttgggttgcccttaagctagacatggaaaagcatttgatagggtagagtagggctttattgaggctattatgtctcattttggtttc

SEQ ID NO: 5210 - DNA, 1888 bp, Cannabis sativa
cagcccattacaccagtgacatgtggttttccactattatatcgagctaatatattgtcgtttcaacatgtaaacgtgtcgtatctgattcgaaatatccaaccagtcaatcggtacacgacaaaataaaaaaggaaaaccccatttcctagccatggaagctcggaagaagcttgagtagctatctcaggtggcaagccctgatgccctttcagcttaaatttcctttttatattatcaaatcacatttttgcttccctctgacgcaaactccaaaaccctaacatggaaccctcaccacccgaggatttcgaagattacggaccgtcatcaacacttatcgggtttgatcgcccgcttcccttgctccgtggccccgtcccggttggtccccttgatgattcatccaccggtttgttcgttcttgcattccgtaaccccagagcttgggcgaaagcgtacagagcctgtgagtccaagattatcgaccagtgcgtctctggagccaggatcgggtgctcgatcagcgcctcgagcaagtgcaagccctcgtggtggctgaatctgactggttttacggcttcggatttgaaggagagggagcaatgtgaagagcgtgaaatgaacggctgtttggcggtggcaaaggagaagtgttttggattcgccaaagaacggtgcttgaagtcgtttagggatgcgagggttgtggagaggggtaggggtttgaatacaaagcaggttcagaagttggttggcttggtaactatgggggataagagtacgttggttcgtttgattggattcaatcaattggtttctcatcgagaatttgggacaaggtattatagggccagtgagttaattggttcttgtagtgatattgattgcattcttgatgggtttagtggcaaggaatcatcacagtagtgggatttcacttcgaaaaaattagctcatgtttcacaaaattgaaagcacctggatggagtctatctcggggcagtacacacttgaacctggagctgctgtgtcattgctgaggtatgtgcatttcaccacctttacttaatatttagcttgcgaagataaaacttactctttagagtttgttaattttgatgcatgccttaatgagatattggtatgcaactttcgtagcatttccttgtttatatttataaaatcatttcactaaaattgttaattctgtgaatgcaattggaaactaaaggagaatctttgtgatattgaatataatactctgtgttttcgattaggcagcttctgaattaatgtcaggtgtaattgcatcgcccttttgtattttgacttttgataatgccggagttgtatatgtttgttcgctgtcatggctgtatcagtatcacatgttagcgttttccattcacttgctttattgctagccatgacatccaatcattttcatagcataaccttgatgcacatagatgatgagatgattatagaaatgtgtctttaatatccttttctctatgtttatggtggattacctttgtccaaatacaaccatgaatcactctcacaattgttaatttctattttttaattaactgtctgtggctactaagcttatattgattgcattttgtagtgctttttcattgccggtgactggtttagtctcatttccaatctatcggtactgtctgccacagtttggaggtaactataagtataacaacaattgggtgctgtaggtgctggatttacattgatattgttgccacctcaaacttcgccatattatttttacttatttcattgcaattgtggcaccctctcatccatattatagttgaccacaatgtttggttaccccttatcacacattatagtcaaccac

SEQ ID NO: 5211 - DNA, 1058 bp, Cannabis sativa
atatattaaagtttggagagaaaaattactaaatagccttgattttttgtttgacagaagttgtctaagaagttgtctagtgtttgtcaaaactaataaaagtaaataataagccccctcgattaattttacatgtggcagatctataatttgcatgtattaatttgtctgagagtttttcccatacgccccatcactatcactttcaattttttgtctctgccatgtttctaaaaataccattttaataaatattaaatttataaatgttccacttaaaaaaaatcctataaatgtttaatttttttaggtagcataaatgtttaagtaatcttagtttaaaataatgaaaaaaaatctctgtttttattgaccggggatgcctttattgtccattttttgtaacagatggttgataatgatgatgatcatgttaaaaagaataatttagattttttttaaatgaaaaatgtgatattattaaccaacaaaatctgtttccaaacaacataacaactccataggaacaacagacttcatatcgaaaccacaaccagaaaaaacttggatttggacatttatggctgtcatgccctttaagcttgagacagttctttcataggcaaatgttgtttattaattctacggaagattactaaaagaaaatcaacaaagaggaatgttattggaaaatgacaattttatgaagccaaagagttatatattactgattacattagtgtcaatgggagtagtctgtagcagagttaagatgtttttattaggatttgaactcttaaactctataatatatatgagatagtttaaccaatatgccaaaatcataatatttgtattatcagttttaattataaatactaaccaaaatatacatatttttatttttccattttttttacagtggcaactgccttctctcgcctgtgaatccgcccatgattagtgtctacattttttgtggaactagtctttaattacttaagagactcttattataattctctctaatatataataaattgttacatgtatttatt

SEQ ID NO: 5212 - DNA, 2819 bp, Cannabis sativa
  modified_base (1973)..(1974): a, c, t, g, unknown or other
tgcaagacaagaatatggtgttataaactataaaataccatcatcttcaaaagaggaactgtcagaatcctctataatggccttggccttgcctctagatgtaggcaaggggcgagcaggtccctcaaaagtctagcctctaagcctgatctggagagaagcaactagacctttgttggccaagcaccggtggaaggccctctctttcctctccagattctatgcaatgcaagacaaaggcacatcatcatccaattaaggaacttatccatctctaggataggctccctctgcagctgagactcccacaactccaaaagtaggaggatacaaaccatacttctggaagttggccttactagtcaactgaagtatgttcctctgctccattaagaaagacaggacgtggttctccctatccctaatttgcaatatgaggatagagcgtttgaagaatggcacccactggaactcttagtgtccaatcctctgaaggccataagcaataaagtacttcttagcgtactcaccaactttcagcatggctgtactattagtgtcacccaaccattgatgaccgatctatctgaagtagaagtacccaaacctattttacttcggagaaaacttcaaattaaataatatccgatcccatagggagtaagctgaggccagcctagctccctgtataagacaaacattattgaaaggtacttgatactttttagggtgacttgtgtcggcacatcctaaagtatgcagcaatgtctcagaagtatggatgaagtggcaacaccgccccatgctcaatatgatactctaactaagccaaccaacccaggggaagtaggtgtgcccagtaatctctatgaggtatctcacaatggacacccctcactaagccactagcaagtatcttgctaaaaacatcatcaaaaagggtagaagcgggagagagccaactgtctcccagtgatcttgcatctagtatctcaggcttataaggctgctccaagatgtgttctaagcctaacactaaaggctcaccaagcctgttcagcagatcgccattagcatcgtaacgacccaagggacagttggaaataaaaacacaagtccttttcagcccgctagtcaatctctaaacatcaacatgaggctgagtagcctcctctacgatcctaactcgaccccttgtagccaccctagctacatggaggcgctctacgacaagtcaacttcatcttggccataattacaaaataaataagggacctacgctgttgtcacctcccctatccaacacccagtgccacctgcatagaagagataagggaaggtgagcaacttgacaaagctacaaacatattctagtcaacaatacctaaggctatcttccaggtaaaacacaacgtgcaaggtcaattatcgaccaagtaccgtattaagtacacttactaagacatatagtaagtcctaagttatataattaactataatggactcactactgagccttatacagagttcccaaggggaaccatgcataaggctatagttgtatatgcctgtaaggccgtcacgagaccctagcctaggtcagcagaggaaaacaaactggttgccccattggagccttggccttggctggccagggttctaagccttagtggccgggcagactccttgacctagtctagtagccagctaggaacccatgtttcaagaataggtcaaccagcttatgcagtacatctccttagctggccagaccccttgacagccacccttagtcgaccaggtcttaaacaagacctccttggctagccaggacttgtatggatcaaaacatgtgttttttcaagaactcaaacatgttctttgtgttcttcatgactcaaagagtccagaatcacaacgaatgtcagattcagatttttttcgtctcgaaatcacacattagatatcctaannctatcatgcagatcaaaataccaaaaataaaacaatctaacgtaggaatcaaaggatgttcaaagcaaagaataatgtttatgcattcatgacgaaatcaacctcaagtgaaatagagggaatatgaagcttgcccactacaagaaactgttgaggaagaatgtgggaagcttggatggtcaaaacgatgtgaaaaccccaagagaatggtgcttgatcggtttgaccctctagagagaaggaggagcttcttcaaatgaaaatttctagtgagagaagtgaaatgcaaaaagtaaaaagctaaaagcgaaaagggtattttcccccaaaaaacacttatttagtacatgtgagaccctttcttcacttactccacctacacaacaaagagacaattaaagcagttatttttttacggtaaataagatcagacaatcaaggcaaggtatttcaaaaggctaaaaatacagcaacttctattcagcaaaggcaacagcagtctcgaccgcaccaatatagctggtaagtcccacttatttgtacagacatccacacagggacttgggggcaaatgttatcctaatgtttgcccacctgatgtggcagtgcttacatgccacatggtagtacaactcaccaacaagaaggcgaaatcagtacctaagtagatgggggccctagcactcaaacaggcttcaaatgatagaccaacttcctcacagaagctagcctgccagcctcttgataacaccatgggcggccagcctgctccctgcaggtgtctaaccaaccaaggaaagaacttggcaggattttctatgcaattctacacgtggatagtatga

SEQ ID NO: 5213 - DNA, 545 bp, Cannabis sativa
ttcgacaccttaaaatatcaaatatcaattttcttataaactaattagttgatatgtaatgatgttttacttggtgaagaagaacattggtgttggttttgattttgttttcctatctttgtaacttttggaatattttgcttcaattcatttttaatttagttaaccaattttgagactagctgaaaaaataaaatagaagctaaattgttttttaaattttaattgtgtttttatttgaggttagtaatttttatgtgaaaaaggagattattaaatcaaaatttgagcatattgatgcactcaaaatgtggcaattaaaattttactataggattttagtaattaaaatttgattgaattttataaaatatatatatggcaattaatgcaagtttactttggaaaaaataaatttacggtaaaaatattaattactaatatacaatacttgttttccatatataatcatgtgaaatgtgtttacaaacttccttaaaaaatatagtttacaaaattgtaataaatatttttaaggatattgg

SEQ ID NO: 5214 - DNA, 2247 bp, Cannabis sativa
ataggaatatctacaaccattttgtttgaactgaaaatacgacaacggttttcttttcaaaattcagaataagctatgcaaagcaatacaatacaatataatatgtatcttctatagttctatgctgccatggagaaaaatagtagtaactgcttatgatgtatatgcttttgcaaagtagccatactctcaggtgggatttttacttcttgtgagttcggatagtttgctgaaaccttccttgattttctcaaaatgtcaaaataacagaggccagagtcaacttaaacaaaaactcttatgccttgatgttcttaattcatgcaaaaatggttcagtttgttacctgcccatgaattaaaacaaaataaaaacatatcagtagtatcctatccttttaaattgattcaaatgcttttacagtatagatacgaaattgtaagtagcattttttttttttttgcttaaatagaaagaataaatgatatggatatgacaagcaagtaaacacaccttacatgagtcgaaaattgggcgaacttgttcaaatatttcatctacatttcctactgcattgatctgcaagcatgtatagattagttttagtagtgagcttgagaacaatcaaatgtcgtaaataaacctgaacgcgaatgaactgttagcataagagcataaaaatcctgattaaagactaccaaacaaagattaattcttgacagtacaatatagtagtgagtaaaattcttaagcatgtatcagaaggttaggaacaacagtactgacaaaagataatctccaatctttgaatgtgtcatacaccatacatttaccttgaaaacttttcctttctctgagtagtaattgataacgggacgatttaatgcttcaaaaattttaaggcgttttttcattgtttcaatgttatcatcaactctgccctgtaataaagtatcattagtacacaatgtactatacgttaaaacttgacaaaactgaaaattatacagtaaacaataacctgattgcgatttagcactcgcttcaccatctcttcctcaggacagtcaaagaaaagcaccaagtctggttctgctccagtctacaatgggatggggttagttagatttgaaaatcaattccaggaatctacagagccaaatcattcacatcgaaataaaatttattaaagcttgaaacatttcactgaaatcaaataagaacttaaatatatatttaatgtatatacatctatattaggatatgaatttagatctccaaaccagattcttcatttgatatctttaactttttccttttatataatgttttatcaaatgtaaaaactatttatgatttgagacttggaattaactttggcagtaaaagttcattgttatctttatatcccttaaaactatcgaatatagaagtacaatatagccttttactccatgagagaaaaataaattagagaatcaaactcacaattttttcaaaagctacacggttctcttcacttcgagggaacccgtcgataagaaattttatattgtcacttgattccatctccctctgaataatcttgactgtaacttgagagggaacaattttaccttctctgatagtatttagaatcatagtgctgaaattgaagttggatattaagattacttcaaaacaaatagagaatgttctaattacacatgatcaacaataaacaagaatgagcaatggttacccatattcagtttcagaggcaatttctcttctaagcagatctcctgcactcaaatggttgaaaccataggtttcaacgatcttttcacattgtgtaccttttccactacctgggccccctgagagaacaaaagaagaaactcccatcataaatataattacatgaatcatgaatatatattggttgaagttcaaatcatgaactaaaactttcaaggcatattaaaagcacccaaaagaaaagaaaagaattattgacacagtgaaactgttacctaagacgaaagttatgaaaggttttgcctgcaacaaaataatatgactgcataagttagatttaatgatcctaaaattccgaataagcataagcaaaagcaaaaccgcacaagcaaaatcatgcaattgaattttcatgaatcaaacttttagaaaagtattaaaaagcaatacaatacacattgtataggaacctctgtggaaaaagtttcccaaaatttgaaggtaaat

SEQ ID NO: 5215 - DNA, 818 bp, Cannabis sativa
acccaaaaacaacaattaaactttcttttattttcaaataatgatgatttattttttagctccaatttttatttttcatttattgattcataattcattatcctatccgttataaccaaacttctctagctctagcagttaatgattatatttattatgtatattttaatgcaaaattgatgagagataacataaataataaaatatattaatgatggaagaatctgactcactgagtcgcattattatatttatataaataatgtattgttaaaatatcacaattatcattttactcgtatttaagtttttaaatttaaatttttaatgttgaaattttttaaattattaaactattaataaatttaaggtgttatttatttttcatagttaattgtcaatttaaattatttatgtacatacttttgtacatgtaacacgtttatattaatacacctaatattattatttaaaaacttactgataatcttaaataactacaatatacttaatcattatatataactaaaaaattctcataaatatcgaaaatgtatcaaaatgaccattttaaatttatactttagatttagagtattgcaatggggtactaagatacttagaacctctatgacatgttgtcttaacattggttagcagtcttttataatctttattaaattaaaataagtgaaattcgatattaaattatactaataattacacctcatagtagtactaggcaacattagtgacttttagagcatctccaatgaagtaataaaaaagtggcgtattgctctattttaacatactta

SEQ ID NO: 5216 - DNA, 564 bp, Cannabis sativa
gcacccaggttgacattcaacctaatgcgcgtggttttgtcactcaaatgccaattctgttctgggcattcttcatatttttgtcccaaacgggggagaagccctcgtacctaaattaaaatatgatcgaagtaccaaaacgacacccgaagggcctagtaacaagcacctagcgcctaggttgacactcaacctggtgcgtttgctctgcttgaccaatttcaattctgtcttaagcatctagctatttttccatcacgaataagatctctaactcgtggcatgtcaaattcatactttgatattcaccttttcaataaagtgaaatatcgataaattagttgcaaatcggacaatcccaagtcacctgatttcacgaaagagcgaaacctccgagaattagtaaacgactttacctgaacaaagaaattagctaagtgatggaaccatataacatagacttcataaaatataattttgacatgattttccaaatttcaattgtctttattaaatggtttgcgaacaaagctgtgaatgtttttggctaaaagtgtttgttct

SEQ ID NO: 5217 - DNA, 2934 bp, Cannabis sativa
  modified_base (1217)..(1227): a, c, t, g, unknown or other
gagataaatcaataaattgtgtatttttcatctctaatcacataaaaaaaaattatgaaaagactgaccatccaggcaacttgcaaatgtacactacaatgacgcttgtggcagagcatcggaaataaagcaagggggcaacacagacatgttgacctagtttggaaaggctagatctaatagttacaatttaaatgaagcaagtgaattattagatttagatttttcttgtaaatggaataggaatatttcatttaccttgcataatttaagaattgatgtttcaatattgttttgcaatctggtttgatatgggaatatattgatcgaggtggtagagccgatattatgagttttggaaaattctcataaatacaagaaaattgtgttctctctctgcgaaaatgctgaagtaatgttgtagcaactctgtagcagttaggatttacctgactagggggattagttattcaagctattttttaatatatcacatttcgtgcaagcaattttccattaacagtagcattatttaaagcaagtttaattacaatccttttaaatttgaataattgcttaaccattctcatattatttttcttttatttaaagttgtaattagttagtgttacatcgtattttatttgcaatctctgtagagacgattttatttactattttattatttgtttaactgcatatatttgcgtacattaattttcactatacaaacctagctcaaagattgaaaaacaactagtactaagaccggataaccacttagtacaaattgttcaaaatcaattctcttaaaggaaacgacatgcacacaactatataaagcatagtgcatcgagaactaccaaattttaagggactttcaaagtgatatttttggtgcactaatgttcattgaaattttgtgtgtttttgtcatatagataagttgaaaaatctattttttttttaaaaaaaaaaatagtgtcatataaggtggtgtttgatataatgaaatagtatatatagtaatgtaatgaaataaaagtggtaataagaattgattataatgtttaatttgcacttgaaataacattgaaataattaaaaattttgtgtttagcttggtatgagaatatactacaaaaaaattttagttacagcataaattttttgtgactaaatatcacttttagtcacaacaaaaagttacttgtgannnnnnnnnnntatttagatacaaattgtcacttattttgttttagtcacaataaatattgtgattaaaaacacatttagttataataaattgtaatttttgtgacgaatacttttaatcacggacttcttagtcacaacacaataataataataatttataattagacacaccattttctttttaatcacaattttattgtgacgaaaataaagatttattatagtcatataatagaataaaaagtatatggactaaaataactttattatttttattttataattataaaatattcaaaagaaggaggaatatagacctttaactttttttattaaagtattattttatataatagattgtaattataatatgactttaacatgtaatcatcattacagtaatagattataaaaattaaaatggaaaaataaataatataataggatcacctaaatattttcataatatacatcggtacttcagtggatctctctcggagttagaataaatatatttttgaacttttctttaaaattaaaagtgaatgttcttgcatgaatctcaactatcacttgttctgattgtacatattaatcgttttgaactaaaataaaacttatcttattcactctcaataattacatcttagtctcgagaacataattcagacaaaaggaaaatagaaaagtttgtttggtttggtttttggagagtacatgtagatacattattggattattgactcaccccactagccaccgttgttagtactgcccaaacagattgactaaagtaagaaaaacactaattacaattgaccctaaagaaaaaaaaaaaaacatgtacactaaaaaagccgaggaaccgtgtgcgcacgttagaaactgagtactttcttgaccacgtgattataaatataagatatatgagaggaaacatcgttgagtcttgagggcgagggagggtgcgcaatgcactatattataaaactattaatttttagtgttttaaaataacattcacgtgtatatatagatttatttattgcatggatgacttttgactccaaattaatcgtacgtgagccaacaaaaatgttggtttttaccttccaccacccttccttttccacgtttgctccactttatactatactcaactcaacaacactatttcctatatataatatacaattaatcatgactaaattaaaaaaagtaacaaactttcataagtactacgaaagaaagatactgtttatagatgagtattgttattagataccagtagtgcttattattttctgtcacgttgcgattggttagcgatactccctaaaagttattatattaaactttatgagactcgaaacttagttggactaatagcgatattgacacataagatgatactaggtgctactggtgccctttactcgtttatagagatatatataatttgagtgcatctctggttttgtgccatcacatataaaattgaggagtattattagggacttatattttaataaaaaaagaaaaagaaaataaatgtattttaattataattattttcattagctaataatatttaatgagatgcttagattgacatatatatagaggttataatagatcggacagtacggccagctatattgagaattcaagattcgttcgtggccgaaagctaggttgaatatttggtcattggtt

SEQ ID NO: 5218 - DNA, 2408 bp, Cannabis sativa
gtaaccattgaatagtcacacccaattgtgtaataatatacaaatgttgtttcttttggagaaaagtgccaaataagacaaagaaaagctatagcctaattcatcataaactcaatctgtagagtatccaaaggtgaagacaattaatgcaacttaaaccagcttccacatatatataattgtattatctcaacttggaagaatatattgttagttgataaggaccgaatctctgactcacactctcaaaaggattgaccatgtatatatttatatatatatatagcttcctacaatcactaattaacatatatatgttatagctgattttcttattaatcacaaaccagctaatatgatcaatattcaaaacttggtcaagctcaaaaagcatgaaatcaatgacttatatatatatgttatatacatcggacactcataccaagcgtatctctgctaaattgcaaaacgccaaggaagaaagtaatagaattaatgtgttctttctttaattaattatttatcatacaatttataattaatatttattttctccaaaaatggcacgcctagctagctagctaagatctagcatagactgatcataaataatcataatttaagaaaaaagaaaaaggaaaaaataaacatgaggcttacacttgagctatagcagagaagactttttgtggtcctaactaattatataaaatatgatcagtgaagaaagactgaacatacagttcacttaattgtagtcatgatctcaaaataaaaagtttttaataagtaaaaactatttttttatttgcatgcatggcagcagtgattagcaatagcagaacacctttgttttctataaagtataataagtaatgtacacacaattagctagtctccccttgtttgcttaattactctaattatatatatatatattcatgagttcaacactaatgaaaaaaaatacaataaaaatcatttcacattttaaactttttgaaaatgcagtactctactgtacacactggttgtttatttatttatttttgtttttctctttctctgtatacataattaataatttactaatttaaactttgtgcactcctaagttcctgtctaatgccagaaataaaagtaataatatataaattatatttataatatctgaaccctaggaagtttgacttgggtttgaaaagagcagagttctcttcctcctatataaaacccctcttatgctctatctcatatttcccctgatctttttgttgttcaacaacaagaattatagcctactttttattaagataaataaaattaagcaaatagttagagagaaattagagatctttacagaatggtcagcttattctatttaggccttctttttctcatcatgatacatattgcccttatggactcatcctctgcatatgctcatcaatatgatcaaggtaattaattaatataataaatacatatatttctttactttattcattcaagatcaaccattaatgatttatatatgatctgttcataatattaattaatattcatgcagataattcatcattattgagtggaggaaggaaaatgatgatgatgatgagagaagagaacaataatattgctggaggagctgttgctgttgctgttgctgggatcccaaagatttcaggtgcaagtcatgatgatattgatggatcaaattgtggtgggcaaggaataaagaggggttttagtcatgtaaaatgtaataaagtgcttgaagaagatcatgatgatgatcagaaaagtattacaagtagagatatggcctatactaataagaaagtagtggtagtagctggttttgtggctttcaatgctgattatcatgggcctaaacgtcaccctcctaaacataattgagtcaaaaaaaaaaaagaaaaaaaactagagatcaaagatgggatagatcgatcttttttgcttaattatattaattattttttgtgcttttttttctaattgtaggagctttagtagttgatgatcacatgtgtacaaaccttaaacacacacatatatatataaatatgtagttgtatgtatgcaaagttttagatgttggaatcatcagattgttctttcattttaattagttgtattcttacaattattattcattatataaattatttgaagccaaaaaaaaaataaaaaaaaattagttacatgttgctcttgtatgtccacaacaaaatatggtttagttttcagatatatttttgctcattttattgcaggaaaggatcatataaaagcttcaaatgatcatcaatattctcttttaggaatgtctcaacaaactttgaactctcaggtatgtataattggaaatgatttcaaagacatgt

SEQ ID NO: 5219 - DNA, 1578 bp, Cannabis sativa
gaaaaaataactttaatatgcaacacaatagaacaagtccagttcaatctctgaaagaacttgtccaattcgtagtcctgaaatcctagtcactactcaaccctggtgatctcgaacaaccccatcaaaaccatgtcttccctccccgtcaaacaatgcaacatcaatattcactttgagtttttcataacctggtttagaccatagctcaaccctatttgaaagataccaagtattaaacgaaggaaacaaacttctttcttgagcttttctccactggtgaagagtgatacgagccaaattgacaacgaactccacacgactttttttacccttcacaagagttgatttcgtgcgaaccaaatcgcccaaaccaacattactgccttaacactttgtttctcacccagtcatgagaacaagtaaagaaaccagtccccaaacgaccttgcatcaattaaaatcatagccaaactcgctacctgccaacaattttgcgcaaaatcacagacaactaaacagtacaaaattgatccacctgccccatggcaaaccgaacacaacaaataaacatccacatatttagtcttcaaatgaactctcgtaggaagacacctactaaccgccctccacacacaattttttacctttagaggaagttttaattcccaaaacttatgccaaaatgctacaatctccctgttgacattaccctttcgattagaggtgtgcataaatcaatccaacccaatgacaactaaccccaaatattggacatccaattctgatcggatgggattgaatgttattttttgaatatccaattggatcggatctgatgtttgatgaggtgtccaaaaatctaatacatccaatctaactaaataatatttttcatttagtttgaatgagtggttagattttatgttgttatatgaaaaaaaaatacatgtatagatgaaaattaatattattttttttattggatgaatctaattcaatccaatagatattggatctaaaataatattaaatagattcaatccaattcaataaatactagttataaaatattaaataaatccaattcaaaccaataaatatacatgaaatacatttgttggatataatcgatctaatccaacatccattggatgctggatcaattggatgactgaaattaattgggtcagatctgatggtaaaatttaacatccaatatataattagatcgaatctgaataggactaaaaacattgaatgttgtaatattccaaaaacctaattatgaataattaggatttattatatataatgggttaattagaaaaggatgagtaggattatgaccatgctaatctaattcagcgtaaattatgaattttgtcataagtggataaacaagtataatttattaattatgaggatttatttagaatatgtgggtataatgtgagttatttattgaatataaatatttttaggtttgacgaccttggagactcgataaaaggccaaaaatgtcacaacaattttaattagtattttaatgggattattgagataatttggtgttag

SEQ ID NO: 5220 - DNA, 611 bp, Cannabis sativa
atttttcttcctttactcattcaagttcattacttttattcttccttttcttgtgacaatttattcttttgattatactttcttcatattctactttcgtttttttcaaccaaacgaacatagcccaagaccaagaaccataactttttctagagagcaagtagagaccaaaagtgcctcaatcacaaaagatctcaccattttcattatagtccaaaaaccagaattgtcacaatctaaaattagttgtgtcccatcttaaaagagtttcaaagcttcttctgccacgcttattatttaaaaaaaggttcttaatcacagatgtcaacaaagagaggaattcatacacttttttcacactagataagaagtggctaatccttctcaaaactccattgttgtctttgtcaataaaaatactcaaaaaaaattttgtcttatatattatctctttagagacataaaggcaattcccatttcggttttgccattttaaccttcaattcctttccctactcgtgtaccttttgtagattgtgttaatacttaatacaatacatctacttctactgcatgttatattacaaaaaggatagtatagtttttaatta

SEQ ID NO: 5221 - DNA, 1540 bp, Cannabis sativa
aatttttttctttattgcttgttctactattttggcagataagcctattctctattgtaatcgttgcttgttgaatgaaagttctctccataaaacttagcaatatatatatatatagctggaaaaataagactaaatattctgtactcaaattatttgccaaagagctattcaacaattattttgtataaaacttaattaatttaaattatatatatgttgtaacatttcttgtagtataaacatataaataataagaaaagcttacatacaattcaatatagggaaaacaataaggttacaacttacaagtacttacaagctcccatctctcaaaccctaaccctagctaatatatatgtatgtttttttaattcattcactaataattcttgcaacaataacagttatatcgtcgaactttcctccagagaagggtttgccggccttggtggctgcttcagaaaaaggactctttcgatctttcttcaaagaataatggcgagagaactccgccaaccaaaaagcactactcagacttgattgtgtcttcaagacttcttctatttccgaaacaaacatgttgtcgaatattccatcagttgccaaaacaataacatctcctggaaccatctcgattatctttactgtttcagcacagtctggagtgtcacaaccctgagagtttccaagctgataaggtgtgttgaatcctcgttgttgagtttttgacctataaatgagctcattatttctaaagatgatgaaaccgctatctccaacattaacactttgcataactccgtcgttatgactaagtatgcatgcagttgaggagccttgaatctcagccttagcgttagccatgaaagcttcttttaaaatacttttgggatcggtgatgttgttgtcaacaatggctttgacagagtgattcatgagttgtcgagcatactcaccagcatcgatgcctcgactagcccaaccaccaacaccatctgctactccaattatttcttgttcttcgcaaatgaagtgagaatcttcacctataacatcatctttaggtatgtaatgatattcacaaaccattttgattttcttcttattattatctgtgatctccatctcaaaatccatatccactatgtcatctttgttcatatccatatttatcctataattaatataatttttgtgtgttaattacttgatctcaaaagtacgtagctagggttaattctttaatgatagctataatattatgtatactaattttgttcgtagtttggagaattataagtaataatgatttgaaattagttattaattatgatttatatatgttttctagaagagtgtactgtccgtacatctagcttaagatttttggatcagatattatttataattttaaataacgattttatttgtttttccataataataaaacatatcttttatccaataatattacaattatttaaaataatattctttctcgatttttaaaataactaatattttaaataagtaaatt

SEQ ID NO: 5222 - DNA, 1710 bp, Cannabis sativa
gccatgcctacgtcggctgcagccaatgctggcgagtcatttattccgtcccccaccattgctactgtcaaccctttcaactgcatcattcgaaaacacatgaatcatttattcaagacgactcgattcttgattaaattccttaagggttagttaaaaaaccaatttttcatgtttggtatggaaagaattgtacaggaaaaaaattgattcaacaaaaaatttcatatcgaacatgaaaaattgatttttttcataaatatttcgttcatttcaatcaaattttctccaataataaccattgtagagttgtgccttctgagttatttcgtgttgagaaaatcactcaggagacacaactctacaatgtcgataattcagaaaatctcttttgtcaattccttaatatattttgacaatgtaatctaatttacagtaaaaaatgtacctgtaattccttgatcttgtcggcttttccaactgggtcagtctcggcgaaaactgtctcaatcccaatctcctttgcaacagcagaccctgtggccaagttgtcaccagtcaccattatgctagatatgcccatcgagcgcagaaaagttatgacacgcttcgcctctggtttcacaggatcagttacagcgaaagctccagcaacttccccatcaatcgcaaccaaaacacatgtccgagccaggtgctcgttttctgatatatatttctcaaccttttcaccaaccgggacattaaaagagcgcatgagtcttctgttaccgactaaaaccgttctatgaccaacttttccgcccactcctgctcctggatgcacctcaaactctttaacatctgctatagattcaccatttgacccgaacttttctcgcagcctcttagcgtgcacaaccacagcttttgcaattgggtgttcactgttcgcctgcatagggaaaaagacatcttacaaaagaaactccaaaaattcgggctgcagagattttcttgtagtaattcaaatctctaaccaaataaacaatactgtgtgtacttatttggtaccctgtattttatttccgtacatatttggtactctgaactcaaattggatcaatacaattttatcaatacgataactatcttcaattatatgagttccaaattcaaattcgagaacaatttggttgataaatatgaaagcatgggcaccaacctctgcagctgtggccatgtcacacacttcctccattggaaagttagaaaagagcacatcactaactacttcaggctttccaatagtaagagttccagtcttgtcaaagacaataattttgatctgtattgagaaccactttcgtgaatacaacaactcaattgagaaaaactgtatatcatttaaccgaaattatcatcactaagcattatcagcattaccttgtgtgccttttcaagtgcattaccacctttaataaggacaccttgagaagcaccctttcccgaggcaaccatgaccgctgttggtgttgctagaccgagagcacacgggcaagcaaccaccaaaactgatataccgaattgcagcgcaagctcaaattcatccatgtcttttggtatccaatgtttagggaatataccaagctttccaggtataaaccatcccaaccaggttatgatagccacaataacaacctgatgtaacaaacattatgtcactcacca

SEQ ID NO: 5223 - DNA, 549 bp, Cannabis sativa
gtttagtatcttggttttagtggggtaatatttttaaatatttggaatgttgggagtatataggattatgagtttggaccatattacccgtagattctaagttacttcttagtaaaggaaaatatcaaattaataattttatcatagtttgtcttttatgaaatagtaaattttatagtaaatcttaaatttaattagtttagattaaggtgaataaaagataactattttattattatttcttatctgaaaatcaaattgaaaatcaattctctctttctctctcttcacattcggacctaaggaaactttggggggaaaaaaatttaaaccaaactcttgagtgttggcagcaaggatttgagtagttagcaatggaataacttaagctaagtatctccttcctctcttctttgtaattcatagcaaaagagttaggttttcatagtttttgtgagtttagcttatgtatgtttgggttgcatggaattgtttttttaggttgttttaaggttattcaagctattttaagcaggtttggttggttgt

SEQ ID NO: 5224 - DNA, 701 bp, Cannabis sativa
tcaaacaaatattacatatgtacaccaaatttatgatcagatccattatgagactactggaccagaaatttggaaaacctccggtgggaaagttgatgctcttgtttgtgggataggtactggtggtactattacaggtgctggaaaatttctcaagcaccaaaaccctcaaattaaggttgaatcattttactattctatttttttgagaaatattcttaatttatatatattaactctgtgacactaattaatgttccttaatttgttttattatatggtttagctctatggtgttgaacctgctgaaagtgcagtcctgtctggggggaaacctggtaagaatattgagaatcatatgtaactatgattgatattaataatattaagtactataacacttttttttttcttagtccttataaatatataataatttgtttggtggccttaacaaatcataaaggtccacataaaattcaaggaattggtggtgaagttatcccagaagttctggacatcaatcaagttgatgaatttgttcaagtatgccttcatacagtacatataattattattatatttcattaatataattatgtgtaagcttttgaagaaaaaaaacaattagtacacataaacatcacaaatgtaccaatttataattctttggattgaatcattcgttttcttaatattgt

SEQ ID NO: 5225 - DNA, 1214 bp, Cannabis sativa
tatgattttccatgggttcccgacttgatattcagaggcaacattctgtaaggaatacgcttccaggtgatgggtccaatccgagcaattttaggggaggccttccccaatatccttactgtccttaagatatagggtatttaatttcttagatttcttttttcttttcttttccagtggatggtctcaacgacgagtttaatcttgaggtcatggaccttgaggaagtaaaggttgaggctccggcagagggacctcaacaagatcctacccttgaagctgcttttaaaggaaattaaaagaaaaccaagacaaaggctaaggtggaggctccacccccagcctcaatcgtgtatagctagtacatttgggagatggattaaaacgtcaacaaattcaaggtgtatggcatgatggagaaattttctactgagggaggagtcagtaacattcctagactggtgtggaacaggttataagtcacaggagaatcttcttcctgaagcacagatgggttcaacgcctggagctgggcccacatctcaagctgggcacacttacccctgaggacttattttgcgaaacactacacaaagatcagaattgctcttttccagttgattccatcgtcttataagttgttatatgggtggtacgtgttatgtgagatggggaacgctggagttccaagtccaaaagagattttgtactattatgacatcaagcctcaacccatttgtaacaaaaaattcaaggttgggttttacaaactgagaagtacctagacgtgtgttgcctatcagcacaacatcacattctcctaacctccaggagtactggtttttctccactggtttcccaatgaagagggtgttgaacctctctttggacttcaaaactccaggtaagaacctttttcctttgtctccatttaatattattttctcactttaatttatgactaatggaatttttctcatttgtgacaacacctatacctcaaactcttgtgagagagtttgatgaaaatattgaccctaaacaaccccattccggatatcgctctaaatgtgagtaacctagttaccactaagttgctctgtgaatatgggcacatagccaaattttagagtgtcaataatatcagccataggggccttggttacatttccctggaggtcaaggaaaatatcgtcgttgggatctctcagatc

SEQ ID NO: 5226 - DNA, 667 bp, Cannabis sativa
tctatttttaaaaacacaaaataattttttaattatgatctcaaacatacactaataatgcttccatgatttctaaactgaagatttatcatatgcaaaattaagttgggttagcaagattgtttatttttatttattactttatttttggaaacaaaggaagcggttagcatgattggtagaagggagtaacaaaggcactatagtcgttatgtaacccaccgatgcagatagccaaatagatgacatgatctttgttactcacttgttcactaatatattaattaatataataaacactctcatactaaatatcctagttatgataattttttaagtggggaaaggaaaagacaacaactaaacaacaaaaatggtgaccaaatttctcacatattctagcaaattagagtcttttgctcctcaacataatattcaggaactgaatggttgatgagagtttcgttttccttgaatattctctcccttgccttctctgcctgcaatttccacacgaagatatattaccaaatataatatatatttatatatagtataagtttagattactgtgctataaattaactcaataaataacacacaatattatcggtataatttttatcaaagttgtcattaaaattatgctaaatatatataatattat

SEQ ID NO: 5227 - DNA, 1262 bp, Cannabis sativa
gctaagctcctttcccaagtgttccaagcattcatcttccgaaaaaacagcacagttatcaaaaacaaaacacaacccaatacatataacacaatagacaatagggaaattgaggaataatgagaagaagagaaaaaatgaagattccatttctttgctatttatttcaaacacctcaacgagctagccatagagttgtgacttagcacaaacaatcaaaggatttgcatattgtaaattttgttaaactttactttcgggtaaagttcaaaactgtttgttgtaccttaatgagttttcggctttgtttggaccttgaacattaacatggaaaaaatttaagaagggaaactaatttgaaggagttgtatgtgtaaaggagtctagtctagatagaactgtactcaaaaatgtaaaggagttttaagtgtgttggtggggtttgctcctttgtttgttattggttcggtttgattaatagaattttatttcttgatataaaaaaaataatttagaaaaaaaatgaaagataatgtttagcataaattttcataaaatcccatgaaaaaataatataaaatttgatatgtagttgttctaaatttcaaaaaattataagttttaatttttctaaaaatagaattcttaatttattgattcaatccagagaaaatggaatctattttccttttcttaaaatcaaagctacaaacaagtcctaaatttcaagagcaacatttttcttctaaagaagatttcagcttaccgatatctttatctgttgaaaaaccaacatttgaccactccgatcctaattcctccattcttctctgcaatttcccattccattccattataaatacaagataatgtatatataaataacaaaattaaatagcaaccagacctggaaatcgagtgcacaatcctcgagtaatttctctgaatctaaaggggataactccgatccatcttcatcaagaaccctaagcatgtcttccagctctctcgctcgacttttacatacaaaatcagaaaaaaaaaatcaaaaaatttataaacacaaatgagttcagattattacttagtattattaatagaaagaaaccttcgaattgcttcgagctcaagcggtggagctgacgaagaagaagaaggagcgatgtcaatggagttttccatagctatcttcaaatttgctcactgtgaaagtactcttcccgcccttttcgagagaaatgctcagagaacgaaggccaatc

SEQ ID NO: 5228 - DNA, 1014 bp, Cannabis sativa
aatcagttcgaaaaatttgatctttttttgagtttattttataactaaaaaaaagagactattgcattagctcgtatacctgcatatgatgatacgcacacaataaggcctaggtagacgaaatatagtgagtactgccaaaaatggaagaaatagataattaatacatgaatcagatctgagatctctaagttcaatccaaaaggcttagttctttaattcaaagatatagtaagtgagtagtgagtgtgtcattcattgccaaacctttgatacttcatcagtcattttctttaaatccatttggtttttcccaaaaccattgaccatttcaccaaacaagaggaagaaaataggcatggaggagccatggataacagctcctatacttccagttgtcatgagaatccaatcatacttgtctgcaaaacagaaaagttggtaaaagggaagggtttgctccttcttcttctcagcttctggcaatgtcttcgcctgatcattggtctccgccattactactagttatgctggtcaaaacccagattttattttcttttttccccttaagtgggaaaaatggtaaagtagagaactgagtgatcagtaaagttggttcattttcaccattagagaatgggtttgttgtatttgatcagtgagaagtgtcaataaatgataaattttttttcctgggcatagaaatacaaaggagagagatctaaattaagaagaaaaaaaaaatcttagcttttttttttgtttgttttttttgggtgttgaagaagtgtcaatgtcgttttatagtttcatcaattcgagacagacactataaataaacctcagtgagacagagtccctagagggctacgagagcttcgtttgccggaaaagaaatagaagaagaagagaaagagagtgttgtttggaccagtggtcaaagggacctgagagagagagaaatgaggtttggagagagacaggtggtgagtgtggtatttttatagtgaagag

SEQ ID NO: 5229 - DNA, 2227 bp, Cannabis sativa
tttttttttttttttgtatttctcaaatttttttagaacatcttaaataactataacttacaggaccatgagttgactaaaaatatatttcagataccaaattagataagggtcaggggtgcatcagtacatttctttttaagtggtgcattataaaattttctaataatttttatagaaattaaacctccacaaaactaaataaatttactaaaattgattataagttttatttaaaataagtatgaatactttttataacaattaagcccataaatagcaaaaattctaagtctatttatgtgttttgtacatatttttgtaagctcaccctatattgaaccctaccctaaatgtacactttaacttgtaggaatgctacgtgtgtgattagtttataataataaactattggttcagataaaatttaaatttaattaaaactttactaaatatttttaaatacataaatcatggcattataacttttaaagtcagggatctccttaaatttcttataaaataataccaagtacagttttattccaaaatacacttataagtcaaagtgtcataaactaaaatttcgataactcatcattgtgagttggatgagatgatatgtacatttaccggagaagacttctaactcatagttttcctagcttattcttttccttacctgcaccacaaagcacttgtgagtcacatatgcttagctcgaaatataataacactacatcacatatcagtatacaaacataagtaataatacacatgtaatcataatcaagtattcacatacttaatccataagtagaaatcactctacacaatataatcattcattaataccacatatttttctaataagacaaagtattattgttactttatacaagaaccattattatccgatatctaataaggaaccatctcttataacgttgcttaattagacaatcaatgtcagtactgttacctaatgagataaccgatatataagaaaccttacaacagtttcaaaaatagagtagtaattttctcttataccgttgcctaatgagacaactaatttataagaaacctaacaacgatttcaaaatagagtaataactctctccaataaacgataattacagtatcacattttgacatgctaggtggtacaattgtacttttttttacttttaatccaaattcaagcgtgtcgatcaacttgagtagaaatcgctcaacgatctggggccctatgtcacaacaacggtaaatcgataaataactcatttgaacctgtgctaagacttaaactcaaaactaaaaatttttctatcaataaatagcatggcaataccctaaatatcgagaaaacataaaaatctaggcacccaaaaaataccccaaccaagtaatcggatccccaaacagttcatcgttttttgggatcctgcttggagaaacagttcaccataactacaaacttgagatttttcatttcaaacatacctcaaacttcctcaaaacctaccaaactttctaaaattgtcctaatatgagttctaaacatgtatcgcaactcaaatagcacaactatggcaaaaatctcaattcaccattgttgagtgagctttgattcctaaaactcaaactcacccaaacactaactacaacagctaaatctatcaaaattcaggataaaacttaacatacaaacaattgtaaacctaaccaaactctacaaaacctaatccacaaaaaattcatacaaaaccaaacttaacttaaaattcaaaggagatgaggagaacttgggttacattgatcattcctttcaattcaacactagtacttctaacaaggttaaatggctgatttattgaagaacaagctctgaaaccttatcaaaaaaaaaaaaaaaagctctgaaaccctaagtctccttgagtctttacttagctgagagaaagatagagatattgaaagagagagtaactttgctttgttgtttatcctcaattgaactcttaattcaattaataaaatcagctcaaaattcacattttagactttagaggttgaactaccttttcttggctattaagtaaactccaaaagttaagggtaaaatggtcataatcaaattcctcataatatttcggtaatatcaattaatatcaactataacttctcgataccacattcacatactaataccgacgtgatattt

SEQ ID NO: 5230 - DNA, 558 bp, Cannabis sativa
gccgatcttcgaaaggggccattgataaactttgtccgattatcataataacaaaacaatttcaagaagaagacataaaaagggtattacctctagcttgttgaggaataactactcttgaagccatttcttcttctaaaacctagaagatcttccaaagtccctgttgaaaatcttgattggcaaagacacaagaatgatcgatcttcttctaggtttctctctttatctttagagatcgctcccttaatgaacacgtatctctcacacacaaggagttctacgaatgcggtaaagaaagagatatcccttttgaagctggaggttcagacgacgaatcgttccaacggtcgaatttttttaaatttgtgaccgttagatctgtgaccgttgtgcgattcaaaagttaccgttctgtcaaaggccaatataaaaagaacttgggacatcttagcagttaacggaatcaataggcaacacgtgtatttttttaactaaatattataaaccagagcttgttttcttgaaaaagaaaaaaaacaaactcaatataaacca

SEQ ID NO: 5231 - DNA, 1210 bp, Cannabis sativa
atatacagtagaacttctatccaagaatacatttggaccaagtaaattatattctaattgagaagttatttatactaaaaaatattcaaaccgccataaaatgtcaatgtaacaattataatagatttatgtttaagtaaatatattatttatacatatattacaatttagaataaaattattaattctacataaataaatttgtaaatatattttattgaaatgtaattattcttatatagatgtatatcttgttaatacgggacttataaaatgtataactaatataaaatttagagattaattttttataataaattaaaaattatttttaaataaaatattcttaaataaatgttctactgacctccttttgtaaagagatgtatgaaaccactaagctatgcctataaataaattaaatattttagaatttcaaataaattaggtttttattttatcattttaatttttacaatagctattcattagtaataactcaatgtgtggctatatagtaggtatatataaaaggccataaacatgtaattcgcacataattgccttaataatgcgattacatatatttttgtaaaaactagtgaattttctaattaaatttattttatttttaaaactcataaaaagtgcaaggtttgtatcccatcaatttttaaatagggagcccccctcccctattgtattgttagggacaaatcactacaatgtaccaccctgccaaatcgaatagacatccctaagcccaagtgagttgaccaaccaagctcgtcgagtcattaaaccaaggatgctggatggagtggtattagacagaagaggccgcgtggcaaatgtagtcaactagaatcaagccaacaaacctctgtctgagctcgaactaagtttgcataaaattcatcttttaacatgagctcgaagtggttccccatctgtattccaaacaaggaagcaaatgataagtaattgtatgggtttatcaagaatcattgtgtttgaaaagttggctacattacactatcttttttgcttataaaaatgctaattacacaatactaacctgtggtgctaagttgatttagtattgctctaattagttatttcctgatctggtatgaatttccgggagatacaaaagcataaaggagctagttgtcggggggaagggttgtcggttcctaactctggatgg

SEQ ID NO: 5232 - DNA, 1295 bp, Cannabis sativa
taggttcatatagaaagattaacatggaatccgaaactaatagacatattcttcaataatagaaaaggtcaaagataaatgcgaagaataaatatgtctagtttgtgtgtgaattgtgtatatacatatatcattactcataaaaatttggcacgacacgacacatattattgatgggttggcacttagcccatccatatttacagcttggcttgtattttttttgaaaaagagaaagacgacattatctaagattgacccctcccccaaaatatatagaaagcctcacttgtggcggaggaataccatgattgcaagtgctatatcacaaacatataaaacatttgaaacaaaaccaaaacaacgagacataatcaattcatgtactattaaaccactaatttcttttgactacttatattaaaccatattagtttaatagtacataatcaattcatgtactattaaaccactaatttttctcaaccactaatttcttttgtctacttataatcttattctaatagaggtgtaatgaaagggaaaataaataaactaatcttttatcatagcgttaattgacctccacttgtgttgaaaagtatctcagcttctctacatttaagtaaatcaattaccacaattatgaacaccaaacaaaaaatatgtctaattggctatggatagtactaacattagtaatatttctagttggttatgttctaagtaataaaaccaaggaaaaggagaagaatctcccacctggtccaaaagggtatcctctacttggaagcttgaacctactaggcaaaaaccctcatcgcgatttgcaaaggttgtcccaaaaatatggcccgattatgcatatgcagctcggcctaattcccactattgttgtgtcgtctcctaaggctgccgagctttttctcaagacccatgatcttgttttcgctagtagaccacctcacttggctgcgaagcacatggcttgggagcaaacgaacttgtcattttctctatatggttcttattggcgcaacatgagaaaaatgtgcacaattgagcttctaagtagtctcaagataagcacttttagagcgatgagaagagaagagattggtcattttattgagttcacaaagaatgctactactaatcgtgtggcagttgatttgagcgccaagattacagcatgtaataccaatatgagttgtcggacggtgtttgggaagaagtactctgatgaagagttcgatcctaagggttttaatgaaattatcaaagagttgatgtac

SEQ ID NO: 5233 - DNA, 808 bp, Cannabis sativa
ccaacagttttatccaagtatgtttcttaattaattttatttctctttactctattatatatgatattatgagaagattatgaaaactaaattagaattcaaaactcatataatcctaaagtatatatattaatttgacattgaaataaaatcataaattacttaatcttttccccaaacattatatatataaataataaatccaaagcctaaaaataaagaaaaacatattaaatctaagcgcaccatgaaacaaatattattggtctttgagtttatacacagtggagtgaaatattaataaaattcagatttatagttttgactctttatactctcctttctctttcaatttattggtttgtgttaccgtgtttgatttattaaattattatatatggtataattagcactcacttaagtttgtttttctttgatgtgttatttcaattatgatcttactatgattaataaagtaaaaagttttgggtacatagtttagtttatctttacattaatttgttattcattattgtttcaactttatataactcaaatattattgacagatggtgatcttgaggcaatatgaagaacaagaatccattaacttaaaatggatatgtaggaatataatgactaatatttgagagagatgaggatttattgaattttttgtatagagaaggagataaaatatatctgctttttggtttatattagtatgtataagaattattttttagcgatacttttttatacgtttctaagccgagagtataattaaaagttatttttattttttgag

SEQ ID NO: 5234 - DNA, 775 bp, Cannabis sativa
aaagcagattgcacatttgtggactattaacagttggcatgcacaattgtttctgaatataagtgaaactttcaaataaaaataacttgagaggaagaaagctcataccttagcatgaatgaatctctcctttaatgatatgggatcgtcatgacatggctttctcatgaaaaacagcttgctaggtttggaagggctacaatgcaagaataaattgagtaactcaaaaagcaaagcacaaacttatattcagaataagtcaaacgtactcacccagtaaggacaccatcagcctgatagttacttcttgaatacaatagctcctcccaaattgaatttgtatatatattgccgagtgattcaaataaagttaagacagaattgtgccaggctttcacatcaagagttagagaccttacctgcaaaacaagaagtttagaaataattgagtaaataaacaaaggggagaacaattaaagctcaccaaacatcaactaaataaatgttcctcttttttactatcatctgctgggcaattataccgtaaccaattacgtggaaacccttttatagggacttctcaacttctccaccgtatagattttcaaaattagaggaaatatgtctagtacttcagttatattcaaattaaatttccactttggataagtaacataacttagtaggaaattgtgcaacagtgaggcaatcgacaacagtttcttgatatccatttgatgaaaagctgcgacacatatgggaactaggcaacatg

SEQ ID NO: 5235 - DNA, 814 bp, Cannabis sativa
tttcttattcacatactaataaatgaaattactaaagcataaaaaggcttactaaaccgtgagttgagcttatctctaatgatgattgtacatatcgtgatgatatttagaagataacttggctgctctgatatcaaattgtcacaccttactagattaggcatgtgatcatattatttaattattgtgcctcctttgctattcaaaaggtttatcgaaaaaatgtgaatgattaaaattttcataaataagctcaaacataaatacataagtacaatacatatcctgtgatctcgttttaaaatttacgtctgttttctaaaatacatgtatacaaaagttatcgcctagcgactatcaaaataaagctcaattttctcgaagatctgaatactcttagtctaactacctcggaatgtacaatcttcatataaactaagctcattattgtagcattgcctttacatacgcatgcaaacaatatctattagtcgacaaaatcagtaagaaaagtataaacataaacataaacaaaaaactagattgtgttaggcacccatacacctaatcacaaccttatctcgcgcccaacacgtactaggtagaatgttcatatgacaatatgattaactataatatcaacctatactcagtactttattcatactgatgtgatagcgtcaatttgtacttcaacaaacatatatttattgatatttagtgcaactttatgtacacaaatatcgctcaactgatatgtaatttattaggcaatcataaaacatgtatgctaaatatgtaagcatgcatatta

SEQ ID NO: 5236 - DNA, 1093 bp, Cannabis sativa
gttttttgacatggcatgaaaccgacacgggcacgacccaacacgaaaaaatataagtttggacacaacacggcacgatgctgcaaattggcaagacacggtatgaaaaaaatagacttaagcaaggcacgtagatacatatagactagtccaaaagcacaacacgttaattttttttacaagttgataataataataattatatatatatatatttactaataaatattcaaattctaatcatactaattaatcttttatataactgtataaagtattgttgaaaaattatataaaaacaattgaaactataaaaaatatatataatttagtgattagctcattagttgtaaataatagttaaaaagtggagtccgaattcgagcccatataaaaaaatggactgacccatttataaactacgtgtcaaccagaataaagcacggcatgagctcgagcacggcacgaaaatattgacttacaggctgtactgggcttacatttaaaatgttggcacgacacggcaggatccatatctttttatgagccagcacgacacaacccatatcaagcggacttttcaaaatatgggtcgggcacacgtatttatagctatagtgtcaactgtcaagagcatctagattgtagacctttgttgttataactgacctataatcaatttttaatccattctacaactcaatccagttccagtaagttttatatttaggttcacaagattactactataaaatattttcaccaaataaatataaaactaaaacaaaaagttcaatctaaggaagtaagcagcaacatacctcatatttttatcttgaagcagaacaacaagcttgcgcttatcaggtataatagtctttgcatgtccgccattgtaaaatcttcggtgacccattaaaaaatgtggaaaatttcctccctgagttgttacgaaaacctcactaagcaagcatgctgtgtagtctaaagcagccaatcttgacgaatatacctacagatcgaaataatcattattaggccagttaaaccaggactaaaataacactaatggtctaatactgcatattcatat

SEQ ID NO: 5237 - DNA, 679 bp, Cannabis sativa
ttaagaaaattcaaacttttttttattggaaaatttgtagtacaccttttatttgtttcgacaaaaagcctattttttttatgaactcaaaattattaacaataattcacatgcatgcatacaatacacagtttgaaccattattttggcgtatttaatttttttagattttttaaaattttacaagatatgttaaacaactacaacgtacatcactatataaaaattagattaaaaaaattctctaaatgctaaataagaaggcatgtgcgcaaaccttgttttttaaatgtgtgtaatcatgttcgggttcgcgttcgcaaccaagtctaagtccatgttcgagtccggatttgggtccaagatttgggattcagggtccgggtgtagggtttgaattcacatccggacctagggttcggggtccaagatctgagatccaaggttcagatgtggggttcgagtctagtgttcggggtttgagttcgaatctagggtccaaattcatgtctaagtccagggcatattccaaatctaaggtttgagttgtaaagaatttataattttataaagtatagtattatattaaataatattaatacaatataattctaatataatactatacattacaatccaataccaaaccaattaaccaagcctttttggagaaaattct

SEQ ID NO: 5238 - DNA, 2013 bp, Cannabis sativa
atattttagaaaataacgttgaggaaacagtcaactaatgtaggttactaacaaaataaatataaacgtagcactacgtacatatatatataatataattataaaattaaaataaaatcactcacttacacacggtggaagaaagtgttagatacattgtatcaagtgaccaaagtatatattttatatttggagccgctttgtcgtgaacaatttatgttatatcaaattacgttgttttgtcatgtacttagattaaaaaaagatatatatcccattcccacctattaaaataaacctctattattataagacacacactaaaaaatcgacattctactcactaccgaggttgtatactaaattcaatactaccttattcgtaggtgtggattaagaaaaattaaataatgtaattaacaaatagctaagcaaggataggataagcaagttactataatcaagaaatgaggttgaagtagttaggggtggagaagatctaatccagttcaattgaattgaactaattcaatctaatattttaattacaaaaaattgaatatttaattataattgaatttgattggatgttaaaaattagattttaattaaactaaaaacggattaaatcatattacatataatacattatattaaaatattatttatattaacaaatagttatagtttagttggttgagatgtatgacatatattatacaatattatggttcgaatcccataacacttttttcaaaaaaaattatttatatataataaaaaatattttaattatatttttactaacttttatttttgttcaatttgtaattggttgttttgtatatttatttttataatgttttgttttgctattttattaattggtaccgttgttgttttagttatttcaaatttttagttgtattaaatttataaagatgatatattatgtagtattaaatttaaataaagctttatatatactttttagatattttttttatatatttttaagttaatattaaaaattaagtatgtaattaaatatccaattaaaaaactaattcaattcaattagtaattaaatgggatgataatttttcaaattcaattactaattaaattgtcacataaaaaaattactaactaaattaaattgaattaagaaaaaaaatattaaattggatcatacagccctacagatagtacaagattttgtacaccttagtttaagctatattaacttcatatttattaaatacatgataatgtaatgatataattttcgaaagagagccaaaacctttttgtcggggataaacatgattattattacttaaaactatagctttttgttttccgaattttatttatttgtttagtttttgtttttgttgaaattccgtaacggacatcatccatgtgcatagtctctgtcagaagtcagggacgaggttttatcaggttggattctgttctaaaaaaacaaacaaaacaaaaacttaaaattaaaaattgtaagaattattatgtataagtaacttattttttgtctgaatataagccatataaattctgtagcagcacgtggttttgcaacaaatatatgagagttttgcaaaattgtaggctcttaaaaagtgtgttgataaagtgagagccaagctaataaggaatgaactttttatccaataaataaataatattgaaatgactcgtgaatgtgcatgcatgttagatagttgtaatcacttttgttttcttttgcatattgtgtacatatgttattaataaactcgaccaataatacccaaaattaaataagctacatgtacatttatgttttttttctcctttggtacactgatgtattgtattatataatattgtattaaattatattgtattattaatattatttaatacaatactgtgtttgttattgacttgtattaatagattgtataaaattataaattttttacgataaactcgatcctaacctcaatc

SEQ ID NO: 5239 - DNA, 2409 bp, Cannabis sativa
agggcataaaacccaacataatggccatgtggttatggtgccagccaaaattgatttaaactctaggttgtcctttattgataataaaagaagaagaatgggcttagaaaaaaaaattgggctcaatgaaacacaaatggtggagctgggccgtgggacaagtattcacaatcagggtgtcaaaaacatggatatttctaacttagaagagaatgatgatgcaactcaaattgatatctcaaaaaacttgatagaggcgggtgttggtttctaggcccgccaagtattatgaatgtattgagttagaattgtcgggggcttgggaaccaacggaccattcaattcctaaaaaaaattatatttcaaaagagacccgattttatatttctgtatgaaactaagtgtcgtaaatcaaaagtggtaggcctagcccaggctttgaattttgatggtgtctttgtggttgatgctaatggggcttcgggtggtattgctttgctttggaaaaataaggaatctgggtttttgttgggttactctaagaatcacattgatttgcaaatctctatatcgcctacttctccaacttggcgtcttacagaattttatagggaacctaatagaaatagaagaagtgactcttggacactcctttaaagtttaaaagaccgatcatcgcttccttagtgtgttataggggacattaacaacattgttcgacaagaggataagagaggggacatccccagtggctcttaactgggtttcaacaaaccttgctgcattatggtttggaagatattgagctgcaaggtcatcaattcacttgggaaagaaggaagaggtacgaatgtgtggattgaggtatatcttgatcgagctcttgtttccacaacttggaatcaattatttcattcggctactctctctaatttggggttcgctacttcggatcattctccattgtttcttgaaccggttgtggtgaataactttgctcctagtcgtagatttcgttttgaaaattcttggttgaaggagcctctttgttttgaaattattcgtgatttttggtcccaagaacaaaatatcagcatctttaacaagattaatatgtgtgctaaaaaattatctagctatgggaaggagttaattggcactctaaaccaccgtattatgagttataaggctgatttgaaaaagcttcatggtttaagggatactacttcagtccaaagatatgccgaaacaaagaagaaactttatgatgcgtttgatcaaagggagagttactcgaagcaaaggtccaaacaattttggttgaaagaaggggaccataatagtagctatttccataaggctgctagtactaggaaaaaaataaccagattactcaactgtgagatgttcatggcaattgggtctcatgggagtcgggtttgccgagtgttgtatcaaattacttccatgaattattccaagcttcaagttgtgtgtgtgatgaagttattgattgtgttcctagtgcggtgattgatttggtgaattcagagctttgtcaaccaatcgaggacgaagatgttcgaaaagccatttttcaaatgcatcctgataagagcccgggacctgatgggatgactcatgctttctttcaaaagtgctggccgattgtgggagatgaagttgtcaaaaatgtacgttctttttttgagaatggattacttgccgaggggtgtggggatgctaatgcggtgcttataccaaagacgagaaacccggaacgtatgtcggatcttcgtccaatagccttgtgcaatgttctgttcaagattataacaaaagtcatggtgaataaaatgaagcctttcatggactcaatcatatctgaaaatcaaagtgcattcattcctggtagattgatctcggacaacattcttgtttcttttgaggttttgcattaccttagaagaaatcgaaagggtaaggatagttttatggctttaaaactggatatgagcaaggtgtatgattgcattgagtgggcctttcttgaggcaatgttaaagaagttaggatttgttgaaaattggatttagctcattatgaaatatgtcaagtctgcaagatactgtgttactcatggtaataaggaagttggtccaatgattccaacaaaaggtataatacagggtgaccctttatcaccatacctcttcattctttgtgcagaaggtttctctactttgctttgaaaatatgaacacaaaggatggcttcatggatgtaaagtggccaatggggctcctagagtctctcatatgttactcgctgatgataattatctttactccaaggctacagaagatgaagctcagcggatccaggaagtatttgtaaagaccgcttagt

SEQ ID NO: 5240 - DNA, 1308 bp, Cannabis sativa
  modified_base (370)..(371): a, c, t, g, unknown or other
tgagtttgggtttgggtccagttccagttcctgaaccaagtccgtgtcctcatcccgattattgtgcggttcttattctagttctgattctgggtatgggtctgggtcaaggtccgaatcctagttagagtccaagtccgggtttgggttagggtcctaggcctgggtctaggttcgagtgttggtctgggtctatgtcccaatttttgatctcgatatgggtttgggtatgggttcgtgtttgtgttaggatttagggttttgggtttagggtttagggatttagggtttagggtttagggcttagggttttacgggtagagtaaagggtttagggttttgggtttagtgtttagggatttagggtttnnggtttagggcttagggttttaggggtagagtaaagggtttagggtttatggtttagggtttaagggtccgcttctagttctggttctaatttcgggtcacggggtacagtttaaggtctgagtataggtttgggtccgggtttaggtctggatctaggtcccagatccaaacaccaacaatcggttgggtccaagccttgggtcaaatctagatcctaggtcctgatctgattcaagttagggtcccaggttccaatccgagtctaagctcgagtctagggtcccactacaggttcccaatataggttcgggtcctaggtaccaattcggttccaggtctggattctggtttgggtctcgaaagtgtccaagtcccagtccaagttcgggtttgggttcaagtccggtccgatctcaggtctcgggtctcaggtcccagtccgtgtctgggttcgggtcttggtttgggtctaggtcccgattcaagtccaagtcacgggttctaggtcccagtctgggtccaggtccaggtccctaaataggtcctggtccgggtttaggtttgcatttggttctttttctagtcccaagtcttggtccttgtttggtttcgattttggttataattctaggtttggattcgggtcggggtgtcagtctgggtccgtgtctgggtatgggtccagatcccagtctgcgtttaggtctcgggtctgggtcaaggttcgagtctgggtccaggtctgagtctcgtccttattcgggtcctgggctaggtccgggtctctattccaatccttattcaggtcttgggctgggtctaggatccgatcctagttttggttttgggcctgggtttagggtttagggtttagggattaaggattcaggttaagggtttagagcttaggaattagggttttgggtttaagggttt

SEQ ID NO: 5241 - DNA, 1233 bp, Cannabis sativa
aaaccattcataaagagcagattctatggctgggtacttcatagtctttgaatgttttgtatttggatttaccaatacatcttcttgaaggaggtcccttgagcgtttaagcgtcttagatattattgcttgtatcactttgagaccatgagtttttttcaaccattaagctagatcttttggactcccattgggaattgatttctttatttgacataggttaacatgaataccttcagtgagatgaacacgaatttcacctataggaggcatggttgaatgtttacagaaaaagactaaacaatatcactacccgaacactactacaaaagttagaattcgcaacggtcctaaaaatactttttttgggagaccatcgctaaaaaaattaagtaactgtttaaaatcgtcggaaaaaattagtattcccaacggtttataacaataattacatgaataagtgacggttttaattggaattcataaaatttattaggcccttataggcgacggtttaaaactatctcctatagtataggcgacggttttaaaccgtcgggtataagagcccaataaaaaatcattacctaaataaaaaaataattaattttaatgagtaatactattaataaaagcctcgtatatattgttctgagaactctcgtcttccctggtgaactctgcaattcctccatgctctcttcggaagagcctactctaaagacgtgctaccaaagcttacctccaatggatgatctgctggcccacaccagcaaactcacggtaaccgatgaagaggggtgggaaattaatgaagcagggactgaagacattggaaaatcttgcctcattggccgactatgcacaatgaaaactttcaatcgttctttattaaagaacatactctgtaggctatggaatttgggggaaaatgaatgggatttaaaagtaaagaagacttcaacaaaagccatctttatggttctttccttcttggagaacaccacactcgaacgaatcttaggcaaatctccatgggtgcttaatgcagggtttctgattctagaacgaatgaaagggattccatccgattgggaaacagagctaacaaatttctccatctcaggaagggtttataatttaccagtgagagcaatcactaaatctaatatggctagattggtagggatggctggggacattatcgatatccaagaaccggatgtaaaccga

SEQ ID NO: 5242 - DNA, 1023 bp, Cannabis sativa
attgaaatatggaagggccagattatgacgtaccttgaaatacgttcttagaaaaaataaatctacattatttctctgttaatatgaatgaaacattgatttttatttaattttttctttttttctgaacaagggcagaaactagtaagttagtagtttattgtttattttgtttgatgaatcatttaatttaagttgatacaaaattaggcaccactatgtgtgatatttttattcgtttttttttttttttttgttattattattaaattggaatcaatgttgctactgagggaggctagtttttctaagaaccactttggacactttttggaatacacgtgaaaattgtaaaagaatatcatgttatattatactccaaaaataccaataatttgcaacaaaaaaatacatattttggacaataaatatgtggtgtggtatagtccactttactcatagaatcattttaatactaaactatttaataattcgaaatcatataagaatcaggtcatatcagtagatcatatccaaaaaaaaaaaatactattttaattattataacacaagaaaaaaatccctaatgtatataatatcagtagatttaggtttttgaattaactcaatcattgaagggaataatgtccacaatattatgagcattgtctgcccttaaagtttgctctgtggcagttgtggtagtttttttctttttaacttctttctttcagttttcttcacccgttctcctttaactcatctctatccatgaattgaattcatctcctctgtattcttcagcgtttttctgtgattttcattgatctctttcggttacctatggattctttccattctgatatctcccaagctctcactgaaaaggaaaaagaggtcatcaaattctccaacatctctgctccactttctcgaactcaatgtaacagagtttattgcaaaatcttctccaaaagaggccataaccgaaagtagttctttaattttgtaactaggaattgg

SEQ ID NO: 5243 - DNA, 580 bp, Cannabis sativa
ttgcatcatgtaaacatcttcctcgagtgtgccattgaggatggcattgttaatgtcaagctgcctaatttcacagtctctagttacaactagagttaggacaactctaactgttggtgccttcaccacaaggctgaaagtctcattaaaatctacacctggcctttgatgaaatcctatggcaataagtctagatttcagcctttgtagggagccatctgcattgagtttgattttatgaacccatttacaccccacaatgttgtacagatctgaaaaaggcacaagtatccatttcttatttttctccaatgcctagatttcatccttcatagctttattccatcctttatgttgcagggcagcttcaagtgtcaaaggctcatggatggattgatcaaaactggcctgaccaaagtaaatatttggcttgaaaatacctgctctggctctagtcgccataggatgaacaactggtgcaacttgttgtttagttgtttgttcaggatcttgagacaaaggcaaatcatttcctgcactcacattcacaccagtagacactactacaaaaatgactttt

SEQ ID NO: 5244 - DNA, 840 bp, Cannabis sativa
tgtatttagattgcaaagtttagatttgacaactaagatgtcatatgttaattgttgttattgtgatctattttatttgtgttactaaaaatctttattttttttcttaaaatcttagatcttagatcgtttattgttcattggttagtgatatgattaaacgtgaaataaaagcccgatttggctttctaagtaaaaggaaaatgtcctctaataataactttattgccaataatgttgattgatgtaattttgttcttgatttaacaagtatacttcttctttcattaaaaataataataataataattaaaaatatagaaacaaaaaagataagaagtgattgtggtctattttatttgtgttagtaaaaatcttttttttttttcatcttagatcgtttattgttaaacgcattagtgatatgattaaacgtgaaataaaaactcgatttggctagcaacatatcctctaataataaatttattgctaataatgttgagtgatgtaattttgttcttgatttaacaagaatacttctcctttcattaaaaaaaaataattaaaaatatagaaacaaaaaagataagaagtgatttttcttttttctttttttatttttaaatagtatttcattcatatctctaaacaataaataatattatttgttatcattattattatttaatataatatatttaaaattccagaccataattctatcacaatatatacaatatatagagttgttatatgcatatatatgaataatctgtcaaattcgtcatcttcccaatttttggttaaagccaccaactcgactcaactctctctactcac

SEQ ID NO: 5245 - DNA, 3405 bp, Cannabis sativa
gaacaggactgataacaacacagggggaatcaaaattgatgcagaggatattgaggaagaggtttcttattggaactcatctttggtatgctatgtgttaggtgctaatccaccaattggcccctttactggttttgctagaaggttatggaaagacaaagtggataaagtggggttgctaagtcatggagtctttattattagatttcatactcttgaatatagagaccaagtgttagcaggaggctacttattttttgataagaaaccgatcatcatgaagccttggaacccaaccacaaatttcaaaaaagagaatgtctcttcatccccgacatggatacaacttcatgaactagagcttaaatattgggggaggaaagctttgttcaaaattattagccaaataggagagccattatagatcgatcagattacttaaaataaggaaaggctctcttatgcctgagtgttaattgagataaaaattgatcaacattttcctgataaaatttcttttacgaatgaacttgatcacagggttgagatttcggtggtgtatgaatggattccattgcaatgtcgtaattgtcagggaataggtcattccactttagaatgcaagaagacagggaaaaaagaacagcaagagtggaggcctaagaaagttgataaaccccctatagctccaccgaagtcaatggaaatggatgaggaaggctttcagttagtgaggaatgggaggagaactgagaaggccaaggagataccaatagtaacagtaacatccccgaatgcttttcaagcactctgtgaggaagagggaagtcatgaggaaatagttgaagaagttactaaagaagagggggagggaggaccccctaacatccatggatagaatcatgagttgtcaggggggtcaacaacctgaataaatagaaagagattaagaaattaatctcttctctacaaataggtttggttggtctccttgaaacaaaaataaaagctccaaacttggaagctctttatacaactatgtttttgggttggtgtctaactacgaataacatgtggcatcctaagggtagaatcatcatcagttggaattcattgatgtttaatgtgaatatcctctattgtactagccaaataatacacattgaagttgagacagtacgagggagtaattggttctttgcctcatttgtgtatgcttttaatgaagaaaagggaagagaggtatagtggacagacatgataacattagccaatggtatacatggcccttggttagtgttgggggacttaacggcatactgagtctagaagaaagagtgggggatagagtcaaaagctctaagttgacaggtttcaaagattgtatatttgaatgcaagttggaagatgttaagtactcgggcagctactttacttggaataataagcaaggggaaagtgacagaatttactctaaaatagacagaattatggcgaatcaagcatggtagagcactacgtaaatgcagaagctgtctttttaacgaaaggacaatttgatcattgccctgcgattttgtcagtctgtcctcacatgaagattgggaaaaaacattttagatttttcagattttggcagcaatcaaaaggctttggggagttgatttccaaggcctggaaagaaagagtacaaggcactcccatgtttaagctaattgataagcttaaaattttgaagaaagagattagagtctttaattggtctgaggttggggacattgcagccgaagacatcaaagtccaaagtcttttgaaagcctatcaagatagcttgcaaagggatcctcttaacagtaaactcattcatgatgtcagaatggctaatgagcaatataagaaaactcatagtaaatatctttcctttcttgctcaaaaagccaaggcacattagctaaaagatggtgacgctaatacttcaatcttccatgccagcattagagcaagaagacaagagaatagaattctctccatcaaagatatggctggaaattggattagtgatccatctaaagttagtgatgcttttcttgatttttacacaaaactgttggttaccaaaatggaggataggaggactgtgttgagaagtgtcatctcggctggacctattttaaatgctgatcagaaagctctacttagcaaacaatattcaaatgaagaagtgaagatggcagcattctcaatacttgggcagaaagcactgggtccagatggcttcaacaaccatttcttttaagataattggaacattgtgggaagtgatttatccgaagttgttctatctttccgaacacagggaagctactcaaggagatcaatactaccacaataacaatgattccgaagtcaaactgtcctgaaaatgtaagtgatttcagacctatctcttgttgtaatgtagtttaaaaaattgtaacaaagatgatctattctcgcttaagggatatccttcctcaatcattgctcaaaatcagggagactttgtacaagggagatttattgcctacaacattccaatatgccaagatctagttcggcattacgagaggaaaaatgccaaggcaaattgcatgttgaaattagatttgagaaaagcatatgacacaataaagtgggactttctagaggagatgttaccagcttttgacttcccgacaagcttcatcaaacaaatcatggtatgtattcgcactccaagatttagtattcttcttaatggatctttacatggctgttttgaagcaaagaggggtctaagacaaggagaccctttgtcccctctctgatttgttttgggtatgtaatacctttcctgaattatggttaagattggaaagaagaatgactttcagattcatgaatgatgcaaggatcttcaattgaatcacttgagcttcgcagatgatgtattactcttttgtcatgggaattacaaatccatctatctcttacttcaaggtctcaagttgtttgtgaacactttgggacttcaaccaagtgattctaaatcagctttttactttagcgggatggatgtttttgaaatacaaagagtgttaagctctttgggttttataaggagcaaactgccatttagatatcttggcattcccattgctgccaggagactttcaagtgctgaatctgaaattttggtaaaaaaaatgacgaaaagaatcagcatttggagctcaagaaacatctcatttacgggtagagttaccttgattaattctgtattgatctctattcacacatattgggtgcagatcatgattctatctaaaaagctcttgaaaaaagttaatgacgtgtgtcgaacattcctttggaaaggcaattcag

SEQ ID NO: 5246 - DNA, 771 bp, Cannabis sativa
tcttctcttagaattttttctaccatctacttacacgaagagaatattggaaccggttgcctatatgttgttcatttattgacttcaaagaaggaagtgtttcaatttttctagtatccccactaatacaaatatcctgcaatgcaacaattaagacataaaggctactaaataagtaaggatacattttgtaagagagaaaaaaagaatgaaagaggcaaacagaacaagttacttgaggatctttattgaagtctagctcagtaactccatcatcattaaaccataagttgtagacaataacttttgtgccatgagacccaatgtcgttaaactgtcataagattgaaactgatataaaaagcgaggctaagaaagaaaatgttaaatgcatcactttgcagtaaaaatagtcagcattagcatatggctagctgttagacaatttggttagaggtaaaaaagaagattttctaagatatgcatgaagattttagctaccaatggtatgtaaataagtttaaggtacctttgagggtgagaatctacgtaaggttataaaacatttttgtttgctggtctgcttaaagattctgattgtacatcataatatatgaataatcattgtctatttcctaataaaaataaataaacaattcagtatcaatgggtgtattttttaggaatagtcacatgcacaaatgacttgttaaaattataagctacccagtaacagttgacattcaaataaccaaatggagaaaaaaaaaa

SEQ ID NO: 5247 - DNA, 1154 bp, Cannabis sativa
atatatgtaaattttacaatccaacggtggttgtttgacgattcgaaattcgtcagaaaaataacctcaactcaaatttacaaaataaagtgcatcatatgtactcatattatatctgtactacaacatacaactgtaaatacatgttagacagttagatcaggcagtctgaatgcacaggtggcaccaatttgtttatttatttatttattttttgcttaagtataattttcatttcattatgagaaaaatcttagttacatctctatatacaggaagctttgtataataatttcggtcaatattattaaatttattttaagggtttaagattatggcgttattataacatcattaaacatttatcatgtttagttttgtagaaataattatttatagacaagtaatatttattcagcaaaaaataacctaaaggatcacacttttggttagtttagtgactccttaataaatctcagcctataaaacattctcactaattaaggatatctctaaccagacactaaaaacttgaatttagtgttgtttctcacttaaaataatatatgagattatgtacagtaccctattattcactgtagagacatactaaaattgcttttttaatatttttaattttaatgattaaataatagtaaaataattaatttttctgaatatatatatatgtataatttatatttttatataaaaataataaaaaaaatatagtttttgtacaacttttagttttgtggttggaatataaaaaaagtttagtgttaaaattgtatctttttaatgttggttcaacattaaatttagcttttactgttagagttaccctaagaaatggtaaacctttgattagtatcaagttgatgaccccttaatattaacatgtaggtgttctaattttttatttatttatttttattggtggtatttttgtactctaggctaattggaaagggaaatttgaatttatatgcatacatttagggtatattaaatctttgaacataagcttacaaaaattaaaaaaaaaataggcacactttatattcatacacattatacatttctctcttctcttctaacttcatcatccatactctgtattctcatccatagatggtagtccgatgatatgg

SEQ ID NO: 5248 - DNA, 716 bp, Cannabis sativa
agcataaggaggcacttaatgacaaggttttctcagagaaggcactacgggaataggattagagggcggttgaggaagccatgaatgcactgaagatggcccaaacggatctgcacaatgctcaagaagagaacaaggggcttcaagccaaaatataaaatttgagaaactccatcaaaccgatcttcagactgctaccaatatgtttgtggagcttaaggagatttatgactttcaggataaggctaactaggaagctaccaaagtggctaagtatgctcttctacctccagtcacttatgaatgttgcgtgaagcgttatgaagacggagtctttatgtgctggaggaccaacaagtttgagcccaagctaaactttttgcataatcctaaagctgttctagcctgattctgggagaaaacaagaaattagatgccaagttagtcgagaagttggtcctcgacttcctccatacttaacttttaacttttctatgtatgtcgcggggagacatttattggcctctttctcatgctgcattaaatgcgtatacaatgatttaatcttgaatagtgtgctacactctgcctatccttccacatctttctccgagtcgaattcactcgcggagaggaagagacgagaaatactcgtcgtccaagtagaccatcttagatatgaccaatctactattattcctctgaaataataagtt

SEQ ID NO: 5249 - DNA, 1641 bp, Cannabis sativa
ccacaaatcttttgtaatatccaaccaaccctaagaaacttctaacctcagtagcagacttgggccgtggccaatccttaactgctttaatcattgtcagatccactaatattccatctttgcttaccgcatgccctaagaaactcacttggggcaaccggaactcatatttcttaaacttagcataaagttcatgctctcgaagatgctgtaataccatctaaagatgtctctcatgtacctcttctgaatcagagtagataaggatttcatcaataaatacaattacaaagttgtccaagaaatccttaaatactcggttaatcaaatccataactgttgttggagcattagtcaattcaaaggacatcacaagaaattcatagtgcccataccaggtactgaaagtagtcttgggaatatcctcttgtcgaatcctcaactattaataaccagattcaagatcagtcttagagaagaccgtcttctcttaaagttgatcaaacatatcgtctgtccttggtaaaggatacttaactttcactgttaacttattcaactcttgatagtcaatgcacattcttaacgacccgtcctttttcttcacaaatagaatcggtgcaccccaaggtgatgtgctcgatcttgtaaactgcaaattaagcatattctgcaactgaatgtttctcttttaattctaccagtgccatttgatatggggcctttaaaactggctcaacctccgatatcaattcaatctgaaagttaatctatctccttaatggcaaccccgataattcttttggaaacacatccaagaattcacacattacacgtaccttttctggtcccatccaatacttctttcatagtattcatcacattagtcagataccctatacatcttccccgtaacaaatcctttactttaagtgtcgatatccttgtaattcgagatccacgaacttcccctataaaaataaatggagtcttgtcgtctggttcaaaagttacaatctatcttttacaatctactgtagcattgtacttagttaaccacttcatacctagaatcacatcaaaatcttggcaagtctagcttgatcaaatctactgacagttcttgatcctccacaaacactggtaaggatctaatccacctcctagagataactatctctccagtaggtaacaaagtaccaaaatcactcagcaacatatcacatggcctactaagaccatcaattactctactcgatatatatgaatgtgtagcaccaaaatcaattagagtagaaaatataatgccatcaataaagatatgacttgtcactatcgaagggctagcatcaacatctgcttggattagagcaaacacccgagaatgaaccatggaatcttttctcttggtatctgtcttctatagttgtagatagtctctttttaggtggcctactaccccacactgaaagcaggctttaacttgacatttgccctgatggcgtcttttgcatcttggacatttaggataggtcctcaagttctcatagctgccttggtgaaaaccttggttaccctaaaaccttttatttggacccgtaattggtggatcaattggcttcctttttctgtcattggggt

SEQ ID NO: 5250 - DNA, 2510 bp, Cannabis sativa
ctacattacatgcaaatgcaatggcttatacggatcataaggatcaggggttatttaactaagctcatcctttcggtttttacatggctgcagtgcagctactatgctctctcttgaaatttggatcgtactatggtttggttgtatttatatatttttttagtttttttataaaatatatttttatatttaatttgtaatacaaaatctactctatacagctgaccttttctttttttaataataatttttcatcttttccgatccacctatctttctaaatttatcataccacccaatcacatcagccatcaaggcagacgaccccacccatatatttttaggcaactctaacctagttttttttttttttttttttgaaagaacacagaggagttcattgaagtagaaaattgggtatcacaccaggggacccctccctcatacaaagtccatcatagttaccatcaattctagccattttagcaacagcatctgacatagtattttctaaacgagaaataaaataaaaattacaaacattataaacagaacatagattaagggtggaaagagccaacgacctgacttcccacacagggggacgccgcctagcctgcaggtcgttcgccaccatctgagcatcagttagaacagtcacaactcatgaccacgctctctgctcagttgcagtgcccagaaaattgctaacaattccgcctccgcggccgaattggcctaacctagttgtattgtaagttggtagaataactgtaaaatatagtataaaattaaatacataaaagtgattgtagtttatttttggaaacttaaatagttgaaaaatatgaagaaatggcatttttcaactgatacatatatctatgtaacagaaaataacagaaactgttagtttcttttttaaagattgtgatttaaatttaaatgcatatctattttttttttaaaaaaattaatctattatattatattaaatgtgactattattttttttttaaacattgagattcaaaattaaacttactccacatagttaggggtgtttataaaaaatttaatctactccgcacaattcaattcgcaaactgcagatattctcacttgtgtagattgtattagaaaatctaaacttgcacttgtgaggattggatgttaattgacatgtaaaagtaatcgatttaatcgaatccatacatatttatatatatttttaaaaaattatatatatatatatacaattaatattttaatataaaaataataatttaaaaatataatacatattatacaaatagatttcaaaatatagtatatcaaatgtatatttcactcttatttataaaaaaaatataatctaaaacaatattttaaacattttttttatatatataattgttttttttcttgctttaaatttgttatttttttttgtttttctcgatttttttttttgttttatatattttaatttgttacataaaataacaataatttattttatttattgttagttatgtgaaaaaaaatatttttctaataaatactaaataattcaatattaaaaagtaatcaatccaaaataaccgatttaatttatacttttgcagattgggttggatttgagttactatgcggattagatttgattcaaaatataaaatccgcacttagtgcggatcggatgtactatgaacaaaatagtgaggattagatcagatgaacacccttagctaaaaacatatctatattattttttaatttttttttacaataaatacataataaaactcatgtaataattttattatttttttaaaacttacaataaaaattcttttttatgattttgttattgtttctattattatattattgcgtttattatgtatattaatctttaacattcttattatttctgttattttttaatattgggtgtatgttcacgtttattatttttaaattttataattattttctttaaatttttaaaactttaaacattttttttaaaaaaaataaaaaatttatgagtggtttccttcagtttataaaattttaatattattaaaaaaattaaaagtttatgagtggtttcaatttataaaattttaatatattacttttatatatcttgctaacattttggatctaatttaatttgcttaaaattttatataatattttcatttttttttaaaaaaatactattatatatatatattttttttataaatagcattttaattaaataatttttcatacaaaatgatattgtttattgtacaacatccacaaaattatacaactacaattacacatataaaaataataactttaaatataactaagtatacatgtaatgtaatatgcaaactttaaatataactaagtataatatacaagtaacaataatatatatataaatgtaatgatacatccaagcttttatgaatataaattaatccaggtttttttttttttttttt

SEQ ID NO: 5251 - DNA, 502 bp, Cannabis sativa
accaagcacgactatgaaaaaaataaaataaaattcaaggtctaatatatataattttaaaaccaaatccacaaagaataatcatgaagtagctagattgaaaagcttaacaagaaagtttcaatcttccaacttttacaactcaatttctcacttcaatagcattttgcatagtacaattcatgttaatggatttttttcttctttctttaagctttacactttctcattcatcatcctagccgatctagccactcagagtcaacgctctggcggcgatcaacacgttcccgagttgagcattgtttggcgattgagttgagctaaacacaaaaatgacaatattgttaatttttttggtgggggcgcggatttcattccggccttgtccttagaaatgacaacttgttttagtgactttgtcgtagatgaaattgagggtggcgagattcgaacttgtagagcccgaatattaatgggtgtttataattctaatttgggt

SEQ ID NO: 5252 - DNA, 867 bp, Cannabis sativa
taatactataattaacttgcaaaagtagactatttttatccataaagcaccaagatatacattttattttatttcagaaaaatagcattgttaattacgaatgaaactaattaattatcatttatatgattaatcgatgagaaacaaacgtacgttcatgcatgcatgcaataatacattacattagtgtagattttgcacaaattaataagcatattatatatagctataatacaatatatagatatatgactatatataacatattatatatgtcatttattgttatgtttgtgggtagtgaaaatgatattagtttctttgtgattttcttggagagaaagatcagtgagttgagaatagatggtggagatgaatgatgttgcgtcctttacaggttcttccatagcttctttaagcttcctcaacgccatacaatatgcttcctatatatattcaaaacttaatatatattatgtatgtttaaataatattgcaaagtcataaaaaaagaaaaagggaaatcatatatatgtaacacaatgataagtttttaatgatcataaaagtgatgaccatataataattttagttacaccacttttatttatgttgcaaaaataagttataagactttctattatttgtgaattgtgagcatgtactggttttaacttaaatattgtatactattaggaatataaatatcaagtaattaaatatatgtactaatattaggaatactgtacacatgacacccaaaaaaaaagttgttatatataatataatatacaaatcaaatttttgttactaatcatattaggttcatatagtctaattaaaagtaaaattaattataaataaaaa

SEQ ID NO: 5253 - DNA, 1227 bp, Cannabis sativa
ctttttaactttctgttctgttctgaagtggtatgtgaattcctactgcaacttatgtcctagtgtacagctatggtaatgtgaaatgaagctgatgttatgtaatgtaataagaaatctcaccaaaaaaagaaaaagaaaaaagagatggaaaagaagtggtggcatttgaactgtcatctttcctattatgttgtcctttgaattacaaagcttatgatgcccaagtggagctagacatgagaattagagttgagcaattaaaccttattgaaaatttttaatgtcaactaatttgataactagtttttgatttaccaagcagaaattgtaatgtttacctttatcacttggtttctgagtttctgttgcatctgaggaacaacatttcgatctccttgagcagagaaagtttctgttgaatttcctgtttgagcttcaattgaggtaccaagagactccaaatctgggcttccatttccaactttgtcctccttatcaccaccccttaactctgttccctcccttggacacctagcctgaaataaattcaagtactctgaatgacttcaacatagccagaattccaaagtgtagttaaagcaccccaaagtgataacaatttagaaagttcagttaaaacatttaatgcaatagaaatatggggtttcttcaatatgtactaattaaaatcagtgttattgacagggtgtagtaaccataaagcctctaaatgctgactgtatcattgttgctgcttgttcttctttcataactttggagactgaggctgagtcaaggctttgagcttgtacatcgtgcttcgtttcttctctttggattcctgctgatatagctacacagttatctcttagtggttgtgtaacggtagcttcagagctcttaactgaacacgaatcattgtccccttcaaggactgaagttagctgtgagactatagcttcagagctattatgtgaagctgaatccttctctgcaatgactgagttgtgctgggtgaaagtgattgtactagccccagagctcctgaaagaaccataatcatcctcagcaatgactgaattcaacaattcatccccacatagatatgatctgacagagttccatcttctcttttccatcatattgtttctgattccctgttaggatcacacagattaactcaaaggaaattcatttaaaatgagatgtacaagtgcatattac

SEQ ID NO: 5254 - DNA, 770 bp, Cannabis sativa
attttgatatctaattatgtgagtttgaaactgtaaaactagttatattattatctaaaataatattaaaaaaatatatataacttcactgagtttatgggagagtccgagtccaactcaaaattcgatcatctaaaaaagcaaaatcaaaactcgctcgaaaggtttactgggttaaacccaacctccttgcactgagcggtttatttttaatttcttggttggatgggtcgggtctgggcaggttggccgaattcgggtcaaacccgatacaaatgttgaatcctatgtgaaactgtaataaaatttctcaaaaatagggctcatgttgccgtcagcaatgatatgtttatagtgggataaatgttgtaatcaaccaaaattttgaagcgtgaagaataataaaaaagaaaaaaagatgatcacccactagcttagagcaaagttaattagatattggaaaggtcccacacctagtttatatataagagttagggttcatgtatagtactaaccccacacccatgtgacttattgtgagtacccactaatatattagctaggtaccttattaggtaaagtattgcatgcttacacattccaaattgaaacacaaaggtagtaaggtcatatatgtactactagtcttcaatctaaagcaaaggctttgttcttcaatacataggcagacaatatatattggacccatgcaggctatgccctaaccctacctcgatctctcattaattatgatctctctctctctctct

SEQ ID NO: 5255 - DNA, 1001 bp, Cannabis sativa
tggatgcatcgcaatataccataaatttctcctgatctgatggaaaagctaatactggtgctgtaatcaaccgctgctttagttcttgaaaactagtttcacatttctccgaccacacgaactgttgatttttcttggtcaattctctcaatggtatacagatcttggaaaatctttccacaaaatatcaataaatagcgtggcaatactctaaatatcaaagaaacataaaaattgaggctcccaaaatttcctaagctggtaaattatatttttaaaatggcaaaccgttttatgggatcctggatggaaaaatggttcaatgtttctggaaaaacggtggaccatttttctgtagaaattccaaagagcttcaaatctcactcaattctaccccaaatttcacatcaagcttcaaaacacctaattaaattataataaacataacccaaccaataacagccaaaactcacagaatttaaattcaccattgttgagccaagtttgatttcttgaactcaaactttctcaacaccacaatcagctcgcaaaaccatcacaagtcaactttaaacatcttaaatcaacctcagtatacaacccaaaacctctagggttcagacaaaaacacatctcaaatttttcatgcttaaattcaaaggaaaaccactaaaactcaaggagaaagatgctcgggctttacctttggtcttggctttcaacttccctttaattcttgctgaaaaattactgaaaataatgaagaaaatggttgattactctggttcttcctagagccgataatggtggagagagagaaacagataaaaacttttgttttctttacttctctaatgttataaaaaattaattaataatataaaattaatgaatatgtctgacatcttcttccgtgaccaacgactcattgtggggaaaatatacatgttttacatcttcatctgtgaaagtaattggtaagttcatcattcgcgaacgtt

SEQ ID NO: 5256 - DNA, 3305 bp, Cannabis sativa
  modified_base (3124)..(3125): a, c, t, g, unknown or other
  modified_base (3245)..(3246): a, c, t, g, unknown or other
ttatattatagatcatcatatgaaagaaaaattgaaattataatatcttcaaacactgtaaaacataaatatctctattttagagactataatttcattgttatataataatttatatgagaaagttgtgtttattattaaattatacttactatccaaagtgtctggaatctcaaattgcaaggcatcatttgcatccttgacagtcttgattaatctaggaagaacattcctaagaattccttgctctattttagttggaggtagcttaagaccatcatcaaagagtgaatctatagccctaaagtaagggaacccgagtgaagggttaagtaaggctgtttgaagagatggtaccaatgcatgtagccctgaatacactgtatttgctgaaaatgttatttgttttatttctgagaatgcttcatctctagggacatacacgctcgcactattttgctctgacaccggatctgtaatatcgttataataatttagaagtgaggtgatctccgcttaaaaatattttggtgagtgtaatttaagtatgtctcttgcattactcgtgtgatgtttacctgttttagtgcgaggacgcccggtcctacaacgcctaggataagggcgttctttaccaccaagaacaggtcttttgagatcatgacttttatcaggattaccaagatcattgtacacatcgtaatcataaattctctcgaaacgcttacgttctccttcaccgttcccttttacattcttcaaatcttcttctcttaacttccttactccactcggtgtttcacatggtaaatatgactgcagtccgaacatatacatattcattaattatataatattaatatgaaagacatgattatactgacatggacatttatattttcagcatttgaagaaatcaatattatgacccatattttttttatataacggtctacattatagttatagtaagcattctatctattttcgaaaaattatgaataatttacaatgtcaaaaataaagttcaaatattaaattttacgtgtgcttgtttttcttacacacatataactgaatatttgaaccttcttttcgatattataattattttaaattttttaaaaacatcaatatatataactacaatatacataattatatatataaaaaatatctttaccgcgatacagacaaaagtaatgtccctactttaaaataaaatatctattatgtgtacaaataaataaaaaaaaaaaaaaataccttatttgtgaagaaaactctcttttgaggattgtcaaacttagaatgcacccaagaattacaggtaacattaatagaaccatttggaaaaccatgaagaacaatattattgatgaacatttccttgtgatgctcattctccacaagaatggcaccaaccattccaaaatcatcaactgacaaatcaaaatctgcttcatatttaactcctccaatattatctcttcctccaataattctatgtgcatatcctttaattgtttccttctctagtccagtttcttattcaccaaaaataaaaataatatttagttaataatattaaatttaattgtattatatatatatatgtatgcaaacactaaaaaaaagttaattttagccgtaatcttttagttacaatataaaatttttgtgactaaaacatacatagtatttaaatataagtagtcactaatttaattttagttacaataaatattgttactaaatatatatttagtcacaacaagttgtaatttttgtgaataacaattttagtcacggaccttgacaatataaaaataataattataattaattacaaatttttttgtaagaaagtattgttatgatctaattaatattttcatatattcttaaaattgttaagcatatataacaaattaatagagctccatgcaccttttctttttaattaattatatattaattaattagatgatgtgttttttttttaaaaaaaataaaaaaccctttattttttccattttttttttttgaaataaaatttattcattcaaacaaacattacaatagattaggcaagttaagctgaaccacttgtctcgtacaagggggaacaactccaacccacatggtactagctttgttaatcaaagcttcattttgagagagagaagagtttagccaaaataggacaaatatgtgtgaatggaccacttataacaaaaaataagtgtaaaacacataataggtactatgaattaatttttaagataacattattgtgacagtcttttttctttctcacccacacacctgtactagatttttttagtgatatatacaatttatgatacctttatgagagttactttacagagaaaaaaaaatagcaaaaaagaaattaataaaaaaaaaggtaaatttctatatataactagctaataatacttaagccaataaaaatatttatttcctatagataattgtaaaaattattaattggatcaatttgttttattaaatgactattcagattttaaattttttaaaatagtacaaataaactataaactcaattttttgttatttttgttttaatataaataatttaaaactaatttttaatatgaacaaaaacaaaaatatataatcagtcttgtcatattacctcaaaataaggttattattaaattttaatttgacaaaaaattaaatctataatttattttatactattttgaaaaaataaatgatttaaattatcctttaactaaataaaaaatccaaccaataatttttataaaatatcaagttatttagccttaataatgtcttgagtggtcagcaaattaaaaagacagatatacacatgagtaattcactcgaaaatgtaatgattaaaatgtaatgatttatagatatgtctatatattaattaattaattaattaatttttttaaagtgggtatacattaatattctgtaaaaattttatacataaaatgtagttagctaataatttttgttagtttaacaaaatattttaaaaatataagaatattccgtcaaatttaacggtgttaatagagttagttttataaatatatannaatattaatattatttattttagaataatttatatacatataatattaatattatttgttttaagttagttgaatttatactaattttaaattaacttaaatatatataaatattaatannttatttgtaatattattatttttaatatcgtgagcatgcttaattttaatattcttaaa

SEQ ID NO: 5257 - DNA, 694 bp, Cannabis sativa
accaaaaaaataatgtgaaatttctcactctaaaaacaatgataatattaaataatactaatgtgaaaaaaccctaactttacttgtgtatcacttgattgagatcaacttgaacatgctaaacaaataatttggaaatttttaatctaaagttgcccaagtggaggctgaacacaattgcaaagaaacaagtttaccagctttatcaaaaaaaaaaaaaaagtttaccaaacctcaattcagcaaaaaaaaaaaaaaagtttaccaaaactcaaaacaaaattaactcttttatataattggaataaataaatatacatattttcgggtaattatatattcttatttttatacttgtacataaaattcaaatacatctttactttgatactcaaatatttgttgtctcattaagattatattttagttttatctcaaagaaaattcttcatttttaatttaaattttgacaatttagaagacactctgatacttaagttggattaatttttttatctctccacatttagataaaagtaactaagatagctaaaaataaataaaagaaactctttcttgattttttttttattattttaggttaaaattactcaaaataaacatttatactattataagaaaaaaaaaaatgttatttatactacttgatgtttactaaaatactaattttaaa

SEQ ID NO: 5258 - DNA, 698 bp, Cannabis sativa
actctcattcaatagctactcatatattctatacgtaaactagcttatacattgaatcaataaagcagtcgattctgttacgaataataataaaaaaaaaaatatgaggacgatgaatataaacataattgattaacttgcataattttagaattaattgtgatcacatttatattaatatacataaattacagacaactaatgggaaaagaactttgtggtttgagcgtgaaggagctacaaaatctggaaaaccagttggaattgagtctcaaaggcatccgtatgaaaaaggtcagaaaatcgtatactcctttgatttttatatccaatatcctggccaataatatattaacactctttaattggttctcctaataaaggagcaaatgctcaccgatgaaatacaagagctaagccgaaaggtacgtacatattattttcctcaagatatacatatataaacataattataattgttgttacttatataccttaattattcaccacttaatatacatttatttttatatacacatgaatatgtacatatagtctcaagtccgcagtcttagtggctgtttcatatacgacagggtaaccttattcatcaggaaaatgttgatttatataagaagataaatcactttagccaacaaaacacggaattgcaaaataaggtatatacatatattgat

SEQ ID NO: 5259 - DNA, 716 bp, Cannabis sativa
tatatatatatatatatcatggctccttctcaataaaataagccagccgatcggtggagccaaaaaaaaaccatgtgatatatataattaaagcaatatatataggtatattttttaagtatataattatataaattaataaatgttttgacttagatcaatgcagccgatcaaggtgggttctttacaaagtggaaaattattcaagcttcgtttccctagctattacaatgtttttgacaaagtagagcacaaataaattaaattgatatttaattaattaattttttcttctatttaaattataattgttttcgtctcatataagcttccactacggtagatatcaacatcaaccaccacactctatctttatttcataatataaatgtatatatccaaaactatatcgataagataatagtatcgtgaaagcaatgaaaacctcacacacaatgacacaaacaaataaatatatatttatatataaaatatatttataaacataattaaatatgtatatatagttttagttttatgattaaaaaggcaacgtttttagttgcgaattttgttgttgaggttaggaaactactctctacacttaacatttattattatggtgcagccaacggctctcttatgactaccacgtgttcctcatattatttaatatatatttataaatacatgaaaatttcattattattattatt

SEQ ID NO: 5260 - DNA, 1449 bp, Cannabis sativa
aattaaaatatgaagatctcaacttaattatcaaatggttactcttacttataatagatagccaaaataatccaaaaaaaatattccctacaaataatagtggttgacttaatcaagtgttatagagacataataatatgcttaataaattccattagtggatgctcatgataataatattatttataatattataaatgctttagaatgtttaaagctgcacggaagtactatatatgttttatttgcctgatgactatgactcaatctcaaatggaatcattagttgaccaagtacactgcttcaacaacaaaattaattaaatacataaaatatttatattctctttttttaaatttatatataattaaatatagtacttactcaactaattaattgaagatgaacatatcaaaagtgtttggaagacatcacaaataggtcagggttaaattagaaaaccttggccagaaatgaaaaagaaaaagctaacttttttatacaatgtgtcatcatatatttattgtatatattaattatttggatatgattttaccaaaatttcttgcaagtttagactagaataaactagttagaactgtgctgaagagtctagaagaaaagaatggttataacatttagattaatgtattcaaatttgattaatttattatgtaatactaacaatacaattctcttatatatattatatgtgtttcttcaaaaaaattaaaatgaaaaaaagtattagctttgaaattttatatatatatatatatatttaatttactatagtttaattgataagtgtttattagtatttgaattttaataaaacaaaatgttaagtgtgatatgtgacttgtttgtatttacctaaaggccttgctatttactagtcaaattaataaatagttagtatttgaattttcataaaagaaaacgtttagttcgaattgtgtcttgtttatttaccaaaaataaagataatcaaaatgatattcttcttataaatttaatcaattcgaaaattttagacttaatttaagcatgaaatattaaaattttgtagtagcatttaatattttctaatttttagcttctaataagtatttaaagtgacaaatttaatgtttaaatttattttagtatttatcacttgatatattcaaaaataatcactactacaaaaatacatatttacgttgctcctttcaaaatcaatgcaaataattagtatagagttttagagtcagttttaaaacagacacttgatttgcgtcggttagaattctttcttgtctaatttaaaagctcacaaagagcctttcgcccgtcaattttaaaagctcacaaagagcaatttttcttttttttttttttcaaaaaaaaaaaaaactgatgggtcaaaacccattaaaccctctccaaccctaaataatataaca

SEQ ID NO: 5261 - DNA, 995 bp, Cannabis sativa
agaatcccagtagacttattgtaagtgaatagaaataaaagctaaaatattattgtagtacgatcttctatattcacaaaaccttatcatcatctccaaattgtgtaactaattagtaccgaaaacagtaaatcgaatagagaatattatacaaaacgctttataatctttacccaaagtggagtgaatggtcaacatggaatatttatcataaagcggcttcatgaatgtaaggttattgttgcatctatatagctatatatatacatatatatatacatatatatcaattatacaacgatgttaagaacattaggaaaatttaaataatttaataatccttgtgtatatatggcatattcactctttttccaagtgacatatatataattaaatatggatatatatagtatttacattatataagataaagtacataatgctatatatcaaatatatattatatattctggagacagtattaacacaaattatgttaattatatgcagacaataatcatacgtgaaaaaagttgcttaattaatataaattagcagagttacatacttcgaacttgagtttttcctacatcaaatcaaactgttatatatctacatatttgagcattgctattagtcatttgcctaatattgttgtgaatgattaataattttaaaataaaataatattattttttaatataaaaataaaaatgttcagtatttctttcttatcgtgcatgttttattaaattggatcgaatattccagagtaattaagggagatattcattattggtttaatttgcagggttatcagaaaagagtgaaagagatagatgaagaggcagagaaaagttgatggttgttaattaagcagcagagcagggtaattgggaaaaagaagcagtacgtacgtactagtggcgggcatctcaagaggcaaagaaggtatctatatatatatattataatagagcattgctattaggtac

SEQ ID NO: 5262 - DNA, 620 bp, Cannabis sativa
taaaaaattaattttatattttcatttgaaactttgtattaaatattttttaatatcacaatcttcatttaatcaaattgtatataattaatgaaatatattataaaaataatttattaaattatttaaataaaatcaaatatatatataattaaatatacgtgcattgtacgtaacttctgtctaatttatttattttataaatgcttatatggataatgaatttattagcatttttttaaaaaaaaaattagtgctcattaataaaaaaaaattagtgctcattaataaaaaaaaattggacctcatggtcattacaaatattattagctagaatagttgacacctcaaccataccggttaaattttaggtatacacccacttattgtgagccgcaaaattacaaaatctaagaataaaagaaaaattacaactcaaaaaagaattagagagtctattacactgcagtatatagttatcaatactccaggcaaagcaggtcccttgcaaagccttgatatcatagagttgctctcaattaaaataaaatagtgcttctgctcagctgtcgtcgtctaaagtcagctggcaagttgtaactttatcaataagagggttg

SEQ ID NO: 5263 - DNA, 1111 bp, Cannabis sativa
acataaatatataagtttaactctgtttgcttataaatagctaagtttattttttgacggtattaatacttaaattatatataagaaacttcttaggtacttgaacgtttattgtcaagtcaatagttacgtcccagtctttgactagttcaggtaattaattattttttatttaaaacttaatttaaggattaatataattttgaatcatgtgttttgcaaaaattattaatttcactacttattttattaaataacaaaatgaactttattttccaaaataatattaaataagatactgtgtttaattttcgataacttttttaatataatgaaatagactctctattttttgaaatggtatttaagcatttacgcgtcgcaaattacttagtatactatttaagggctcgtttggaatattgtattaggttgtattgtattatattaaattcgattatatatcatatttttatataataaatatgttaaattttaatttatactaatatattatatatttaggtgcttataaaaattaatatcatatgtaattttatataaaaatattgtataaaatgtaatttaatataaaactatacaatataatacagtataatacgacttaccaaacgaaacttaagtgataaattttttacccattttaaaaagagggagagagaattttttaaagcttttttcatttatttatttggacgttctggtgcgaaaaagaaagcgggtacagttttgtcgtgtgttgggacaaatggcctatcacacattttacttattttttgaatgaaaataaaatatatgaaaatgagtaagtaaaaacaaacaaaacagttggaagtggactcttttttacttttttttttttgacaacagctaatgagatattttgcatctctggaatagtctttagcttacttcaatattttgaaataattgtttcaattagatcaaaccttacttattcatccgtactaatttttctttttcttcttttcgctaagaatatatagtttttttttaagctgaaataaagtgataactaattcaaattttcgaaggtaaaaaagaaagaaacagcttttaatgcaattaa

SEQ ID NO: 5264 - DNA, 905 bp, Cannabis sativa
  modified_base (728)..(729): a, c, t, g, unknown or other
attaaaattaaaagtgatgtagtctctaattaaaactatataactatataattaaatagacatgattgtgcttctgcattttgggcttaattaataatgctattattgaggcccaagcccaatagataagatggacccaacacttgtttgtccaacaatttttttttttgttgttgtcaagatttgtccaacaattttttgatgcaaaaaaaattactaaaatttgaattagtgactagaacataatatgatcaagaagagttacttccaattttgttatatttcttctaggctcattgttttctacattccatctcagttaattatagtcattaatagggataatttcaaaaaaatacaaaaacaataaaaaaaattacaaaaatatggttgtatagattttatttacataaagatgtatttttatgttggtactcttgttattttgtggtttatttttttattattcgtatattatttttttatgttattttgttgttgtttttctgttattttcacgtgatttttttggtttttttatttttataaaatattgtaaaatatattataaaaaatattgaacataaaaatataaatattttactaaaaataatcatttatgtaatttttcctatatataaagcttaattatcaacatctcatataaataaatacatgtatttatatatctcggcctttacacacaaataaaaaaaaaagaaaaaaannaagaagaagaagaagaaaagtgtatgggtgggtaggtctcgtcgaagttattgtgatattaaagattctaactactttatttgtcttttaccccccaaagttcaaaatatgcttctcttttctactcccctcctaaataaaatagtatatatatactcgtgcaaagtagaaaatgt

SEQ ID NO: 5265 - DNA, 1091 bp, Cannabis sativa
atatatatttatgatattacatactatatttatatttaaaataagacccactagctcgaccacacacctaatatattcttcatctagcttgcttaatttcctctacctaccatttcttctaattaaccacatatataacctatatacatatgggagcaggaagtcaagctttaacatcacatcatcaaaattgtacgacgtaattatatatatataaatatataaacaaaaattcgaaatcctcatactcatatacaatatataattccagtagcaatttccaatgtgacgaaaattaaaaccaattatattcttgaaaagaccaattattactcttaaaacgtgatgaggactagtcatgcatagaaatagaattatatatatatatatagtaattagttaggaatagggagcccacacacacacacacatgcatgagatgagaatataatctttattataaaatggtcattgaagacagtaatactaacaacactactactactctactaggagattgagccatgacaaaattgtcactgcccaagtatatgacacactaggtttaatcaacgtcaaaaaaaaaaaaagtaaaaatttcacaaaataagtaaaaaaaaatctacaagatgcatggattgagggtccccacaaagaccccacgtttgattgccaagtctctttttgtttagtcttctccaacatgcactggcccagccagacctctctatctctgaccatattcacgagatctctctctaaatatataactgagttgactcgcccgtttttatgactctaactcaccatttggtattgtgtatagtacactatcttttagtactacaacaaaatgaaagagctggggcctaattttgaatttacctttttatatggttgttgttgttgttgttgttgttgtttgtctttattatgagtactaatgatgcccattgtactggctcaaattcatggttgaacccattgaagcaaacttagcaagctcttgttgaaagaaatttgaagtagttgtactaacaccaccaacaccaagaaaatctctagtcatattaccatgctcatcattttcg

SEQ ID NO: 5266 - DNA, 745 bp, Cannabis sativa
taatcattattatattttatactcgtcacattacaattattacaattactcaagtactcgtatagatttaaaattgttaaaatattttattttgtattatttggatgcatttctattttttctatataaaaaaaaaaaaaaagtttaaaaatacatagttttagccccaaaaaatgatggattaaatttacataacaaatagataatttgtgggtgataatttgtaattatttgacaagtattttggctgactttatactaattttgaagcttttttgagcaagaaatgggtttagttgcaatccaattttaattaattttttagccaaaatgttatagttcaagggaaaatgaaatttggagtacaacgcctcaaacggcatcaaaaatagtgtatcggaggccgaaactcgaccgggtcagctcaagaggttgaaggcgaccccaaaaacgacttgtcatttttttgtatggtttcagctcctttatgtcgcttattcagtattgttatcatttttaaattggctgataaattacatgtcgtttatattgaagaactacatatagtttcatggatatattacatgcctctttttaaggcaaattacatgttgttttcacaattttttcaaaagaaaattttttttgggcacgtgggggcacgtgactagtcctttttgtgcctaattttcactcttttgctctattttaattgccctacttaattatgtgattatatatatat

SEQ ID NO: 5267 - DNA, 1119 bp, Cannabis sativa
acttgttccctatgagcctcacattcatctcataggtaacaaatgggtccatcaggtcaaacttaatgctaatggaactttggataggctgaaatccagacttgtagctaaagggtatcttcaaaaaccaggaattgattatgaagatacatttagccctgtcataaagccggtgacagtgagacttgtacttactctagctgtctcttacaattgggaaattcgactgttagatgtggcaaatgcatttcttaattgcactctccaagaaactgtacatatgcatcaaccacctggcttctaggacccttctaaacctcatcatgtgtgcaaacttcacaaggcattgtatggcctcaagcaggctcctcgagcatggaatgacaaactcaagactacacttttcaactggggtttcattgcatcaaaggctgatacttctctattgattcatggcactggatctacattgattattctcctagtctatgtggatgacattcttgtcacaagtcccaactcccaactaattcaaaagttgattatggatctcaactctgccttttctctcaaagatttagggcccctgcactacttcttaggtgttgagattcacagaaataatgaaggcctctacctgtctcagaccaaatacatcacagatttactcactagagttcatctagagggagccaaaagttctgtaagtcccacctccactgctcacaaactgtctcttcatgaagggtctccatttgaagatgtctcactgtatcgaagcaccttaggatctctgcaatatctaactctcacccgacctgatgttgcttatatcataaacaaactgtcccagtttattcatgccccaactcatgttcactgggaggcttgcaaacgacttctcagatatctgaaagggactatttctgatggtattctactcaaaccagttcatcgaatgtcacttgttgcctactctgatgcagactgggccagttgcattgatgaccgaaaatctacaggggactatgttgtgtttattggttctaatctcatttcctggtctgctaagaagcagtaggttgttgtcaggtcttcaacagagttcgaatttcgtgc

SEQ ID NO: 5268 - DNA, 1332 bp, Cannabis sativa
aaatacttactattcttgtcaccatctcgcagccaaaattgtttggctcgttgacgccagaaggtttcttgttgcgatagcaccccaaaataatcctcatgagcttcttggaatagccgaacagattcatcatcgactttgcctttaaacgatttcattctttttttgctagcagcaatcctttttttgaaaccacccgtgtactccttcccccagctggcaagtttggacgcacaagcccttattttctcttgaatcgacagcagaggattgttgcaccagcaatcttgcacaatctcgtagcacattggttcatgattccaagagttctcaaaccgaaattgaatgcggctactgctatgttgaaaagtagtaggctctaaaaaaattggagtgtggtctgatgaggaaaactccatattagaaagggtagcatcattaaaaatatccatccattgagaggagactaaagctttatctagacgactctccacccaacgactagtacctcggcttctttcccatgtaaatggataaccaattaaatccatatccaccaaaccgcactcactcaacatctcctgaaaaccattaatcaaagaatttgggtagggtcttccacctttttgttcattgacgctaccaatattattgatatccccaataacacaccaagggagattagaatttcttcgcagggtacgaaccaaagcccatgtttgatggcgaaaggcacggttgggttccccatacaacccagttagtctccacttagtcgttccttccagagaaatttccacgtctatgtggttattcgaataacccaacaaacaagcttcatccttaactttccaaaataatgctaacccaccttttctgcccactggatccacactaaaacaagcctcaaagcccaaccgaagcttcagcctctcaataacatctttcttacaaatagtctcacaaacaaatacaaacttgggtttcttttgaagcacaaggtcttcaaggaattgtgaggcccgtgggttcccaagcccacggcaattccaacttatggtactcataatgtttggtgggtctgcaaagcagaacccaccttcaatccattttttgccccatttgaatcttgatccataagtacaagagactcattacttccatcagcattttccaaatccatattagtcatagagtccttctcccttggcccatcatccaagcccaacacaattcttctcctctttaaatcactaatagtcagcgtatcattctccaaaggaattggagatatgatatttaatgtagcagttgtaccatatcttccttttg

SEQ ID NO: 5269 - DNA, 950 bp, Cannabis sativa
  modified_base (757)..(759): a, c, t, g, unknown or other
gatatgtttttgtagtaattgcaatggttataagaaaattttagccaaacaaaagaaaattagtgggaattttggttacacaaatttgagagaaaattatactaaatttatagttccacaagaaaaataaatatttaccctttttaaaaagtttaaatatcttaagttttggataaggtgaaggttttggttggccatgcctttgattttgcactttaagattttcaagaagctacaatgttgttttttctatgagtttttaaaatatttatttttatgtatactttacaatgataaagaagaattaaaaaatagggatctaaaattctttttaacatttttaagaattttaatttttaatttttttttggacaaaaatacaaatagttttttttataaagccaaaatttgtgtaaaaattccttttaaaaagtcaaaatatatgtagagtaataataaacatgcatttaaattgcatgtaatattattcatgaatattatatataagtgttatcgtcaactttttcttgcaattttttagttaatatatgtacctaaaaacagatgtaggaatatttctgtttttcgaaatattcttcatgatagtattcgttataattactacatcatctctgtaaatttttaaaaattctaaataatttacagtattaaaaataagtttaaaattttttaaacactcatgtagactgaaatattagaaactctgttttcagtactgtaaattattcagaatttnnnaaaaatttacagggatgatattctaactataacgaatattgctatgaaaaaaattaaaaatatttcaacatataatttcgatcatagaaattaattaaaaaattgtaattagccctccttaaaaggtcccataaatttactaaagaaaggatgaaaggatccctattggccactattgttggctcgtgagt

SEQ ID NO: 5270 - DNA, 838 bp, Cannabis sativa
caaattctaataccccaaataaagatttgaaaacctaaacaaaaactcatcactctaataagcttgcaaatacagcttagttaatcaaccgaaatataattatttgcaatcaactattataaaaacatcacagtcaaatttcgataaaccaattcaaacaatcaccaattaaccgataagacatcaaatttccgaactcaaatgcatttagcaatgcagcagaaaccctaatcaagagacaaaggaaacattgaccaattgcaatatcgcaccgcatagaatcaaaattcaatcagacttttttcatcagaaccctcaaaatccatctgggaaccaaatattagaaagagaataaagagaaaaaaaaatacctcgagcttttgcactgcgatggcttcggatgcgccagtaatactgatgaaagtatcaattgcttcctgatttggcctcgccattgaaatcaaactaattcagagcttaaactctcacctcttcttcctccttattttctttttccttttgttttcttgtgagtaataacaactttccaaaacttagaacagatatttattttttgcgacagtgaatatatatacaaaaaaattgtgtatatatatatttgtgtataactgggtgttctgataaaggaaagaagctccgggggtaaaacagtgaaaccgctctgatctttctccaatcttctacgcctctatggagagtaaagtatatcaagattcaatttttattggttatcaaaaaaattcaatttttatttttattttggttaaagcttttaaattcttaacttgttgaattttttttcttttaaaaaattctt

SEQ ID NO: 5271 - DNA, 531 bp, Cannabis sativa
ttatcgatggtttctctcgatgattttcatggcatcaaaaaattcacatagccatagaaattatcgagagaaactatcgatataccatcgataaagaaactgaaaaatgcaaaaaaaaaaaacaaaaaaaaaacataaaaaaatttacactgtcaaggaaataatcaagaaactattgaaaaattgttgataagagtcttctcaattcttggtacgcttaccattgataaaatatcgacaaaccatcaatataacgttaaaatttatagatctcatcggaaaaactagatcatgccattttgtaaaagaaaaaaacatattcttcaaaatgtttagaaaaatattgtgtaaaatacttaattattattgtgagtgtaacgggtttcatacggtcattgtgcgtggttcgttgctttagtgaaatctctactagttgtcgtggtcgttgatggatttttttgaaaaaaaaaaatagaaaaagagagtagagagatgagtgagttagagggagttcttttttttttttttttt

SEQ ID NO: 5272 - DNA, 1660 bp, Cannabis sativa
gtctgagaaaggaaggaaaaactcacagctaaggctctatgatctgagctgaaataatcaagatgatcaacagtgggtaggtgaaagtgagacgaccatttattattgatgaagcaccaatcaagacgttctttaaggccatgaggagtagcacgattctttgtccaagtgaaaggatcaccattgtaaggtacttcttgcagaaaacatttgtctaatgatgttctaaacgcatccatgtgtgactcacgtctcaaacttcctccggatttatcattgttagataatatttcattgaagtctccaattgcaagccatgggaggagaggagcaacatcaccaaaacgctgaaaaagagtccaggaggcagatttactagcaagatcgggagctccataaaaccccgtaaaatggaagcttggactgccatcgaacttcatgtagcagtcaaaaaaagtcggccccatattcagcaaagtaacatcaatttcatcagaccaaagaagcataattccaccacttaacccaatccgagcaacttccaaaccgttagaaaactttaacaaatgacgcaatcttgtaatagagttatcagcaagttttgtttccataagaaacaaaacatggggcgattgttgttgaacaagcaatcgtaggtggcgtaatgcactcgggttccccaaaccccgggcattccaacttatgagtttcataatgagttgcggggttgcaaagcaacctccgcatcaaagtcgattgaggggttcgaatccagtgtaatggaaacttgatcctcttgaacatcttccattgacaggttggaagaagttgaaccatctaggccacggcatctcttgagcatttttcgcaaggagagattggaacttggtcgtttgggagtgatgttgggctctgaattttccttatcaacagtagcatagtcatgtgtttgttggaaaaaactagaggtatgggagagtttagccggtgcaaaggtggataaaggggtggttggaatgtgggaaggaagtggtgttgtaggtggaatcatagtatgagaatttatggcaggggggtaagttgcaaagagattaggggccaaaggagaaggacccacataaggtatatatacatgggataagtctttaacagttgggttagattgattaaaagggtcaggtggagggttggaatttgatggtggcaagttggaagtggttagtggagttgaattatgtattacatttgaggaggcaggccggcaatgcacaggggtgatagtgggggggtttaatgggtgagtagtagttggaggtgcactatgtgagatgatagtgggatttgtggatggtgagatgaggttcggcctaacagaggagtgagatggtgtttgcaaaggctgcataggggtggatgattctccttcaaaaagaaaggcaggggcgggtgaggagcgagaggagagtgtaggcaaagtggcggtgagtgcccgtctagcaagcctagtagtaagaggccagacattgcctttgctaaagtccgtacggtagcgatcatagttatttgcaggaagtcttgcacccttaagccacgggccatatggcaaatcatcatcatttccgctatcgatgcgttccataaacgctatgcattgctcaaa

SEQ ID NO: 5273 - DNA, 980 bp, Cannabis sativa
aagtgtcgccccctgaaatttcctcccagactacattctagatatgaaactataaaaactctagctattacactttttttctttaagaaaaataaaatgactatgaaacattccttaatcaaaggaaaattaaaaataacaaagcactcaaataataaggtatttttcattcaaaaaataaatccttttttaccactgtcttagcaaatagagagatatttcttgatctttttgacttttctattacagaggtatcaaaagccaatcaagaaagccacaatagctatactaattggaagaacaatagcaaaaattgtaattgtcgaaccttttcctttttcttttgttgctgcacaaaatataatcttatgaattttattagtatttattttagtttttttttaaaaaaaaacgtattatcaaataaataaaaaatgactacctggtggtggaaccggagtggcagtaattgaactgtagaaggggtagagctcgaatctagtgatgcagttgggcaacttaacagccccacctcgtttgccaccacaacaccctagtaagaaaccaatctcgctacgcaaacacgtgttgcaaaaagaggttggtacgtatctgatgagcattaaacacacactatatatacgtatgtatattttatacatgttctattttcacttagagaaaacatcaaacatattgagtacatgaatttttaacctcaacccaacttcacaccaaatatatacttcctctcagcatgttccaaaaaccatagtaatattagtaaaaagaaaacacaagtgagctagtcaagcaaagcagatacctaacctctgaaagctgaaattgggggagaaacggcaaaatcttgtatacaattgaaaataaggatatacatttttcgtaattggaatatataatattcgttaaagtgtggcaaaaatatcgatgcaaaggaaataaagtaggaagaaatatat

SEQ ID NO: 5274 - DNA, 3705 bp, Cannabis sativa
gtcatatagatcacatcgatctatcgtacatgatccaatatatatcttagtattgatttctttattttgggccttacttattttttggtttactctatttatttatgttttctttgattattgtttttgattcgtaaattttatcactgttaattattttattgtttaaagtttagttgacctaattctacaccttttgttataattttctcctatttgacatctgcaaatgagagaaatgaaatgtcaaagggacagaagtagtcaatgacgttggggtaagagacatagattgaaaagagcaaaacagtacgttctagacataaatgagagaaaaacgaagaccaaatcatagagcaatcctatttcaaataaataaataaataaataaataaataaataaatcatagagcaatctattgctttatgattgatacaaatagagagagaggtctgatatttgtggcagcataagctatagcagaaaacagctttttcgtgttttgagttcgatgatagactgatagtaagaagaagaggctatttcctatatggtgtggggccaatatatacgtaaaccacacaatattttctggtaccaaccatacctttcttatgtatgtattgtatatatatattatataagtccactccaacaaatatatatatatatttttatatataaacatctctttatataaatatgtatcgatatatatggatgtgaatgtgatacatctatatcaatctcattcttatcttcccaagctagcattaaagttgcaccattcctacttttaatgtttcctcattcattacacaaattaattacgactttatttaaaataaaataaaaaaccctttgctttccaacttgctagccatatgcagtagtaactcaatactctttcattaaattatctaattattagaaatacacaataatatgggctacacagtttaccctacatttaatttatcaaaaaagttaaccccacttcataatatacttacataataattgtcaccgtaaatatagtccactagattttattgccaagggacaacttgctgtgttataataaattattattttaaaatataggagtaattacataagctaccaattacatttttacgtttaaaattttttttcttacatttttataatttttaataaaaacaatactaaaataacaagaaaactagagtaacatgaaaataacatctaaataacattaaaacaacaacaaaaaataacatacagagtacaaaaaaatcaacaataaagtaacaagagtacaacataaaaatatcatatattctgtaaataaaattaaaaaatcgtaaaaatatttaaaattctataaaaccgtatgtttgtaatttttaattatttgtgtgtatttatgaaataatctctaaaatatatatattgtttatattgctgggtccgtcacaatttgtgggcttggaccaaataaaagtcagccacaatttgtgggcttggaccatataaaagaagctgcccaattaaaagaaataaaaagaaaaaataaagtggatcttataaaaatattttataaacaaattgtcattttttatacttttactgttacactatttttttttttttttttcattttttactttaccaagtttttcaaaataccatgttaaagttttaaatttcaaaaatactatatttcactaaaattaaaaataaaaaattaaaaaaaaaaacaacaacaacaactctaaaaaaacttaacaaacaatataaaaaacaactacaaaacaataaaaaaataaatacaaagtaacaaaaacaaaataaaataatgacctaattgcaatatgcaaaacaaatcaactcctcagtatattttttatattacgattttgttacaacttgatgttttttttttgtacaattacattattttttttcatgaaacttattgctacaacttcgtactttcaactttttttttttcttttcctttttgatttagtggcagctaaagtaataatttatttttcaaaagttaaataaataattatattaataataaaaataataaaatcttatgattttaaaatggggtatataatataataggcaatatatctttaatatgacaatatctactactgcacattgtgtcaattaaaaaaaataaaaaaacttatcattatattttaataaaatgtgtcaaaaaaaaaattaaatatatgtatctaaattataaagcaacacacatacaaccaaaaaaaatgttaggaagaaactaaaaattatacaccataaaaaaatatacatgaataaaaaaaataactaataagtaactgttgaataaaaaaatattctgaaaacaacttaaaaataactaaaaaataagaaaacaaatgcacatatatacaacaaaaaaattgtgttgaataaactaaaaactacacaccataaaaaatatacatgaactaaataactatacaaaaaaaatagaaaaagaactataaaacacctaaacaacaacataaaaacaactataaaataacaaaaagacagctataaatcaatatagaaataacaagacatcaaccttgtcaaaataggcaaattattcataaatcaactacgaataaaatacacaacatccaaaaaaaatactactttttattaatcatgtaaaatggagaaagatataggaggagtgttcttaatttttttctaaactagagaaagtttttaaaaaaaaatggctatttacaaaaatatgggaaaaacaattaagttttgatatatatatatggcatgcaaacttaattatactaaatataacatttttaaaaaaaaaacttaaaatatgagaaaaatcattatagataagaatgaatgcctaaagaactgtaaaattatgattctttttttatcatataaaataaccagttatttacacaaatactataactataaaaacttatttaaaaaaaatatccaaaagctaaaataatagcaatataatcttaataaggcaataaattaataaaataattttttttgtataatcaaaactatttttaataaaaaaatccagctatacaaataccaaaactcatataaattttacatgttttttataagcttaaaacttgatcatcaacccactaccaaaactaataccaacataatactaatattaaaaccaattaaaaacttctcagaaactccaatactagaccatctacccactaccaaaacaatcactatcccctaaaatataatattagccgcaaaaaaagtagaaaatataatgagattatattccctaaacttgttatcttgataaaaaaccagttatagataccaaaaattatatataaattttacacgcttgtattctagatactgtatggaatatggaacaaattaaatacaataccaaaataaaactagttacaaactttttaaaagctccaagacttaaccatcaatgcactacactacccaaaatagtcattatccactaaaataaaatattagccccaaaaaaaagtagaaaatagaatttgaatattcgccaaagttgttatcgtcatcaaaaaattatcaaaaaacgtatcagagttgtcttcattacccaaaagtcaccagagttaaacattggagttgtcactagtgttagatgttgaaatttgacacac

SEQ ID NO: 5275 - DNA, 846 bp, Cannabis sativa
gaccaatgaagagcagagtatccttccgcatcgacatcatttatatctatacttgtcttaagaaggagcacaatgacggcttcatctccagcctatccaaataaaaataaaactcaagccgtagatcactacacacaacatattaacaacaatatatcagcatggcttctttcgatgcagttgcctctctgaatttgagattacacctctagttagaggtctcccactattcctttcctataatcctaatttgccaaaacccattagtttccttgttaaattattgtttcaaagatagattccatgtcagttattcttctgctgatgttggaggtaagagctttttactaattcaaattattctatttgttctatttggaggtgatagtggcataaatatagtgtgtgtatgttttgaggtgatagtagtctggaaagagatgacttgggaatgatcagtgaattcgttctattcataaacagattactctctcatttttatcgtagcaaacattaagatatagcttctcctctccctcatccatcctatcaaacctggccctagtctgatacaaatattcttagacagatcctcacttctaatttttatgttctttcatgtcaaagaaaagtacgaataatttattctttaagaacaaatgggccccgtattgaatcctggataattattttataaataaaattttcacgtaaattaagtaaaattgtcctggttggatttttggaaatgggatagcaccattctacaatatttctatcaatcataatccaagtgaaagttgaagagtttttcaaaacaacgagcaatacaaatattatttaaac

SEQ ID NO: 5276 - DNA, 547 bp, Cannabis sativa
atctagttcctgtattttacttgaattaatgggttattacaccaaaaatttgttgatagcttttgtttctaatttacttctataggggtttgtttgaactcattcaaagctcagtttcttaaatgtacttcattgatttagtggtaaacagctgggaatgagaattatttttgtttgatttatgcacagatatgacttgctttgtcttgaagggcttgttcagtcacttctcatatttgaaaagaaagagaagatacctgagtataggcttgctaagactagttcagattcaataattaaaatgcatgtaaagccagaggtatttatcttatttcttttcaaaaaatcatgcacagacctttagttatgattcttttgaatactactcctatttcgtgaagcatattgctctttttcatactgcagacatcgaagattcggccctatgttgtttgtgctgttttaagaggtgtaacttttgatgaaaccagatataatagttttattgacctccaagataagcttcaccaaaatatctgcaggtaat

SEQ ID NO: 5277 - DNA, 662 bp, Cannabis sativa
aatttccctaacataattttcgaggcggtagatggagttctgtcaaatatttgggacataatcaaattttgggtggcctttgggatgattattctttaacactaaatatttcaaagtattattttccttttctgagagtattagaagttggcatctgtggctgtaacatgagatggtatcttatcatctttagtttaataatttttttaatttgatacattgataccatcaagaaaaacaaatcggtataatacagttgcagtcaagaaacaactagattagtgagagttgaaatacaagatcatcacccatactattcaacatgaagaatcccaaaagactgtagaaagagagagaaacagatgaaagaaatacagtataaaagcatggaaatgtatgtacttatacattagtagtagaatacctcatcatacaaatatggaaaaggatactgaaaaattttagcttcttcagccatgaattcaggtccatcctgttagtaacattccatgttggacagtcagacaatagcttcaagccagctctaatcccaaattatggagttactacaacctgtggatgtgtagaggcagagtttgaagatatcgcaacaaccgcaagtcctttctgcagtaaacataatcacattttgtgataatagt

SEQ ID NO: 5278 - DNA, 522 bp, Cannabis sativa
tgtaatgaagtgtatgactattccaataacaaaagatttttacgtaataataattagagcaacatgtaactaccatggatttttatttttattaaaaaaaaaaatctattcggaatgattatgttatacatgttagaaaattaagaaggaagttattctgtctgcttttttctccatgaatattattcataatataaaatgattatatatatatatatattatgtacctgcagtggcagctccaatgacgtgttttttagagtccgtagcatgaatatggagccttgttgtgtaattaggatgagaagagtaaaaatgggaaagagacatattaatgcatctcaatcccatcttcccaaccaagctctcatagtcaaccaccacccccactttcacacccactaattttcttccataattttgctcctcctcctctgcaatcgtccaccttaaaattattaaacacaccaccaacagtacttttaggcttagcagagaatgataagatgacatagtaaacac

SEQ ID NO: 5279 - DNA, 2003 bp, Cannabis sativa
attaattataataagagcaatactcaagagaaactagaaattacaactcaaaaaagtctaaataattagaaaaaatgaagcatttttacatgaattcactatatgtacacctccttcaatcatgataattgattgtttaaccaaatgatatgtttggccaaatcgaagactacaaacacaaggttgtgaattatcattttgacaaaaactaattcgagaaaattacatcttatactcattttatattttttatttttaattttaatttttttattattctttaatttatacctaattttataagaactctaatttttataagttatgtgaggttatatttaatattataattataaaaaaattatttattaattaaaattattttataattatatttgattaatgtataataaaaaaaattctcaacttatcctaaactattattagtaaatttagacaacacatttataagaacaataactactgtgcccaacgtaataacatattgggaatagtgcataaaacatctacaaaataaaatattagaaaataaattaacactctagtaatgatattaataaaattgataaaaaaaaaaaaattaatatttagaaagaaaacaaaatgtctcttcaacagatttttttttttaaaattaaacttatcacaaattctctgtaatcataaacccacagtaaacatcgaactataaaataataatatcataaaattttattaccacacaatttaataataaaataaataacgtgaatgatagtaaagcaattcaaattataatatatgaaaataataaagataaatagtaacataactacttatatttttgagtttgtaagcgacataaatttaataacttttgttagcggtataagtactcaaatatttataaaactacaatttttttatagtttcgtcagtatagagaccgttattgtcttaaacatgatacatataaagtctaaattttagatcattaggtctagactgaaacatgtaattcaaaatcttcttttaataaattcaaaatggaacccatattgataaaaatggaggaaaattataattttacaaaaattgaaataattggttttttgtcatatacaagctcaaaactttgagtacttatgctgatatttacccaaataataaataaaagacttgaattttttttttaatttttttaaggaaaagacttggagtttggtttaatacaagttacttttataacattgaaaatttctttaatagacctccttaaatggctgttatgttagaccctttatttgttttggtatttaggaaaaaaaaaatatttattttttcatgatcacatacgttgtagctatttaagactacttgtaaattttaaaaaaattcgaaatatttacagtagaataaataaagtttaaacaattacttactacgggtgtaaaaaaaataatcacgcattcaacaaaatatgtaaattttattttcgtcattgtaaattattcgaatttttctaaaaaactatctttaatgctaaaatagattgggagtatgttgcttagcccttgatacagctaagctcaaaggacacaagttcatcatcgtgaagaacgaatctagagttgtgattaattctctcaatcatttgtcgtcttgttgggagattgaaaactattcttctttttattttagactctctaattgttacgatagttgtgtttttacacgtattttgagaacttgtaattttgctgctcataatgtgctgtttctactattttaacaaacttattttgtaatgacccatcttctctttcattctctctcccagaccagaccagaccaggccaaaccctacataatttcctcattgtcttaaagcgtcattccactgtcattcagtctcactctcacacatttacttacccaacccctaaatctcaaccatggatgaagaaagagaaaatttatgcatattcacgtaaggaatatta

SEQ ID NO: 5280 - DNA, 630 bp, Cannabis sativa
ttctgtttttcaaggctgcatgagtataggtgattgaggataaagatcacgagccgaaatgaatcgaaaagatacaatctttttatggttctgatataaatggtgaagctgatatatatagatacaaatatatttatttatatataaaaaaataagaaaaaaattgaatctggaaaattagaaaaaacacgcacgtggctgttttagggtggtgacgaggagtaatgagtgctttacacatagtggggggaatttgggtatgttgatgtggagtgactatcttctttgaatcataattagtaggataattaggagttaaaaaaaaataatttaattaattaaaatattaaaaaataaaaaataattgtatttaagtagatttttttgaattaaatcttgagcttttattaaagtaatggcaaataatttaggagacaaaaatctttttaaatagtacgacttgacttgtgaagaaataaaaaactcgtgccatgagcagttttatttacaaatcgtttaacaaaatataaagaaacaaaagataaacgtttaagtaaagtcttacaattaaaaataataaaaataaggctaattataatttttgcaccttgaactttgacatgtaccaaa

SEQ ID NO: 5281 - DNA, 3967 bp, Cannabis sativa
aatttgggttatattaatgaaagtaaatatacgtacagatttcacaaagacaattttcaaaacaaatgaaaaagatcatggctttttcctcattacactgcacacgttagttttatgagtatcgattgtaatgtacttacgtgcagtgcactttttttttatttaagaaaagcattcatatataaaaataaaagcggtcattacataataattgtttagagatagaaaaattcggaatacaaccaaatctctggtaggaaaatgcccacttaaccatgttatgggctgcaaaattatattttctactaatatgttcgaaggtacaaccaacaaaaaaaaggagaggatctaaaaaatgagacatagttctcaagcttccaatgagactccttccctttaagagcgttgatcactaccctcaaatcactatcaaccacaataaactttaagcctcgagccttaaccgtctccagggccaaacagcaagtcgtcgcttccccacagggacgaacccactttgattagcccccactaacaaaaaaaactaccttttaaaaaattaaatacaattttttaatttcataattatagattcaaatagtagaaaaagtccccataaaattaaataaatctagtaagaataattataatataggtataaatattttttaatgattaataagcccccacaaagtaaaaattctgggtctgtcattgctaccccacatatatagtgcatcacaaaatttagataataacccagatcaccctgccaaaattactactacaaaattcactattcacgtcggtcaacacgactgttcattgcgttgaccaacgtgaatagtactagattaaataatttgacgttttaaaaacaacacaaataagtaatgatttgtgtcggttctctctccctcgacaaaaccgacgacaaaaggcagaattttaaaaaaaaattatataaaatttgcgtcagttttaaagcctcgcaaacccattttatgactttttaaaattttcatttttggattttgcgccggttttaaagctttgcaaacccatttactagtcagaaatgtaaatgggccaaagcccattctgcaaaccctaaaacaaaaccctacacttaaatatatcttattctctttctccttcttttattccagccacatcttcttcttcttcattcttttttttttttttgaaagaaaaatctttctctttttccttctctctttctcaaatctcttttccaccgtagcccccaacaaccacccaactgtgatggatgcccaaccccgatgacccaccctgtgtgctccgaccgttagcctcctaaaccccgtgagcttcaaccatgagctctctcggaatctttctcttgcctcactttgccactgttaaactcacgctgcaccaaaggtatagttctctctctctctctctctctctctcttttttaaatttgaaattttcctatttcttttgcaggttcatcattgattcgagcatttttttcaaatctgtttattattttttttttttttgtaaaaattgtatttggtttgctaatagattttgggtttgagcattttttagatctgattttggtttattaatcgaggtttgttcagacggtatctcgatcgaatgtgtgtgtgtgtgtgtttttattattattattttaaagtttgtgtcggtacaaactggcagaaaaaagtgtaaaaatactattcccgtcaattataaaggaatgcgatattttgatatcgactgtccaaaaccgacgcagaaaaatatcattttgcgtctgttgtatgtacgtcggttatgagaaccgacgagaatagtataaatgtcagttaaaaactgacgaaaattggccttttgtaatagtgaatgatcccttgcgaccacagcagcacacatactgtccagccccactctaacatcagaattcagcttcagccaatccttgggggggcggggaagccaaacatcctccaaactcgaagaagggcaagggagcaaaaaagcatgttgatctgcaaaagataaacgaatagagtcaatgcactttcttacatcaacaggacaattattgtgtaccttatcattgcgagttcgccagatggtgtcaataattaatgaagcataaaggaaaacctcctcagtgttaatgtctttgcttttaagatcccacaagaattttacccagtcccacattcgaatcccagtatcacatatagggaaaataccccacggagaggaccaccacaggtgaaaagctagattacaggaaaggaacaggtgttccatagattcaacctcagttccacaaagggggcaactatcatccccaattggaaaccttttactaatcaccgaacgaacagggagagctttggataggatacaccaccatagaatcttgagcctctctggtattttactgttccacaactttatccaaatggaaggagcgacctcacaatgagtcgctctttctaaagactaggtccaataagtcgatttgcaagagaatcgaccattgctttccaaagtccaaacacatctatcctttccttggccagtcgggttgcccccttttaagattgccgaagtagtctcatgattgaacatactgttaagtttttggatattccactctccattgtctatcagcagctctgccactttgctcactcaataagtatcctctagaatgagggaggaaatctttcttatgcgctatccacggatcatcccaaatattggtatcctaaccatccgccaccaatttgtaggtgcctttacgaaggatggtgctggttttaaccacgttctttgaatttcctttaagatatttagcttcaaggattcgagagcataatgattggttacctgttagaaggttccaaccccatttcgccaggaagacctgattcatctctctagtttttcggaagcctagaccccctaaagacttagtttggcaaagtttgtcccgggcttttggtgtagcccgtgattacccttctccgacccccaccaaaagtcacaaaacataccatcaatctttacaactaggcgactagagagattagttgtttgcatagtatacataggtaaagataatcccatagactttacaagggtagcacgacctgctttagatagcatcttagctttccagccttgtaatttagatttcagattatccaaaataaaattaaagtctccatctttttgtctagatctgaataagggtagccccaaatatttgacgttaccttccggggagccgattcccaataaagccttgataccttgtttcattctattgggagtatttttgctaaagaaaatcgaggtcttaagtttattgacttgttggcccgaccaagcacaaaacctctcaagacaatcccagtaacctttgacttcttccaaattagtctttcaaaccagaatgagatcgtccgcaaagaatatatgagagattataaggccaaccctactgagcctgataccactaatagtgcccttacatttggcatcctccaagagtcttgacaaaacttccgcaacccaaacaaagaggtagggtgacagaaggttgccttgttgaaggccacaagaaggaatgatcctaccaaattgtcctccattgaggcaaacattgagggaggtggtagtagtacaccgggtaactcaactttgaaatttctgaggtgccccaaaacaagaaagcacatgatcaatgaacctccaacacaaccattcttaaactgagtaaccttttcactcagtccacttaaaatgtatggaaatttcactaaccattcttaaaaatatatcttatatttaaatttagaccccaatttaatttatactaaaagatgtctataatttcataaaatacccaaaatgcttttaatgaaaatttctctctctctctctc

SEQ ID NO: 5282 - DNA, 937 bp, Cannabis sativa
acagatatagctattttacatcagtcgataggagtattttaaaaaaaagagtaatttatggcgtaaatacataaatttaactctcgatggcagataaatatctaagtttaatttttggtagtaataataatacataagttatatttctgaaactttcataagtacatggtcgttaagtgtcaagttattatctatgtgtcattttcttattagtatatttaaattaaattttaaataaaaatttaataacgccaatcaaagactgccacatgtctattgatttggttagatatttatagaagtttcaaaaatataacttacttattattacgatcaaaaattaaatttaaatatttatgttacatattctaaaatttcacgtatttgttttatttatttgaaaaaataaaggtgttcatcgaatcgttcacactttacaaactgctcgcaccgtaaaatgcagtttgaaatcttttgtgatgcgacttgtgattttgaatttaataattgcagttcaaatcgcactacaatatatgttacagaattattaatttttacaatataattttttattttatttttcatatgagaacagatacatatataatatgtgtatattactttatacatgttatacatatatagtgacttgatgattattatacatattaagatgttaaaattttaataatttttcttttcatattaatgtttgataataatagtgtaaactgctcaaaccgtcccgcactatactagtattttcacagtgcaatttttatacttttaggatctcacaaaaactgcaaatacatttttgtttgaaaaaataaactacaaaccgcaccactcgcataacacccttataaaaaaaatattaatcttgtcttggcagtcgaacacgtggccggtcaatcaacaatgcacgtaggagaaa

SEQ ID NO: 5283 - DNA, 1280 bp, Cannabis sativa
actttttgttatcatttctagaaatacttttttgaaaacaaaaagtagaaacaataccaaatatgctttaatttggctgtctttttcgtatttctagctaagtatatgtggaatgaaaataatgtatcttacgtacaagtgagcaaagtctcctatttatagaattttatgatcgccatttgattttcaaatctcaccaactcgacgggtgttaccacacctaatttgagcgtattcagacatccaaaaaggctaaaaattcgaggtgaataaaatgcatgggtgatatgagtcgtcacttaattagtaggtgactgtcacctactcttgatgatgcccaaaaatatcagctttggtaacatgcatgaccaaaatataccccaaaccttttcccatgccatttcttaacctcaagccacttgttgccaataaaagtagcatccccaacatccatacaaatattatggcccatgaacatcaaattcaaaatgtgctactccagtaaaagtgattttgtagcccattctaatattaataaatagagaaaacaaaagaaagattgaaaatatcaaatgaggataaaaagttcaatttattctaacggcaaaatgtgatcagtaatatttgtagatttgatcaagtttgaactaaaactgaatactctaaatctcctaacagcaatatatgatcacccaaaggcattattctctttcctttctcattagcaaaactaagatgcatacatggatccactaatatccttgttcttgtagatctgtttgaaaaagtatgtacactgttaaatcccagtagctgtttctcaggagccccatcaataacctttggcaatctagagtataacatcacaacatggcttccatccatgtctcctgcattcatcacagagatttccacaaagaatttcaacgaattacaagactctatctcgtcaatgcttatgtaatcaagttggttttctccttggtgtagtatgtttttatcagatccagctttgaaagattctgataagcttattttgttgggaactgacaagaatttgtaagtgtaggtgctgtagctcaggccatgtccaaatgaatatacctggcttccagtgtagaatctgtaggttcttccaggatagccacgggaagaatttgctcgcattctcatatcgttcatggggacatcagtaaaggactccggataccaagtcataggaagccttccacctagaaattgtaagcttgatcaagtcttaagatatatggatgaaaacc

SEQ ID NO: 5284 - DNA, 1288 bp, Cannabis sativa
ttactttttatcaaattcaaatttaataataccctaactttgaggtgttatagccaaactagttatcttgttttgtctttgtttgtactaaaaacttaattcaggttggttatatttaaaaaaaaaaggctggggtcatttttatatttcaaattaatttttctttttttgtatttttaagaaactttacataacaacccacatagtaaccaacaaagtaatctaaatcgtaattgaaatctatatagtaacctacatagcaattatcgaaacaatttaaattgtaaaaataaaaagaaaaaattaaaaaatagtagatatagtgattttccaaaaaataattaacaaaaattaatttaagtgcgtattttgttctattttaaaaactataaagtctaaattgttatttatgaaaataaagagtctaaataataatttttttaaaaaaaaaattaaaaatgatattttaaaactctaaagtaatatagattatcgttatcgtgcataacaattccaaatcaattcttgtggtccttggtcggtgttacgtggcacgacataatttgtcaactttttcaaatgtcattctggaccacaattacctctcaccgttctttttggagtacacggtgcatggtcaaaagcttatgtatgcacctcacataaaataacatattaaacaacaaaaaaaaaaaaaaagaaaacatattaaaccaaagacaaataatgaaaccaaacacatagctctcataatcattgctaaaaataattaaaaatgtactaataacaagtaattattgatggtataatacagtatagaatgctatgagaaaaagaaatatggcacggcaccatgataagtcatacatatactaattagtatattaggcacagcataattttcttttttaatgaaatgtcatttttaatcatagcaaaagcttatttatcaatgaaatattatatactatttaaatataaattattaccaatttaattataataactcaaaaaaatattcagtcacaataaatcataatttcgtacctaaagacttttacaaatttcttttttgattgattcaacttttacacagatttcttttggtgataatataaacttaatagtattgttaatttagtcacagatttacttttattcacaaattttaaatattaattttatttcaatttgcgtgctcaattttgattcattttcctataactcatttaaaataataattaatagactcataaaagactttgaaataatttacttttaaataact

SEQ ID NO: 5285 - DNA, 958 bp, Cannabis sativa
agtgctatttggaggattggggatggttgtgacatttatataatatatgccttcgttgtcacctaatttacttggtgtgggtagtaaggtggctcagctgagatttgaattgggtagttgggatacataattaatttgtgggttattttctcctgatgaagcgacattttgtcttttccttgatcgtcttgccatctcgagacatgttgaggttcgagttactattctgttaagagtgactactggcttgctatcgagaattcaagcttgggtagagctttgcctagagggtttcttaggatggtggaagaaaatctagagtctcaacatccctcctaatgtaaaagtgttcacttggcaaatctctaataattggattcctacaaaaaaatataatttaattagtcatggtcttttgaatgataggatttatcctatttgtgatcatcaagaggagatcactcaccatgcactttgaggatttccttctctttatattcatgtaaaaaaatttgtgattttatgggaatctgatggctcattgttcggatttctatatttattctgaaataatatattgatttgtaaccactaaccaattaaaaagattgaagtaatctattagttgttacgttgtggagaattttgttccaaaagaataagaaagtgttgtacaaaaagttaacaatcatacacttatatggtttcatcgttgggtttaattattcaggaatttgtttgtaatttacattatttttaagtttcaagttctcaatatttttgaataaaggtgtagcccacacccttgctaagtagactttaatggttaatactaacaaagtttagtattctagtttaatggttaataaaggtcatttttgtctttaatcattttttcctataaaagaaaataaaaaaatattaaatactaatattatatacttaatctataaaatgt

SEQ ID NO: 5286 - DNA, 2067 bp, Cannabis sativa
ctaaaagtcacgttggagctgggaccaatagtaaaagggcagaagttcccgtcgaggaagcttgcagatgcaaagaactcaaccatggttcgctgagtcaaacgttgtatgaaaactatatgatgtggagagtagacgatatttacaatatgctgacgaagctcatccacaaaaagaatcgatcctctgcctacggtcagacgtctgtagacgatactactgaagatgaaggtgatgaagcttgtgggtcgtcgaaaaagtcgagaaaacgtaagggaaccttttatttggttccctctagaagagataactaaattgtttcttcctacaatgctttcatttcagtgttaagttcattttccaaagaattgttgttgggatatcatagtcgttgttgtaagcctttttaaaatattaatttactctcaatatatagtattaacctcaatattaggtactttgtattgacctaaataagttactctcaatatgttgtatgctttcatttgagggataagttcattttttaaagaatcgtacattgaatttgaaatgattaatttaaactaagagaacatgtttgcttcaattaaaatataaggaaaaagatggacttgtatatcatagatgatgatgtaactaatacttaaacgcattgcattagtttttatttcagttgattaagtagaggacaacaattttttcctttgtttattgttttaaattattttccatgtaccattaacaacatttagtacataagtgaagatagtaatcaataattgttttctggaaataaattctttttggatccataagatttgtaaagtacttaatcttacactaacaattttacaagaaattgatttgaaaatgaaaactctatgatataccatatctcacttacatccacctaccaactttaagaaaagacaacactcaaaaaccaaaagtacatccaaaattatggcaaggaacgtatgacttgtgaaaaaaacaaaagaataattacagtcaagaaaagtatgggtatcacattgaactatggttgtttgtactttgaataaaagtaggcaccttctaaaagtctgaataggaccgccaataagaacatgtctccaatcaagtgtttcgctccaaaaaagtctccattatgagataacttgctcagggaataaatctcacatcaactggtagttatttgtaaacccataaaaatataaaatacagttgaattatacactgctaaaacaacagcacatctccaatccagaagggacttgtcccaatcgatcaaaatttccccaataaattaataaaccagcacatttaattacaatgacaaacaaatttgtaggggaaaacagtggtcattgtaatgttaagttaaagtaaaatgtcttagtaactaaattaagaatggtcatgtcaaagccataccacctgcctctgccacctgtgtaataagaatagtaaactgaagagcaataccaccttctttagataaagccacactcttttgtgctcctatataaaggagcctatgcattttgtatgtcactatattttacttccttgcaaatcacaaacacagaatatcttagttttaaaaaaaaaacctcaaacagcaactttgagatgaattactcacctcatttctcaaaccaattggaagtatcagctggtagtaatgaaccaacttttggttctagcacatgggaacaaccacatgcatctgatggcatgtatgtattacaaatggcaatgaacacaatgcaagccattcatgcacaaaatgcattgtttgctaatgaatatcatcaaatgctcatccataacaactccctacatcaaagagttacatttctagagcagcagcacatcaacaacaactccttgcatcaaagagtttcatatctggaacagcagctagaggagcaaacacaagtgtataactataatatttctgagctgtctaaaagggtgtatgcccttgaacaagctgtggcttccacaagtgctggaatgactgacatgcaagtagcagtccatacttggatgtccatg

SEQ ID NO: 5287 - DNA, 1265 bp, Cannabis sativa
gagagagagagagagagtaaaaggttgttcctaattttatttggttttttttttaaaaaaaaaatgttaaataggattatttcacatttttcttatgagaccagaaaatatgcagaaatgaggtagagaagagaattaaaattgttaatatagggataccaataggaggatccgtctataaaagtgatgtttggctacgtagttaaacattgtaatcaggtatattgagaaaaatattcttaatttaattatttttaattttcaaattttaaataaaaatttaaaaaaaaaggcaaaaaaggtatttcaaacaatataaacaatataataatctttacattagttttgtaatgtaatgagaattacatgatgtaatggctattataatatgtaaagctattataaacctttaaaaattaaaccaaacaatatattgataataataattctattgcaattcctattatatattaattaaaccaaacatcacctaattgtaaaagttttttggcaccaataactggatcgaaatatatacatatatattgacaaattaaaagcaaatataaagaaataatacaagaagaaatctgttataaaattattattacacgtattaaagtttacaaccttatggtatatcaattaagtaatgataattaaatcaatactcatacacttgtacaaaagacacacactatacgtacatgacacgttatgttgttattcattactatatgtgatgatgcatcataatatatataaatatatatatagtggcacatcacatataggaactaataggccaataatcacccactatatcatgtgacattatttacctcattcattttttttttttttttgaacaattaattaattcattctaattatatatatagtcccatcactaccatattggtcatgtaaaaccgattttttcaatctttatgtatatatgatgtatatctatatatgtaataataatatattaaaaatgataacttaattcctatagtccagtagaaccaacaagcttagttaaaccaaaagtaacagccatggcaatccaacctccaaacaaaaccctcaatgaagacttaacaggatgagccttccctaatatggcagccaaagctccaaaccctaacaaagctaagctcactacagcaacaatcactcctaatctcaccttatactccttaacaaacgcagccccaaggagcggcaccgcagccccaacaccgaacgccaacgccgaagcc

SEQ ID NO: 5288 - DNA, 608 bp, Cannabis sativa
accagaaagtacattagcatttaaatgattttcagggtaaggatctcccgcaagagcaaggctatcagcccaagccttcttttgtctaagataatcaaccatagtcatgttacctttccttacagtttgaatggctgtccgagtatcatccattttggattttgagtgagctccatagagattttccaaagctttccaaagagcagctaaagtgttgcatcccataacttctgtggctatggattccgtcatggagctgtacaaccagcccatcaagagttggtcactaacgatccaatgttcataatcaggattgatttgaacagtaagctcgactccttcttctccagagggaatagcagcaggaacaagttcagcagggcagattcgagtgccatttacaaatccatcaagtctatggccacgaataatagtagaaaccatggttttccacagggtatagttatttcggtcaagcttcagaggaaagggttggtttaaggtgttgaaaggttgtgtgaaattagttacatagctcgattgagcagagtgtatgttggtgattccagggttactggaggttggcacaccattgttgttggcagggg

SEQ ID NO: 5289 - DNA, 1770 bp, Cannabis sativa
tcaacaattagtctattgatttaggttatgcacgtagttattggtgactgtctatgatcaaatttgggtgataatttaagtgagatgaataaattaaacaccatccttcttcttttcttttcttgaaaaaaataaatcaaaaatgcccatttcaaagcattgaactcaatgtaagataagcaactaaacaaaaatagcagagtgagaaacagaggaggtagcatctgtgaaccaaccgaagataaaattatccaggcttctattgggcatgaactcataaacgagtaatttctcttctttttgaatgcaacaacccaagagcttgactagatttctgtgctggagtttggagattaaaatagcctcattcttaagctcttcaatgccttgtgctgagcttctagatagtcttttgacggctatttcctttccatcttgtagttttccctgcagaagtgcaaatagaccttgaatttccaatccagtcttacttttatgtctagttgggggcagacttgaattaaacataaactacttaaataaaatatagtagggacaaagtgtagtgaaggtataataaatcacattaatatgagcaatcaccttgtaaacagaaccaaaccctccctccccaagtttgtttgtcatactgaagtggttcgtagcagtcaaaatactatctaaattgaaaatatgaagctcggcttcaagcgaatcatcatatggcttgtcactacaagtatgcataggactgttaccattatcattgaaatcaaaaacttttatgcttttaaccttccctgttataaaaagttttaactattagtatcaagtttgatatggaatataaaacttcaataataaaaggaaaaatttatagtaagattagaaataaaactcgaacattacatagatgtttgaagcatccgctcacggagcaactcttcatgtttgctctttgtcggtgtatggcgaaaactgatgcaaggaggagagcacttccgaaaatagcagtaatgctgatgataatatttttaattctcgttcctctgactagacaagttaattgcattaagtgttaggcatgcaaatgaaagaagagtgtatgtattaacagagtttgtgcaagaacagaatcattctcacctagctccgtgtgagcaacacgaagaaacagatcaaatccaccaaaggaaagcttttgaatgtcaacaaggtcatcccaccagaccaaacaacctattccatttacaaatgcgtaagctaagcaagaacaattattcaggcaccatgtatagcaacctttataatcatcagtgatcacatattcatgtaaatctggaagtttcagtaagctaatcttgagaaacccatcattctttcctccctctataatagcatttctactagtgtttttatcacaatgcaattcagtattccttttgcaccctccagtccaatttccattcctccactcttgatctgattttggtacatacccttgtaaacagctgcaaatgggagatcttgctgttttgcatacgccaaaaggtccacaggtcccatatatgtcacattgacttcttggtacttcccaatcagttttccaaaagtcatcgcccttgaattttaccaaagttgttaaatatcctttcgaagaaacaaaaacttttggggcaatggatttattgtacaagttgaaaagcagaaaggttgttccttcgtaaacttcttgatggagattcattgaactttgatatgaagtatctg

SEQ ID NO: 5290 - DNA, 903 bp, Cannabis sativa
gagagagagagagaagagaggggaggagaagatattacaagtcacttaaaatcatctaaaaaatgatatcacttacattatcacaattttcgttaggatatctactattgtctttgtagctcagactatagctaggagtagggccatttgtagactgatcataagaagatgataaatctagcaacgcatccaaggcctggaaaatcataaagacaatcaattagactatagcagcaaggaactgttgtttacacacgacatttcagttgcaaaatgggtgaaaaagaaaaacccatgacatcctgtcatcttccaaaatcataaaccaagtcctaggtgaacaagaattcagacaattgacaattatattccagacaaccatcggtagagaatttttacactttacactagaaattaacagcatgacataaaataaaaaaaaaaaaaaaaaaattaatgccacattgtctgcaatctcataaatatattagtgcaccagcacagcctaatcatatgagtccaaagaaaagtagagaaatggataatgtgtccaatttccattaagaactaaccatccataagcacaaagtgcccaaccaacaaaaacaaactccaaatctaaattaaggcagcgaagtaaactataaaattttatactcctaaaaaacagagtgaaaagcttcttgtacaaattattattattattatttgcaaacaatgatccctgtctaaacctacaatatttggggaacaggaactccttctgcaaattatttgatgatgaacccatgtaatttgtaaatacacataatattattcactaatatattaataataatgtcccggcacatccacaattcagatatcagcacttcaaaacttgatattaaatatttttaaaga

SEQ ID NO: 5291 - DNA, 1114 bp, Cannabis sativa
tgagggataacaatggcaacaaagtggcttcgaaagatggaatgacaaccataatcacagagtattttgctgatcttttttcagcttctatggtagacttgaaggccttggaactagtcacagaatcaattccatgttccattactgtagaaatcaatgagctcctcaccaaacctcttactgcaacagaagttctaatagcattgaagacaatgagtcccaacaaaagcccaagtagtgatggcatgtctgccatgctttatcagaattattggcacattgttggttcaatagttatagaagtttttctaggtgtcttgaatgatgggtacagtatggattctatcaacacctcaatcattacactaattccaaagattaaagctccttgtggtatggttgatttccgtccaataagcttgtgtaatgtaatttacaagctcatctttaagatgttggtcataaggtttaaggaggtgctcccactggtaatttctaaatcacaaagcgcctttctctcaaatcgcctcataacggataacattctagtagcttttgaacttgtgcatcacatccaacataggacaaggggtggtaaaagttactctgctttcaaattggatatgagtaaggcatttgatcgtgtcgagtggccttatctttgggcagtgatgcagaaaatgggcttcgatatcaaatggatagtgttgattcaacattgtctagcttccacaagcttatctttctcactcaattgtgaagttacggggtatgtcaaaccaacaagaggtctccgacaaggggatatctcttcttgatttgctctgagggactatccagattgctacagaaggaggaagtggctggtaatctttgaggtttacgcataaccaggcatgcaccatcagtctcacacttattttttacggatgatagcctattgttctgtgaaactatggaggggttagctttagcaatacgaagatccttggacatttaccaccgagcttcaggccaaatgctaaacaataagaaatcagttatgtctttctctccgaatacgccagttgctgcccaaactttcttccaacagactttacaaatgccaattagt

SEQ ID NO: 5292 - DNA, 537 bp, Cannabis sativa
tgcactatctatgttcatacatagatatggtatgataccaggacaataataatgtaggggtgaaaagttagtcagccaccaccttagggtagattacctacccttgggggtggtggggggattgatcacttgacatattcttaaggaataattactctatctcatctccatatatagaacatatccttggaggtagttattctatcttaaccccatacataaaacacatccttagagtagttactctatctcattcccatacatagaacaaaccgcgagtctatcacccattcatttggaattatatcttttgtcaagtgactttacgtatcatctattaatttagtcttgaaaagtctcgtaacacatgtcatcatatttgtcatgtcactttttttatcagtaaaattataaatttttacttaaaattcagtatttttataaaaattcttcttcctctcgaattcgtcccgtgtctgaaaaaggactaaatagctacaagtacacgggtggcttttcattcttggacgggctgtg

SEQ ID NO: 5293 - DNA, 890 bp, Cannabis sativa
atacagttttttaaaaagactgacactaaagactattccaattgtaaagtgtgagttcattaaggcatccaaattccgacaaatggagaaccttgttcgttgacatagtttagactttagataggcaaagaagaggctactgattttaacaaaggtgataagataagagtttaaatttccaatcctccaatcattttgccatattgtctctaagactttgctttggtaattccctccttcttttgaaaacaaaatttcctaggtgggttttctctctattggattgcttgatctcaaggcacttcaaaatagaatttttttggacaatgggccaaattcttggagaaaagcacactaggatttgatttgctataaacttgcccaaaccatttctcataattaaagcagggtcaaacacttgataagctctttagcataccattaatcaaaatagtatcatccaccactactacaaaaaaggagcattcacgacggttttaaaaatgcttcttttaggaaaccattgctaaaaaaattaaacgagtgtttaaaattgtcgagaaaaataaggtattcctgaaaaagttttaaattgttgagaggtatgggcgatagtttttaaacgtgccttaaaaaatctcgtgtatttgtaaaagagaattaccgacgcaaccgtcggctattctataggcaacggtctaaacttcaatttcacacgtttcagatctaaaattttatttcccgcatcttaaattttaaatttttattttcctcatcttaaatttcatttcccgcctcttaagatataaacccccatccaaaaaaatcatttcatttattggctctctctcctccgcggccatgagccatgccgtccatctcctccacac

SEQ ID NO: 5294 - DNA, 1444 bp, Cannabis sativa
acaaaatcctccaacaacctcctctcgactcggctgctgctgtagcattaccgaagcagacactgcaccaccattgaactggccagcaaacatctcatccgtgtcattcccatcacgcaaccactgagagcccaccaagttgtttctccgtcgtggttgagccctcatccaaacaccataaggctttatgagcaactcggctggtgtatcaaaaagcttagggcaaaacttcttagagtgccctattataccgcagataaaacaaaacgtagggagatactcatatttgaattctgcccagaacccatcctccattgcaatccgacggagcttcctgcaccgtctcaagggaacagtgatgtccaatgtaacccgaacacgcatataatctctccgcacattctgaaagttcttaggatcagccttaacatatgcaccaacaaaattacccaacttctccacaacactcgcagacttaaaccccggttggagaccatggatttgcacccagataacgagattgttcagcactaccctttttggatcatctccccttctgagcttgtgaaaatcaaattgaaccctattaaacgtccacgggcttccctccaccaccctttctaagtcaatttcatgaaaaaattgaaacagataacggttggtgtcaatctccttagcataaactcctttacctggctgccacaaagaggccataacatggtgcataacttcgaaatcaatggctcttccagtcaagaaccggcccacaatacataactcaacattcaaaacttggtcctcagggacaagaaaatcaatacccaactccccatcatcctctccatctagtgaaatattcgcatattgtccttccacctcctgataagatttactactagaagccatggcacaccacaatactttaataaccacaatcctttattgtattcagtattgtcgtttccaagactttgattagatttccttggttgtttaaagattttgaatactgcttagttttctatatagactgttgtttaatggaaattatattttctagaatactaattgcaattaattattaaatagtcctcacaaccagccacaacacaatcgcccacaccacaatcggccccaactcaatcgggccacaacacaaccagccacaacacaatcggcctgtcaaacccaatcgcaacccccaaaaacttccaccaatcagccaacctgcaacccgaaaacccaccccacaatcggaccacaacacaaccacccacaacacaatcgccaacaccacaatcgaccccaactcaatcggaccacaacacaaccagccacaacacaatcaaccacaccacaatcagccctaactcaatcggaccacaacacaatcggccacaactcaaacggcctgtcaaagcccaatcgcaacccccaaaaactt

SEQ ID NO: 5295 - DNA, 1296 bp, Cannabis sativa
cttgttcgtcctttttatactatcaacttttttctcatgtttgcaacttattagcttaggtacgaaataatcaattgtacatgaacattcatgataggttaacacgagggttgagatttttttttacctacagtaattacaggtagacatgtcaatgtgcataacataaatacaaatttgacactaacatgaattgccaaccatagctgcagtgaccttgttatactatttcattaacttttttgctcatgtttgcaacttgttagcgaaggtacgaaataaatattatttgtaaagaagggatagaatagaaaatcatccaccaccataggattgtatccaaattcattgctctgtaagggacaaaaacaaacatcagccaaaactagtattatcctagaaagtagtttagaatatttagcttgatctagattgtaagaaggaatataataagaaaaaaaaagcaaaagctgaatactaattatagacttgtaatgatgattagagtcaaatcaatgaaaagggttgtgggctcagaagaaaagacaattaaaagtgaccgaaaacttgaacaagtttattatgctgttactgcagcttgatttcaaatccattacagtaatctttgtattacatgtgcatatttctctgtagattcacggagattaattatttgttcctcgcctccactaatcactagcttttactaattaactttatgataaaaaaaatgataagaaagatgttgtgttctgattcattgtatactaaagtgagctcttcagttcagcctttattctttaagcacaccagttcgatcgagtctcaatatcggcataatgaatcgaagaataagaccagatttttgggttatgagctcatgtggcagactcctatattttgttcatcggtggtccctgaaatttctgtagaccaaagaaggaaaggagttaaacaatcatcaacaaatatttttttttgtttgaaaataatgaatatatcattgaacaaaaacagtatgtttgattatagaaagttgtctaaccacacaagttgtttattcatttgaagggcatgtacagttaatcgcgcaaccacattagctgttcgacgaacatgaattaagaatacccttaaaaatctagacaacaaacttgccaaatcaaccaacaaagatccaagatcattaaaaaatattaatacactagattccaacacaacgttgcactaaacgtgtttgaacaagagtagtgccagaaaaatgggtaaacacataagaaaggaatgtgtccattg

SEQ ID NO: 5296 - DNA, 1197 bp, Cannabis sativa
aaaattaatatatataaaccgcgtaagcttaaaatgtttccttgatagttgataggtatcctactatcatattcatatgcatcgacctttttttaaacgcggtgaagcaacatatgtgtatatattgcttgccaattctggtaagtttcatcactgtgacaaatacagaatacaatactacaataataaagcaagcagcccaagtattttcaatctaatattctcttattcttttttgtaagccccaaccctgttttgtgtttcttcaaattcaaaatggtgtcaagtagtcctattttacataatgcagagtattgcattgacacattccttggtctaagtccaaaaattctgaaccaaaacaagaagaaatggcattcggcttttgttaccatctactgctctagagctttctcctcatctttaaaagcttcctcatcaccacaacaaactagctacaccaccaaaataccaccctttccttattcccacactattgtgaatgtgaagacagaaaactgtttcgaaatcgatcagaacaagctcaaccagctcaccaaagacaaagatctttctcaacttgaagagttgggtggggttgatggccttgccaaggctctgaaaacagatgcagagcatggaattcatagtgatgacaaagacattgcccgaagagttgaagagtttggctcaaacacgtatagaaaaccgcctactaagagcttctttcattttgtgtggcaggcttttcaggatcttactattgtcattcttatagtttgcgctgcactctctcttggcttcggcatgaaagtgcatggaactaaagaaggttggattgatggtttgagtattttcattgctgtttttcttgtcattggtgtgtctgcagtaagtaactacaggcagaatagacagtttgacaaattatctaaagtaagcaacaacatccaaattgaagccattagagatggacgacgccagaagatttcgatattcgaaatcattgttggagatgtagtttgcttaaaaattggagaccaagtttcagccgatggtttgttcttagaagggcattctttacaagttgatgaatctagtatgacaggggagagcgaccacgtagaagttaaccacaaacaaaatcctttcttgttttctggcaccaaagtagttgatggctatgcaaaaatgctt

SEQ ID NO: 5297 - DNA, 1073 bp, Cannabis sativa
atgtattgtgtttttcaccaggtcgttgcttgcttgtaagttatttttattattagttaattaaattgttatgttttaagtttttttaatcatcttctattctcatatcagtttatataatttgtcaataccaatgtaagccaaactgaaccggtaggtttatagggttataataaactttacttatgtcatgatagttttcatcttcttataactgtacattactgcagtttgatgtgtgagaaattcatagataagtaattgtattgatgttattaggcaagatttagtaatgctgtccactgcaaaccctgagactgcccgatgatagcctgctgtaaattatgaaaaaaatttaattagattttttaattttttaacgccttctcattttcagttgaaaattgatgtcggagttgataacccatcagtggaagcttgtgtatgaattagaagcttgcgtgtgagggtatgttactttaaatgttattgtttgatttatttatttattaagttatgagcatatttttgcatattagtggagatacgcatctctgtaaaattaaaataataacctaattaatttgtttttcaatttttgggatataaggattgatatttagttcattaccttatcatcttttgtcaatctttctgtagaaaataatacaaattatcggggacacaaggactaagaatttattaattttgctacacaagacattaataattaatgaatctttaggacgtgaagcttagtgcatagagcagtaacaatttattaatttctgggacatgcttttcttaatatagggagaaagtcccacattgacttggtacaagtctacattgtagggactgaaatttgggtgggggggtaattgctggagaatgaaccccttttccctgtctatattcttctctaatggaagcaggatagggaatccttgttggggctggaaaatcagatgggaacctgtatattgtaattattgtcattatttttatataaaagaaatttgtgagtgaaatggagaggtattggtttacagttagtattgttgtgtaactct

SEQ ID NO: 5298 - DNA, 552 bp, Cannabis sativa
gacatgtagtttgtcttaaaactacatgtagtttggctgaaagttgatgtgtaaacccaaaaaaaatgacatgtagtttattagcaattcactaaacgacaataatttaaaaaaaagacaactatttggctgaaatcatgcagaaaaacgacatgtcgtttttgggtcgtcttcaacctccacatgggtcattcaaacccgattctacccatttcgaacccgatcaacgacccggtcagatttcagcctccggtacactatttttgacgtcgtttgaggggttttccaccatttttcatgttctctctttttcccaacctcatttcacccgaaaacactctaaacccgtaaatcacatacccatattcggccattagcaaacttttttaaaaaagcttgggttctcaacattttcaataaaaaggaaaggggaaatatggtttaaaatattgattaactcaataataatattccaatctaattttctctacgaataacttaaaaaatccagatttttttttttaaatgaataagccctaaaatcaaatgtcc

SEQ ID NO: 5299 - DNA, 1018 bp, Cannabis sativa
cagttattttgtttcaatatatattcctttaacaatctcttagataaatcacaaaaataatagtcttatctatgtatgattcaataaatttgaatttttttttcccctttttttttcattttcttctttaaattagtcaaagttgtcacctagagaaattggaaagtacaattccaaagaaataacattattggttttttggtgtgatgaagaaatattattgaatattaaaaacaaatgatatccatctttggatatattattggtacaatatgaggactgcaaatcattcacttttgatctttagccaaaaattaaattaaaaaatgtcattcacttttgaaaatttggatgattacatcatatatgtcatcatgatcataattttgaagaacaatatcttcactcttccaataaagtattttagagaaaaattagcaattttggcagtactttttttttttttttggtcttttcaataattacaaaataaataaaaatagtgcagttttccacatcaaatttcactgccaaaattcatataaaaattataaaccatatttaatagtaataaaaatgttctttttatttaagcaaaataaataaataaatgttctttttattgaatccaaattttcaaagtattcatttaatcctttttaaatgtgagatgcaaatttatggtgtacacttttgtgatagtaaatcatatatttttgcacatgtaaatatattatcacttaggttgcgtttaattgagaggattagaaatataaaactaaaaataagaatgataatagaaatgaaatgaaataaaatttaaaatgcataaaaaaattattaattagatccgttccgttcggttatccattagatcggataaatacaattggatataaatgttaaatcaattaatatttttttaaactaaaatgtagatgtattttaaaactatataaataccattggatgactgttggatggtaattggaaccgttccgttcgattatccattaga

SEQ ID NO: 5300 - DNA, 2700 bp, Cannabis sativa
ttttttttgttttgatagttttcctttctttacattgaataatctatacaccactatacttttaatttcttgagctatctttgtctctgttttggaccagcctccaaaactacatttgtttctattcagccaaacactataacaagtcgctgctaagacaacaatcaaaatcctgtgtataattcttggagtagggatcgacagccagcataaccatcctttgaattcaagaggccaagctggaaaaagagattatcatgtgtctcaaaatgctcctcacaaaccgagcaagctaatgaacttaagataatgtgaaacttgttcatattatctttagtgagcaagtgagaattcacaatttttcaaagaatgaattgatgctttggtaaattgagattgctccaaatttccatgtgataagcaaattgagtttggggaagagagttggtatgaaatttggcagctctgaacttacccgttttcccagctatttcaatctccgttcaagtaaatctctatttcaatttgcaaagttttctctagtaccaacttgtattaggaccagaagggcacatccttaagatagatgttggtgatccatttgacccaaagaatgtctctctttttagtaatggccaaaatgtacttggctagattagcttgattccatttagtaccatctctaaaactgagccctccaaactgttttggaagaaagactttctcccatgaagccacatgaactttgcttctgttctccttcaatccccaaaaaagccacgacacagtttttctatctccttagtgatactttgaggaagaataaaaatgctcatccagtagtttcgaaaccccgctaaaataaagtggattagctgaacttttccagcaaacaataaatgtctactcccccaagtttgcagtctcattctaattttcttgatgatgatatcacaatcttcagctttctactttgttggtcttaaaggcatccctagatattttaaagggaaagtaccttcggtcaatcccaattcccttatgatttcctccttttcattgaggttgatccctccaagatagatttggtatttattcgcattgatagataactttgttgtagcactaaaatcttcaaggatattttttaagacctttatagagtgtttagtacctttgcttaaaagaattaggtcatctgcagagcataagttgatcaaacccaaatttttacaaagaggatgatgtttgaagttgggagaatgggctgcttggagaaggtttctagaaagatattccatgattagcccaaaaataagaggggataaaggatctcattggcgcagaccttttactccttggaatcctccttgaactcttccattcatcattagagagtagtgagttcctctaatacacatcatcaccaatttgatgtatttgctgggaaattttagagcattcaaaagatcttcaaaaaattaccaatccaccgtgtcataagctttgcttatgtcaatcttgatagtgcaacggggggagacatttttccgtctgtagttcttaagaatatcttggagaatcatgacattatgagcaatcgctcttccttgaacaaaggctctctggttatgatgaacaagaataggcaataccacagccagtctagcacataaaagtttagatatgcatttgtagattgtagaacaacatgcaactggcctataatttatagcacgggctggaacctcattcttggggattaaggatatcattgtattatgaaattcagttggtatagtacttgaattaaaaaagatgttggctgcttcacatatctcccctcctattacaggccacattttcttaaagaaccccaatccaaacccattaggcccccgtaattttttgtcaggtatgcttaataaagccttccttatctccttgttggtaactagtttcagtaacccaagctattattcaagcgtaagaactggtcattgctcaatactgctcaagtttaatcttttagtcgcacagcagtgctgatgctccacatataaccctaaaaatggtgcatgaagtgcttgacaacttcactaaaatcatcaaccagctatccttgctctgtagtaaatgaagtaattttgttatccgccttcctttttttaataaaagcatgaaaaaaggaagtattggaattgcctttctgcagccaagtgatcttgcttctttgtttaagaaattcgtgatacattctctaatgaatattatagcattcaactgctacgtggacttgttgtttagctaaccagtcacttggattggcttcagcatgatatttggcttcaatgaaattgtctttagctttgtgataggcccttccaacatcccaaatttgttcatgattgaacttcttaagacaatgtttcagtctcataaattcaagtaaatcctttttaagcctctagccttcataggggctttccaattcctttcctctgtcaaacaaaaagcttcatggttagcccaaacactaaagtaacgaaaatgtttcatacctatcgcctctattgtggtggctgaaatcacacacgaatagtgatctgagattatttcccatctgaaatgggcagaggtgttggaaaaatcatcactccattcttcgtttacaaagatatgatctatctttgaatagat

SEQ ID NO: 5301 - DNA, 1515 bp, Cannabis sativa
taataagattatatatactttcattgttttgatatttacaaatatatttgatttcatgagtaaataatattttggattctgtgttttgtaaaatttactgattagattttctattttgttaaataataaattaaatcttgtattttctaaaatggtacaaaatagtaccataaattaatattttgtcaaaataaaagataataataactcaatttaaagttgttataataaaaatgaatacatttttttttttgcatatattcgtgctattgtcttcaagttgattgtataattttgtaccattttaaaaaatacatggttcattttttttattttataaaacaaagaattaataacttttacaaaatacgttttccaaaataatattaatctatattttattattgtatatagaatataagaaggaaaagagaaaaagagaataaaaagtgagtataaagatatatttatacattaataaaaataaaaatagtcaaatagagtgtaaaactcccctaataatagttcttaatgcatattttggtcaatgctaaacccacaattcaatcttacaattgtttttttttcctttctaaagcaatgaattgactcataagatcttgttcatatggagacacatatagtctcaagtatatattataagtcattctcatttatagtaaagtatttctctttatttttcatttaataaatagaataacactacactagttattgcatttgattttatttatttatttattttgggtaatttaacaaatgtggtgacaaccaaatgtgttatttattgctttgatacattttttttcaaaaaaattaaatattttgtggcaatgaatatttggatgggtcattattggaaagtataatatagtttgtggctagagatatgatagtacataataaagacttattaattttaaataaataagtggtggggtaacacatattacctcccattcactcaaattgaaaccttatatatgctcaagtcaaccatggcatctttcattgttatttttttcaaaaaaaaaaaaaggaaaatattgattaataaattattagtaataatattaaaaaacttatggaaatatatgtacaatttaaaatataatcatcttctttcccatggtagtgggttttctaatcaaccatgacaaatagtggtacacaaataagattcatgcatttatttcttcatactaatattatttattttataatataagagaaaatgttatgattttagtgtaggtgtaaaatatatcaatttgactacaccaataaaaattaagcatcattggctttagatttttaaggtagttttttttttttttttagttgatggcaatcgaatgagttctattatgagattggtagggcttgactcaagaatttggttcattaatgtgttataaatgtaaatatgccttatttgatttaattgtagtagtagtaaccatttatcactatcaattttttttgaaaaaaaaa

SEQ ID NO: 5302 - DNA, 887 bp, Cannabis sativa
tataaattaaagaactagtagaacaaatattagaatattagaaaagactaaatttttaaattctaaatgaacaaaaattgcttaatttattcaaaataaaatttaaaaccaaaaaaatcatataggtgatgtactgtataagtctttccaaatctaaaaataactagtctttaatcatagtttgaatatccttatagcctcatctgtagatgtctcactttttacccctaaagatgaatctttcatcatcacttaacttttagtttcacataaccttctatagttatacttacataagcaatgtcacaaaattttatttattaagtatatttagtacaataaattaaatatatactaaagaaaagtacgtatatacttagttgtatgttatattttttttcttaataattatttaaagttttaaaaataaagtatatataataattgtattcatacaaattgtttcgatatgcatactttttcgtgtaagaaagtttttaaaaatttctaatccaactaagtaaaatttaaataaacaagaaaaaaaactttacaaaaaacttatgctaacgaaatgtaattgttgccgcatatagctattttattacaaatcagtcgatacatttatttttgtaagtgattcattctcatccattaataactttttcataacttataaattcactatctgaaatctcatagtttttttttttttttcacttttcttaagacttgtttagtttaataatccaacaataaagataatgaaaaatcagttgcaaacaatcatcaaacttgtgattttagaactaaattttgatatgttattccaatatatttttattcctttagacttttattcactctcaacaaaaattaatttaatt

SEQ ID NO: 5303 - DNA, 805 bp, Cannabis sativa
gctaagtgtccttggtaccctttgtggtctacttttatcgcaaggtcagtgatattatctcaaaatacccagtgatagaatagcataacaattctacatgaagcttaaatgcaagtttgcagtaactataaaggtattctttcctcacaatttgtagagcaacagacgaatctttggtgatggtaaaagtgaagaatggacgtcattgtcgtcaaccaagcaaaattcatatatgaaaactctcatgtacaaaaatatggcgtaccagttttacacatttatgtaagtaacaacaacaatgcaatcaaccaatcaatgatataagtataacaggaagatcgattagcctcactctttatttatttacacaatcacaagtaatctaacaacgcaaactttacatgcaaacccattttaccaccatctttcacaagcttagcagctgttactaaccaatgccctggagcatcatggggccctcgcaccacctcagctgtctccacaaatctacgtagctttgcagatcgactcgataggggtggtccatccggataaactccagagttaagtacagcctgtgcctgtctctgttgatcaccagtagtggttttctgagtaaatgtaaatgttgtgctcaaattagtgagaaaatttgatttgcgagaagtatctggtgctgcagaccactcggtcttccggatggaacaattaggtaaatgggtaaagagtaaacgaaggtgaagtatggtcttaggccaactccctttactaattagctgtgctccagtcacaatatagactccag

SEQ ID NO: 5304 - DNA, 722 bp, Cannabis sativa
ttaattttttattactttccaatttcttctctttacaattattttcattgcagattagttaacttgtttctagtgtaatgtggtagttacagtctctaggatattttctctggaaagaaatgtgcggaaaagttgcaacatttttatcacttgttacatatttaaacttaaaaaaatcaatctctgttgtttgcagagaaaattgaagggtggcacatgtgtaaacttgagataatagaatgcagaaaggttccctggccaagtagtgccataaaggagaaatattgcgttgaagattgttattggccttcaaaagattatgcatatgaatgtaaaatcaaccttttgactggaaagactcatcaggttagaaacagacttttatttgctttttcctcgtttaatattcaatgttcactttgagcaggggattcattgagtaactcttgagttgccttcactagtttgcatgatggtgatcatggggcagttccaaatatcatcatcctttaaatatgtttcttatggtatttcagacaaaactattaggttaattttttatcagtcgttattgtattgtggattttactatagtaaattctgaaatctatacaatttgaagacttgatcttgtcaagggtgtaggagtttgcaagaaaactgaggtgtgggaattattatcactgtatatattactatttgttggacaagacttatgagtt

SEQ ID NO: 5305 - DNA, 1551 bp, Cannabis sativa
caccccaattttccctaagctcatctaaattatctaaattattaatcataaattgaatcaaaaggtgcttcttttaaacaacaggattgtaattgaaaggttatttttataattttagatgaatcgaacttaaataaataaaattttatgctataaatttggtatagtaaaattgtgttttacgtttattttaatattttaaatataaaaattttgcttaacacatttattttatcatcatgacacttttatatcaaaattatcttgtcttttcatatgatgaagattgaagagagtactagtaatgaatgttagaatagcaagcctatatttcaagaaaaggtacaacctgtaactctttaggttagcgagtgatttctcttcagcaaaataatgtgtgcatctttgagctgatacaaaggaataaactctcagatgaaagttaatttagagctgcacttataaaaagttgcctacgtaccctatcacagggatcaagctccacgtagttctgaggacctgtaaaataatcaagttagtaataaaccataaagaaagataaatatgtataaataaaaataaccaaaaaaaaatatactcgataaaaatattttaatctatattttaatcatgtatattataatttataatcactctcttataattaggattgctcatataattcggaatctatagtttcaaattacaaccaaactaaaccgcataattcttgatatatacttgatatgattattttattaaatattaatgtttaggaacaatcttaagcataatatttatgattatttaaacttaaaataaatattaatgtttaggaacaatcttaagcataatatttatgattatttaaacttcgctttaagaatatttatttttattattatttatgtattataaactttaaagtaaaataattttgtaaaaaaacattaaaacatttacaaattacaaaccacgatttcaaactaaactaatctgttgttattggtttgattctaaaaaaaaaaaaaaaatccaaaccaaatgaaaccatgaacacccctacttacaataagatgctataaattttaacatgtatatcacacatttccccattttgttttgtgatatatcttaaatggacacgatccaacaaatagcaccacaaatcctattagacaattatgggcacatcgtattagaaattaacataactttgttttgagtattttattcaaaataaataaaataatatactttttaaatttaatcaacaccattacaactttttttaataaatctaaaatataattgatcaaaataaaaaatagaataccaaataataaataatttaaaacaatatgaaactctaaataaaataataaactacttaattgtattcagaattttaagaagaaataccaaataatatttaaccaatatttcttttgaattttcacaaatatagcttgccttaacatataatgtagaaaaaaattaagacatactcattgataattgatacacacagctatttagattaggggtgtt

SEQ ID NO: 5306 - DNA, 739 bp, Cannabis sativa
ttttgttataactatatgttaaaatttttttttaccattatgatatttgacatgtgtcattttagttaaatttaacacttgaattaatattaagtgaattgcaacaaatttttaaagatacggaattttgccactaaatattttatatagggagttaaagtgtacaaactgaatttagtgaattttgccactatttttcctaaatataatgtcacttatagttgaaattaagtaagagaagtgtccattcaaaaaaaaaaaaaaaaagtaagagaagtgtagatcaaagataggggtggcaatttataacacgacttgaaacttgcaagaaataatcgagtttgagtttgccttaaatgaatttaagtcatttttaggttaacacaactcacttatttattaacacgtcattttttggattgacatacttaacccaaaataatatgataatgactcatgtaagaatacacatttttaaatttattatatgtaaattatattttttaatttaataggacataaacatgttaaattctttataaatgtgttacatatgtaaattatattacaaacatgctaaatttgttatatacatattaataagttgataagttaactaaaattaaatataatttttttatataaataggtgagatcatgtcaatccgtttataatcagttcattttttattttttaatttttgacaagattaataataaataaaacaaatttaaattt

SEQ ID NO: 5307 - DNA, 805 bp, Cannabis sativa
tatttcatttagtatatattgctgaataatttgatgaatacaccatgatgaatatgatatcttcattcacaactaaaatgattgtttttatttataaatgaaaggcggatgcagatggaactggtacactaaactgtgaagagtttgttacagtgtcagtgcacctgaagaagataagtaatgaggaaaatctatctcaggctttcagttattttgataagaatgaaagtgggtttatcgagtttgatgagttgaaagaagccttgcttgatcacaaacttgattttgccaatgatcaggttatccatgacatcttatttgatgtcgacttggataaggtaataattttcattacaaaatctctacaaaatgttactaaattgtttctgttctagcttatttatttcttcttataaagtaaggtaatatttacatagatataaatataaatttattaattgattttgtggtgaattcaggatggtagaatcagttatgatgaatttaaagcaatgatgggaacaggaatgaattggaaaatgagttctcgaagatactctagggccttgctaactgcccttagcacaaaattattcaaagacaaaccattactgccaaaaaaatgtttaaaatctggtccattgtgaactccacttccttgtcatcaactcacatcaattttactccatcttacttccactccaggcaatattaaatatttttttaatagattaatatgtattgatgataaattataaagaagttacatagtagagtaagcccctcttctttttttttttttttt

SEQ ID NO: 5308 - DNA, 939 bp, Cannabis sativa
aaagaagaatgtggtaaagaattgaagatggaagtggttataatatatttgattatttgtgagcttctcgtggtagccatataccataatttatatagaggagttggatttttcaaaatgtttgttttaatatttgatatgacttgcattaaatatcttgcgtacaatattgagtaaaacaaattatactttgctttttgtgcattgtttttggtacttaaattatgagaaatggtaagtattttttttatgtaggattattgttattgttttaattaagtatagggttttatataatttaatatgataaatattgttaattaattgtaaagttacgtgtcaaaaaaaatattagctagatagaatctaataataatggtcttaattattgttgactaaaaagtcaattattaaataattaattatatttcttattattttttttaacaattatattttcttagtattaataatcactgccaaaagattattgactatgtaagtcgttctgcaagtgtaataacactaatagagtggtcactctctcatcataaatacacctagacaaaaataaaaattagatgtttggttcagcaatatgaaattatcttgtttgttttatgcgtgaatattattcccttaataatataattatctttgagtaaggtaatattgatactttaaaaaatggtaagattaaattattaccttttattatattaatttaaataatatttttgaattaacaaataaatttaaatgtcaataataatattatttattataaaaaaatattacaatatatatttagtctgtgagaacaatttttttaactgagttatttttatattattagcaataacatatatatttattatacataaaatttgtgcagatggtatacataaatgatatataaaatatataaaaatgttcatt

SEQ ID NO: 5309 - DNA, 2444 bp, Cannabis sativa
ttttttagtacttctttttttaatattgagagagaaagttctaatttgaaaatttttattggctatttaataacaaatatataaaatacaattcaccaactttattttttttttatttgttgagaaaaataaaaaaatatatattaataagtaaattagataatagtcgattacatgatgataaatcgctcaaagaataatcaacaagataggcaaataccgtttacaaaaataagaaagaaaaactctaatatcaccttcaactataagaccaataagttacaagcgttgaagcataaaaaaagtgcagagaatcctaattttttaatccaaatgaacatgtaacaaactatacctatcaatagttatcagtcaaaatatttcaataaaaattggataataacaacttctattattcaatcgagaataaaataaaataatcaaatgaccaaccatagcaataagaattgtaagaaaccatcacatcaaaaactatagggccaataagaatttgcgaatctctgaacatggacaagactaacatccattgccatgaacaaacaaagtcatactaccatactaacaaaattatttatgatttttgcccccgaactatgacatatgtattattgtgcccgtggacttttcagtgttacaaatggtccttaaactatttattgtaaattggtcattctgtcaagttttgtcacacttggcaaacaaaatgatgacatggttgcttagtcaattgtcacatcagcgccacatgtataattttacattaaaaaataaaattatgcatttttaaaaaattattaaactaaaaatcaatcaatgataaataaaataacgtaaaattaaattaaaaaaataattatttgtttcaaattaattacacatgtggctttgacatggcattgacgtggcaactagctaagaagtcatgtcattattttgtttgtcgtgtgtgacaaaacatgacagaatgaccaatttacaacactgtgaatagttcatgaactattttttaacgggctgaaatgttcaaggagcacaataatgcataggtcataatctggggacgaaaatcctatatagccttaaaataagaacaaaacaaaaaaaaaaaacattaataaattgaaagcatcaaaacatcaacacaagccacacagtgtgttcgtatttttgagaattatatatgttcgtatttttctcgacattttttcgatacgttctcgacgcgaatgtcccaaggtcagaaaatgcctttgttgatagttttttaataggttctcgtttgtttgtcaaaatggcaaatgattttgcatttgtaaccattcttaacacgttatctatgtgttttggattgtttgtcgatagtttttttatagtgtgtataattgtcttttcaaacttacttgcccatgttattgacgttttcaattggttatcaattatttatcaatgactggctatctcttattttcaacagttgtcgacgggttatcgattggttctcgattgtttgtcgatgttgtttcccattattataatttttgttatttttgttattctgattcagctgttttttgtttgtattgaattgcaggattgcccatgtttatggtgtttggagtgttgagggatttaattagatctataaaagcgaaagaaagtatgacgttgatgattaaaactaacgcaaccttaccgtaaatgcacatattttatatgaagagttggaggtttactcattggagtatgatttaaaattggtgataaaatagtaacacaatctcaaaattgcggcaactgtggcggttcggtccacaagagagctacatgcaaagcccatgtttaatgcatagttcaatgttgcttgggatccctaaaactgtttcgattatatttactgctaattgaaactcctattgtgtgaaatttttgatatttttttatgcttctaaaaatttaattgaaatgtgttttttttttatggtttctcgatagaaatcgatgtgttattgataatatttcaggttaaggctccaaatgttgtcattgcaatttttaaaatttaatgatggtatatcgatatgttcttgatggtttgtgtagtcctttaacaaatttagtaaaatatgttttatgatggttttacacgataggaatttgatgtgttcttgatggttttttgataatattttatatggagggtccagatgttgttattgtaatttttaaaatttagctttgataacaagaaaaagttacactaattgtctctaaatgtataaaattatacaaaatatttttaatacaaggatgttattattttaatttgttatcctgcttttttagcatgactttcgataataacagggtcctggacgtcatattaaggatgtgtctcatctacactcatctcaatcactacctca

SEQ ID NO: 5310 - DNA, 912 bp, Cannabis sativa
attgtccctcaatttttggtccatgttaccatttattggaagtataagaaaaaggcttatattatattatataaacagaaatgataagtatcacaagagctagatatcgctattaatacaaattaatattgatataaaaattgttaaccactcgtaatatatgtcacatcgttatagtattgagtactgtaaaatacgcaatgcacctatataaactatagggatatttatggtttattatggtaggagtgtaggactaggaggagcttaggtctcttaaacactcaagatgttgagaattgtctcctctatctttatttttttctttacacataagctaattatgggaaactttatcatatataccaataaaaaacaatttcaaagtgtgatcaagcaaagagaacactctttctttctttcttttttataaagatttttcattgcccaacacaaaatgaacatgcagtccacaaaaatgccactttatatattatgacacccacactttcaactaccacataagaattcaactagctagattgtgacagttagtgcgtggagcagataataagtacctaaaagactataaatatgtatatttattatacccagatctttcactttttattatttatttgttataattatactgtttttggaatcatctgatagattcatagacaagttaagaacaaaataaacattaattaattagagaatcatgcactttgtgcggctaagtttgcttattcatttgtcagttcttcaaacttaattttatatttcaaacgttaactcagtgaatggcttttcttttttatttgatggggcatagttatgactctatgcaaagaatgtagcagctgatcaatgagcactacatgctcccacataaaaaaaaaaaaaaaa

SEQ ID NO: 5311 - DNA, 723 bp, Cannabis sativa
gaaaacaaaattcaaaataatcaattacactctagcttaactgaaagtttgaaccctgttatgaggatattaaattattttaattcttttaaacagatggaatgtatgttgtgattataatgtttacagtcatataagaaaatttgagttataatttctctaaatgttaaaagtaaaggcgtctttcaaagacaaaagtagtactctacagtagaatttttgtagatttatatgaagttagaatgaaaatgaaactaatttggtttaatatttatgaatgttgttgcagtgtaggtggtggatggtggtggttcttgtgctggtcttggttatctttctacttgtccttatcttataataacaacagtcttttaattgaattgattccattgtatagtttgtttgttgttgttatagcttgtattgtaacttgtaccattgcctttttttcattgtttggtttgttcatttcttcattacttaccattatatgtaactttttaaaatttaacaagttgtgtgctttggatttcaataaaagagtcaaattttgatggcctggactcaatttcattacaatgtgtgttgggctaaaactaaatacacacaaatttaccgaaagtattatttttggtaaagattttgcattttaatttcaaataatttttttatattattaggatgttttgtaaaaactcaaaaattacataaaaataataataa

SEQ ID NO: 5312 - DNA, 954 bp, Cannabis sativa
ctacggatttcacactccacttttcagcctcttgaaccatcaggcagcctatgcaaatgattaagcttacattccaactcttttatagtagcatcaactttttgaaaccgagctttatgacatcgtaataaggccacccgagtggcactaatctttttgaacatccaaattagggcccaatggtgcaccattgaattctatgcttgggcaaccactaacttacttctttcatctcatgtcagcccttcatcaaatttaaagctccttctaaatttttcttcctctcccccagataataggcacagggtcctatgattagaattataggtcttgcaagagcacaacatagatttcgggaataacttaatccaaccaccattcactaaccccttctctaaagtagatttaacatgtccctctaccaaacagtggttatctcaagctaattggtccccttgaataggaaaacttatgagacccaacgagttcactaaatttgagataactaagataaattgatcttttcctcttgaacctttcctttcggactccttcagcccaaagttagtatcacccacaatcaaccaagactctccaaacttatcaccttacctcataatctcaaaccaaaaggacttttttgtatggaaatatggggggccatacacacaagagagaatccagggatgcaaaggatgatcctagtacaccaacccataaatatggttatgagagctataaatatactaaaaattaaacctgaatttccaagccagaataataccccttgaaacattgatagcaggcatagtaaatatgaaaaaagacatgaagtttatttaaaagaagtaccagtggcataacatccacttttatctcaaacatgaaaatgaaatcaggagcgtaagactgagccagggacttttgttcaggaactatagagatctggcccaa

SEQ ID NO: 5313 - DNA, 3098 bp, Cannabis sativa
ttaaactaactagtaaaaattattgggtaattactcttgaaatgacggtttcagtatatttttttatctgttttagaattcagaagaattttttaattatttttcgtttttcatgatagttgtatattgtaattatttatgatcatatttaaattttagaaaattcagaatatttgatagtgtaaaaaataagagattcaaatattttattgcacgtggtaagcaattattaaaattttatttttgacatatattgtaaacaatttagaatttattaattttccaaatagaggttatgccattttttttgccaaaagaaagatttttgatggtatcctatatggttggacatccaattcaatccgatttttttctcctaatccgatcaaatccaaatagtaattggatttgaaaatttatcatttgatctaatccatttagatctaaaaatttaatccaagttcattactgttggattggatcattggatccaatacatacctagtttttaatattaacctaaaaacatgaagaaaagtatatagaaaccaaatatacctttcatttaagcttgatactccataaagatatcatccttataacttaaatgtaattaaaagtttgaaataactaaaacaataatactgtaaagtaataaaatagaacaaaaattataaaaatatattcacaaaacaaccaagtattacagattcaacaaaaaaaatagtaagaatatattttttattatggttaaatatataaatacttaatatatattaaatgtaattggattggatcttgaccacccctagtaaccgttattctaatccaacttttaacattcagtccaattcaattgtaattgagattttattgtaattaagagcatttctaatggagatgcaaatacaaaatacagctcactttgtaaaaaatttactctaataatgtaccaaattgtgatgcaaatttgtcacataataaaaaaattgattcaaatttaaatcacaatatagcatgatgagaaatttgcatcacaataaatgctatactttttatatttactgttatggtatttttaatattttattattaaattttagtcaacattcatgctcatttgcattaaatgttctgcattaattattattattattttatcttcttaattaactattaaagaagcactaaatgtcatattaaattttgtatcaagatttataaaatttataattatgcattggaccacaatagtaaattgtttaaaaaatattacaaaattattttttatattaaatatagctcaatttttacatcttccattagatagacgatctcacaaatccaaacatgacccgacctatgaataggtactgttacattattattaagagcattgttatgggacactaaagtgcctagcactttgacatgtcgtcttataattgattagtctttataatttttattaaattaaaataagtagaattcgatattaatttatatcaatagtgatattacattttataatttataagagtgctaagcattatgaatattttttagcattttttaacaatgtctccaaattaaatgtagggctgagttttgttggactttaggaaaagagaatattttgggctttttttttttttttttgctgaatgaatattttggactttccaaaaatatatatattttaataatgatttttaaaaatatcactaataatattttgggattttagtagtgatatttttaaaaattattattaaaacatttatatattttaaagtatttttttggaggaattttcctatgaaaatttttaatggaatttacttttatatggcataaataaataatataaaagatatgtgcttaaaaaataatcaaagtttaaaatataagaaataaaaaaagaccataaatatatttagtaaaacttctaataataattattgccataaaattgccagagaagttgttggtactaaaaaagttaccggcaattgtcgtcgaaaaagttactatcactggaaatttatcgaaaaagttattgtcaccgaaaaaattatcgaaaaattcaacgaagttgtgtcgtcgtcgaaaaagtcacgggggttagatgtctcagatataaattaaaataaaactggttctataacataatgaataaaaataagtaacgcacaataactcaaaccagtaattataattataataaaatcggtctataacataatgaataaaaataaataactcagaataacgctaaacgattataattaaaatagaattaattctataacataatgagcacaaacaaataacacagaataactcaaactgattataattaaaaaataaaaaggaaataagttgtcaaaacactgaaacataaataaaaaataaaactagtttcacaacaaattgagtgaaaataaataacacataatacctcataaattggttatataattaaaaaaaatatggggatcaatttctaaaatactgaggcataaatccaaactgaactgattctataacagaataaataaaaataaataacacacaataactcaaaatataagataaagaaatcaattatatttaccaactaattaaaatttggagacaaataaactgattccgtaaagcaactaagataaaaacttacagacaaaaaccagtcaaataaagtaaataaatcaaaaactaattccttgaatttacttaatcaaaaatgggttcccgaaataactaaattaaaacccagttccttgaatcagttaaaccaaaaatcattttatgacttaaataaaaaaaccagctgtgacataaattaaaatagagttgctttcacaacaaaatgactaaaaataaacaacacacaatataacttagatgtcggttacaatttaaaaaaaaaaaaaaaagacgagtgaatttgttccaaaaatattgatacataaattaaaatagaaacagtttcacaacaaaatgagtaaaaacaaatagcaaataataactcagaaaccggttctaattaaaaaatagaagaaaagagaaactcattacaacaacactgaggcatt

SEQ ID NO: 5314 - DNA, 640 bp, Cannabis sativa
tctatcaacaacctcaaatcctctgattgagtttctgtttgacacagcatctttctcactcactatcccatttgctgggtcattatccaacaacactgatccatcacaaccctgcaatttttaattccttaattaaatatcaattaaaaaaaaagtgttcaaaattatataaatatatatatatacttacattaacaaaacaatcgtggaaatgaagcctaatgaggctagctccaattctagggtcagaattattgagaacatcagcaacaatatcttggataatattggtaacatttggacatgtttggtcgtaaaatgttgagcttaattgaccatatgatgaactaggtaataatactcctccaataatcaaaactacatacaataaacttaagccactcattttcttatacagataaatagaacacaagctagaatatttcaatgaagataataaaccttgtaaatatatatatatagaaaagtgtggtgctgaacaatctatatatttataatatttattagatttggtagtagtgtgtgtgtagtgctagctattagctaatacttttcttcccatctttgttggtagagagctttaaaagcttgtcctttaataattaatgagatatgcatg

SEQ ID NO: 5315 - DNA, 1011 bp, Cannabis sativa
agtttttcctatattcagatgctcaagagattttaatgaggtattttcttaaaaattcaaatatatatatatatatattaaaaaaatatttacgcacaatgcaaattatccattgcatttacgagatctaatgaaactcaaaaataggaaacatgaatgttattcaaattcaacatgttacaatcaaataatccctaaaaataagctataacagaacactaaccttaataaatagggagcagaaaacgattttgattgttttaataaaatgtaataaatactattttagattttgtgtttcgtaaaagtgaccaatagatctttcgttttgttagaagacaatttaaaccttttcacaaaatggtgaaaaatagtctctgtgccaacttttatcaaaataaaacttaatgatgacctaacctaaaatgtgttatgataagattggttatatttttttatgcataagttcatgttagaaattgactttaagttagttatatatattaaaaaaatcgataaaattaagttattttgcaccactttcaaaaatacagagtcatatttatcatttaataaaataaataattccactaataatttttataaagcacaatgttagagatctttaattaatatattacaaagaaaaatagtataagtaggtatgggatgtgagtgaaaagtggaaaatattgatcaaactatctctttaattagaaaaagaaaattaaatctgaattttaatttagacttattatataattaaagtactataaattgtaagtatatgtattattgttttgaaaaacttagctcaataaatggatcagagatgttttaattatcaaaaaacaaatggagatgttttttattcttacatcaataaaactctagaaaagaaaaataaagttcaaaatataatagaataatagaatattgtttgtagtaaaaaaagaaaaaaaattccctgacttacattacagtatatatatatgaaatgaggcaaaaagt

SEQ ID NO: 5316 - DNA, 1665 bp, Cannabis sativa
gattgtacagtttctctctttcctttctcaattacactttgttcttattttactaaaaggttcagacgaacaaaacttattcggattgtgtttgaattttataattttttgtgtagtcatgagtcatgtacatttatgtcagcagtttttcaataaacataaaatgttagcacgatacaaaagtgatacacaaacactaaccatcactagtgctattgtagatattttgcatccttttctacgtgaaaatgttcgataatctttcttatatgagtgtttttagtggactctgtcaaattgagaaatcataaatagaattaagaattataaatatcagcaataaatatatagaaatatgttgaaattatcactaatatgtattaattttttaaagaggaaaagttgagtcttatttattttcttatgttttgtagggaagttggagccatatattcgaataatatatattataggaacattattagactatttgaacggttagataagtgagcgttactcatgaaggttgtcctaagatcctgaagcgctgggccaataggtccgggaaggcttggccatagcacgttccttcttattatgtaatcccttctcttctctctgccctataaccgaccacgcttatctgcttttccatttctctttatcattattattaatattggtttctactctttttaaatgttattggctctttttaatttttaataaataatttttcttttgaaaggatgaaagtattgtcaagtcagtggagaccaaataatatccacgatattgagagatttttatagggttccatatggggattattttttctttgagcttgacatttattctgtccaaacaagattaactattctcacacacttttctttctttttctttttcgttttttcaattgccacttgcatatatgagttcattttattatttctaagctagcactcacattagtgtttatatgtaaaggtaattttctaagtttttgggtttcttaaattatttttcttcatttttctatttttatctcaacatcaattatttatttttaattttctctttcaatttttttttcttaatttaattaataaatagtatttaagataggtgcttataagtaaattgtatagctaaagttaaggcctatttgataggtgcttatagattgtaaaggcatttgttttgtggagcaacgaaactgattcataaaaaaaaaaaaaagtatttaagatataatattataatgttgtaaaaaaatataaaaagttagtgtatggtgtaattaacataacttataggaatcttcaaaaaaaaaaaaaacataacttataggaatgagtttctctcacacattagttaataaaattaagcaatgatcattaattaaagcaaaaattaatacattaatctgttatataacccactatacattacttaattattcttacatttatgtttcctaaagaaaatatcatgatgtagtgcatactcaaatgtttgtaatttaattttactgaaactagttaacaagttattcgtagtattacaatctatttatatattactttctttttcttgggttgtctactaattgagcatcagtttcctaccacagccacaatatatatatatatatatatatat

SEQ ID NO: 5317 - DNA, 1000 bp, Cannabis sativa
taaaaataaacctatttatgaaacttattttatatagtgtgtataaatcgatcaaatcaatctaatgatagttgatttacctaattaccgatcgtcaaatattagatatccaattgtgatcgaatcaaattaaatgttatttttgaatacccaattagatcggatcagatgttgaatgaggtatccaaaaatttaatacttccaacatctaatcgaactaattaatatttttatttaatttaaatgagtaattaaattttatattgttatatgtaaaaaatatatgtatacatgaaaattaacattaaaatatttttttttattgaatatgttgaattaattggatgattgaaattaattggatcggatcagatgatgaaatttaacatctattccaatatataattagatcgaactggataagtcttaaacattagacgtggtccaatcaatcaatagtatatgtaaatagaaatcaagaatattattatctttagtgtagcttttatccgttgagcaatggagtttttttttttttatgagaacaattagtaaatagttgctaattcacaaaaactttagggaacaaccatactaataagtaataacccaaccatttaaaggattgagttaaaacaaacaaaatcactattttgattttaccaccttatgtgggcaggcttgcactttttctagtgagtttagctgatattaaaagttccaactttactcctaattttgcttccactagctaatattgtactcatgaatgagagttttatcaactaatattgttgtacttcaaaaacttattgtaattgttaattcacagcatggcttgttgaaacccattgtgcatatgtggaggtccatcattgaaatgtatgaattaaaaaaagcccatattgtgtaaactattggtccaaatcaagagtctatttaggaaattacatgaaatatgacttttttttataagcttgatagctatgatattaatttt

SEQ ID NO: 5318 - DNA, 729 bp, Cannabis sativa
ttttttcataaatatgggaaaatagggtagagtttactttttatttggcataaataaataatgtaaaaaaatatgggattaaaaaataattaaagtttaaaatatagagaaaaaataataaataaatttaataaaaattgtaataataagtttcgccggaaaattcgtcgatgccgaaaagttattgtcaccgaaaaagtcacaatcgctagaaagttaccaaaaaagtcatcgtccctggacaagtcaccaaaagtagatttctcagatataaataaaagtagaaccagtttcataacataatgaataaaaacaaataactcaaaccaattataattgaaatatagccggttataattgaaatacaaccgactatgtaacataataaataaaaataaataagacaaaataacttaaaccaattataataaatatagagtctctcctctatctcttgcttctctgtctcatcaagctcaatcgactcgctaaaaggttttacttccatcttcttgccaactggagccttcaaatttttcttgcagtctgccataatgtgaccataaccatgtcaagctttgcatctaattggaagccactcataatcaacccatgttcaacaagttgaccatgttcatttaaataatgaacgactctcagaggctcatctgttatgtccatctccatgagaactcttataaattttaccatttctctctctctctctct

SEQ ID NO: 5319 - DNA, 516 bp, Cannabis sativa
tttaatttaattttttttcatgatcccataagttgtatctatttaggaccatatgtaaattttttaaaaaaattctaagtaattaacaatatcaaaaataaaatttatatattttgttgcgcacgtaactatttttcttatacgcgtggtaagtaactattcgaaccttttttttttgtaactgtaaactattcaaaattttctaaaaatttacaagtagtcttaaataactagaacgtaagcaatcatgcaaaaaaaaactgaaaagttcttctcgatgtcaaaacagataagaggcctaccagaataaccctttaaagggatctactacaaaaatttcctacaatttatagtcattttatcaacttttgaataatttgcagaagctcttgtatgtgcctggttttgtattctttattaataaaatattcctccttttacaaagatcaatagaaagtgaaaatgagaaaagtagctcaagtatagggaccaaaacatatttttttttttaattat

SEQ ID NO: 5320 - DNA, 1616 bp, Cannabis sativa
gtaaaatatttccaacacgtaaatcatatcctaggtgaatacacagcctgaggtgaaaagatgatagcctacttaagctagattcaagacttattaagtcaactcaaaggctactaaaaaggtaagtccctaaagaaggttgcaatagccgatgcactcgcttgaccagccagacgcaccttgatagataaggcgaacttggtacccattcaattcttaaaagaactaagcatctctattttgaaagaaatagacatgctggatgacagtccaacatggatgacacccatagaagcatacctccaaataaaaactttgccagaaggcaataatgagggggaaagctactaggtgtccaatcctagacggggtaatgcatagagggggtagacgtggtatctaaataccacctctaagatgtgttaccaagaaagaagatgaacaaatattgataggagtgcatgaaggctctatggaaatcatgtcgggggcaaatcaaactgagtgtaggtgggatcaaactgtcttggactacaacatcgaccttgggtccaaaaggttggccgaccatggcctcaacaggatggccagccatgggctcaacaacctagctggccactacctccataggctggccagccataacctcatcaaactggccagacgatgctccctcagcctggtcggccacctggtctgttccttggctggcctgatctgccaacagcctgctcttatacttttggtctactatgaacaaaaagcaaaccacatcttgctagcagaatcccttgatgaaataaaagaaagaggagactaagccaacttaaatcgacatgtgtggcagcaaaaagttgccaggtacttcaacaaacaagtcaaagagaggaaattcttcatagaagacttagtgcttcaaagaatattccataataccaaagatcctgcaacaagcatgtttggactaaactaaaaatgtctacaccaagttacaagataacaagtaatggcttatacaagtttggcgagtacaatgaaaacatggagttagctgtcctaccaagatacaggaatggagaacatctcagtaagtactgccactagccaacttctacaaaatactactcttcagtagtggttcctgtaacattttactatgcaggaattcagaaaagagcaaagtttccatcactcttcagtgaattcctatgcacggtgtgctctgcaaaggtagacaaaaattaaagagctatatcaccatcactcatcattgatggctcttgcgtgatatgccgctcagggggtagccaaaacgtggtttcaaaattagactttgatttgtaagcttttgctacaccaaaaatgtacgttgcatagcaacaacacatatgtaagaccaattgatgaataaaaatggtatttcatttcaatattgtgtcaaacaacttgctaacaagataacttcttaaagttaatcttgatttttcgttcaacatgcgtgtaaaacggtcctcacaagaaaatacacaggcaaatgatctaattacttggtgaattgtaagtgaccaagagaccataagtgtgtatgatacttgggacacacacacacacacaca

SEQ ID NO: 5321 - DNA, 506 bp, Cannabis sativa
taacagagcttcacacagagcctcatcccatttctcaacaatttccttcggcaaaatcgatcgacacgattcgatctccaattcgtgtacgcctccgcaatccaatccaggacacgccacaaccgccaccgccgaactctccccgattttgctcgccacgtgtctccctatgcaatcggagcagtacgagtgtgtacaactcgcgttggggaaaatctcgtccgtcggtttcctctccgtgcagatttcgcagaatatttccgacgattgaccgatctcttctaccggtttctgaacattgatgattatcgacggcggcgatggagaagatattagaaaaaacgacggagtaacgatcgtcgtttggtttctggtggcttcggccgaagagacgagagcttcttggaactgtaactcctcggcgtatttagcgtcggaaactggtaaaatatcggtggaaggttcgtcgaagagtaaggagaagtagaaatcgtcgactaaagcta

SEQ ID NO: 5322 - DNA, 1216 bp, Cannabis sativa
aaaaatagtataaaaaatgcaaaaaagaaataaaaaataataaacaaaatatcaacgtgtataatttctggttctataaataatatagatagaactgagttaccaccacatattttaaccaaccctacgtgcgactgtctaaatatttataatacattaattaataacattgaagtgccaagtgagaaattgaagcccatctaaccaataagaacattataaaatttattggatttttggtgaggtgcacagatgttactattggaaaggatgtcattctacaaatttatatggatgctatattgtagcattgatgctatttatattttaaataaaaaattattatagctaaaagttaggatttatatattaaataataatgtgtgagatcataattatagcatttttaaagagtgctatacattagagtattttagaagtaagagtgcaaaaaataatgtgaaagaaaaatataataaaatattatatttttagataatgtgtaaatttttaacatccttaaaaaaatactactattggagttgctctaagatagctagagaaagaaaaaataaatctaaaaaacacaaaggtagcaccacgtaaagagctttattattggatacagataatacattttagcaattctctcacctaaagtaatagcataactaactatactctatcatttaaaatacatcatcaaaattttattttctctattttacaacataattttatattacaacatacatcaatttctttatatttttctctacatcattaaattaatatatatatatatatttttacactattaaaataatattttttaacatgatacaataatatacataaaatgggagttattacaatagggattgagtaaaatacctagtaataggaataataatttatagcctttgatttaattaaatgactcaaattaactcttaaaaactacactataattaattttaaatattattaattatagatttaaccaaggctggtcaaagggtggggcagccgggcgtaggccccaggccccacaattccagaagctgtcaaaaaaatttaaacttatataatatatatgaaaaaaatatataatatattaattttagtttaataaattacataaaataattatcgcacaattatgtaagaagattgtatgttgacagtgtggtgatgggtttgatccttaactttc

SEQ ID NO: 5323 - DNA, 1851 bp, Cannabis sativa
agagagagagagagagagatagtcagtgaagcaaattctttgagcgcgagggtcgattggagaaatagtcggcaccgggagaaatagtcagtgactcagtggcataggacttggctgagagaactgaggaggagattgttagagggaaaggtgggcatcactgggtctttcacctcaagaaaattgaagagagtaaaaaataaaataatgtttagagagacagagagatgaaaagtccaggcgagtattgtagggttttttcgttcgacggagtattgtaggggtttgcttgttggtgggccttggttagtcacgcgttgcagggattgggatagcgaaggggatattgatttggaagctgagtttggagttcatgaagaattctaataagcctgaggcgtttcctagcaagaaggagttggttgatgctggaaggattgttttggtgaaggcttttgtcaagcaaggtggttggttgtcgtccggttgggatttggacgacgaagaagaaggaacccaagaaagtggagtcagtagtctagcttcatcggtggccacggaaagggatcattttcaggaaaacttttttctttctgtggatgaaattcaggaccctgatgcttcttttcgttcgttctttatttttccgtcaacctcaccgtctggtagattgttagactgggttttggtggatggggtgaggttctctgttcaccctgtgaccgtggccgggacagaggtgggtggtgctgtgcgtaggagtccgttcacagctactcgtggctcgaggcgtttcaagatagtgacttctcagggtcttttggggcagggtcatggtaagctacaggtttggaggcccaagaatgtacctgatacgtgtggtgagaggattaccagtaatggtaatggggacaccttcgttttgaattttggaggaaagatttctgcttgttttcctcttttggagcctacaaataaggtcaaaagggcgttttacccgttggtttcaaagaagtcttgtggtaaggaatttgacttggatagtgggccggccttgaatagatttattagtgttgaaaatgggttggggtctgggccgagaagtagtgttggacctttgctatttgggcctggtgggtcgaggcctttaaaggagttggagcctaaagaattttctatttgtgggcaggtggcccatcagggccaatttaaagatagggccttcttggggccagttctcccaggctttatcgcttccttaaatgggccggttcttctggcttaagatattgacgggcaggttggggtcaattcttatatgtcctttgatgatcgtgagacctatgtgcaacctgggccggtaggggggatgctaatactaatataaatgaaatttcttatttggaagtaaatgggacgatagtgtctaaaaatatctcttctactcttgggccgtttcttgaagatcaagtgagtggcggtcaggttgggctctcttctccacagcccaatgttgatcgtgagtctatgtcgcttcctaatgaagaagagctttggctctttttttcaaagctattgaggacttaatgaatgatcttaaatattttgggaagctagacttatatgtgattcgaaagataggaggtgattttggagtcccggcctattctgaagttaatgagaggacgacttctttcaaaaaaaggaagtttgaatcctcagcttctctttgctctaggcctcataaaattctccgcaagtatcccggggttgtgcgtgacttcccctgggactcgaggcgtaaagagaatgatgctgaaatggtgtttgatgatccttctgaggatagtt

SEQ ID NO: 5324 - DNA, 663 bp, Cannabis sativa
tttttttttgtacaaaacttccctcaagccattgaaataattgcaaatttacctctttaactgatttgtttactttttaatataatttataaatgtggccattaaccacacatataattacaatactagtgtttatttaagtggaacttaatataatagtcttaaatatgtaaatattaagtctaatattatagataaataatcttatatttcatcattaaagtatactttatttatgcaattatttttcatttgaattgtttacggtaaattagatttagatcagtcttacaacattaaattatttgcaaaataaaaataaatacaactacaagaaaaaatttacaattctttttatagtcggagagcagtattttacaacaaaaaaaaaaagtagttcaaaagtaaaaaaaaaaaaataaaagtaatttaaaagaaaaaatcctatttattctaaatatatatatatattctctttttttataaaagcattgttatgggacatcaatgtatctagcccctctataacatagcgtcttataataagttagcggctctctatactttattaaattaaaataaataaaactcaatattaaattacaccatttgcaatattacaatttatagagttactaaaatagtaaaataataataataata

SEQ ID NO: 5325 - DNA, 1824 bp, Cannabis sativa
ttggctgttgaaaatgtaaagatccattctttcatgtttttggaacataactacacaaattcatattcaaaaaaacataattacacaaaaagaacttttatggattgaattgttattgttgctttatcctgtttaagccttaaaagctaacaatgaggttgcttagaatctaaatgctaaattttcactacaggtcttacttgacatttttatggattgaattgctgttacacatcaactcacacaaagtcacattcaaaagaacatatttacacaaaaagaacttatatggattgaattgttgttattatgctttacactttaacttgtttgtttgagccttagaatctaaatacttaatttttcactacaggtctttacttgacatttgttgggcatggcaacaaaacgcagtgttccatatagccgtcttcctactgatgacaattataatgattatggtattggaggacaacatgaccgtaggtttgattactctccaaaagcatttgacaaaattccatggaaatccatactcttggctcttttcctgctttttcttggctcagcccttctttttctttcttacttcatttttactggtcacatgggaggagagcggtcccaagcctatggccttttagctctaggcattctaaccttcctcccaggtatgaaagcaaacactttctcttttcttacttgtttctcattctaatataattgaagtgtgaagctaatttagttttgaagaaattagttgcttggatcttttttgggaatccttaaatttgtattatagatattctatagtttgtacttttgagctggtgcacactaggctaacaataaaagaagattaaaaggtctttattctattattcattaacgtaaaaaaagtgaagggtattttattgccaacattacataaaatgtgatgtaaaagttatatttcgagggatattgttaatgagccgcatactataaggagcacaacttggtagtctaaaaagtttaggggcaaaaatgttaattattctaacttttttatagatttgcataatatgtcttgtcaaaaaaagattacaaaatattttaaagaaagagttaccatagtctcactgtggttgaattttataaaagaatctgtacatgtgacatcattgaatttgtgcctgtgaaatacagcatattttttatctcttgtaaaggcaatgatgttctatttgctttgttcttcaatgaataagcatttgatttttttctctagtatcttgctttatttgaagtgttttgcttgtggggctatatttataccaatggaccatgtagtacatatggttatggattcttagaaaattttgaaccaaacataagcttgttcaaagcttgatctgactgaaatgttcctcaacttgtggctgcaggcttttacgagactcgaattgcatattatgcgtccagaggtgccaacggttatcgttttgcttccatcccggattattagagttttcctcctttgtaatcatccttctgtttttttctttttcataacatgtaatgtacctttatagccatttttggttttgtttcttgcatttcttattcctgatttcctttgttttgcctgtaaaatatgttggaatatcaaatatataaatactatattttgtttttcaattgtagcaaattggctctagtaaaacaccacttcatcatggaaaagttagcccattttgcaagcctatcagccttgtagaacaaacacagagcacttaaacaactctatatgtttaagggtataatttcatgtatttattatta

SEQ ID NO: 5326 - DNA, 1308 bp, Cannabis sativa
ctgctcttgcctttgggtaaattttttaacctatttttcatatttttactctttttttttgtgatatttttaggggttatgatttgcatttttgaagattttatttttggttactgtaaaaaaattacttttatttatggtttttaaggtgtacatatggctttctactcaaaaataaatattttataggaaaataatatggtttttaaggtgtacactccctaattagccataaaataatatggaaaaaatttaattttagagtaagtggttactcatttggtttggttttggttgcccttacttggtttttttttaaaatattttcttgaatttttttcgttcaattatttaatttaacacacctagttagtattagtataaaaatttgtaaaatttatatatctttttcttaatacagaactatattaaaagcaaccgtttaaatgtgattttgttttaggtaattatgagaaatttctgataatttaaaataggaaaaaataaaagaaaaagaaattctttctggtaggatttccatcttactcatgtgacactacggttacttggtgtataattagggccacggcccgctagggcctgtgattagggcccaacttaataagcccaccctaatttttaaaatactacttattttaacacttctgatatttgacaaaaagtaggagaaaaatggcacaaatttaaagtaaaataagaatttataggagaagtaagtataagtatacttataaacaaacttttgtgcaaatatatgagaaagcaaacctataaaatataaagaaaattacacatatactttaattataaaaaaaagtagttatcaattaaaattatattattttgtaattatatttagttaatattctcaacttatcccttaagtataagactcttttggctaagctttttgttatatttttgtgaagttaaaaaaaaataaccataaattattttaattttcaccaagaaaatataaatttttgtaggcgcaaaattgttacattaagtttgtaaacttacaaaaaaaaaaaaaaaatattagaatttgagttaatttttacaaaaataacggaaatttttttaaaaatattgtgtttttataaaacacttagtaaaacacaacaacagtagaacaattaaaaaacgtaaaacatcagtaaaacttaacacagtatactgatgcagtacgaaacttataaaattctgctgacatgtaaattttccagttattataattagtatcttaaatcatatgttatttgttttagttatttatttatttga

SEQ ID NO: 5327 - DNA, 3834 bp, Cannabis sativa
caacgtccttgaggaatcttctttgtgattatttttttgtgtagccaccatggtttcagcaacacagtagtttagatctttcagtagctgtcaatgaatgcaacaaaatatttatcgagatttttggaatctaaattaaaatataacttaagaaataacaaatgatataagtgaaatagacagaaagttttacgtggttcaggcgttaatgagccctagtccaagagtaagtatattggccttttaggtttgtataatattgtggtatttttaagacgcaagtatacgcattgttaacaagtaatagactcacaaagagtgaggtcaatcccacaaggattgtagttaagtactttaaaatgaaattttttatttctatttggttattcaaatttaagaagaaattagaactagaatttaatgcaatagaaacaataaaaacaatcaaataattgatatgtaaattaacaatgattgaagattagggttattagtttcaattgtatctatctattctggtctaacatgattcaattcctattataaatttctatgcaatagtaagtttactcaagtaatttatagttttcttagatatataaatctcaattacatgcaaattttatactctcgtgataaattaaacacgttaaaggcattcaatacagaaaccctataagctatccaaaccacataggtactctcgtcctatatcgaaatttattcctatttcactaaagcataattgatactcacttctcagattttgtatcaaaatcatagacaattaattgatggccaagcaattaacataaataagtacaaatgaaatagcatacccaaaatatcaaagaatagggatggtaattatacccgcaggtacccgcccctaatggggcagggataggggttgacttttgggggtggggcgggtatgggtttaaatattcatgcccaagtcagaaatggcgcaagagcgggggaatagataccgccacgatatgatatatgtatatatttaagttttaaaatcatagctactacaattaaaattacttcatgctttaggctttttattgattatactccttttttttcactatacacactattccacttaagtttataattttactgagtttttatgattatttttttttaattttctttgagacgtcatttttttcttcaaaaatatatatgtaatgggtactccatgggaatccttttcccatcaagtaatctccgccccgcccccattttaatttaaacgggtattagggtgggtatggtggtaaatttagaaagcatgtatgggggtgggggagcaatccccgcacctgtcctgccccatttacatccctaccagacctaaattcatctaagtttggcagtattcaacaagggattgaaggtagctagttagccaagagcaaaagtaaaaccctagaacataattcctttaattttgatagcttttcttaattttgtgcatgcaagatttggagataggttatgtccaaaccctagctggtcttgggttgttttctgggatagttttgagttgtttacttctaatttattgtgttttgaggtttagttgtaaagtttagtaagtttgagttcaagaactcaaacttggctccacaatagtgattttcgaattgctatgtattttggaattctattgcttggaaatgatttattttgatgtttataggtattctggagagttttttggaatgtttggggtggttttgagttgaattaagacactttgtttttctacagttaaaaacggcagatcgtttcagcagaaacagtctaccaattttactagtgcaaactcaaaaaaactcctcactgtttttacgaaaacggtctgccatttttcaggcagtttccttgtttagtcaattttctctttttttctcgatatttagagtttttccatgctatttattgataggaaaacttttaggtttggttttagatcactagaaaggttttagaaagttatttacatgttttgtatgattgtgacatagggcctccattcagcgcataattttctattcaggtcaaccggcatacttaaaattcaaaaacgaggtaagattagcatagaatatatatatgtatatgtgtatgtgtattacatgcatattgtttatataattcatatgctaccaaaactagtacggtagcagtgctgagtgcatgtggtacgacatatgatgtttaagagcacaagccggtgctaccaacactggtacggtttggtacatagtgcatgtggtacaacactaagtggtactcggggtatggttcaaaccctaccaacattagtacagtagcagtacgtagtgcgcatgtggtacagaggtcttatacctttattaaaaacgttcaaaatcatccgttaagccttgtggatgggtgtatgggcaccgaaatacaagtggatagtatattgtatgttatatgcttactgagtctgacaattaaaatttactacttgcatgtgtacgtaagggaaaggctaaggctgagcaagaaaaagtttggagctcgaggatgattgtacatgtcaagatggtacgaactaaagagtttagtctcgggacgacttgggcttattttgtaggtgttgtactataaagtcataaagtttattttgaacatgtaaacaagtttaaaagcggtatctcgaacatttgtataattatatatttaaagttgttaaagaataacgttaaccaaaaaaaattttaatttatttatcacatcacaattttcttttcgagaaaactctttgattagcaaaggagtgcacaataatcaaaagatcattgtagggtacctaatcattagggcgttactgcacgttttaatggctgatatttataacaaggttgtctaaccgttggtaggtaaggagcctcctcatcgtgtggtgttcaactgctgtaatccaatttatgggactaaggacacgtgttgcccaaaagtttcaccttgtaaagttggtgtctagacaagccgttggataaaaaggagctacagagcacgtacgcgcactaccacggtctaatgcaggagacaagatctgatttggtattagaaggtatacaactatcgcatttagctctagataggatacacccaagtgagttccaagaacatatggctaaggctttcccgaaccaggctaacctgctaccatcctggagcacttatgactcctgatccttcattatagcagcattatttatgagaattccagagtttttctgcctttactaacaggaagagcttccgggtagcctctggtatataacatcttccgtgatgctgaggggtggaaggtatatactaaccatacataatttgacatagcacccttccccgattgctacgtacacttcatttggcaatccggatatcattagttagaaagattattaattgataattttaataggttttgaaattagatttttatttattattatctgattaattaattaaataaattttttgttttaggttgtttgatgtatttatttttgtaaattaacataaaaaaataaaatattatttgaattaactagaattaagagatattaattaacaataaatatttaaattatttgtaaatagatattatttaaaattaattcaaatatatctatctattctctctttaattctcttatttttttaattttttattaaaatttttattctattttttttaattatagatcactaattaattaaaaattgaaaaaaattatctattctctcatttttgtaattttttttattctg

SEQ ID NO: 5328 - DNA, 1112 bp, Cannabis sativa
ataggtcaatatcttcttattctaagttgtagatagtcattttgccatcttcattatcacacacatgacacatctctccaactgtcatataattggcgatgatttcatatagtcattttgtttggttgattagtttttttttttttttggctaaacctctcaattatcattccacttagacgtttaaattttggtgataaaacctttcaaattacttgtcatctatttttcatgctaacataaactgcttatttgtacttttttttatagaagacacggttatattagtacacctaatattattattttaaaatttataatattttgttatttttttaatatttttaattttaaaataaattttcaaataataatattagatataccaatataaatgtgtcacgtgtacaagagtatacacataaacactcgatggtaacaattaatcggatgatactttaaatttgctataattcagtagtttagaaggttaagctgctaaaatttgacttgaataattaagtacaagtaaaacgatagttgagagtctttaattgccaaaaactcttagtgaaataagcttcagtttactgatatgattagagttgtttctccaggatgaaaaatgtggaggctgccatagctgttggtatagttggtcttcattttaagaatgcagaaacactgcgtcaggatctgtctctcatgggcattgacgtttcagataatgttgaagataaccaaactggggatcagtaaagtttactgaagacaacttgtattattaattcattcacaacaagcaatatacatcattctttgcttgaacactgttttatcaagcttcaacctcagaacaaaaaacgacatgtagtctattgtttgaaaaaaaaaattactttttaataaaatcacaccaaacataaacatagtatttaccaaaattcaatcatgggttaaaatttggtagctactaattttttttaagagtaataattataattcttaaaatattccatttgtaccacccgtcattttcaacttggtccttataccctgaattttattttgctgtaaaattggtgaacacgttcaactctatataatatgtg

SEQ ID NO: 5329 - DNA, 1031 bp, Cannabis sativa
  modified_base (770)..(772): a, c, t, g, unknown or other
ctttttctccaagtgagctaaatttttcagatcatgacctctcctaagaatcataagtctaggttaccccaagatctatcagtgcaattcgaggctgaatttttcagtctaaagtaactttagttgccccatatgttgggcctttctcaaggacaaggctggtctcaagatcaaacaaaaggatgcaaaaattgtggaatcggagaatgtttaagaggctcttgaagaccacgagaagaatgcccaagacaggatcaatgatatgacttatttttcttgcttcaagatttggcaaaacaaataagactatgaatatgtcttttttggaacactttttcgagcagagtttagctgatttgaaaaagatggaggaagagaaaattgcaaaggaagccttagaattagaacatgaacttgacgatgaggaagaaaaaggacaaataagaagaagaagaaagaggtgatgagagctcttctaagactttgttaaggatacttaatttattttgttcttatcaactttgtttgtttttccctttttaacttgttaagttaatgacttaaaagctgagacaatactattgatcattgcttttgatcaagttttaatttattatctcgatattaagaaaaaatttctagttggatgcccaattacgttttatatttttaatgtttaaacgtgtatatatctattctatataaagtgtgcctatataacataatttttggtttatgagaaatgcatgagtgactttttatttatattnnnaataaaatgatttattattaaagttaacggaggaaacaaaacaacatcgttaaaccaagaattagcgttagatagacacttttaatatataaagatataaagataaatatatatttgttgtttaaatatatttttcattttatttgtaaaaaatttaaatgagtttgcttatttaaaatgattcatgacttatcattttagaaaacactttgtctatttacaaatttaaggcatcactttttaaccatcttaattttat

SEQ ID NO: 5330 - DNA, 2455 bp, Cannabis sativa
aaattgaacaaacctgttcgataaggcggtggacagggctgccattggaggtgagattagaggtatccttataacttttcgcgaaaagcgataacagatcgtacgtaaacttattaggcatgtcgtaaacgtaaaccttgatcggaaaagcgactgggtaatggggatctccgtacaaccgttgtgtctgggaattgaacatgagtttgtccagctcctcttccttcttctcagatccggtggcgccattgctataaggagtgggatgagtgaggagaaagtggtcgagtgaggcgacaaaatgaggtttgggggtttgaagaggaattaggattggggaattggtaagggtttggggatgagaagtggtagaagaagagaaaggaaaatgctaagagaggaagggttaagagaaggagaaatggagatttggatctctggttttgtttacctaaaagagccatttttacagttcttcactactcagaagaaagaagaagaagaagaggaagacgatgctaacggagcgggtatccgacccgaacctgaacccgattgattgtgtctagttttacgtgggccaactggataaggcccgtgaaacagagaaagcccagtagatgttagttaaaggcccgaaagtgggagtaattgaataaagggaaatttagataaagtagtatttttttggaagcttttatgttcaacaattttttttatctttgggtttctctttttttttttttttgttgaaaaaaaaatgcttgagcaagacaggcaaatttcatagaaaactgaccagttgaatcaatagaccaaatccattaatcactgccttgtcccccccgacctacctcctttaaggatattattggtggttacttggtcaaacagggagttgagtttggaaacatcccaattctcatcaccagtgagtaaattcgccattttattccaacccttaggacgactattttttggattgagatagaaattctgcccatgaatcacccacaagtcctcccagatattagtatctttcccattcgcaatgaacttgcatgctcctttcttaattaagtctttgaatttaactatattcttctaaaattaggagtcagagttcttgtaagagcattttaaaaagggtctacccttaaggtacttcgcatttagcactttgcagcacaacgaatcaactttggtaaggagagcccactccaatttagccagaaaaacttgatttatttttgaggtcttccagaaactaagaccacctctagatttcgggaggcatagtttttcccaagccttaagatacaagccacaatttcctttttcacagtcccaccaaaaatctctaaccatgccatcaatcttagacgcaagcttcttggacaacttcgtcgtttgcatagtatacacaggtaacaaaaggcccacagattttatcaaagtagcacgatccactttcaaaagcgattttaacttccacccatgcaacttcgagaccaagttatacatgataaaatggataaaattgaagtcaacatctttcttccaacaacggaaaagcagaagacccaggtagttaatgtttcccacagttgcgttgagccctaaggtctgaatgatattacgcttcatcccatcactagtgttcttgttgaagaagatggatgtttttactttattaatgcgatgtcccgaccagttacagaatttttccaggcattgccaaaaactcgtggcttcctctacggtggctctacccactaaaataaggtcatcagcaaagaacagatgagacactctagggccattatggctcaacttatcactttaattcttttcctgtcaagggcattttctaagagccaagagaagatttcagcaacccatataaaaaggtatggggagagggaattcgcttgtctgataccgcactctgggttaagtctatccaccttaccactattaaggcaaatattgaatgtagttgttgaaatgcactaacggacccacccacagaacttatctggagcctttaagttgcatagcacgtgatctataagttgccagctcaatttgtcataggctttaaccaggtcaatttttattgcaaataagaagccctctttcccttttttacacttgaaagagtgaacgatttcttgtaccagcacattgttaacctagatgttcctacccgtgacaaaagctgcctaggttggacaaataagtctcaagaggacaagtgtaatatgcttgcaattatctttgaaatgatcttgtacaccatattacaaagcgagataggtttgaactgcaacattttttttgggtttaacaccttgggaattaagactatattagcttcattaaaccctttatgcataaccccagttgtaaagaagtccacaacagcctcacagaagttctttcccaccgaacc

SEQ ID NO: 5331 - DNA, 816 bp, Cannabis sativa
atatatatatatatatatgtcattggctactctgttataaaatggtatatcatattaaattcatcacaacataattaatagtactgtcacatacagttgatcatactatatagtccttaaaaaatgtttttacattttgacaaaagctactaaatgtccgattaattttcaaatgcttttttgatttcccaacaggtcaaattgttagactttaacgatgatccattcccaaatcaataaagttcaaaccataagtatttatataaatataaatatatatatttgcttttgacaattattgtacttttaactattttgaagtgcttcttatcataaatgtttcattttttaataggtatgtcaaaaagatccatttagttagagcgggttggagttccgacccgacgaattacttctgatccgaaacatttggatacttattcgatcttggatcagatccgctccaccccgcctaatttttttctagaccggatctgatctgaaacgatttttaatttatttaaaaaaaacttaattcaagactcggatcccttaggaccttgattcggacccggacctagacccagacctggaccaagactagagacccggacccaaactcggacccagacccagatctgggactcaggacccagacccgaaccctaaccctgacccaaacctgggatacggactcggacccgaacccgggacgtggacctggacccgaaacctgagaccgggaccaggacctggacccggaccaggacccggatccgggtcccggacccgggaccaggaccaggacccggaccc

SEQ ID NO: 5332 - DNA, 815 bp, Cannabis sativa
tctcttttagagattttcctcctaacaataagtgataatttcaatgctactctagtcaaattattcacatagaaaatcataaacatattttgttcaaaaatataagtatttcgattccaccaaatgaaatatatagttgtcgcataggtagccacaacaacattagtgcaactgcaatgggagttgctatatttgtgactgtaaaaaatgtgggtccatttatccaaattttttgactttttaaatggataatataagtattattgctcttgccaagtaccgatgcccatatttttaaaatttttaatttttttctaattgattagtgtaaaagcttaatatttataaacctgaaaatgggccctacttacgttgctagcgttggaggtgcccttatgaaacaggttacgatctcgtttgatattcagccacatcagccaatctgttacaacactgaccaaattgccttatcaaaccaagacttaattacatgcaaaagttgcttggaaaaaaaacacttaaagaaaagatgagtatgacacccatcaccaacatcacacactaggaaaaatgtaccttttgacattaggtgatcttttgttataaagttattatgagaggcttgccaaatgataaatgtatattttggtatgaataatctacaccaaattattttataattatcaactttagcataaggaacaagaaagaaattgtaaagtaaagcctgtgcagaaatctaccctcttcccaacattcaagattgtgtcccgtatgaagatatccctaagattgagaagtttacgccaatacca

SEQ ID NO: 5333 - DNA, 515 bp, Cannabis sativa
gcttatattttattttagttttttcataaaaaaaaaggtgaatatatgggcaaacataggaccggtcttgaaatttagtgggcaataagaaacaaaatatttttgagtccttattttaaaaaaaatgtatggtattttttaaaattatagtaattaaaaaatatataattttaaaaggagatatttttttgggcctctagtttaggtggattctaaacacaagtttagtccgcctatgtttaaggtcgagtccacattatttcagagtgattttttattttttttttatttttcatgatattataaaacattgtcccacatggatcaaatgtaaaagtattgagctatatataaagaacatgtgctacttaactcatttgcctattggttttaagatggaacccataattttcaatacatgaaattagataaaaaaaagtcatgcatctttctatatatccctctaaaccttcgattttactattttttttttgtgctagatcatatatattata

SEQ ID NO: 5334 - DNA, 1331 bp, Cannabis sativa
tctctctctctctctgtgtgtgtactgggttgggttggatcttatgttaactaaatcagctcttagatttgttacttgataaatatggggcttaaaaatgtgtgatttgtaatgttgaattgaaatgagctatcttttatgacccttttgttttgtttcaatgttgtatggtattactttaagctttatagcctatctgaaagtattggtttcttttttgggtttctggattcatgcctttctgggtatctgccattaaagactgagtttcagtttggcttttctacaaggattttgtctggataacaaggactgattttctggtcttattggttagatgtataagacttggtgctagctaggaaggataatggctggtctgcaccttacgatctgttggattctatttggcaatggagtaagtgagttggggcatttgttattcgcttagttatgttacttttgctggttagtgcaatttgagtttcgcaatccctgctgatggaatttaagttcaatagcagactgttgaatcggttgttttgatagcatatccctgaacaaggatgatgcagctataatatacaagaagttattttttgagctcagagttgaatgttggttgagttgatatggggatgaagttactctattgatatggggatttgggattttacagtctaattgtcaaggtttctgctatgctcccggtcttttttttacatgtatcacagcttttccttggttggcctatttgctttctcttgtacatggccgcaggatgcctaacagtttgggatttgttctgaaagtgcttttgatagaatatgatttgtaaattggttatgctgttgaaaattgcaagttacagtggtgcaataattttggatgttgaaaggagcctctaacatagaaagtatgatgattgtgaattccagcttgctcaaaatctttatgtgtaaatatgtttttatatatattggaattattttcaatatgattcattccagataattatatatatgtgggagcacatgtcatcaatcatctttcatccttacatctgttaattgacagccagaccatgacatgaaatagggtagtacagtatcgcatgagctctgttagctgtgttgttggctgcaatcgcgccactttctccgtttcttactcccgtttgtcgctgctgtgattttttcttcttccgaccttcttgtttttttttgtctttggttcgaagaacgcaccaggagagaagatgaaggcagcagggagaagcgggataagatttagggttatttcctttttttttattttaattcattaacata

SEQ ID NO: 5335 - DNA, 590 bp, Cannabis sativa
aaaattaaaaatggaattttcatgtgagttattgagctaagatctacctttcctgtaaggtgcaatccagctagtctggatgtcctaacacatctttaagtaagcttaaagaagttgttttgagctgaattgaattgaattgagctggtatttagctgatccaggctgtgcagactcaagttgtggtagaaaattacttgtaagaagaaactaaaagaaaacctgatgagtatgaccctcatatagcacaatacatgtttcataaactcacattaatgcctaagtacaagaatttagataggatacgtggcagaaagtgatgacgactgaattacttactacagtcatcaagagtgagaacccaaaagattgagactttgttggaaaaccacatgttttcagcactctttctaaaaattaagctaagttaagggaggaatactctttgcttgatgtcgttgtgagaaaacctaaaattgaaggtgtagtgcttctcaaaatcctttttgtagtgcctggtttagatttcacatgaacgtgggtgcattccaacctcttaacccatgatttgtttcaattgtcgattactt

SEQ ID NO: 5336 - DNA, 633 bp, Cannabis sativa
tttggggctttgcccttctacataagcatgaagaactccataccagagtagcagtttagaaaaaaggctcctgaagcaaaaattacatgagaaggaacacttgattcaaagggtttcattttcttgactcacgtctgaaacattgtttaggaataacttttgtattctttgtaatgttatgaagaatttttcattttgaaaaatggagaaataaggggaatggaggttattttacttttgattctgtttcttaataaaccaatttgtaacactgatttagatttaattaagatccatgatttattgataccttaatctctatgttcaccattgtacatttcttttgctttaatacgttattgagttgatagaagaaagagctttcttgaaaagctgatagggacaaccatattagagcacttaaatgaccataacaaacatttctcatactaatagtaatcttcgtgtaattaaattagtacctcatgaattgagtatgattattagagcactactctttatcattcatccaattaaaattaaatttaagaataaagaacaaaatgtgattgttagattacaacttatttattgtttaaaatttaaattgcaagttggaataattagaaaagt

SEQ ID NO: 5337 - DNA, 509 bp, Cannabis sativa
aagtcgagaatgagcaagcttcgaaggcaagtgtgggctacaacaatggtgagtttggtttatatatgctctctagaggaatcgtaatcaagttttttggaatcaaaaagtgacaatgaagaattcaattgtacattttgtcaggttaaatataaaattgatcatataatgcctaagaatattaaataagaggatttgatttggtttgaaaggttgtaatatctagtcatttattcaggcttttataaaaagtgctactagtattaaatttaattttgatggcaatactgtatacaatcatataataaaaatagaatttaaatatttattatcattttaaattacaattattaataactatttattgttattaagttattgcactttttaacattttgtgcttttgagcatttctgtcaaattgtaaaattatgctgtatcatgtttaagtttaaatattttctttgtgtcaaaattaatgtaatatttacaaaaaggatatatgatcc

SEQ ID NO: 5338 - DNA, 1073 bp, Cannabis sativa
aaaaagtaaagcaaaaaaagttacttgtgattaggaatagtgaaccaaaaaaagaggcgcttatgatcgagttgaccaagatagtaagcaaataaaatagttactatcttgaggaaatattttgggataaaacctcattcatcttatcccaaattttaatacgtgtacaagtaggtctgacctttcctgagggttatgtatacataattaaatgatagccagccatgcatatatatggtatctaaacttgaagggttgggggaggaaggagccatttggacccctgaatgtaaccaagattgagaaaaggtttggcttggtcatcggttagtttcttgaaatatttgactctcccttctgtggctgcacctcctcctgtgttcttatattcaccaaagaaaacagtcttatcacattcagttttgcctttatcataccatcccaatggcgaaacaacgccggccgccatatcagtgtaggcgaacaccactctcgggctgcactgccaagctctgcccaaaatggagtctttggcagtgccaacaattttacaatgaacaaatgagtaaccagtatcatcaggtttctctcttgcttgtgctgttatgacagaggatcctgtatggtcacccaaaacattgagttcagtgtttaaatatagagacgtcccacttccaaaaatgaaatccactgtgccttcaatgtaacaatccttgaaaagatgaaaccctctatcgtcgcaaagtgtgtcttggaatcccaacattcgtacgttgtaaaaagctgccttgttccctgatgctctaaatgctacagcctgagctccctttcttacaccatctggttttggtgcagaattctaatcataaacaaaataacttatgttaagaaaaatgatcacaagcgtataatttatttaatttaaataaaaaaaattgaaaaattatataatgtactcctttaaagtgatgcactcttatctattttgatatctgagagattttttagtccaatttttttttttttttttatggtcgtgcacgttataattatttaacatattctgtaaaatt

SEQ ID NO: 5339 - DNA, 702 bp, Cannabis sativa
ttgcaatgcaagataaaaaaaaaaataaatttttatcatttttttatatattttaaatttgattctattctatttatattcttatatttttattcttcttaatttaatgtggtctaaatattttaagagaaatagtaaagggtaacttggtgcccaacaatactttttttcaatggaaaaatcacatttaatatttttttttttttgaaaattaacgtttattaaacataaaattagacctcacaattattacataaaatgttcatcggatagatgctacatcagagcacccaaagctattatgagataacgatcatatggccacattatgagccataaaatcacatttattgttagtgaaagagataactcaacatccaaaatggccattaataaacctttggttctattctaaacccaccaaaaaaatttgttctgtaataaataactcagctaagaaacatggtttttctttttttttttattctttactcgtacggagggtagtactgctgtgaggaaaaatactattagttaagagtgaccgacaggtggttttagtgtgaaggaacaccataccacctagtttaggtgagaattaggtttattgggattgatgacgtggctgcacactgtccaaaatgtggggcccacttttttatttcattgacgaataaggagtgtgggcctctttgaatgctc

SEQ ID NO: 5340 - DNA, 3680 bp, Cannabis sativa
gcttccacctgaaataccaagtagtaagacatcaactctgtaagaatagaacaaactgtgaaaagatgttatccagtaaaaaagaggatgacttaattgccaataaaatatcttttctcggtaggaagaaagaagtattttcacttcaatgaactaagaggaaagaattgaaacctcttgccagctactataatgattgtctgcacttaatatgtgactgtatctctgcaaagcttgtttcatgtgcatcacctaaccatccaaaaatattatggagaaacaaaatattaaatgttatacaactgaataaacgtttagaaactagtgatggcagaatacaataaagcaaaaaccagcaagcatgctgtaatataaaacagacctcattggtaatcggatcgcttttaggcaggtggcagctgcacatggtaagaacatccaaggcagcattaagctcccatctatgcatatacctggaataaatatgtgacaaatctaatattagtatctagaggcacaagctttcaacacagtttatgatctggcattagttcatgtataaattttattagaccattaagtttataataccaattgtaccgtaaatagcaaatgtttgaagatgcaaactgaacctatataaagtgagcagaattcagctaagataaaagtacataattttaactttgagaaaacagggcttttccacaaaagaaaattttttaaaaaaatgttgtgtcttccagaattatcatgtaaatcaaacagccgtagcattcacagcaagtaagaaaacatgaaacaatttacttacttgagggcaactctagcagctagctgcttgtccttcaaccgcaggcaatactgccaactattgctccaaatgccatggcctccataactttggttttgcccagagattgactgattctcttcccctcgttcaataagtagctgcagcaactgatctgaggctcccttacgtagaaagcgatcagaaagtgcaagagcatccattagttttccttcatcaattaatctgaaaggaagaccaattgatgacatccatcagcatgtgaatgtccatcatcattgcaatgctaaatatgtatatcttcaatcatcatagttagcaactcaaaaagaagatgtcttagcaatatactcacacctagaattacatgtggctaaatatggtttttctttcatactacgtaagtttcagatgtcagcctaatgaaaaattagatcctaaattttccatttatcaaattgctagtgcagagaccgacaagcctttaagatataaaggagtgagatgtttagtaggatggtatcataacttacaagtaccattacaattttttaccagaaaatgaaaatgcaattagcaataatctttcagattgctaatatcaaaaactgggatcattttcaagcagtactaggatggttaattagactctaacttagagtgaccataacccttgtactgaaagatatccaaatataatgtacagaagaaactttttgacagcaatataatacacgagcaagaaagccaaacaagctaaccctcataaattttaagggtaaagatggaataaattgtataccgttctattgctttctgatagggttcttcattctcccaattaaaagaaaggaaaaccgaattatcatgttcgggaacatcagttttcatggcatcttgccaagatgtatctggagctgcaccactttggctgttaaaagatgataaatttgtgggcatattagtgccaccaacattttcatcaacctcggactctgtatcactatcatgctcatgaagtctctttaaagcagctcttacttcatctttaactctgctgctatcagcagtttgcttggttgttactgcaaactctgaaacccgatgaagatttgtttgcatttgtatccatcggtttaaagttggaaacctgtgcagcaaatataaatttaaatgggccatcacagagtagattatttgcaaggatgaataacttcaaggacttttaagctaacctctctgattgatcaagagcaaactcgtaaaacaaacgattcgtatcaggtgcttcaagcaattcaccatgccaagagcttgatgtagaggaggcacttccactgtataaaatgctactcccaaaaacacatgccaatactgccctaactggcgatattttaaccaagtgttttacgatatccagctgtaaagggtagagagggatgccgggtaatattgatgaccagtcatgacaattaggttcaccttttgaagaaggtgatggtagtttattctctgtgccattcttaatgcaaaggggtactggaatgcaagcccatccttgaccagagcgtggaggatacactgacggcacacacgctgaaataacttcatgaacaaagtcagcacacataatctcagccatcttgctagcagcatcagtactaccacggtcaaatacgaggcgagttaaaagctgcaaacatgaacatatcaaatcaatacctatattatccagagagaaccctcaaaggctcagttggtccccctcaaacatgagtcaaaacagaagtctaaatgtaacaataactaacaataacaataactaacagtgatccatccagaaagcagtgatgaacctttaagatataattaaaactgtgatccatccagaaaaggatcaacctttaagatataattaaaacaataaaacactctaaacatattagaattgttaaagaaaaaccacaggtaccgccaacatataaatggtgatacagaaaacaataaaatactctaaacatatttgaattattaaagaaaaaccacaggtaccgccaacatataaatggtgatacagaaaacaagaaagaggcaataaagaaaaacataaaacacattacaaaataacattccaatttcttaataaaacagagaaaagaatctctttgaaccccttaacgatatgcaaccagaggggaatccagaataattcatgtgttttcaacccgatcttgaattttttttttttaatacagttaatacatatcaacaaaagcattatgtattgaatatttgcaaagaccacctcaccaatgatcctacagatgatagaatacaccaacacatttccatgtacgttttataaatacatatatataatatatatatatgtatttatatatgtacgaagtaaaacatatatttacaggaagaaaaaataataagagaataaggcatcctcgtagaaacataaaaattaaaaagatcatatctatacaattaccccaactgatttgtattattcaagaacttaatattgccagaaactccctaataaacttgggaggagacatatataatacatattgccagaaactaagtaaatgattttccacttgtaacttatataaatcaatccaaaagtattgtagaaaaataaacatgtccgaaattgattccatcacaaataaacaaaataaatttgggcaagaacattagcagacaaacaagaaaagttgtcataacaaaccaaacataaatttaagagcacataactcaattatgaagatattgtcttacatccttaggccattcatacacaagtgagaaaaagttgaagtcgtgagttgtatcagtcccatctact

SEQ ID NO: 5341 - DNA, 782 bp, Cannabis sativa
cttggagctcaaaagtgtacttgtcttctttatttgaaaagaaactactttgtattaattaagaaaaagagatataaaggtatatataagacctgatctcataaaaattacaaacacaataagtaaaacttgatagtagtggagaacattgttttacatgaattaaatgaaaaatattgagccatatataagaatataagttactccatttatcatcaattgatttcgaaatagaatctcatattttttaacatagtatcagagatatggtactagatgctgtaaagacgtttgagatccaaataaaataagatttagatagtgtaaaaacgcttgagatctgaacaaaataagatttagatttgatattaataataattagtattaagtcttacatgatttaatttatatctagtgtcactttatggtagtggtggctaacaggccaataaaaaaattacattaaaaataattaaatattatttatttttaaatttgataattatactacaaaatgaatttaaagtagacccaaatattatcttttgacaattaagctcccatttaggaaaaatttcgagttcgtcaaatgcaaggaattttaataaacttagtggaggttggtccagcacatttgacttcagtctttttttattttatattttcaaaataaatatgaagaatttgttttttttttcaaaaggggcaatgacatgattttcaacttgcaattttattaaatagaaaaaaagacttaattataattaggttgacaccacttg

SEQ ID NO: 5342 - DNA, 1870 bp, Cannabis sativa
gattgtgtttcttattctttcaggttgaagattatggcttcagcagcagtttttttccattcatagttgcagagaaagaggtatgtaccgaaatatgtatgctgcagggtgcaatagaggtggaggagactgctggtgatgctgttaaagccaagaatcaagctcttgactttgtacatgaaatggggtggcttcttcatagaagtcatgccaaacttagattaggtcctatggatcccaactcggatttattccctttcagacggttcaagaagctcatggagttttccatggaccatgactggtgttgtgttgttaagaaactcttgtgcattttgtttgaaggtatagttgatgctggagaacatccttccattgaggttgcaatactagatatgagccttctccatagagctgtgcagagaaatagccagcctatggttgataacttgttaaaatttgtaatcccacagaaaattatggacaagtcacaggtgttgttattcaaagctgatcatgttggtgctatggggttaactcctctacatgttgcagcaaatcaaggtggttgtgatggtgtgttagatgccttgacagatgatccaggaaaggtatatttgttcctttaagaaactaacaatacataacaaagagttagtgtgacaaagtaaacaggatttgtcccctcaaactatgacccttgtatagttttgctctttgaacttttttttttggcaaatttttttcttgaactaccaaaattgttgcaaatatctccctccagttacattcagctcgtttctttaaacaaatttttaatgtagcactctaatgtgacgtttatctggctagtttaagaattcagataacaaataaatacataaataacaatctaacgatatatgagaatatgtatatgtatctttagagttaatatttgtatgtttaatatttataagttggatttcgagtggcttaaagttattaaatagacccttgtattgcaactaaaactgtaatttatggttacataaacaaattgttttaaaaaatgagccgaatgtaactgcatgtgaaatatatttaacgatttgtgtagttcgggaagaagttttttgcaacaaaaaatagttcagagggcaaaactttataagagtcataattcaacgggaaaaaatcttacttgttttgcaaaatgacattaaaaaatgtcaattttcacctaagtgtgaattgacttattcaggtgggaattgaagtgtggaaaaatgcaaaagatgaaaaaggtttgacaccaaatgattatgcatgtttaagaggccactactcctatattcaacttgtcaagagaaaaatgagcaatataccatcatcatcatcatcaacaacaacatcagcatcatcagaaagcgagcatgtggcggttgacatcttagacgacgacaacagcaacaacaacaacaacacaaacaagcaacagaagcagagatggaaaggcgggaacatggagatcgaaaagtacgaaatgaaggaatattgcagaagatggcattggcataaacaaaggcaaatgcaacataagaggagaaattctttagtgtacaaaccagcaatgatgtgtttggtgggcattgctgctgtgtgtgtttgtgttgctttgctgtttaagagctcaccagaagtactatatgtgttcaagccattcaggtgggaaaggttgaagtatggatcaagctgatctgatctgatctgagtcattgaattggaatatgagatgaaaatgaaatgccttgttttgtttcttactatgaaagaaactgtacacataacaattatagtgttgttggtatcaataaaaattggtattgta

SEQ ID NO: 5343 - DNA, 594 bp, Cannabis sativa
ttcctgcaaatttttaaaaaattttaattagtttacattgccaaaagtaaatttgaaatttttcaacaagcatagtaagctataatatagaaaatcgatactatacatataaattattcaaaattttaaaaaaatttaaagaaatgatattgtaactataacaaatatctttataaaaaaaaaaatatttcagcaaataatgtcggacataaaaattcactaagaagtcactcttactcggagaatgctttctgctgaacttgcacctattaaattgggaaatgtaatttgccaccagctgcgatttcaatagcagatcatcatcttatggctcttaatttaattaattaataagtatcgctactgaactatgtaattgcaaacaaacctttttcaatgtgatttggctatgaaaagatgtggaaatggaattttctgtaaaaataatgtatttcaacagtgaaacttcttaacagcagactaacattaaatgcagaaaatataagataacaaacagtaaattacatacaaaccaaaaggattaaacaaaaggaaacacaaaatatatacagatagatataattccttacaaaa

SEQ ID NO: 5344 - DNA, 864 bp, Cannabis sativa
agtgggttacatttgtaaagtgtaagaaaagcccacaatgtgatgacctcgtgattgaagatctatgtgggttacatttgtagcgtgttctgttgatgattacagtggtacaagatggagaacagtgtttagggtttgtgttaaaagtcatcctgataaaatatggtgaggcaatgagttttgttggtgatagcaacatcacaaggtggttttgctagagggaaagccaagagtacgtggtccttggtggagaggattattggggtatcaacccaagtcccacattgaaagaataggcaagattcgccttgaatataatatccctcgcagtactccattagtatgagggtttttgggaaaatttccaaaaaaaaattggtgagggcttaggcccaaagcacacaatatcatactaatgtgggagtgcaagtgaggtggcagcccaataaagtggaagaacgaggtccaacgtacacttaatggctacctcgaataagtaatatacttggagcaacctcaaggatttttggtgcaaggacaagaatataaagttctcagattgaaagactttatatggcctaaaacaagctccacaatcctagtatagcagaattgatagctacttccttaaacaagaattcaacatgagaaaaagtgaaccaacactctacatcaagacacaaggtacgcgtgatattatggtaaactgattgactctttatatgttggtgatctcatctacatgagaaataatgagaagatggtcaagcaatttaaagagaatatgatgaaaagttttgagatgaacgatcttggattaatgtactattttcttgagactaaaacaactcaaaaagaatatgg

SEQ ID NO: 5345 - DNA, 1884 bp, Cannabis sativa
caatcctcaaacagcatcatttaccgctaaaatctttgctcatattccggcatgagtcggtgcctgcctaataccccacccaatataccttcaaaagtactaaaaataaaattaataattttttttagctttacttcattcatcactctagcgactactaattaatccctgtgtgttgacttgttgtgaacaagtgtcagaatgtgattggttgataggataataatatataagcctggcattaataaattgagtaaggggaatcctggctggttggtgattttgtcagcaagattgtgttcagggtagatatacataatagaaggaaagaaagattagattagatgtagtgcaatgcaatgcaaagcaaaatgaggcttcacaaggcccaatgtcttcaagacaatacatatatgctactgctgctgctactggctactgcagcaactgctggtacaggtgtgtaattataaagaaatggaccatagagatagaaattaatagatagagagtatgtcatccatgtatatgtataaacattaatacatacggtactattactatactctgaaattctaagtaattcgtactatatcacctttgtttttttggccgaactttcacggagctgccaagtggctccggattgttgtccttagttgttttttgttttttgtttttttattactaaatggatttttatttcaatttcttcttttattattatattattttattaaattatatataaatataaaattttaatcacaaacatattattttaatgttaaaaaaagaaaaaaaaaaattagtgtagtctatagtgtcctactaaaatagtgtgatactatagacttcaacatatataggatagcatttagtgttctattggagcaattttgtgtccaaactccacttttaagattttagtattctattggagaagcccttaagggtgtgtatgggttgggttagccgcagagtcatctcaaatagtttgaggttcttggtgaaaaattaaaattggatcttttataaaaaaaaaaaaaattataatcaatactttatgaattcatttttttctaaaacaaaatacttcataaattttaaaatatgtaagaattttaaaatatgtaagaattttaaaatcgtatgtattgaaattacaaaattttatatttttttttataagtgctaagtatatatttactcttatgaatatttattgtgtatactatacattatcaaaaaatatttattttatatatagggatgataaaaacaagagccttttaatatagggatcttatgtaatgattcaagctgccatatgcttgggtcgactctaattagccgggttgagactactttagtgggccaacccaataaaatcggcttattaaattctaacccatttattttaagttttttgtataacccaacccaaattatcatggattgagttacaacccttactttttaaagttacaaaaatgacaaaatttaaatatgaatgttcgattaattctctatacaagtcaacctgtaacagttcatagtcaaaaacagttagttaaaatcccaacagacctagccgtatgcaatcccacatcaagacagttgttagttatttctaactaacatttttctcagctacaacttatataaatagaagaacaaaaatcagagagacttacagcttcaaaactacttctcagaaatctagagaaaagatgaaaactccagacctagatagagagagtttctctcgtgtgtaaacagaaagaaaaagagtagaattagagaggaagagagaagaagaggatcgattagatcctgagaggaagaacagtcagagaaattgagagattgagagaagttgta

SEQ ID NO: 5346 - DNA, 528 bp, Cannabis sativa
tgactttaaactaaaattaataatatatatacatacctgcaaataaaacaaagttaatatatgttagagaatctaatattaataatatgtggaaactaaacactatacacatccttttattatcacaactaattttgagatagaacctcatacaccttacatacacacaaattcctatttctttaacaatacactttcgcattctaacaatatataatctctgtaaaatctaaaagtcaaaacatttagtaattaaagtgagaatattcacacacagtggaaagattaaatctcagctcgaaagagtctgaggccaatgattgcatttaaataaccaaagattacaacggaaagggccaggtggcagtgtacagcaggagcagagagaatgaaaaggaaaaaggaaataacagaatgaaacaggacaaaatagcataacagcatttagaaagttctatgcctaattactctgcaatagcattaagctaattaatctgtcttaacaattaatacatttaccattaacag

SEQ ID NO: 5347 - DNA, 570 bp, Cannabis sativa
tatgatcgatatttgcgcagcacggtaatataatatgaatgtttttatgagactatagatactcattctgttcatattttatgtacaaattgtttaagggttaaaaaatttaatttttcagcagccttcttatgccgggggacagcctcctagaccgatcagtggtggaatacctaaccgtgcagttgatgatccacgtcttatgggcattgggggcgttgaccccggggcaactataaaagataggactcttggatatggaggtggaagacctgaagttccccttcctcctgatgcttctagtacactatttgtagagggtttaccagccaactgcacaaggcgggaagtagctcgtatcctttagtagtggataattattttttatctgacatttcatggcagtcctttggcttccaattttaaaaaaatgaaaaatctttgcaattttagttccttgacttgtgtgttcaaagatatatttcgtccttttgtaggctacaaagaggtgagacttgtaagcaaggaatcaagacatgtgagtttaccttctgtgccttttagtgcaga

SEQ ID NO: 5348 - DNA, 1440 bp, Cannabis sativa
ttttgattatactatagggcagtactaatctcagtatttcttctattctcttctgattatacttttagcaagtatattatatcttatctagaaaaataatagcattattgttacttcatttgcttcttgcaataattctacatgtgagcagcgttatcagttatttttcttgtacaggcagagaaacctacattgtcaaatgtcaatctggatgtttcagttggaagcttagttgcagttgttggcagcactggagaaggaaagacatcacttatatcagccatgcttggggagcttccttcaatgggagattcaagtgttgtaatgagaggaacagttgcatatgttccacaagtttcatggatttttaatgcaactgtaagtatttgtgaagcattccataattctatatctgattattggaatgtaatggagtatgcagtaatctaacaacttttaacaatggaacttgctgagactagtcaatgtaattttcatcgagacttgtggttttttgcctctattgttctatctatattttgttcttttctttaatattaggagtgttttcctcctgaattttgcttgagacaattctctctttatacaagttggtgttgttttaaaagaaaaaattgggagaaattgctataattattgacgatgtatactaatgaaatgaatatcagataggcacagtgctcatgaatgacgtattaacttttgtaggtacgtgataacatcttatttggatcagcttttaattctgcaagatatgagaaggcattagatgtgacggcattgcggcatgaccttgagttacttcctgtaagtgatattaaagttataactttcttaagctattccatgaaaatctgttgtccttttttgggcatatggttctagcctttctcacatgctacatctacaggggggtgatttgactgagattggtgaaagaggtgttaacattagtggtggtcaaaagcaaagagtgtccatggctagggctgtgtattccaattctgatgtatacgtatttgacgacccactaagtgctctggatgctcatgtggcccgacaggttaaatgtttatcctttaagtttatttttaatattttatggtatcctcagtacatacttaacttaagggtaaacatcttcatgtcttgtaatacaaatattcaattggataactcgatagtcttttaggataatatccagagttctatagcatgtaagtgattgttaaagagtcattggaaactgaagagaactgttttactgtttaagtccttgtttatattttataatcagctgatggatgcttttccattatagagtgactaaaaatcttctattttttttctgcttcttttaccgagtttgttgatgttcagattcaaaaaggaaagctttcttcatcttttagtatttac

SEQ ID NO: 5349 - DNA, 1846 bp, Cannabis sativa
cccccccgaccctcaccgctcagccagtgacgctgtacggacactggcttgtggcttgagaggttaatcgctcggcttcccatcgggtcgatcacaatccagctcagcgtcagttcctccgccagattccggcacgcggtttcgttgtcgatttcgtttccgttcgggtacggtattcgggtcgggacgatgtctttcgggtgaagcaggtcgacccggaaaggcgagcagcgaaaccaccccgacgaggtttcggtcacgacgaccttgctgaaaatgagctctccgcgatagtggaaatcgacggctgagatgaattccggcgtacggtggagatcatcggtgccgggatttgagggcgagctattatatgtggtggtgattagagggaaggaatcggcgaagaaagatcggtgggcgccgtggaaatcggcgatgacttggcggacacgtggtgagcttgtggaaggccacgtggaatggcaaatgttggtccaaagagtctcttccgtgtagagggagttgagttgggccgaagcgcagcccactgaggccagagttgggccgtcgagacgagtgaggatgtggttttggattatgtcggaatgaagggtggagattgaggcggcgccgtcgtgatggacggtcgataatgaagtggaggaaggtataatagcaatgtccattgactgtttgtttgtcgttcccaacaagtttggacactcttaatttggagtcctctttgttagtttatataggaacattaatcattaggttgacaaaattgcccttaacttactttttaattatgtatcctccaaaatattggctatgtatttttatttatttatttaatggactgtctttgaattaattcacatcacaaaattaaatcacggaatgaaaacttaatttttttttttaagaaaattaaattcctaatctacacacacaaatagggtccctcaacttcgctacgttttatttttgaataatttatggtataaatatttaattttaatttataattacaaacaatttctgcaggtacttgttaagtgttaagtaaattggaacgtgagaattcttgattattacacgttattaaattttattttcttaaaaaaaattattttaaatgtaccaataaaaaaaatgacacgtggataataatttcacatttaacggtgatatacttatggagttctagaaatataatttaggtattgttactattaaaaattaaacttaggtatttatttacaacttaaagttaaactgaaatgtttataccgtaaattattttttattttttaatttaattctaaagcctgaattaatggctatatttatctatttaatgatatgcacaaaacaaaaaaaatattgtaatagaataatgatttgagcacatttaaattacacacactttctatacaattataattaatcttaaccatataataaggttatcttatgtcctacttaaaaataaaataattaatatttaatacatcattatgtgtaatttatatgcagcattagttagtgtaatattactaactgtataattactaagtcgtgtaattatattatatttaaaatacaatgcatatttatatgatgtggtactgaatattcataatgttttgtttgacaaattattagtaattatatatgaaaatattatttttaatagtttatatttaaaatgaaaagtttttcattttcacgtatagttacacttacaacattgtttggtaaggtggaagaagaagagaatagataagatggataatacaaaggatggagaagagagtagtaattcttttaaattatttggtag

SEQ ID NO: 5350 - DNA, 1674 bp, Cannabis sativa
tttttttttttgggttttacatattttctcagattcgtatttcaaaatctgatttggggttttattgtctttaatgaaaaatcagattttggattagtgggattgaataatcttatgtgttaatggatactggtggaaattcactcgcatctggtccagatggagtgaagagaaaggtctgctatttctacgacccagaagtgggtaattactattatggacaaggtcatccaatgaagcctcatagaatcagaatgacccatgctttacttgcccactatggtcttcttcagaatatgcaggttcacaaaccctacccagctagagacagagacctttgccgctttcatgctgatgattatgtccactttttgaggaatataacccctgaaacccaacaagaccaactgaggcagcttaagcgtttcaatgttggtgaagactgtcctgtatttgatggtctttactccttttgtcagacctatgctggtggctcagttggtggtgctgttaagttgaatcatggtctgtgtgatattgccattaattgggcaggtgggcttcaccatgctaagaagtgtgaagcttctgggttttgctatgtcaatgatattgttttggctatattggaacttcttaaacagcatgaggttagtatagtatagcaatttccctttatttatttgttttacattattttgtggaactattgttgttggagtttagttgaggaattggtagaagggttttggttaggagattaattgaatacacacataaatattggtatgtaagaaagaatgaccactttgaagatctgatcagttatctgaattccttgggttgtttgtctgacttttgaacttaggtgtggtttggttagaggtaatgaaatggaatagaatggaaatgaaataatttttattttattcttttgtttggttgtattttaaaatgttggaatgtcattctaatggaatgactttttcatcgttttggtggaatgactattctattttaaatttgattctagtcctatgtttttattttttccaaccaaatgccacgttagtttttggttaagaccccattaattgaattactaattggatagccaagagacgtagttcaaatggtcaggcatgtagtttgtggagttcgcttccacaacgtctaggttcgagtccctcttgggtacctacctacatagcaattgtccccaaatactctagggttaggtgaggatcctagtttaaaaaaaaatgatttactaattggatgtattgcagtcattagacaagctttttgaatatgatggaccatttttcttaatgaaatattgatgtatcctgtatatgaatttctttttttgaaaaacagacagaggccattgtcttagacaggcccctacccgttatatattgaaaactctcacttgtggcggaggaaaactgtgattacatgaagtttagcataaaacatactaaaacaagcacaaacaaatcaaaaacacatcataatcgtatgaatttcatgatctcattagagtgaatgttagaatatcaaagtaagttgcgtgttagactgtcggtttactcatagctcctaagagttttctgccttctaaatagaatattaatgtgtcttgaattatttgcagcccaaagtagagtg

SEQ ID NO: 5351 - DNA, 1375 bp, Cannabis sativa
aaaaaaaaaaaaaaatctaatatggcccattcacaaaacaccaaataaaaatattagtaaaaaactttgagaacatatatcttatagtgagaataatatagaagattgtatatatgagaataatgtatatatataaaagagaaaaatcaaatgatatacacttaccaccatttgagctttattaatagcttaatttcttggcaccacataagtactcttacaatcattcaaacagttgatgaagcaacaaagatggaaaaatggatagagagagataatttgagagaagaagataatatataatgattgtgatgagagaggaagtgggttatataaatttatatatatatatacatttatgtatattatatatttatatatattgtacagaaaggacgatagccatgattatgatgagagaggaagtgggtttatatatgataattaggtataggttttaattaattagttagtttatcattactatcataactaacaaaaatttaaaaattgcattagaaaaaaagaacaaaaaaaaccattttcaaaatagttttcctcaaagtacggtgttggtagtttaaattgattagttcattaattattattgatatttttatttattaattaactaataatcattaatttgaacaaaataaataaaaatatttaaaaatgagaaaatttgataatatagtttagagttgttctccaatatttttggcacatatgatgtggcatcaaattcacaacaactctggttgacatattgagatcacatgtggaaaagtactattcagtgcagggaaatggctggtttgctcattggcacatggttggtagttaaagagatttataaaattctttatgaacatatttaataaaaataacaaaaataatgatagagatattttcgaaattgattatgtatttatttatttatttcgaaagtagtatttctatttttggtgtaaaagtctttcaagattagattattgcttaattttgtagattaatgtttggaatgaataacttgtggtttgcttcatctatagattattgcttaattagtttaagaatatgtgtgattttcaatattttgtatttactttgtatttgtaaggaaagaattgatatttattttctttattctaatatgattttttttactttgtattttttctttattctaataaactttgcttctatgtttaatgtatatcttgtttaatgtatccacgtgtagtgtacttgtttgaacgaattgacagtttgtttgaacaaattctagtacttttttctttttgggaagattttctacttaatggctgattgtttcttgattcttctacaacaatcatgaagagtttctaaa

SEQ ID NO: 5352 - DNA, 618 bp, Cannabis sativa
catctttgattcatcaataaagaattcatgctgattgtttcccagggatgtaggcatagattgcattgatctatgttcgaacctcgttaaagaaaaggtgccattattctgtttttagttcaccactttgattgatcattgttcatacttgtttgaatttatcgctggttcttttgattgcattttcagttctggtttgtgtttaattgttctttgttgtgtgttcttgaatgaggtgaattggaattcaccacagtatataccaagtatatttggtttataatttatatatgttcctagcttccatgttttcaatgagtttgattacttaatatgaaaatattcatattgtatacataaataatgtgcatcataaaacacatgtagaacaacttagttcaatacaacaaaattacggaatatatgcttacacaaagcaaatttatatacaattccatatgcttaacaaaagaaaaccaaccgaataaataaacattcagctaaatattaaagttcacataaaaaatggtctgagtacaaatgttgaagcgtactcgtgaaaatgacaaaagattttcacattactctgagttcgttcaagaaactttcagtctcccg

SEQ ID NO: 5353 - DNA, 951 bp, Cannabis sativa
accctagactaaaccataatacaaactaggttcataaatatctcaatacgggcatatacatccttttttgaatgtagtccgtaataaaccttgttatgaccctgttttatgtagtgtggtcggttgtattgaaaatggtagtttacagagtactaaacaaacctaaatagattctttaatgcttttctaaggaaacaaagtatctttcttacctttcccaacccaaagtggtgatgatgatagaaatgtcaagatgtaactaactatagaatgttttccataaagctaattagttaacataatttttcagtaattaatattttattcatcccaaagtactatacatctcattccttcatcactcactagctcattattcaataatgtatttctatcgttatatgacaaaacaaggtaatatatccaaattgaaaattaactcatttgtgaccaacacaacacccttgaccatatttgctctaattaataatgaagatatatgaaaatatagaaacccaattaatatctatatccgtttacattatgttatatccaaaccaattaatttgtagtatccaatatttaaactaaattggtgaagtgcagacttttatttgaaataaacttttaaaaaacaaattaatagatgacatgtctgtgttatctactacaaagttatatatgaatataataatataaatctaaagctaaaagctaattaagatatataaacacacaaatattattatatatttatgtatttatcccacctcatcaaaacttaatccctttgtaaccaaccagctaactctttattagaacatgtacctagccaaacaaagacaccatacatttttaactaatttcatgaattataattataatcaatatatatctatatataaccatcaatatgtgaatccatgctctcatactcaaacacaagtcatc

SEQ ID NO: 5354 - DNA, 1740 bp, Cannabis sativa
aaaaaaaataagcatacaagaataggataggatatataggacctaatgacaaaatgtagtattaattaagagtttacatatataatatttatatgtatatcaagatcaagataagaggtgtatcaatgtataaatatatatataaatgttaattaaattaattaataggtatgagtgtctagctacttttttgttagatactcaatctctttctcatcctaacataacatacattaacatatgtatgcaccctaaagcttacatactccatagccccacttcatcaacacccttgtcccatatatatataaacaatatatgtgttgtacatattcggtgtatatgaataacacaattctaataattaatgtttatttatggtaagaattaaagaataaaaacattaattatttttacaagtttaactaatttttgttaattatttaattttgtgatcagaaactctaataattaactacaatttatataaataaaaagcatcggtttgtgttgtctttctactttgattaatttttttttgtaatttatacgaaagccactttactttctatgtttatggccggctctatgttaatttaggcttaggcaaaaataaaaattggggccagctctatattaatttgggccttaagcaaaaataaaaattggagcccaatgaaaaagtaagactattgggatttgaactctcagtctcttagttgttaaactaatcaaattaccactaggttgcaacacatatttagaatttaaagtatgattatttattttattactaactatattttattttattttattttttttgaaatggagccctgagcggtgggggggcctaaggcggtcgcctccttcgtcttagctcagggccggccctgtctatgttataattccttctttttcaaagagaggtgtgattatcgttaggctggcataagcacataagtaggttaagtttgtatttagggctcaaaatataatttatttttaaagttataaatttttttattgattttaaaaaaataccatattttcttctaaataagagtctaatttttttttctatggcccattatattttagggtcggccttgattatcgttttttgtaagtttttattaaggataagctgagaactactattttttattacacattaattaactgtaaaataattttaattgataaatactctcttttataattaaagtacaaaatataacaccacataacttatcaaaattagaatccttaacacacataatagagatatgacctataaaactgagtataaataaaataataataaaaaataaaaagtgaatatacagtataatttcatctttttactttgaggcaatgtataaggttcaccaaattaggctaaccagagagagattcttctctcagatattgtatgaatgttttaagcatgattattattctatcttttattttaacacttttaggctttactttaatatacttacctatttacaaaatatattatgtttgcttactttcttttaatgttactataatacattttttcaaaactaattctctactttatgattattgtatgtaacatcttagtcattcattcaagtagtgtctgattgtttagttttgatttttaatttttctaagtgctctttttttgtaatgacctatgttctttagttgttcttgttcatgtatttagggtatatcggttagtct

SEQ ID NO: 5355 - DNA, 1617 bp, Cannabis sativa
accgaaaaataaacacaacctcaacatactcaaagtttttaaaacaattcatacaatctataaataaaggaaaagtaccccactcaagaggcaaagacctaactttgaaccctttaacaaccacaatcgaatgagattcaatcacaattttcttgaaacttttggagttagaaacttctagagcaatctcaattgcattcaactcaccttccaacacatttccaacaatcataaaatccactgccaccgtatattccatcaaatccacacatctcttaataaccacggctataccagcttctaacttgtcaactgaggcctctagttggagacaccaacaatcctctccatcatccaaaccagaatgcttcagtagtagagtccaggtagctaccaataggacaaacatttagattaacaacatctgtcacacctccaaaagtgccaacaaattcattcaatttcttaaagtagtccaaaaaaatagttataagatcccatgactttcgggagtgaataatatcatttctccacttccaagcaatctcataaacataagccccaaacaacttaagattcgaatctttgatatcgatccaccaccttccaaaatccaaaagaccattccaaccaagctcatcaattctcaacccccattcacttttatatcaaaggccacggatgagattacatttaccaaacaaatgaaaaatagtctctacttcgatcttacagaacacacaataactctcattcgaaggaagaaaacccactctgttacgagtaggaaggaaatccgcaaggaatttcaaaatatggaacaactgtctaatatgattttgatgcttctagagcttcttcaagaccaagttaggggtatgaaatcttcttgcttggctcactcagtaagcgctattcaaagaaaaactcccaactttgaagctttccaaaaaaggatatctcttccatctaccaaaggttttatcttgagaatagcatcagttatatctccgttaaagcaagctcgaataagccccaaataaacttggcttttctaacagcctcagtacctacttcattagaggcaaactttgccagctggtatcaaatttggtggcatactctgtcaccgtcatactgccttgagttagccatatcaattcttctgccttagcagtacgaatagattcattgtaaatcttttcctaggagaaggttcaaaaggcatcccaggtcatattattcagatcatgaccctaagacacaatttctcaccaaatgcaggcatcttcccaaagtatgaagataacacattccacctgatcattaccttcaacttgcataaagtcaaaaatggatgttatcatgctcatccattgctctgccttaagtggattagcaccaccttcaaacattggcagattttgcttcctaaactgctcatacaatggctccagatgatttcccacgtcctgtggcactaccaaaggtgccagaggattaggattaggataagaagcacgtcgagcttgctgctctcttaactctctaatctgatcatcttgctgttggacggtctcttaaatcgtagcatacatttattcttagttttgtggt

SEQ ID NO: 5356 - DNA, 1658 bp, Cannabis sativa
atacagataatgtaataattaatattaaaaaaaaaatcctctttttgaaaaaaaaatatatttgcactcctttttgagtatccttaattctacaaaaatatttaataagatcttgtctaagttgaatactatatatgttttgaaaatcaacctatggagcttttgtatttagataatgtaatcagacaaagctacaatataatccataactcataattaaattaaaatcaacttaaaaagtcttctcacctttttcacttttacatatctatttatttattttttttattaaaaaaaacatatatttattaccaacactactatatataaagcactacatatcactatgaaaaatcacaaacctcactaagcttttctttcttcttcttcttcttcttcttatatactttcttacattttctttttttattttctcaagaaaataaaaaatgggtgaagctgttgaaattttcctttctaatgggttctctactttttacgaaaaaaaagatcaaaatattataaataataatattactaataataataatattaataataataatgattcaagttggtatgaagaagtaattgatgaagatctcaaatggtcttttgctttgaacaggtttgttaaattaaattatttattaattaattaaactatatatattataattatttgtcttataattatataaatttgtttttttttaaattaattaattcttatttttattttcagtgttctgcataaagggacgagtgagtttcaagatatagctctcttggacacaaaacgttttggaaaggttattatttttatttatttgtttattttagaatattatacaaatatatataaataattatttatttaatttaatttaattttcttgttataattttgaacaggttttggtgatagatggaaaaatgcagagtgctgaaattgatgaatttatttatcatgaatgtttaattcacccagctcttatatgccacccaaagtgagtttattcatattaaaaaaataaataaaatttatttatttatttatttataatatttaataataaattttaaagaaaaatatacaaaaattactataggtatcattttttactgatcttttttttcagtggaatttttacttttatgtttttattaaatttttaaatgttaattttttattttgattctttattaatattttaatttttaaaacacttataatgtattatattatgtattattattataaataattaatttccattccatcaaaatagaagagtatatgagtctatatatattgaaaagtattattattattattattggaatgtaattaattaattaattataattaatgcagccctaagactatatttataatgggaggtggagaagggtcaacagcaagagaagctcttaagcacaaattagtggacaaagttgtcatgtgtgatattgatcaggtaacttaattaaactaattaattaattatcattaaaaaaatatttatttattttatttatttatgtgaaattaattcaggaggtggttgatttctgccaaagatatctaactgtcaataaagaagcatttcttcacaaaaagcttgatcttgtaatcaatgatgctaagtaagtaa

SEQ ID NO: 5357 - DNA, 1292 bp, Cannabis sativa
aaaaacaagatcactgggattccataatatatataataatgataattttgtattaatttcagggtaccaatatagttgaggaggactcattggattcttcttctccatcaaacgacatgctgacgtgttcaaggccgttaatggaacgaaggctaagacccccacacgaccaagccctgaaatgccctagatgcgagtcaacccacacaaagttttgctactacaacaactacagtctctctcagccaaggtacttttgcaagacttgtcgtaggtattggaccaaaggtggcaccctccgcaacatccctgtcggaggaggttgtcgtaagaacaagaaagtctcctcctcctcctcttcctcctcctctaagaataagtccaacgacaacaatttagatgtcgttttgactagcaataataatgggcccaccgacctccacctctcctcctcatcctttactcatgaccaacttcagtattgtcacctcgggtcaggcccaaatagcttctttgaaagcccaaggcccattgattttatggacactaagtttgaggcccttgtgggaaactcatcagggagttatgattttatggggaataatattggagatttgggtatggctgggatgggacttggtatcataggtggtggtggtggtacacatcatcatcatcatcatcatccacatcatcatggaatggtacttgaacccaattttagtaataatggcttatgtagtcctccatttgggatgtcccttgatgggacaagtacggggacttttatggacacgtgtcaaaggataatgttaccatacgaagggaataacaacaacaacaataataataatcatgaagttgatcatcaaaatggaatggatgtgaagccaaatcctaagctcttgtcccttgaatggcaagaccagcagggttgttctaatgctgggaaagactcgtttgggtacctcaatgggttagggtcttggtccggcgtcatgaacaattatggaccatctacatcgaacccattagtttaatttttatatattgaactaataatattttttctttcattattagtataaaatgggttcgatcagtagtggtgtgattagtgacttcattatgatggtatgttgaatcatcttcgttagagtattatatatatagctaggttattagttcttctacatatataattaaggtttctaagaaaaagattgtccttttgaagtgttttgtatttatatttatatatatgtttccctctttttgttgccctttattta

SEQ ID NO: 5358 - DNA, 1591 bp, Cannabis sativa
attaagtataaaatcaatcaatgatttatacttgtatataataaaatgaatattttatattcattgaattttatcacaattaattggttgatattctatatatggtgagattacgatttaccaaacatttaatttttagatttaatatcctaaattaattatcaaaatattctaactattaattgtgccagagaccttgatagaaggtctcacctatataaatatagggtatcgatctccaagctcacttctcattctgtgaaacacagtaaattcatctaaagagagtagagagagcctggaagcttaattacccacaataatcagtttttttttcttttgtagatacaaagctcctgtgggattgaagcgatcaaagaatcaatgactaaaagtatttcgatctatttcattgatcagataaacacttgatatgtaatgttattccacatttcatatcgactgtatatgctttttattttcataaaaaattctaacatttagtatcagagtatcttttatctctgtcttgattattttgagttttgtggtatatacgtgtatatatattgtcagtgcatctctttgttcttgaccgatccatgaatgttttttttattttaattattttgatatatatattattattaggatagttatatacactcgattctaatattttctaagtattaaaataataaattttatttttgtatgtatatatacattcatatttacatacagttgtatatacatatatttttttgcatatatgtttatataaatgaatccttgattttattacataatattgattagaatatcatattatctatttatcatattttgaatcgatataatcattgtatacgagaatatatatacatgatttttttttgatttacagccattgtaatttaaaatttgaatttttttcaatgtttaattttaatctcttatgcaatattacattcatataatgttaaagatcgatttaagcatgaaaaacttttttgaaaacattgaaatctggagaatattctttgtagaacacaatcggacttgaactatttttgtgaaatcaatattgcttaaattctatatggatctcttaattttttcattcagatcattttgcaattgaaatacgaatttcggtcgtcagaattgcattttcagaccgggttttgatcaggtccacaggacccacgtgtaagaaattgggtcaaaaagactcggctagaggtaggggatgatcctgtacgacatgttgttttctactacatgtggaaaaatgacatgtcattttttgtagtgcaaattttcaaatctccgtgacgtgttgttttgcactatatgtggaaaaacgacaagtaatttttttgagtacagattttcacatctttctacgaccattatttttagtactcagatttaatttggaatcttaatttattttcttatttttgtaaatttgatcaataaattgtgttgaactcaaaaagtaatcaaccgatagcggggtcatatgaatttgacgcttgccacgtgttacacaaatcgaatagaaaagtagtaaacacacagattt

SEQ ID NO: 5359 - DNA, 804 bp, Cannabis sativa
cttaaaatagcaaagacacacacacaaataatgtcaacatataaataaataatttgttaaaaataaatatatcataatttgttaatacaagtaacccaagaaagaccaataaatagaatatatattttaagaaagaaaaagatttgattttatcacataaataaagcttgcttggtattgtttttcatttttttgttcaaaatgtattttgaaaaataagaacacaacaaacttgttcttcaaaaactgttctcggtttttagaacaaaaaacagaatacaatgtcaatcgaatccaaaaagtgtttggttgatgtttaaaaaattgtattaattaattaattaatatattttaaaactttcaaataaataatttgaagaaaaaagtgatgaaaacaccttactgtttctacttacaccaagggactgctataagcttacctttttggattcagcataaagccccatgccagcaacatagaaaggaacttctcgacaaagagttgcaccagtcccacgaaagaatcccctaaggccatcctgccgccaagtccctataataccctctcccacattgttgtaaagaccagcctgcaacctctgctttaatacctcacatgggatccgtactgctgttcctagaaccgtgctacaaaaggatgctagagattgaacctataaaacaaataaaatataaaataaatgcttcaaaaactgtttgcaatcagctaaaaagtaaaataaaaggatcaacttttcagtctccaccttggaattctttaacaaggagagagagagagagaga

SEQ ID NO: 5360 - DNA, 692 bp, Cannabis sativa
atagtttgaatataactactattattactataaaattacaaagattttgagatgaacggaagacttcagaaaaaggaaaacttacaaaagtactgaaatttggtttaatttttataaaaatactgtcactcagaaattttttcaaaaatactgtgtttttataaaataacagtgaaacacaaaacagaacaacaaaaaacaattgtagaataactaaaaaataatcgtagaacaacagtgaaaacttaacacagtacacagtataaaacttatacaatatttttgaaaaaaattccacccacagtgtaaaagtaaaaaagttagaaatttcaatatatgatgtaattatcccctagaaaaatgcagggtcaattttaagttaaggtaggtcaggtttacgtcgaggtttatctttttttataaaaaaaaaataattttaaaaatacatgttttttttataatttttaaaaatgctacataatcttataacaagtctaataattaacttttttttaagactcaattgctttaagacccaacccaatatgaatgagaggctaactagtagttatgtatgtttgtaaaatgtaagatccatatattagtgacgaaatttacttaacactaaaactatactagtaatgtttttttagggaaaactatactagtaatgttacattatttaaattata

SEQ ID NO: 5361 - DNA, 1169 bp, Cannabis sativa
atactataattattaggctatttaggcattttactctcaaactattacaactatcgaatcacaccccttgaaacttttagtccgtcaataattcctctcgaactattcacacaatggtaaaatacaaggccattgtaaaattttatcatatgtaattaataaaatatcgatgggactaatgtatcattgccacataagtgtcacaagttgttaacgtaaaaatttggccaacactcgctcactagattggtgagaggagatctaagtttaagtaaatgaatagagagacacaagagatttatagttgttaaggttgaaaaatattttaccacgatcttaatttactactcatgtatgttggattatgactaatctaacatcttaatatggataagcctaaaaaaataacataaacacataaaggaattagtaggtcattacaatgattgcagagaagttaattgactcattctatttagttctcctaccctggattctttttatcatagagtgtgatcaagaattgaacttagattctccttcgggttgtagtagactacacagtcttccacactatcttgagtattgctttatatttgtgagcaatcacttaataccaaggagcacgaaattttaagaataaatctaagataatttcaaaactctaagtatatatataatataatagctcttaattttctagttgtctggcaaagagagagtcaaaacttgttgttatccgtgctttcaacaatggacatgtggaacccaagtcagaattcaaggcccatcaataggtccctcagcaaagataaagtgggccaagcccatttggacaagtctttctaggaatgtattctagctctgcaaccataaaaccttccgcctttggcaaaccgttccttgatgcaagttcggtaccatgagattggatggacgagacaccgtgttcctgaaagactcttccagttttcctttatattcctatgcacaaataaggaaataacagttgccagatcttgaccaagcatcgtattatattaaatggggaaacttcttgaaacaaatatcaagcaattaattcatagttaattgcccacaatcaaagtacatggtgttgatcaaatcaagccaaattcgacttgcttaatcaccaaatcttctccttc

SEQ ID NO: 5362 - DNA, 1771 bp, Cannabis sativa
attttttttcaatatgagagcctaacaatatttttttaagacccatcaaatctaaagacttcaaagcaacaaagaattctacaattaggaagaaatatagcatcctttaagactatttccaataaatgatgtaaaatttgtattaaattttactcaaaaaataaactaatattatatttggtctaatttttacaattatgctcaatgcattaggtgtaaaattaagttaaaaaaaattaacaaaatttttaaattttattgaaagtatataaaaattctattaaatatatataaatgaaatgtaaaatatactattaaatggtaaaagagtaaattaaaaatatgatgtttattgtgatgtaaatttagcatatgttatattttatgtcaaatttaatataatttgactcatattatacaacactattggagttcaatttataaaaaataggataaaatatgtataaacaccaccttataactaactccaataaatggtgtaaattttgtgttaaatttgactcaaaaagtgagtcaatattatatttagcccaaattttacaattgtgttttaatgtactaggggtaaaataaactttttttttttgaacaaaagatgatttattcattcataaacattcaacatcaacaatagacataagttcaagaggggcatcttgctcacaaaagatacgatctgaatggtaacaagacgctcttgcaacacaataagtcgccctattagcagaccgtttaacaaaatgtaaagacacatgattaatacaagacaataagttacgacaatcttgtaccaaaaaaccaaactgtgaaggcatttggattgagcccatgacagcctgcactaccacaagcgcatccgtctcgatctccacctccatccatcctttgcgcttaatccaactcaaagtctccttcaccccgataacttcagcaatctcaggccccacaatacccaactgactgcttgaaatggcctcaattaatctcccattagccccacaggccacacaaccaaagccatacttgtgttcctccgcaaatatagcaccatccacattcactttgatggtgtttaacaacagtttttttccacagagcctgatccgtatgaggaccagacaccagcagcggcccatgcttctccacacaagctgcactccactgttgcagagtggatcaggccgagaggacaacactagcagcactctgatttttactcttccaaaaggcatcatttcgagcattccatatactccaactcaccattgcagcatcaaccgaaacatcagttggcttagtatcaagaaccgtggaaaaccagctgccaaaatcgtgattgaaaccatgaagcacacttagactagcacacttggacaataactttattttaatagaaaattgtaaaaaagtcaataaaaatgttaaatttttattaaaaatatataaaaattatattaaatattaaataataatgtgaaaatttattaattacattaatgagtgtcaaaaaagtaaataaaaaataatatttgttatggtataaaatttaattcatactatattatgtgctaaatttggcacaacttttagcatgtgctaaatttagaccacattatacgccaccattaaagtttaatttttatgaacatgggttaaaaaatatatttacaccatctttataatgtggtgctataaatgtagtatatatgtaatttttagcccatatttatagaattgaactttaatggta

SEQ ID NO: 5363 - DNA, 2433 bp, Cannabis sativa
ggcttgcaataaggaacttgtgaggatcccagattatgaagagatcagaaaacttgtgtggtctttgggtctgttgaaatcgccaagcccggatggcctgccacgaaaattctatcgggcttattaaaaccttgttggtgcagatgctgtggcaattgtcaaagaatttttcaagtttggggagtttcatagagacctcaacataacttttatagtgctcatcccgaagaacgtgaaggcctctaaatgtgacgatttccgtcccatctctctatgcaactttgcgtataagattattgcaaagatccttgctaatagacttcacccgtcgctctttgggtttatttctccctttcaatctgcctttgtcccgaatcgctggatcacggagaatggtattatgtcccatgaattaattgatttgttcaagaagataagaggtggtaatgggtttgttggtctcaaacttgatatgtcaaaggcgtatgatcaccttgaatggaatttcgtggataaagtccttgaggcttttggctatgggattaagttttgtgccttaatctctaaatgtatcagttcagtcagcctctctattctcttgaacgggggtcctctcaaaaagttttggcctacccgagggatctgacaaggggatctgctatctctttaccttttcatcatctgcagtgaaattctctctagacttattccccaccaggaatctactggtagcatccacgagttctggtgtaatgcttgctaccctcctattacccacctcatgtatgcgaatgatattttccttttttgtaaggcagagactgacgaagtcttgagggtaaacgaatgtttggatttctattggtcgtggtttgggcagaaaatcaattcagccaaatcgaccttggtgttctctaataacactgatgaggtttttagagatgatatcactaacttattggggttttgggtgcttactaaagaggataaagttttgggtttccctctgcttttctcaaatagtagatgctgagactttaactacgtcctggagaatatcaaatctcacttatctggttggcagagcaaactgctatcataagctagtcgtaccaccttaatcaagtcagtcatttctactatccctattaaaaccatttccatttttcatcagcctaagatgacttgtaaggctatggataaaatggttagaaatttctggtggattgggaattcaaaaaaaaaaaactcatttcttaactcttacgaactgaggttcattatgaaacccaaaagctgtggcgggttaggctttaaaaaatttggggatttcaacttagccttagtctctaagctgggttggagcttggcctcaaatcttattagaccttggtctaagatgtttttgcgtaactatggtaaacaaggtgagacattttggaacctttcgatccatcagaatgccactttggtggctaaaggtattatgaatagccatgactttatccgaaatgaaagatgctggttagttggtaatggctgatctattgacttatggtcttcgccgtggattccttggttgaattggaactcctattgtgatgccttcaatccaagatgttagattcctaaggtctctcttctccaagatgtgctggttgactcgggaaactttaataattaagctatctcttgttggttcaccccgtctgttgttcaacgaatggatgaagtaattaaacttccttgggggaaaaatgaccaactgatttagaaaaatttagaatctggtgatttctcggttaaatcggcctatgcttctctcaccaagcatagagttggctcctctgagagcctttggcttcaaattcggcgtgcccaatccatgaaaggtctaaatttttcatttggaagctggccagagattttctttcttgtggccagagattaatggatctcttcatcactaacatgagatgcaccttctatgattctgaggaagattctgcgattcccctattccttaaatgccctattgctcagaaatgctagtttagtacgcaatggggaattagaattgacgctctgaacattgatacatacccctaaagatatgatctctcgcatgttatccctgatctctagacaggtttatgaagttgataaagagttgtttacccaagtggttttgaccctttgtatctctatttggaatgcccgaaataacagctttcatgagggagcttttgtttccccaaaagctatatgtgtaaaactttatcggatgtggaggagtggagaattgtttgcagtaagagtactctgacagatgttgtcgaaccctttgacctgactcctcctaaaagagcctctatgcgtaattattcagatgtttctatccgcggttcgaaggcttttgtggccactttggtg

SEQ ID NO: 5364 - DNA, 934 bp, Cannabis sativa
  modified_base (295)..(296): a, c, t, g, unknown or other
taataaccatatcaattttaaaaatgctttctttctttctcaccattttgtcaattttcaggtatatattcacttacccttttaatatttttttttgctaaatataaattttatatgtaagaatattgtaatgttagaaatgtttgattataaattttgttgggaaatttgtaactatatattatgaataatattaatttccatttttttaatattaaaccaaccaacattattttatctgttgacaaaaagctccatcccaatctataacaaagattatatatatatatatatnnatatatatatatatatggatgtttcacagtgttgggacatatattggatagtgatgacacaatgaaaccattttatccaattgcatgtaataataataataataattagggcactagctttaccattatatattagtaaattaagatgaagatatttattattgtgggcacaaataaatttgttttaaaattaaaataaaagaaaatgattacccaacaaacaccaataataataataataatgtaaaaaattattattacggtcaaataaaaattattattaaattactttttaaggctgagcaaataataataataatttattaaaattatttattgtgtgcttcttcagaaaccaatatacacatgctcatcaacttttggatgagattattaattaaagattaaaaaaatatagtaataaattattaattaagaattaattttctttatttataatgagaacaattatttgcttaaagatacgtttgttttgtcattacatggttaagtggtttatttacttttaagtttttctttttatttaattataaactgttttcgcatatacatttaattaattataattaacgatcatataccacacacatgtactatttattctacataattaatta

SEQ ID NO: 5365 - DNA, 840 bp, Cannabis sativa
  modified_base (166)..(168): a, c, t, g, unknown or other
aactttttatcatattgatgcgtggcccacgtgtcaaacagtaataggtctgtgtgggtacactatagacaattatgtgatgtctggtttctatgggcttccattccacccataaacaaatgtcacattacatataaaaccaagactctctctctctctctctctnnntctctctctctctctctcattattcaatattcactcacgagatcattcctaatttgttataaactaaacgtccaaacacactttttggacctttctgatgaagactctttcatactcaaataaaagtgcaaactcacatgaacctcactttcaaaggttgaacagtgtattgtctcatctaatcaagtaggttctcatcataggggtgctcaaataagtaataatacccaacgcatcataatttttgttttaaataagttttagaattcccagtttaatgacccaacgaacccataccattttagtattaggtaacaatttgcttaatataagacgtgcagaatgttgaaagcctctgaattaccattgcagtgcctcctaatggtgaataattgaagaagcagaacccaattataatgataattatggggcatttgtttttggtttttaaggattattcttgttgatcgagcatgcgtgttaatggaaaaaaaaataattgcataatccaatagcacaccccattgtctagccaaaatgagataatgctactcactacacctactactacactacgatagtcgtcacaaacactccactcaatgaattttcttttcttaatgtgatagtgctatgtataagtggaggactgcattttaaagctttctttgg

SEQ ID NO: 5366 - DNA, 782 bp, Cannabis sativa
aattttatttcatttaatttgtatttttatccacattcccgtttctattcttatcttttcttacaaatcaaacttattgtagataatttgaagaagaaaaataaaaggagcttaataaataaacaataataattcataattagaaaaataaaaaaacttttttgttttttacaagaaaagcaaaaattctaaatagcaaagaagtacgatttaaatagtgaagggaggataatagaaagaatagaataagagacccacattgacatgagtatgcacatcgatccaacccatcaagtgcttgataaaatttcgtaatgaaatgaatgtcaaatcagtcaccttttttgctgcaatttcatgtgcccactccacacctactctatgctctatacttataataattatgtctacaattgaaatcccaccgccacaccgcccattctaaaattaatcccatgtcatcttatacccactgctactactgcacctgcccctaatcttctctgtatctatgtctcaacaatcctcttaacttctttccaatacaatttgtatgtaaatttatttaaatgaatattgtaagatcattccatgatgtcacaacaggtacttgttatatgtgaaataaagtgagattaggtcgaacagaacaaaaatttatctttagttgaatatatgccataaccagtttaaaaaatatatatataacacttgcctataacatgtaggatatgcttgttaggtggtcattggtataatttaatagttctacatttctcttc

SEQ ID NO: 5367 - DNA, 1472 bp, Cannabis sativa
ataaagccaccatctcttactgtactacgagtaagacacataagactccaccaacacatgatcgatcaagtgacatgggaatcaaacaagctagaatgaagatctaatttcaaccccaaaggatcttataatcatcaaccaatttttcatccacatttaatgctttctagtcaattatattccaagttgaccctacttacactctcccatgatcccattcccatgatccttttgattcataaatattatataattgctcaaacctggattgttaatctactaataactaatagcatgtataacattttccaaatccttattatattttatttatttattaaataaataaaatagtataattaactaatttttctaagttattattattgattattttattataaattacgcacctgaagtataaattccataatattaatagaattgtgttgagtaaatttaaaatattaaaaaattttgaactatgaaatttgtaaagttgtattctttaactttttggtacgatctctcttgaactatagcaactataacaaatgcgtccttttattatattaaatttattttttaaaaagtatttattaatatagtacttatgtggcgttaatatagtgtgattcaagaattttggtgaaaaatacaaatatagatagtgctctagaaaaaaataaaaatatttaaagagttaattttagtatgtttaacatcaataaattaacttttagatatgtttatcagttagctaaatagataataaagtaattatatttgtgatacatgaccacattcagggacagaggtagagagtgactataagaatgactaaaatataaaactaaaatttaagtgggttattttaaaaaaaaatcttcctaaaataagttttaaagtgttatgatttggttttttttggttccaaataaaataaaagtgtgtaattgatgactaatttcaatattgtttttgaaaatgtaagttatttgaaaaatgattatatctactataattaaaaaaaaatatgaaattcagaaattatgttattataattaaatatgaatattcaaaattatagtatatataatgtgcactttaaaaataacataagaataataattaaataaagtcataaagtcatttgtacaatataaataataataataaaaataaataaagtgatttacacatataaagcaaccaaatgcttacatattaatatgtgagtatatatgtgagaataaatgactttttagtaatttacttggtcaacgcccaaaatactgtcacttttattatgataatagataatagatttattgcatgaaatttataaaacattttctttaattagtttaaatgtctgtgattaaattgttgataatccaaaaattcaaattaattacaaaaaaatgttgatagaccaactaaattgtagcaaagctaaatttgtaattctt

SEQ ID NO: 5368 - DNA, 2241 bp, Cannabis sativa
aatattatgtgaaccattaaaaatttattgccatgtgtatactgtgtacacttaggatgtccgcctaagcacttaacatcattttaacataagcataaaaattaatactgaagtgcaattcaagtaattttttcacaaaaaaaaattaatttatgtaattcagtgtcacaaatcatataatttaaatagttttgccaccaatattcttatataaataacataaattattattatacactgtcggttttttttaatttttctcccttttcgattctctagatcaacttaatcaaattctcttttcagcttagcaagcatgccattttctcattcaaatattgcattatatagagggaaaatatcattttgaatcccgtgttctgcaaaaattatcaattagtttggagcctctattttgttaaatgacaaattaaatcttgaattttccaaataggtacaaaaataatatcataagctcaatttttattaaaataaaacttaataacttgccctgaaggtgtctatgaccatactgataatatttttttttgcatttggtcatgttaagaactaactttaagttgattatataaaaaaaatgcaaattgagcttagggtatcactttataccattttgaaaaatacaatacaaaatccaatttataatctaacaaaacacattgttaacttttacaaaacaaaaagttcaaattaatatttatccttatataaataatgttgataattgatcaatggggtcatttcataactcttcaatctcattctttaaatcatttatcctattcaaaatgagcatttatgacatggaaaaaaagtctttcgtcatgcttgaaccatccgtcaagagccacgtggctggacgaaactaggtgagcgcctgtaaagacggttgctatcaaaagattctttttcttgaaaattcacactttttcaaacctagaacaatgatagaattctagcattcaaaattaaactaaatactttcatgcataattcttctaattatgcaaccacctgactcgtgatggtctgttcaagcgaaacaaagaacatggtgcctaacaccctcttatgagatgtaatataactattaatacaatttaatgtcaaatctcacttattttactttaataaaaattatagagaatcgttaactaattataagacaacacctaattgtaatgttaggcaccttagtaccagacttcattgcccacttttgtttccatcaaaaggtcttttttttttcagaatcaaatattcattcactttaacttatagtttttagaaagaatggccttgtacaattttagccctctaattgttccaatacattcatcattaatcaattattattgcacaattaacttctatgaaatatttaattgaaggattagaaggtaaaatactaacaacttaggatactgtttatttcatgttcattcagtaacttaataaccttagttacatacacccaccaataaatcagtaatggtaccctgagaaagggactaaccagaagaaacaagacattaattttaatggatgaagaccagggaaaactctaggggtcaagatcctaaacaccttcctataaggtaacttgaatcgaaacagatgcaaaatttgagaggactagcttattcttgtacaaaatcaggaacatggaatggaaccaaaatgtagtgttcttattcttagtgatatctatagcaaacacgagaccgaggcaactgaaaatccagacctagtctgcagcacccataccaaatgcatatgacagccaagatgagatgcctgttacaaaaggaggcattgcattatcaggaattctagaatcaaaactagttggaataacatggtatgaaaaattgtgtgccaaagatacataaaactcgaggaaaatgatgcacataacacttggcatgacgaattattaagatccatagtaaaactagttcggaaaatttgacaagagtctaaatggttgacgatataggaagtaagcatgaggattgccttacttgaggcttgatcaggcttttgagaataagacttggggatggattgggtagtaaaagcttaatgctaaggctttatcaagtgagacatatgcttaaagacataagtacaataattgagaccctaagcattgcagattatcaagatgtcaaaccgagccttgaggttcgaccatggcaagatggcataagccttgag

SEQ ID NO: 5369 - DNA, 1690 bp, Cannabis sativa
aaatatgtgtaatacactattctttgtttgttagttaatgaaaaatattgctacaaaaattgatattatatatcaacaaagtaaagagaatgagaatcacaatacttccttttcaagtttcaagactgccatgaaagcttcttgtggaacatccactttaccaattgccttcattctcttctttccttcagcctgttaaatatatacacatatatatttatatatgaatcaaaacgctctctttattatttactactatatacacacaacacaactacataatcacaaattcacctgttttttaagcaacttcttttttcttgaaatgtctccacctatattatacatatacataaacaaacaagaagagattatcaaaatatcagctcatttctgggattgtttttcaaaactaaaaaaagaaaagatttaataatgtcttaccgtaacatttggctaaaacatccttcctgattgctgataaagcttcactagctatcacttttgtacctatgcaagcctgtcaatgccaccatacacattactacacatgacacatcttctttactcgccctaattatcatcactaaatacataaaatgagtcttacttgaattggtactctaaacatttgtcgcggtataagctccttgagcttttgtgtcaaagcccttccaacgctatatgcctaccaacagtcaatagcattgattttgttaacaaaatattacatatcaaaaatgtgccaaaatatttctttagtctctttaaaatgatctgagctaaaaatttgacggtcaccaagattcaaaaatagcgcaagattaccttatccctgtgcacaatggtcgccaacggttctacgcgttcactattgatctgaatgtcaagttttatcagatcactttctttgtacctaaagtcagtatatagacttattaagcatctactcaaaaatattttctcccacatttgtattagctttgaagaaaaagcaatatacaagtcattaaaattatggtgctggctaagcctatactatacctaacaaagtatgaaggagcaaatcaatgtttagatattcggtttctagtttaaaaaaagtggtcgttgttgattttaggttcaaatggctcatcagatataaaaaatgagaaaattcagacaaacattttagtaaggctaattcctttaacatgtaggtaagtgctcctaataatcaaatgtagttttgtacgttgagctttcccttaagctaatgttagttacctagatgttgggtaagtgataacatattattaacatatttggcttcagcatcaattttgtttgtagttatagaagtatcaagaagctgaatttacccgataaaggtatactccatgcttgcgtaacctttgcttttggatttcaactggtcaaagaagtcacctaccatctgtgaatgaaagaaataaaggagtggagaagcagttcattgagtttacaaattagtagagcaagccaagtggactgcagaggtggtaaaaaggagaaggaaaaaacctctgctagaggtaattcatagataagtgatgctctattctcagtaatatatttcatttctttaaactctgcccttctatcttgagccaactccatgagcggaccaatataatccttcggcgtaagcatctcaatctgtacatat

SEQ ID NO: 5370 - DNA, 1745 bp, Cannabis sativa
tgttagtttcacagggcttgatgacaatgtctcccctcccactgaatcaaatccccaagctaatgttgccttctctgcagctcctcccgatgatggctggtatcttgatagtggggcatcaaatcatgttacaccagatgccaccaatctcctgcagagaacatcttacaaaggcaaagaaaagatggtagtaggtaatggctctaaacttcacatttctaacattggtcatagttcatttactgctgatagagttctttatcttaaaaatattttacatgtgcctgccatttccaagaaccttattagcatttcccaatttaccaaagacaatgatgtaaccattgaatttacacctgatctttgttttgtcaaggacaaggattcgaagaagcatcttcttcagggcactcttaaagatggactataccatctccaaaatcagtctactgcccaaaacacttcttgtagaaccaagccttccccttcagctcaagtcttcatgacacaaccgagtgttactagctctcattcgaatacttgtaataaagattcatctgttgtaaatctttggcacaaaagacttggccaccctaataaacatgttttgagtaaaattcttagtcatttgcacatttccaattccaccattgatttttgtaatgcttgtcaacttggcaaattacaccaatttacctttcattcctctgcaaatatgcccaaagctccctttgatatagtccatacagatctatgggggccctctcatgagccctcaacagaagggtacaagtattatatacattttcttgatgagtttacacgatatacttgggtttttcccctcaaacttaagtctgatactcccagcattttcctgcaatttaatgcatatgtcgagaggcaatttggatgcaagattaagaccctacaagctgattggggtggtgaatatcgccccctcaaacctgtgttacttaaactcgggtttgtgttcagacatccctgcccacacacccatcaacagcaagggaaagcagagcgaaagcatcgacatctcactgagatggctctcactctcttagcccaagctgatttacctttaaagttttggtgggatgctgtcacctctgcagcctatctaatcaatagattacctattcaaaaacgaaattatacaaccccttaccaatttctttttcacaccagacctgattacaacttccttaaagtctttggttgtgtttgctttccttttctcagaccttacaactctaacaaatttaatttcaaaacttcagcttgtctatttttaggctatagccctgctcacaaaggttatcgatgtttacatccatctggccgattgtatattgctaggagtgttacctttgatgagacttgtttcccttacaaatctctatttaccactcctacatctacaccagataacaacatctgtatgcctcagtttctgccactgccacaagcaacacaccagactcctatcacaccatctatgacccctgaaccaacatcagctacttctcttgcatctcattcccctcctcctggtttcccacatcctatataccctcccttttctggtcatcataccaccagtgttaattccacacatgtccatcctaatgcctctcacaatgttacacctgagtcttcaacttctaccctgcctcctatccctgctttacccactgcccctacacagatatccaacatacatc

SEQ ID NO: 5371 - DNA, 589 bp, Cannabis sativa
gctacgccggctgccatggtgtctccggcgattcgttgaaccgctactacccatattacccatataaaaaaattaaaaaaaactcccttgaaaagtttttcgagaaatggatcctgactcctgagttgaagaagaatcaaaatcccatattatgcaaagaagtaagatgagatgagagaaagatgcagtgatgtgatgaaggaaaagataagagaagggaaggttggccaagggaacaagaatctcttttatgggttataatggattgcgtaaagctccactcagaatcagaagagaagagagagaaagtagagagaaactcattctgctaaactaaaaccaaaccgcactctcattgaaaaaaaaaaaaaaactaaaccgctcgcttctttcttgctttgtctttttcttaggtaagtatattgaaggaaaaatatatagagaaaaaatatgttaaattaagaaagagacaaacaaagttaagttaaactcttctttccagaacttgaggctagctcaagtggccatagggagtgcgtgtgtggtggagatcctgggttcgagtccaggttatgcatgttgtaatata

SEQ ID NO: 5372 - DNA, 677 bp, Cannabis sativa
tgggaaaacaatatcttatgacaaaagtcaaatgtgtgaacattccacttgaataaaatgtgggacatgacatataatacaaattggtcagttgggtgtttttaatgggcattcgacaatgttccacattgagaagtttgtaggatttggatcaagcaaaaggtaatagtggtatctttagtcattatagcaaatttatttgtttttatgttggaaatatgcaagagtcaatgaggataaagtgcaactcgaatttcagtatggtcgacaatgaaaccagtgatttttttttaatggttcttcttcgtaagagtttaaagacactccacttttctttgttttgttgaactagaaggaatctttaatggtttttcttcttcttcttgattttgtgctattattttttgtgaaaagagacagaggtcatacgtctaagactgacctcttgtgctattgttgcttgtcgttacatgtaaaagtgaacttttctatcgagaagaaactatttttaattcatctcctaactgaaccagactttctgttagctaattggatttagtttgattgagaggggttttgacaatcattatgtcaaatatccttaccacctgatcagttgtggttgcgtactagcagtgcaccattaagagagaatttatggtaaaacgatgtctgtc

SEQ ID NO: 5373 - DNA, 890 bp, Cannabis sativa
attgtgaagattctctctttcttttctcagatgcagttcaagaaagctgtggaagaataaaaagagggtcatgtatgtatccataaacacggccaccaaacgtacaataatatacatatatacataaatttagattcctgtggatcctaaccaataaggttagagagaaaaagggttttggtggaattatcaaaagaaactccggccattaaaatgaatgctgtaacggaaaaaggaaaagaggttttattggtttggtttgggtaagagagataggagtaaaggtgtaggttttaggtgaggcttgaaggtgatatttataggggaaatgaagggtttcttttttctttttcttttattttgttgggatttaaaaaaataaaaaaaaaataagaaaataaaaaatagttttaccaatcccaagaagaatattgggacctaaagttacagattactcattcctaccctgcttttgattttatttaaaataataataatacaagctctacttgaaaagctgactacatttgattttgatccgatcagaatagaaaataataacgaaataataattagtttattattaatatctcttgtatttttatatacatagacagatcatgtaatgtaattgtaaattttgtgtaatgagaaaagaaaagtcataatgaatgtatgtgcggctaggatgaaacctactggatctaagggtgatggtcaccgtagtgtgggcaatgttgtgggaccctcagtttcagatctgtccgtttattaagcgaaaaatatggtaccacgcgctctcaggaaggtggattatactactactactgtctgctgaggtgaaactcgactggcaccggataccaaaaagtattactattggctaacaa

SEQ ID NO: 5374 - DNA, 1057 bp, Cannabis sativa
ggcagctgccgttgtgaaatctgagccgtacgattatcagtatatttactcgtttaatcagagtagtcaactcgctgggcctccaataaccgctgccgaatgttcattaatccctaataatattaatcagccgaggaattttcagatcaacggtcaggatcaaatgttcgatagatactcgggaatgatcgctcctaatgtgttattaaatattcaaaataatgataattttaatagcgagcaaaacaagtgtcgtaataataatattattggttcgaaccggaaatcgtcggtggcgagagggaggcattacagaggtgtgagacagagaccatggggaaaattcgcggctgagattcgagatccggcaaggaatggcgccagagtttggcttggaacctacgagacgtctgaggaagcggctttggcttacgatcgagccgctttcaaaatgagaggttcgaaagctttgcttaattttccacaccgaatcagctccggcgagccgccgccggtaaggattacgggcaaacgccgagagtctgagactacaacgacgactgggtctggtggcggctcaccgaagaagatgaaggttgtcagaaattcggcggagaataatgacgtggcatcgaagaaggaattcgacacttttgagataggccccaccacaagttttctgccacttggcgaagagctattagttagttaaataagagaaaaatctcattccttttttcttttgaaaggctaaacaaaaaatacttaaaaagtggtgtcagtcaattaattttttatttattaaaaaattaaacttttaactgagtgaacaattaaaagtagtgatctacattaaaaaaaaatagtgatcttgattaaaaaaaaaagacaaaaacaagttcgttgggtgtgtgtgaatattagcaaagcttcaatcaattagccttattaatattcagtgtaaaacatcaaacatcgtaaaaaatcaaagatttttaatttttgtttattaatttgataattattgacattggagacaaaaaaaaaaaaaaaaaaa

SEQ ID NO: 5375 - DNA, 1417 bp, Cannabis sativa
aattttttttgtcccttttttaaacaaatcttatattattcaattaatcgtgtatattaatattccacttccttagaagattgattgtcctttacagattttaccaaactatcatctcactaactaacaatctttttcaacgtattcaacatgtaatcttatctgatctttttagactaaactataataaaaaagaagacaaaaatctaagagcaaaagtgagtttataacataagaaaccccataataatatcggttttgaagactctatagcttttacacatgtttgatgcatagtaagtagcaataataatcatttatataactgtacaatctcacaagtcacaaccaaccctctcttcctcctgactcccaaattcaagtttttatgggtaaatcaaactcaaaattacatacacaaaaaaaaaaaactatgaagttcatgatgatgatcatcattatattgtttgaccaccctttaaacagattcaaggtaatcaccactgacatcaatttcggactcatcatcagggtctgatgtcgatgctgtggcgcctagaccagttgtagctttggacccttcccctggcgtctttgcctcttgtatgattcgcattatctcttcaacgctctgtgtgttttggtctgtttccgatttcgcttgattggtcttttccacttcaactagttcctttggcaagtttttcaggaaccaagggtgttgtttgatttccgggattgtaatcctctacacaatatataaacacagcattgtaatttgtaagagaccatatttctattgtactaaatatgagatgttgttgttaccttggcgggattcgcaacgaatatacgagaaagaaggtgtttgcattctgcagatactctaacataatctggtattgagtattggacactcatgattctctgtttttaagaatttgaacatgtcagttacaacagccgaaaaaatataaagctttagttttcaattcataagctcaactaaccccgattgtctttcgaaaatttcttggatcttcgggatcttcaaagggataagctccaaccaacatcacatataacgtcacaccgcaggaccaaacgtctgcaatctataatatgcggtattgtatgataagtactacgaggtttctcgtcttaaaactaattggttatgagtagtgtactcttagcaaaggtattaagttcgacacagagcaatgttgggaattggaattgtgggatttgtatattgaaaataatgttgcatcaaaaaacacatgtacctttccatcatattcttttcgagacaaaacttcaggcgcgatgtaagcaggtgttccgacagtggatttaggttgagagtgcaacaaggcagactgcagagaatacaaattagttgtaagttcgatga

SEQ ID NO: 5376 - DNA, 2072 bp, Cannabis sativa
catgaacgagttgtctgcaagagcaagagggaagttttctttcatccgacacctatttactgcaaggaagacaaagagcactcaataaagcaggtttaattttcttggtttccaaacataggcatatgcgatagaaactagaaagaaagaaagaaaagaaatgtaatttgttatgactaatcaccttaatgatgacactatttgcaaatataaaattgccaaaagaaaaaaaagaatgttgatttgagtaaccctaatagagaataaaaattataggtcgaccatatattatctcatctagttgatcttattgtaaaggagatatagtacatggttctgaacatttaaaagtgtcatatatatgtaatttcatatcacatctagttgaccccattgtttaggttcttatcttttttgtgttcatattaatgttaccttatttagtgctatttcctttaactataacaaataccttgttttcatacttactatgcattttagactataactatggattttgatttatttgatgtactttaattgaggtgtaatgtgtaatgtattctatactcgatttgatgcacttttaaccgttaaatcaactcaatctttttgtgatttgacaaaattcactatatatatgtataaacttttacaatatttgagtgtatgaactatgattcaatccaaataaaatgactcattttattaaagtatgatttagaattggacgatttaagatgttttggagttgagcttgaggacaacttctatgtctacattaacttaacctctccaaattatggccgaaaaaatgtcaaaatcttatgataaattccgacttgtgaaagctagatttctaacttggactcatttctgaaaagcttgttaatttttgttttttttttttttttacaaatagtctactaaacacgtgaataatttttcaatgacaccaatcaatagtccaagaattaaattaacaataattatgcaagagtgaagacatgagcattgctattaggtaccagtggtgtcgaataccttctcgacatgtcgtgttgcggatggctagcgatattatctaaaagctattatattaaattatataggacccgatacttaattggaccaataatgatattaacacataagagggtgctagacaccactagtgtcctttagaatttttagtgaagacagtgacactaattatactacaaacatccactgaacatcaattattattttacaaatgtatattatatccacttgtaactgaccattgttttgtgctatttatatatgggtctgcaacatgtatacaaaaacatttatatgtatagaattcatagttggcaactttggcacgcaacagtattagtcaaagctgacaccaatttggaccatttggttcaatatgggctgcacgaacccaaaagcccgacccactgtacctgaaaaaaccgaaatcattgcaggccgggtttggaattattaaaagagaaatgctaaaaggcaccagtagtgtcaaacaccttcctatgtgttaatatttttattggtctaattaagtatcggatcccatataatttaatataataacttttagggagtattgctagccaatcgtaaaacaacacgtcttaagggtgctaggcactacaggtattcaatagcaatgctcttattaaaatataaacttggcccactgcacattgtaggccaagttcggattacacccgggtgtatcgcgggcgggttcaaaattgttaaagtatattatcccgaattcgggtttcacccgaactttttttttttttttttttttaatatatatatgttttcctaaaaatccctaatataacatcccatcccatcccatcccaaagaaggccgtccaacttggttatttatttttattaaggataaatactttataaaatatgttatatttacttctacctttggtaaatattgcaggattgatacttattttctttatgctatatatttgatttagtaaaattgatcaaatttaatcatcattttgtttttcaaaatgaactcta

SEQ ID NO: 5377 - DNA, 709 bp, Cannabis sativa
aagaatcatctataaatggtactagacacgaaactaatatcaatgctcctattaaaactctttcacttggcaattttagttaattagccaaatgaatttagggtttaattttactagttatagcatgttgtcattacttttactagttatagcatgttgtcattgaaaagtcaatatatgtgacattatatactcaacttaattatcgacatatattaacaaccatataaatgggccgctataaatatacgagaaatagcaacaaatggcctttagtcttattataaggtaagactttatctcttctatttctcctttgctgtattacgttatgattgtttcaaaattcaataattcatactacttatttattatataaaaaattaaacccttgtgtaaaataaatatatcaaaaactgaaattaatattccatttttaatttttttttctttattttcttacgatatcacatacaaacgatatatcttagaacaatatgaatataacacaaatttaaactaattttctattaaattttttttttctttttcacgatatacaatagcatacaaaaatcatatactattaacagaaataatataccatagtgaaaaaaaaaatattcatgatataccatagcacttaaggacaatataccccgatgatatataactacaccacaaccttaaactaatgttccataaattt

SEQ ID NO: 5378 - DNA, 839 bp, Cannabis sativa
gttttgatattgccaaaaacaagattgttgataatatcaaaattatccaaaagtaacataatcaaacacatcccactacactattttagaattatcgaatctaagagataccagttaacaacaatcacgtaattgcttttcccacatctttttatcgagggtgacagtgacctttcggtccttcatgttaaccattatcttctatatttttttaatttttggcaaaagcatatatatctactgctttcagtaactttaaaattaagagagggatgggaaaaggggatgagcatggctagaactcaagattcctaattatttattaatagattgtaatactatgttacactaaaaaaaaaatagaaactttaaaatttgcctaaaatagacatgtatcttctttacctattattttcaatgagaaaaacgagataaaatagaatcatgatagttacttgcctaaaaggaatgtgcacaaagaaaagctggagtctttgacctaccagcagcccatgccaatttttatttagaataagaaaataaaatacctcactttcgtgagaatttttattgtaggcttggattatcaatttgattctcttttactttccagaaaatctgggtgtaatgtgcaccacaagctctagtaacttgcacaacaagaaaataatgatcatttttcattggttagaacggaagccaatttttgtaaatagtcgtcaaaagcttagatatagtcacacctaaagctgtaaatactggtcgagttgttttataatagtgggcaaatgctaaaacagagaaagcagaggaaagaattgcctttattgaattgagtt

SEQ ID NO: 5379 - DNA, 1396 bp, Cannabis sativa
aatctacgagtgagcgtctgaaaggactaaaactcaagaatgtgggcctacaggtccaccacataccactgataggacgaaccataatcttgctcggagtaatccgaataatacaagaaagcattctcctccgcgagattctccttgaagactattttgagaagaatatttgctatagtgtttctgacgatctcgctcatagtaatcagcctaaggacgactctctcatcaatatgggagaaatccctgacattttctcgacgaccccatggtcaggaagctatagccagacctaagttgatgaatatttttgatcatcttggatagaaaaaggacctttgagataccctaaacaggagacgattagtggaagcaagagcttctaatagtgacctcgttgatcgggtagctgaagttccaactggggcacagaccaccatctgtggtatcaatagggtcaaatttaataacctaaccgctttggtaaagaaaatcacgactcccaagctatcatattttgaactagatcaagagcgacactcagtgctctcagatcaaatcaaagctttgaggattccttcaaagttcaagaattccacctgacatcaatacatcgagaattttttagaagacccattgtctctcatccactacttcgaagtgcagaccgatttgaaaggggtaagagatgacgttcagtgtagaatcttccctaccaagttgacagacttagttttgtaatttatctcaagatggcccgtggatctattgattcatggaaagagcttgtgaatgcttttggcagtctttttgctctatcctcaaaaattcagatcaaacataatgatccggtatatgtgaagcaacaagatgacgagtacttcaaggactacatccaacgattctaagaggtaggtgtttagacaaagatacttagcaaggatatgagggttatggtatttgcagccaagcttaaggagatggatcctctatgctctaaccttcatctcaaggtagtctacaccatgaaatatttccctgatagaggagacgactttatcaaacaagaaaaagttgttactcgagctaaaaacttaagaaaacaagaaaaagaaatttccagactcccctacacctaacactaaggcagtaggaaaggagggaaaatggggggaaaaagatcgaacaatggcagtaacacaggctaacatctctaacggaaagaaagctagaactggagagagatccaacaaagagtatgtgcctagattcaccacctattatattctcttatccccaaaagaagaaatctatctagaaacttagtcaatagtgccatacaaaaagcctcttcccttcaaagagctagggaaaaaagacatgaacaagttctgtc

SEQ ID NO: 5380 - DNA, 852 bp, Cannabis sativa
tgtaacaatctgttctccatctaaaactcctaatataaaagagagttgatgatcaagaaagtagtactataataaataaataaataaataactcaaaaatgcaaaataaagtttgtactttataattaataataatataaataaaaaatttaaattattaaactctagttctatatatatcttggattatatttctaattaatgcgggtttatatatatttgtgtatattacttaaagttagagcgaccatttgaatgattatgcacgttattataggtattaaagtgtcatgagttaaatgtacaaatacttagaaattattgaggagctaattataaattagaaatactaaaattgataattaggttatataatagtagtggttcctaaaaataagagtcattatattctcatctttcccaattaagagaaaaaattagacaaatctttaaattttgtattcttgaaagattattacccaataaaatttagtctacggattaagatcatcattactaaattaaatatctctattaagaaattaaggtacgtttttattattaatattttctccttctcttcgaatcatcaagggctttaaatctattgctatacacttttaataatatgtaatatatttacgtatgatattgtatattttatgagtaaaaaaaatccaatcttaaatatatatatatatatatactgattattgtctatacaactgttaaagaaaataaattttcccactagagaattaatgaggatcacctaattgatagttgtgatgacagctatcatgaggttgcggaagcggttagtcttttctttgaaattcaaggatttctttt

SEQ ID NO: 5381 - DNA, 560 bp, Cannabis sativa
aaaggaagaagaaagcaagaacctcaccagcatcaatgacagcgtcccaatcggttttgccatctttctgaaactgagtcaaatcccaagttccattgacccatttggggttgtcgaagaagctcaccatttccacttcgggggttttaagcgcagacccgtttgacccagctgagctgtcaaccttctcagaggagggcacagaaggttctggggccttgggttccacagcggtggcagctgagccgagggctccggctccattatcaggagaggatttgggggttaagagacggcgaaagagaggagtgttgggtctgagaaggagacaagggttgttagggaaatgggtcttggaatgggaagaaggagagagtgtttggagatgggttggcggagaaaacaaggccatggaagacattgtttgtggttgggttgggtggaggaggttgaggatatcagagcatggcgtttgggctatcctcagccgtaagtaaaagtgaaaccaaagccaagtggatgtgctctgctttgcgcttactatttacaagaatgagatg

SEQ ID NO: 5382 - DNA, 508 bp, Cannabis sativa
tttgaaaagaagatgttagcttatgtgaaagcttggaatatgacttgaagccctctttaaataggttcaaacatatgtgtttggttgggcgttattgcataggtgtctatgaattgcctgtctatcaaaaatttattctgttggctcttgcagctccttaattgctgtgttgttattcccttctaagttgaagatatgttacttgattctgattttgtattcagagggacaaacgtgaagaagccctgaggttggctcaattatcagcagaaaagcctcatttttctcactgtttggagtggcttctctttacggtgtttgatgctgaaatatccaggtacattcaatgagaataaaattatatccaaagtacaatgattctgatttcggccattatcaaaatggaatgatatttatggtagtttcattaagcgtattattgctggttctttctgctaacttggatttccctatttctctatcattgttagtccttttaaccctagtt

SEQ ID NO: 5383 - DNA, 748 bp, Cannabis sativa
acaaagtagtataactgtctacgcgtgtggcattgaaaagcctcattcattacccatgtccaagtgtcaactaactactctatctcatcaactcctacacccacctatcccttattaaatgctctcacctctcttcttttgtaggtttcgaaactatattattgttaaatgatgctagcattgtggtagagaagagaaatgtaaggaaagaaaagtgaagataagagataaatttgagttgtttgaggtaaatatggaatgaaagtattggtataatttagtatttaaaaaataagataatattatatttactcaaatataaatgattttttttattatttttatgatttttaaagtattaagttaaaaaaatatatgttttttctcaaaaaaagttattttataaaaaatagttaaaaaaatatgaagaaaaagaataacgtaaggtatctagttacctcttatagtactccattaaaaatgttgttgtattattatccatgtaaatcaatatcagtctcattttccacattttaatataatggtcatgtttggctgagcttctactttctgtttataactttttagaaaactactaaaactaacttctcttaaaagaactttttagacttataaataaaaattcattgattacccaaccaacaacaaaagtgcttttagaatttgagaactaccataaaatacccctaataaacccatcaatatattatagtgttgtgttgggtct

SEQ ID NO: 5384 - DNA, 2061 bp, Cannabis sativa
  modified_base (1875)..(1877): a, c, t, g, unknown or other
agctcctgtaataactatattcaacaaaagtacagataagtacccaacattattaggttcagttaataatactaaaactgctacgaccaaacatgaatctaccttctgggccactccaaaggttcaatagggtcctgcaaagaaccaaacaactgataaactaaagatatggattggaaaataatgggatttcttttccattgatgagaagtaatatatagatgataaattattattacacacaaatacaaaattcacattagataagtctccatatcctaactcataaacagataaaggtagtgggctagcatgtttccctgaaaagataaatgataacaaaataccactatttactacgttaaacaaggtagtaaaaattctcatattatctctttatagagacataataagaaatgtctttcaaatagagatcaatctgcactcttgctcaaccaaaaatgtgttatgtatgtacacgaaccttgcaccactaaggatactaatacttgtcaccgaagaatatcaacttatttgccaagcagaaaagtactcaaaatgaaaaacccctcaaaattggatgaaatcttatagtgttgaagcttagatgttgcagatatgaacatacaaaatataatgtgaactaataaaatcctacagctctaagatcatgtgaccaaaatatttatgaatctagatctagaatgaattatactttcacaaaattgggaaatttattgaaatttgagatataccataaacaagaaatgccagtagtagagcttacaatagtgcatctcatttacaacatcaccaaattgacaagcttcttcacatcattcacaaacacaaaaacaccaatatagtgtaaagctacatgtgtgagatcctatgcagctcagagaaatgcaagactatacagatgagaaaaatgggtccaaatatttgtccaaccatgaacaagtaccctatgagaacaagatccacagctgggatgtacttgtacaagccaaaggtgtcccatttagaggttcttgatgagaatagaccaaactctacatttgcacccttgagacatgtaaatggagagatggtatgaattaggatcacagcgccttgatgaaaaacgagtacatggtatcttgtccccattcccagagatcaaaagattgtgagatgtgaaaggatttttaaccaaaaaagaatttttgatagctctatttcaagatacaaggcaagactagttgccaaggatttcataaacttgatttctattacactaactttttagtattgttgtaaaaccaacagcaacaagaatagttctaacttaggccctctcacaaaataggaacatcaaagtctacaacttgatgttacatttctcagcgaaatgcttgagccctacttttcaagaagaacaacatggtctgcaaactgcactagacttttgagtgggctaaaactagctactagagcctggtttgatgggcaagttgggttttttctcatcaaaggcatgtagctctctcttgcttaagttcactccaagttcatacataatgattttagtgtatgtggatgatataaaaatcaaaaacaacactaatggtgaaatccaacactcattaatctcctcaataataaagaaatctactttctcgcgatagaagtgcatcaaatcaagaatagccctctgctatcaaagtcaaaatacataacaaagctactgcagaaaactataataatagaacaaaagtgttggccaaccccaaggttagcattcaaaggctgtacctttgaagattgccactaaaattggaactacttacttacacaaatgcactataatattcaagagagagagagagagannnagagagagagagagagaaagctgacttctttgtaatttggaggagatttgtcggcgactcgattggaccttctgagtggcgcggaagaggactccctagctctgggcttcgcctgctttacctgaatcagaaatgggaaccaagcatttcatatatagaatggagaaacagaaaagagatgaga

SEQ ID NO: 5385 - DNA, 930 bp, Cannabis sativa
atatatatagtagtacgtactcatagtatagtcaaaaagagtggtgtgaccactcaattctattatagtacatttattcataaatacgtattttattagcttttattattctgaaaataatctttattgttttttttttcaaaaaaaaaaaatcttattaataatttatattttgatccctttctttatgtttgattaggttagaagtagtactccctctttattgagtttttcttatgctttattttattttatttttgtttgaaaacaaaagaatgaaaactatctattcattagtacttatctatcaaaatgaaatagtaatgaaaactatgtgtgtgaacttattataattggaaattgtcatagcgtgagaaaaaaatgtggctaaaggtatatacaatattatacatatattttataatatactctgtttttcaatctcaaatgttcataatatatactgaacgcactagcaaaaataaaataatgacacttatacacagaagagttaaataatgaagaattgaaatcatgcatggatttggatgcatttagttaactaaacattctcattaataatgtcacttgatgtctcattattgcaaagtttggtagatcaagatctctctccctactactgcttagtgaaatataatcttcgtctaagttatacagttatttttcaaaacccaattggcagaaaaatccattaaaagcaccaaaattttgatgtggccttcaataaaatgattttgggtttataaatgataattatttcatcccatatttgggtgataagctcttaaacagaggaattaggaccactgaatagtgaacctataaaagggaatttgcccttaccaagaagttgatctgtttcctctaatcacacacaagtgcacccatttgtttaattgacccctaatt

SEQ ID NO: 5386 - DNA, 901 bp, Cannabis sativa
tatatataacatctattgcttaagaaatgatgctgatttacaattaaaatagaatagaaattatgcttatcgttttggagttagctgtgactgagtcaagaaaaaaaaaaaaaaaaagagagcagagttggttgggctgtcccatagcagaaaaccccaccacttcttattcatgcatcctaacaaaaagcctgccccttgttcattttatcttgtcaatgatttattttgattttctccctaacatattttcatcaaaacttctacttccattttcataatacaagagtatatatttttttatggtcagtttggaaacaaaacaatgaaaaaaataattacaaatgtgcattttctttttttattgtaagaatagctccttcattctgtactgatgttttaaatcatgtatggagaagaatgtgtgcagtgataaattattttatggagatcgatctctataatttctcaactgggaaaccaataacaggttggatttctgaagctaaagacctcagctcgcttacttcgtcatcggtcaacttccatccaagtgcaccggcaaattctgcagcctgttctgcatttttggctcccgggattggcactacgttgtcttgggctagcagccagttaaggaccacctagataagagtaaaatgttctctttatatcccagcagaatggccagttgtgtagttgaactagaaatcttaacacaagaagcttttcgcatgacatgttaagtttcactaaatttaacaaacctgagtgggtgttttactgtagttgtctccaacttcgcgaattctgttaattaaaggttgaagctgcacagaagatttgcatttcagcagtgaggttggaaccaaaatgaagcagccatttacataaaccaaaa

SEQ ID NO: 5387 - DNA, 1042 bp, Cannabis sativa
caataaaacgtgtgtttacaaaaggtagtacactcccgaattaaaaaaaaaaacagtaaaaatgttataatctgcctgtcacaattataattgaaagaaaatgaaaaaaattagtaatgtttcaaaaaaaaaaaaaactatataatatattagatatgtaattaggtgtactgcatgaaaagccgcgaatattatttctttattcaataattaaatatagctgcaaacttggcttcccttgagaagcaaccagcaatacaaataatacaagataaaattttctgtcccaaaatattgaaatgaaataaaaataaatacgttgaaacaaacaaacaacaacgacaacagcaacaacacattctcataaaatttatttatgatgacgtcccaaaaaggatcgaggcgccatgctatagtattatccctatcaattggaactcatgatgcatggtcatcaatagtcaaggcagcagcggaacatggtgtacctctccatcaaacgaccacactcagagcaggccacagtgtcaggcattgcaccagtggctggcaaaatgaggctggtgcaatggtgtggtgcatcgatatggagcttctcaaggtactcaataagagcaggcacgaaacccacctctaattctctcgttctccattggtcgtgctcagccaagcctctgtacatgtgctccccattgcccttagccattccctcaaaacctctgctgatggcggcccaaccttggctgctcgacccgtaactcagtatggcgataattccttgcatgacatggtcagtcttgacagatgcacttgtggtaagttgccccttagagtgccacatgctctccaatctcatccagaagtaccatatgagattccagtccaaggttctgctcaagttctcattctgaataatgtcaatgatgttccttgttgctttctcgtgaggtttgctcttccccacataaagtaactctagatgaattccagatgttcgagccacttccttggcaattcttgtgaattttctgatccagtcaat

SEQ ID NO: 5388 - DNA, 1141 bp, Cannabis sativa
tttcttcttgttcaaggagatcatcgagaactgattcttggtgttttagtgaggaagaggtagcaatggaatgtgtgctaagattattaagtgttgtcacagtagcttgagcttcagtgattttcctcttcatattgccatactttcgtacatgccatcgttggagattagtagcacatatatccaattgttgaatcacatttaaaatggggtcagccactgaagtatcacaccaagattcagtgattatgtctgcactcttagggtcagcaagccataatttttcaaaacgaaaacgagtgtgctttttggtggagagaggagcatgagtcacggacttcactatagcagaaattgctcgatggtcagaactaaaaaagtctagatgagttactggtggtgattcaaaaacttggtcccaagtagcattagtgaaacaccagtctaaacgttccttgatagtggcagaggaagttctatttttaacccatgtaaactggtttcctacataaggcagctctttcaattgacagagatcgagagcttgatggaagtgttgaatttgtgtatcattgcgaagggcaccacctgacttatcacgttgtgataatatttcattaaagtcaccgatagtaatccaaggaagcgctggtgcaatgtcatgtaaacgcttcaaaagtgtccatgaatgcactctatttgatgtttcaggtgctccgtaaaaggcagaaaaatgaaaagatgggccatctgcaaaggacataatgcagtcaaagtatgtagggccaaaagtattgagagaaacattgacattatttttccaaagtagcatgagtccaccactaagaccaactcgtggtgactccaaaccattactgtaatttaaagattgacgaaaccgtgagatagagttgttaccaaggcgagtttccatgagaaaaagaacttggggagactgttgtgaaacaagcagccgcaaatgtctaaacgctttgggattccccagtcccctagcgttccaactaatgattttcatggtgaagcgcggggttgcagcacaacctccgctaaatcgtcaatgaaatcatccgaatccatcatgtaagaggaaacgtaatggtttgagccatctccttgagac

SEQ ID NO: 5389 - DNA, 553 bp, Cannabis sativa
tatggttaaaatgtttcaaatggtatcttcttttgagacaaaaaattaaaacataatccttattttgagacataaaaattagttaaactatccgaattgaaattttatattttttttttcaattagaaaacattataaaagtaagaattggtacattaactagtataactgaatatacacaatcaaattcaataaagaaggaagataactgaaaattttagccatatttacttgctgtagggcagttctaagttaaggtgggctaggctcgcgtctaagactttattttaagaatccaaataaaaaaaaatacatttgaaaaaatatacatatttttttttataattttaaaatgtactatttatttttatagtaaaaatttaattttttttttttttatttatgactcatttcaacccaacaccaacatgactagcaacaataaaatgatgtttggatccttgggttatataagtcttgtaatgtatttttgtttttcataaaaatattgatgagatggtgactctgattatgactttgaggctgagcctta

SEQ ID NO: 5390 - DNA, 1338 bp, Cannabis sativa
cctcgtagcaatgctgatataagtagctagctagatctaacaaacaaaaagtgtacgtacgtgtgtataatatatttatttatttattgaaaacaaattgtataatatatttatatcatgctcatgctataaattataacaatatataatattttttttattaagtgtatgcgtgaaatataaagaaagatataacatttattgctcttttaattaaagaagtttaagttaattgattaaatatttttacttctcatacttcatgtccctttcatattgtatatatgtttttttttaactcaaattttctttaaatttgattggccgatcgtattttggagtgtggtcaaaacttgtccattatagctgtatagatatttttaacaatgatcaactaattattagttttgcaataatattctttataaataataattagttgttggttattttatttttatattttttatatgtatattttttagattcattctaagaatatatagtgtgaggttaccctcaaaaatttctaagtaaagtttttttttttaaaaaaattattgccgccaaaaattaaatttaggtatttatttgtaactgagagttaaatttaagtatttataccgcaaattactcatatatgttcgattgattattatatatgcatacacttttaatggatattacttatgaatggatagtattagaaaaatttgaatttttatgtttaacttttctttttaattagaataatatctcatttttacattatatggagtgaaattgtttcattggcagaaaaaaaaaataagaaaactagtttttcaaaaaaaaaaattgattttaacataaatatttcgtatatatatttttaatatagtgtaaaaagagatattttctcatatttgtttaaattaagtacaaaaattaaaaattcccatttattatttctcaccattagatttaaatctaattatttagtattttaaaattaatatttatatttaaatttatttagtataactatcatattagaaatactcattaaaaattgttatatatatatattttttatatgaaaatgatatatacatatatatatagaatatgatattaatttttatccaaccttaaagtgcgatttagaaatacatcttaattattatataatgtgtgttgttttattttgataataatatatatataagtaatttataatatgaatacttaagtttaatttctaattacagataaatatttaagtttaagtttttgacagtaataatatccattttatatttttggaactttcgtaattatctgaccgttaagtgtaag

SEQ ID NO: 5391 - DNA, 872 bp, Cannabis sativa
aaaaaaaaaaaaaaatactaataagataaatcaaagaagtgcttgcttgctaccacacaattttcccatgcacaatcaaattaaaggccagtgcctttttttctatgaaaggaaaatgacacccctaatagaaaaaaattatataaattatatatgcattttttgtgttcgcttcttttatgcaaaaagatgtctcatactatagctaactcattattaattctacatgtatatattgtaattattattataatatatatataattatagaaatgacagcttggtaaatgtttgaaacgaacaaagtcagaaacagaggctggcggggtcttaatttgatcacctttatatatattatatatataactttttaatgaacgtgtattttgcggggccttgttttcattgatgattgtttaacggatatttgttatagtgtattatttaatgtctgataataatggtgttgtacgtttagtggctataatatatatgacactaattaatttggagtaaaaatgctatgtacagttgatcatgaaataatgttcattatcattatcatgatgagtagaagtagcattctatattacatcgtatatatgcaatatcatatcaattaggcttctttatttatttatttatttatttttttgaagccaacaaaacgagaaaggcgcactcgcgatcgggggcacacgtgttgcatgcatggcaaaatggtcctacatattacgtctcactacccattattaattataatatatataatgccttgttgattgtactatttatgcatcatcattagtaattataaactttctcatatacttctttatttaagattcatgaaaattttggttccaatatac

SEQ ID NO: 5392 - DNA, 1278 bp, Cannabis sativa
aaatcagaacttacccaacttactacagttgcttgtgctggagtgggtcgcaagcctgcagcaaacagtagtgactgcaaaggagtaagcatggaacacaacccaatttacagttatcaaattgcacatatggcatacagactcaaacaagagtataatacattatattactattgaccatactcaataaaagtaaaatgacaaacacaaagagaaagccacacggcaaacataactgaatgcataatacagctagaagaaatgatccttgtgaactaaattttcatacttctttcttggagagggatatttcttataaggagactgatctgtcaaatcttttttatacaaattcttctattttctcatttctcctcgagatagaaactcagattctgaaaatatttctgattaagtctatatggggttaccaaccatttttcaaaatcttcctttacttacccctgacatttgcagatatttgtgctttgaaaaacacaacaatcttcttcttttgagcatttttaattttaagtcatccgttcctaacataatcaaagttttttcatagctagtttatctcatgaagattaatatttgtaattttgtacatcaaaaaggcctgcgtgtgctctaaatccctctcggtgtgtaatgtgcaaaatggatagtaaaacactggaacaattattccgcattataggtagctagtgttctttcttataagttgttgaaagaagcagatttcagggtgttgcctgaaagatgcaaggcataaatgattaaaaagaccataggttaggggaagtataagatggtgatggtagacattgttatgtagaattccgttgtgtaggcaattatttgggtcattttgttggaaaagggcaactattgtcagagaaactaaattccatactacacttttgtcctcaatggcaaagtaatttcaagactttctgctttctttacacaatattcttggttcacaagatcccttatttagtggagttttattttttcctcaaatcttttgttacaaaggaaaaacacttaagacttcttttttagtttttttctgcctatctttctagaaaatgctgtaaatatttatatctttatatgaaagagagagagagagagagagagagagagtgagagataacctgagttgataacacagagagtgttgcactggttaagtgttgcaacgctcgaaattgtgtgtatcttagatatccttcgttgacactacataagtaaaacaccataatcttc

SEQ ID NO: 5393 - DNA, 1252 bp, Cannabis sativa
caactcatgaggtcagcgagtattagtctagaaaattgatattcaatctcaataagtgatttaacatttaagtgtctaacatataactagataaaaaattgattttcaatctcaataagtgatttaagtgtctaacatataactagataaatgtgaggtgactaatggatagtttgttatgagggtttgattttttggaaatgagaatttaaaatcaaatttatgtttagtatgatttaagtaaagattttatatttgtgtgggtccaactttgaagtttatttttaggtaaactcaaattaacactttgagatacccaaacaccccataagtgatgaaaagctaactagaaagctacaaccttctacattaggaatgctccccaaggacctactccttgcatacgatatatactcttaagaatttcgagatgttacctaagaattacgagctagatttgttgcctatttgtcacgtgtaacacttaaaaatttgaacaagaaaaaaaaaagaaacagaagagataatgtaatattatttgtatgttgaatttgaattatattattttatattttttttaaaatggaatattattttgtatttaaatagatatggtcgcatttgaaagtgattatcttgttatttaaaattggaatcagtcgacactttctgaaaacatgatgggaaataaccattgtaaagtggcttttgttttctctttcaaaaaaataaaaaataaaaaagtatatataaatataataagcttttgatatttccacgattctctcaagtgtgtttcctcctaaaattaggtttttaagtaatgtgtaagaatcagaagtacagatgtttataatgtgtttatttctctttaaaatcataataaattatttgcctgttttaaaaattatctagattaaaattatatttttaatattaaactaatgaatatgaaattggcaatagaagagagtaaaagtgggaagccctcactcattctttgcgatgaccaaacctcattcctagattaattgagtaaagaatggtaagaatattcatcatctatttcttttttcttaacaaacataaatacattttgcttattaggttcaaaatagtgctgaatccaatcctcaatatggatctgaaacagttgctcatggatcaggtgacatccagcacacaaacatatatcggggttgaaaccactatctgcttctcttgcttaattatttatttatttatctattta

SEQ ID NO: 5394 - DNA, 588 bp, Cannabis sativa
tctatttttcttttattttgacaagtaaatctatttttattttaatttacttttttaatggaacaatcgatcaattccctataattaattatcgtagattagaattctcacaattatttttcgttggggctttaggaaagtagacactagagaaaaaaaaaagtacatgacggaaatagtactgaactgaacagtttgtttttggtcacacatgaacacccatgtcgatgtgtgtcatgaaaaagaaacatcagtgacgactatatgttgtcactacgctatttttcttttaaagataaaatatagcattacttttccttattttttttccaagtaaaaattttatgttataagattcttttagatgtaactttaatattatttcagattttcattactcgatagtcaaggtttattaggttttcagtccaatattcattcacaatcctagttttaaaatatattagagtaatacattcaaaccaaacataatgaaaaaataaattcataaagaaaatgtcaatcattgtcatacttcaaaattaccaattgaatccaaaaagagtaaaaagaaatatcccaaaactg

SEQ ID NO: 5395 - DNA, 1425 bp, Cannabis sativa
gaaagctttaacgagctctgctcctcatataaataataatattaccttgtaaatgtctggtagatacataagatcaactttttatattcaaaacaaatattatatccacctatatgtatgaatctaaataagtggtggtgtgtatttcttgtatagccttcagctcaaataatttaggctaaaaaatggagtaaacacatttggaaaaacaatcaaaagtctaaacgaatgcatcatcatggaacttcatgcagtttaccatcacagtgtgtgtctggcatcttcccaggcagcagcaatataagtgagctagcccattgtttattgactttcacctaaaaatattgtagaagaaacacatgaagtcaatgtaaactcagacaaatggcaccaagtaagcccgataactaatcgcatcttcctctaaaatatttgatattgctctttcactgagaaaaagcaactcaattgttttggtctagttaaaaaatcacttaccattttaactgattccctcaaaactcctaggaagtcctcaacagctgatacatgttgaagggttatgcatacatgaatgttggtttaaattacaaagagagtgaaaaatagtatattaaaaataaatgaatgaaatcagttcataaaagataaatatttatgcatccattcaagttgtcctttctactcctcacaacagacatcttcagctgcactgaaatcctaagttgcagtataaccagcatctttcattaggtcaatccatctgatacaaggtaaatgtcaggttttgacatgtccctaaccaaaaagggagagaatctattgcccgcatcaacccaagcacattcagggaatttcctcacacccaagtctctcatgaacaccctcacctctgcaagcttgttccgattcccagcaacaacatacatatttacaattaatatagtagcctaaattttcagttctcatttccagtagcttctcagctctccattcccttatttttacattcccatggattcgataatctttaattaaagggattcacatggaaccagttggcctgtagttgtgtggaatccttatgatggcctcctttgcttgctttattagactagccttcccataaagataaaccatgcaagcatagtgctccaaatggggacatatatataaaaaaaacactagacatcttctcaaatagcagtttaccttgcatcacaagaatagcatggctacatgctgatggaatagcaaccatagttacatgatcaggtttgatcccacatctggccatctctccatatatcttcaaagcatcttagcactctccctgcatcccataagcagacatcataatagtataggttactttgtctctcttggtcaatgaatcaaatactttttagccttgaaaatcttgcc

SEQ ID NO: 5396 - DNA, 1042 bp, Cannabis sativa
gtttgtcagctggtaagttatctgcattgtcagctagtttgttagctggtaaggtgtctgctgaattgggtaaatctagtaagttgtcatattgagctgtgggaaaaaaattgatcgatttctctgtttggtttgttattttgcagagagtatattcctcataaaatatgacatctcttgattgaaatatatgatttgtttgtatgtcaagaagtgtgtatgctttcatatggtcgggtaacctatgaaaatgcatgatttgatccgaggtgcaaacttatggtcagattgagtaggggaaacataaccaagcatccaaagtttcttagatgattatagttaggggttttttatgcagcagttcatatggagtgttatctttgagaagaacagatggtgttctattaatgagatagacaacaggtttaaccatgtaattccaataggataggtggagattggattgaaaagtaagtgctcctgctacattgagtatgtgctggtgttttctttcaacaatatcattttattatggtcttgccacacatgaattctggtgtgtggtgccttgagtggcataaaaactagtgagatttaactcttttacattgtctattcttatggatttgatattctttttgtaatgaacattgacaaaggtgaaaaaattgtgaatgattgtaggggcatctaatttagcccgaagtacatataatcatgtgtaccttgaatggtcatccacaatggtgaggaaatatttgtatccttctgtggaaggagtggggtaaagtccccagatatcaaggtgtatcaaggtacatttcaagtgagacaattatagacgtagatgcatcaaaaggaaattgtagccttttatttactttgtttgtaatcaatatagaaggatgaccaaggtgtgaatgccaatggtttgtagtgtgtacattacaagatacaatatgttaggcttggtaataagaagcatcttggtgtaggtagtaaagtttgccaattcttctagttgtcccaatcatcaatgtct

SEQ ID NO: 5397 - DNA, 1009 bp, Cannabis sativa
aacaattttagagcctaatcttgatctccaaagctttccactttgttttctatgttctaagaggtggtcccctgccaaaaagcccaattctctgataaaaacaaatacctaattcattttcttgttgaaattccaaaaattcccttcaaaatttaagaaaaacgtatgtcgtacagacacttgcactgtggtgccactttgattagggaaatttcaaagtttctgtaaaggcgcacgttgcggccataattcagtttgggaatttgactcccaatctgtgctttgtttctcgtcgcgaccctaatataatttcagcacaaatttgaataaacttttattttatcatattttcttcacaatcctctccaaaaatgcccaagcatatgcttaaacctgaaatcaagcaaaacaagaataaatcatctccaaaaagacacaatcgattaaaaagacaatgatcaggacacttaaaacgtaaactatatttagcttaataacaccatcccacaatatgtaccctcctgacctctccatctaaaaagtagtggtatcgccaccaccctggaacacctgacacctcgatcgttagtaccctgctacctgcacttgtaagagtacctagtagtagggtgtctcctattaccacttttgtacccaaagtcaatagagcctataaatacttcattgccatatgtgagagagggagtgaaaaatcattataactacaagcatatgaaagtaatagaatacttattttcaccattaaagctctacatgtctctaagtttcttaagatttcatctccaatcttgatctcatatttaagctttaattgtctactataaataattgacgagtttttactgtcaacatatacatttgtttttatggttattaatggtggagagaataactgtcatctccacgacttggagagctttgaacctgaactagttctactgccaccaagaagatcaataatggggcgaactttaatttgaactaaatt

SEQ ID NO: 5398 - DNA, 1489 bp, Cannabis sativa
aagaatatgtcttaatactcttttcagtttcataataattcccatatgagattggtccaagattgtccaatgagggccactaaaactaagatgataacagataactaataatgctttcatgaggaaaacagccacatattgaaggtagcgaatctcatcactttccgaaattaaaagaaaagaaagaaaaaaactaacaactcaacgcagtggtgtgagttacccaacgttgtcgattcgctacaagctaagctacaataggaagaatacattacatggccagcctcttcgctaccgttaatacattgataggattaggagtccccgtactccctcgcaaaacggcatgggcctccgtttattgggttttggtcgtcgcgtaaataggcctaatactattcactgaaaaatagctgtccttggtgaggtatcgattcttaatcttttaaggggaaattttaaatatacccaaattcagtatattaaaaaaatataaattttatttacacaagtacagattacgagttgttaaacaagttttacatgttcgtaaataatattgagaaatgttacgatattgagaaatgttaaagggcatcctgaatgatcttatcaatacaagttgaagaaaaactaagcttgcaaaagatacaaggcttagtgatgcaatcctttatttataggagaaaagatttacaggtacaaaaggaaaaactgtaaagaacaactaacaaccttgtaacaaaaagttagttatgtacaagaacctgacaactatacacaagaagctaactaacaaaacaactagttttatcacaccttcctatgtgtcaatatcgttattggtagagaaagtgttaggcactattaatgtctaataacaatgtaaaaaatattatatcactattaatgtaattaagtacttaatcttacataattatatataataatttttttaaaaaataccattaactattcacaaagtattattttatagtagtgaaacccctaaacctaaagtttgcatactctaataactaaccttgagacattttttcaagtggaaatctcccaaacttatattttgttaggtcaaaattatattgattcacatattttaatcatttaaaaaatcttttaaatcgaaaaagttacaaaattttcaagttaaatttttactaaataaataagagtaaaaataaaaactaaaaaaagaaacccctaatttccctaaaccatatcttccctctcccttcttgtgcctccctcactctccttctcaatttatgtaaaatttattaacaacccccttgtagaaattagacacgatgaaaatatgcatgtcaaatttataggcgatcgtatctacttttcttaccgaattcaataatttgcatcatacaacgagactcgatagaaaagacaaaggcatgaccgcatgggtaccattatgtctccatcaattgtaatttgtaatatttatatttta

SEQ ID NO: 5399 - DNA, 863 bp, Cannabis sativa
taataattaagccttctctacagaaaataaaattaattacgctctgctagggctctgttcttgctatgctctggttcgactccgatctcctccctcgtttccgaagggtccccgctgagtcgggtggtgattctcaccttagcaatggatgagttgctcgcgaaaacacacaatcttcaagtctcagatgaagatgagtgggaagtggacaagaatctgtctattacagttgcaaagtccattcttaggggacgattatgtacctcgattgatcacagtagaggatttctgaaacgggtgttgggtggaatttggcgagagaggcagaatggaatctcaagatcgttgataaattcgactcaggtctattcttaacttttactttttcttctgagtccattcaaaataaaatcttgactaaactaaaatgccatggtatttatctaatggattgttaatcttggggaaaatggagaattcgaacgattcttggaagaatgatctgacctgctttccaatttggggccgagcattaggagtaccagtcgacttcttgactcccaaaaatactgtacgattggcggctatggctggagaggttatcacagtgcacaattctgatatctctaaaatggtggccaatggttatttcagattccaagtttggatgtcaattaacaaaccagtttgcccgggatactctctgccgtgttcgggaaagaagaagtggattgcgtttaaatatgatgaattgccatttatgtgtttcaaatgtggaagaattggtcacagcctcaaagattgtcaaaaggaaccgatcataatttcaggggaagagaatagtaaagctgctgcatatggga

SEQ ID NO: 5400 - DNA, 853 bp, Cannabis sativa
atatgcgatgacagcgaaataatacatagatgcacattatttgttacgtaaaacaagtaaaagaaagtatataagaagacaattctaatcttaaataaatcgtacgtgttctttctcaccccttattgtaagcatagtcacatccatggttaactagttgtctttggtttcaagtcctttacgcaaaaggttggagtattcatatcttatagtttaataaaatttagtaataattatcctgtagccgacgtaaattattgaggtcgaccaaaaacttcttataagcaagtttccaagagtaatttttttaatttaatgtttttattgagctcgacaaaaaacttctgatgagctagtttggggggccaaattaatgtttttggagctacgtaaaagacaaatacagatgttggaaatttcaaattggcaccctcacatagcttagtcattgtttctaactatcctcctcactgcccttcagtaacacgtatagatttattgctggtaggaatcaagatctcatactaaaaattagtgcctcagttaaatttattaaggcttgacagatcaattaatttaatttatattaaatatgttaattatttttgttgactttattagaagtttaatttttttataaataaaaaattaattaatgtgtcaaactttgattaatttaacacagtatgagacactactttttaataggaaatcttaattcgtaaaaagtattagacaccattaaattaatgcattttagtatttctatttcccttaccatatgaatcaagatgacagaaagtaaattcccttctacatgcactgagtaatataaaatagtacttgaaccgct

SEQ ID NO: 5401 - DNA, 1084 bp, Cannabis sativa
tcccccaattcaagttgatcttacttaaacatgcattcaaaggcaattggtcttctttctcttcacattacaccataacatcaacattcagcaagaagaataaaaaaaatattcatagttaatagtataactttttagcatttgcacattaacatacaattcatcgtacagaacctcctagaagattctaaactttcaaacttatttttcactgatccatcgtacagatttagactactgtacaatggcataattaacttactacaagaggtaaaattcagtagcaagagaaaacgaagagcaaaatcatgaacaatggaggggagattgaatttgaggctaaactattatttcaatcagaatgactgaattaaacaatacaatccaataagcaaacgaggaaaagcacaattttagaaacaaacacgattataaacacaacacacacaaaagaagggtaaattagaccccaatgctgttgaagacaatcacaaaccgaccaattcaaagaaaatcataatcaagttatataattccaatttcccctaaaaaaaaaaaaaaaaaaacctcttctacattcactttttggcaaccaaacagaaaggaataactaaaaaaaagaaaagagagaacggcaacagacctgaagttcccttgaaatagaagaaagcaacaagattagggtttcttagcaaaaccctaaaatttgggggggaaattctgaagtgtacagaattggggaaaattagggaaatttgtggtttaagagaagagagttagataggaagatgaacaagaccaaaaattggttcaagggcaaaagcttttatatagtttggtagactactactgcagccgacaaaataataatatatattttctaaattagaggaatgaaattgaattgaattttagtttggtagttttttagtctctcttgttttctggttagagtgataaaggcgtgaacttgaaaatctccgtctaatttgtttgactaaagagtaaagagggagaaagaatggtgggaaaagggtggtaggtagttttcagttggaagtttgtcattttcttttattattat

SEQ ID NO: 5402 - DNA, 1814 bp, Cannabis sativa
  modified_base (990)..(991): a, c, t, g, unknown or other
  modified_base (1458)..(1464): a, c, t, g, unknown or other
ctctctctctctctctttcctctttcactttctctctctaaaaccaccactactactagtacttttactacttaatacgattctctctcctcttcttcttcttcttcattcagtcccctaccctattaaacccccaaaaaacggctaagaattgcccgtactactatacatctctatcttctctacatgacacgtgtcaaaaacccaatacatctcaatcctagtccccttaatattttttttgaagtgaaagactaaagtttgtgcatatatatatatctattccatatatatttgtatgcacacataaataataatatgagaattggttaaaggtatggttgttaaaattattagccttttttttttttttttatgtaatatggagtttaatataattataaaaaatagattttataaactatttttaattaattatggtcaactatttataaaaggtattgatcgctattaatatctaataataatattgatttaataatatataaagaataatgggagacaaacttcctttaaatttatttttcattagttaaaatattactactacatactaactagataactattgtatatatttatatataagtaaaaataaaattagattattactttattagtttcaaaataaataatttaagtgtatgaaataaaatcataaagaatttcgctacaatcaactttagcattggtattcagcacgagtagtgcttcgtatttgtaacgtcaccgctttaaatttttattgggctcttttacccatgaaatgataattcttatacatgagtacgtcactctgctgcttcttgaattgatgactgaccctaaagaccaacataagttatgagtatttctagcgtgctttatcctcactcgcatacttctaggaaaaacttctaaggagatcacacatcctgaaattacaccaagttaagcatgcctaaccgtggagttctttcatgatgggcnnccgaaaaacaagatgcaccttgtcaatataggtagtaccaaccaatcacactacaaaaaaccgctagttttagtgacaaccttttagtcacaacataattattttgttactaaatgtgaattttagtcacaattaaaaaattatttttgactaaaacataatagttagttataagttgttactaatttagttttagtcacaataaacattatgactaaaactacatttagttacaacaaatattaatttttatgagtaatatttttagtcacggaccttttagtcacaacaaataattatttgtgactagaacataatattcaattataagttatcactaatatagttttagtcacaacaactattgtgactaaaactatatttagttacaacaaattgtaatttttgtgactaatatttttagtcacggactttttagtcgcaacacaataatgataatttataannnnnnncaactttttttatctttagtcacaaattttgttatgactaaaagtaaaatttgttgtagtatcaatacatttaagtcatctttaactgtgtagtctcatacctacacagtctcagaatcatcttacatgactttttctaggtggtatgagattgcacaacttactcggcatttctctttacagattacaagattagtgactgtcacagtatcttttataagtgtcatctataattagttagtaatatttcttaaaaattattttcttcaactatataaaatttgatacttaattaaactaacaatagagaagaataataagaaccctaatatatataaatatatctttat

SEQ ID NO: 5403 - DNA, 639 bp, Cannabis sativa
tgatgccctaggtaggtgcctaggttgacaaaaccacatcgttcgagattctatcaattcaattgtgattccttctcgtgcattattcttgttttgctccaaaaacaagatatgagacttggaatcaggagaaaatctcatacaagtggtggttcagcccccaggcacaacactgggcacccaagtttacatttggtctgaggcttagtgttttgtctatcaagcgacaattctattttggacattggtcttattttgcccccaaaataagatccggatgcttctgtaattcaatatctcatgtacatgtgtcacacataagtccactgacacccattgcaatagtaatcacctgattgtcacctaatcatcgttagtgattcactgggcatcacatgtgcacattaagtaaaattgccaaaagagcttaaccggagtcaaataatgaactaaggatagcttcacattatttagcatcttaaaatatgtggaaaatccaaaaagtgcaagttcttggtgcctaagttgacatttgtggcaatttggtcgtcaacaagttagtttgccaatttttcaatagtacacactactcagtaaaatggccataaatcattcaatttttatccaaatgataaggtt

SEQ ID NO: 5404 - DNA, 1049 bp, Cannabis sativa
tttacacaatacaataaatgaaatggtatttgagatattaagagatcaacaaatcaccatcaaaattcaatacttaaagaaaacggtatgatcatatcttgtttattattttctcattattaaatgactagcacacctaattaacctagctataataatatgtatgggtttaactagatgctcgacactcttagtgcctttggtgtcgaacaacaacattaatacaaaatattgctattaagcacttaattaatggtgcttaacatcactataaatatttatatatattaataaaattctattatagtaacaatgtaacatctttagaatttctcatatcttaaagtcagtgtttcgaaaaaaataatattttatgtcttcaataaaaacgtaactataacgacttgcagtaataggttaaaaacaattgctacaaacataatacaaacttgcagtaacaagacataaatagaaataaattttgcaaaatttaaaacttaatacaagagaattatacatggtaccagtattctttcaaacagtactagtccacgggatttcgcccagagaatgaaatcaattagtaaagcatcaaagattacaaaagcagttgatgtaaacaaatttcgactccatctaaaaaatttgccgcaaccgtttattatccactttgctaatctgatctctaaaatacaccaagtagtgaactcccttcagctattgatgcatgctcatctcctcccaaagtgagtcttgaaaaaaaaatcttttctcaaaaatttgtgctcacttcctcccaaaatgagacttagaaaagtcccgaacacccacacttgttcaaaacttctctataaccaattctatgaacaacaagagaacaataacaaagatacaaacacctagcaaaacactctaggtttttttttatttttttaaaaaaaatactcttctcaccaactaagacatgaaatatgaatctagaagagatgaaaacattttggtactcttatagaacatagaaatcataaagacaaccacaaatatatttt

SEQ ID NO: 5405 - DNA, 1084 bp, Cannabis sativa
  modified_base (409)..(409): a, c, t, g, unknown or other
agtagatggcttggccttcttgtttgcgagttgtactcctacgtggcattgatgttaagcacatggacatgccacgtcaggtggaaaaaatcgggataacaatttccttataccatggaaaggacattccacatatcattgtgtaagtaaactttatcattcgttatcacgtcagtataaattcagtgcactaataaatgggactcaatactttgaagcatatattcatgattattttccactgtgtagacaacactataatcatgaataactatatgttaaagatttagtagaatttatatatgaaatatataatcatgaaagtaatcatgtgaaccatgcaacataacatgatttttcatcttctattaattagtaaatctagttatattgaaatagattttatttngggcataaaatcccaacaactattaccatcatcacgaggtcaaaactctaaaaattatggtgttctctttattttctgtttttgctttctataatttattttatctaatcgatttattttgactcactgtcgttggctagaagcaaagtcaaataagatattttatcattttatcttaatagatattttaaaaataaaatattattaaaatataaaatttgaatttgtaagttacttaaaatttgaatagatatttggttgttgtacaacatattttttcaaatttaatgtttgaattgcaattggttgttttttaaaatttgattatttattattttattaattattgtaattataaggtcaactattttcatattgtgtatatttttttaatatacatattgttatccatattcctgaatgacaaatacatggcatttacgaaaaaaggtgccacaccagaacatgcgcaataagcatggacctcccgcctttctccatcacaaaagatgttatgttccaggagttgcccgagggttctccctgttagcaaggacggaaaagattctgggacacacactattggttttctattaagggggattagaagattagagtgttctagaagggtagcaggttagtctaatccgggaaggctatggccagatgttcttg

SEQ ID NO: 5406 - DNA, 1147 bp, Cannabis sativa
ttatgaactaattcatcatcgctaaataattatattatcaattaataatatttttactcttcatttcacattaaactaacaattgtagataacacaaaataattatctcaatctcttacatgtaaattaatttaaagaaaaacgatgttgactaatttttttttaccatacaattcaagaaaaaaacacctaaaatttaattcaataaaaacattaagattaatagaggtagattgttctaggcaataattaacaagtataatctattcaacctaggttacatgttcactagaattaaaagctactttgatataatcaataatcatgaaattactaccaataattagaactgtagattattaggtgaataacaatcaatcactacaatatcatattcaatggccatccaaataagaataagataataatcataaacaatcaatttaaaagcatttgagcaatttaattaattggaatgaaagaaatcaaaatataattaatcaatgatgatcaggggattaaaataaaaactactctaaagataatcacaactattgacataatcataactaagagttaaagatgaaagaaaaaaacctagattgatgattttgatgaaatcctctttttttccatagctcattctcagtatttctcttccataatgtaattaaaaaacataattaattctaaaaaaaaaatctgtttttatattctcacttaaattgcaattaaaaactgaactaaaaactgaaatcaacgtcgtgggctatgatctggaaaattgcatgtcgtggcctgaatttcgtttcgacaaatcagcccctgtggcccgcagcgcgactgttattttgctacacactagcaatggcctaaaaaacttggacaacggcctctgtaaaaacacgtcacatactctgattgtaatttggtcataaaatatttcgaaaagctgagaacaagatctagaactttcatgttcctctcaaaatccaattctgtctttaaaagtgtcgtaatctacaaataagttctaccttgtaaaatcaatctcttcaaaattatcattttccaccaaagtgtgctaaaaccgttccaaaatatttgaaacatgtaattagccttctaaagtgctaacgaattaaaa

SEQ ID NO: 5407 - DNA, 502 bp, Cannabis sativa
tttaataaagctactgatgtagcagctctttgtccatgttttttattttttctacttttaaaatgaagaaaaggcacttatacatcatctcatgtaagtgctcttagatgctatttattaagaaaaaaaaaatacatcttttccttaaaaaaattaaattaaaataagagacatgaaggatgcattctgtaatactttttaatcagatttttgtgtttctaatttaaaaagtggaaatattttcaaaacaaaacaatgtcactttttaaaaattaggcatttaaacacatttttttaattataatctgtttgtattttctttcgttaatattttagacatgggattcagccccgactccagcaccggacctcgaacccaaaccaaaaccccaaacctagacctagccctgaccacagactcggacttgtgccctgaaccttgaccccggaccctagctcaagacctaaactcccaccccggactgagacccaaacccctcat

SEQ ID NO: 5408 - DNA, 641 bp, Cannabis sativa
cttacctgactttttctttttgtttcggtgtttagtgaagagaaggtttgtctgggtttatgcatcgattcagttcgctctggtggttctatttgcacacatattttactccttggtaagatgaaacttaactgtcctttccctatagatagaaatcactgctccataggaaaatttggctagaaattgtgttcggttgatgatgcaatgtctttgttcggccttttcttaacaaaccaactagtgactttggaaaagaatttagtcttgttaaatcactacacattctataacgcgatcttgtaaagtttgttcacgacaggatttttgagctcccgagatctctatactaacttttgactcgtttttttttatgtaacatttgtgggctcagattcatgtgcaagcagttctgtgtattctccttgcgacatttgctggacttggtgttgccatgagcggaagctccataattgtcgagtttttaagatggaaaagaagatggcgagcttcgactgaacaaagacaaagctcccaaatattgccataataaaccaattcctgtgactttacatttagatacaggataggaaggatcaccttcatcatgtgtagtgggatttgagttttagttggggttg

SEQ ID NO: 5409 - DNA, 1113 bp, Cannabis sativa
ttaggtttgatattttcgctccacataaattgaatacacaataaagctcatattatttgctatcaccactagcaaggtacatcgtatatatcaaacaaaaatgtaacaggtctcccaggcattatgttaattagtactggtagattctagataatctgataatgcaaaatcttgacgaataaataagtggttagcaaaagtcttctcagatataggtcaacaagttgcacatgtgaaatggagatgtaatttcagctcaataaatttttgttttcatattaataagcactactagctacttaatcccagccacgtacaaaaacaataattatttttagtgggggagaaaggaaactttaattaagctagtttgagagccaccaaaataaacacagtacacaaaaacaaacccaatatatgtatggaatctgaaaaataatataatgcttgtaattcgtaatacaaagcaagccatacaccacaactggcaaagagaagtaatcaacggtggaaaattcttccactgtggtgcgtggatagagacacactcaaacatttgagcttgctctcccatgtggtggtgatggtgtgtctatatagctatgttcacttaatctcagtactaaaagtacacaaagtattcattcaaaaggaaaaatacacaaaatataaaaccatatacattaaacatgtgttgttcactaaattggtactaattatatgccacttgtcaacattcctatgaatgactttgttatatcgtttcagtgctcaaacactactaattacatttaatgcgtactaccagaattcattaattaaaagaaaattctgggattcacagaggtaatccctccccttcacaaaaggaaactgagctatcagacaatctagctttggtagccagttcattaacaaagttcaaattatcctgtttagaaaaaacaaaactagagcttgagaaaacaacagcaagcgtttaaattgaaaaaaaaaaaaacaagacacaagaatgtttccagtgaggagcacgatcatttgagagagcttggacacacgagtcaatcggtcacgagcaccacaaatttatgctaacatatagataagggtaca

SEQ ID NO: 5410 - DNA, 564 bp, Cannabis sativa
tttttcctgttctttgtttcgactcaatgaatgaatgattataactctgttttgtaggtttttgaaaccctgataccgttttaatttacgatccttgcaatcattttggtcaatttttattaatatttgagttttttttaacaaacatttgagtctttttttttctttttatgtggacaaatatttgagtctattattttggaaagttgttaatataataatattgttgttttttaagtgtgaaaaacttaacatggccggactgacaccaccaccaccttggcactaagatattaaatgaagaatgcccatatctcgaaatggttggcaaaatggacagagcaatagactttgttttgccaaaagttcacgaaaatcagattgtgaagaaatgggagtggtgattttctttgggctcttttataagcgtgtgcacatgtatgattgaacaagtaatagagccatactatcatgttcttttatgtataggtgtagctcaatcttcttttttaatttgaagacaactacaatcaatctcctattagttaactttaaaatattcat

SEQ ID NO: 5411 - DNA, 1009 bp, Cannabis sativa
tacatattataataatatgcttctgcataattataatatatattataacaaatatttatacatatatatcaataatgcatgtacgtaatgtaataatgatgcaatatataatacaagtggcagttttatgttattttgccctttttgtttttgtttttttaaaaagagacaaaagaaaatgagaaataataatttaataacattcaataggaaaaaaataacaatcttaatatcttaccagctataaaattgaaataaagccgcacaaatcttataagagatgatcaagtataatgacaccccatgctgagataaagaagggtaagaagattatggaaaatgagacccgccctaaaggtaggcgagtcaagcatgcatctcgagccctcgaacgctccatgcccctaaaattgtgaagaaaccaaattattagaaaatattaaataataaaaaaaaaatataacagatattgtttgatgtagtggtaaagactaaagaaccttactttaagctaaaaggtcaagaatgaattaccaacttctactttcttttttttaaaaaaatatttaatgtgtagctagacacaaaggggagaccccacaaaaggcaatcacatagtgcccaaggttggaaacacctatacttgattgtggaaccttatgaaaatgctccacgagcagcacaccaagacactggagagctccacgaccaggccagtgccctagctaaggaaagggaaagaggaagaccctaaccctaaagagagaaggaattaataaaatgtacgcagggtttatattactccctatatatatttccctaagaaatgttgaacaagattattattttttttagtaaggttgaacaagatcgatttgattagtaaaggatgaattttttaattgtgttccacattcataacaaaattttggtacgaaacggatgcagtacaaaaaattcaagtttgtacttgacaggagataaaaaatccgtggttcaatccctccct

SEQ ID NO: 5412 - DNA, 697 bp, Cannabis sativa
  modified_base (159)..(164): a, c, t, g, unknown or other
gcggaagagaaagcggaattagggcatttatgttttttattttttaaagaaaatgaaaattttttattttttttattttttatttttaaaaaaattaattttttattttaatatttaataataattacctggattaataaaattgtgccacgtgtacannnnnnacacgtagacattccaacctggcagttaacacccaaaaatagatggaaagggctaagtgctaacagaacttgggtttaggaggttttactaccaaaattttggaattgggggctagttgcaaaaatctgaccacttagggaggttatgccgcaaattaccctaaaaattaatgatgtatattgaatttttttaaaataatggtaaagatatatatttaaaaggaaaagaaaagtccttctcaagaaaaaataaatagtgctttaaaaacaaaagaaaagaaaaaaaaaattgaagaaaggaaaagagaccaggggtggatacaattaaggaaaaaaactaaaattggtgctgaagtgacagaccgacaaaataaagatttcagtagattatttgtatctcgataattgtgaacaataattttaagtaattaaattagcttttttttttattcatataaataaatatataatcacgtatataaatgtaaaaccccctaggggaattttgctctttttgaccatttgttttactt

SEQ ID NO: 5413 - DNA, 917 bp, Cannabis sativa
cccctactcacaagcacaacaatccattcgtatctaacactatgattagagcttacacaagaagcgtcattccaatatgggctatccgtatttgtaatggatacaaatgtttaaagaagcttatttaagggatgctgtttcttggaactccatagttgctgctaatgttaaggtcaaagatactattgtgggagatgaggttgaatctcctacgtgacatgcaagcttttaaagtgaaagctacagaggggacacttataattgctttaaaaggtgcattaaagatttgtatcgatggtatagccaacgatacaatattgaaggatatcttatacactagttatcaaacatgtctcctaaattcctaattatgatggaagcatatattatactgtacattagtagaaaaaatcaaatgtgaagatgtttcttttttcttcacctagagactacaagtaatttgtaggtctcataggggtgagaatttggtgttaaataattggacaacagtgtacccaaagaaggagaaccattctcagggtcaacaaaaggaggagtggtggggaaggaaccaatggcatcaactacaatgtaaatgaattttcaaaacacagtaaaagttgtaaaagcatgtgctgcccgaccttcatctcacttttcagctacagcactccaagattagcccatgtgaataataaagccagcattgataagaataatgatgtcgactatgagacctaagtgaagaggcttcaaaccttagcataaaaaacataatcctccactcaaaaaattttacaaagtaaaaggaatctaaacttctccctcgtcctggtttgtacacatttcccatcaaggtactgaaacatcagcaagtcataacaatttttgattcaaagaaaaccaggttccccgca

SEQ ID NO: 5414 - DNA, 546 bp, Cannabis sativa
acacagtatatcaccgatgtctgaggggcaggaaaaaagcacttacagatcaatatcaataatttgatcagcattggacgcttctaacaattgcttaacaggatcttgatcatatagaaacttcaggaatataacaacaagttcactgcaaaaacaaaaatctgtgacaaaacaaaattatatgccaacagctgattgaaacactaaggtagagccaagacaaacctattgtacggtagaagctgatcactaggttcttgcatcagtatcctaatgcatttcaaaagccagttgaagaaatttgagaactgaaaaaaattaaatgaaagatattatcatgaatccaaaacaagaaacaaaatttatgagagaaaataaattgcattcatatgaaattgttaatccacaactgactaatttctgaaaaaacaagcaggctgaaacaggacacattcattattaccccctctccttagttgtcttgtttttcgttaccgttatataaatggaaatacgattactatgtacacaacagaggggcagtag

SEQ ID NO: 5415 - DNA, 1963 bp, Cannabis sativa
tgcagtagcagagaccaaataaaccatcatgatgttgttaggcctataattacaaccatgcttctaagtagattcattatcatcttgtaatgacccttaagggcaaagctagctttcaatgaattctatgaaactaaatctttcctaggtaatttttgaatcaacttagagcaagttcaatactccggtcttggcatatacagtagtcaaaccttattcaccaaccttcaaaactagcttttcaagaacaaatggtcatttcttttaagtgtatcaaagatggatatgatacaaggttgtccatgtctagtctgtattaaaaagagagtcgtctctcgctctctcatgatgctccttggacataggctaatgtggtcaaaccatgtatcttggttgttgtttttattatacttttcctatttgtttcaattttcggcattatttttcaaatcttgaaattatatgatgtataacaaaactcaatacaaaattattgtggtcatctcaattcaatttagtcgatctcaacaacctcaaatgaagatatcatagttgaagcttttcctattacaataataagagaatgtacatgttatattattgtttttcggtaagacatgtactttagtagtcaaagtagattcaaataattgaacaattacctcccattcttttttcatattaatttcatttgactcgtgagaaaactaatttgagtaaaattcttgaattgatttttaacttgaagctatttaatttatttatagatgatccctcgagcattggccaaactgtcgtatacgcatcgttatggacgaggcctccgttttttgagttcaatttcttcaagcaacaataataccatatgggatccaactgtggcacttaaattcagtcacccaactcttatttctcttgagaaatgtagttcaaacaatcaattcaagcaaattttagctcaaataatgaggattgggctcattgggcagacctttcccatgagcagactcctcttatattcagccatttcccacccagagaatttggacacggcaatcctacttttcaatcactgtactcctcatcccaacctttacatttataataccatgatttcggctttatctttctctaaagttcaatccttttctatgtacaactccatgctccatttgggtatatacccagataaaagcaccttcctttatttacttaaagcttctccatgtgtatcagaggtgaagcaggtacattgtcatgcaattgtattaggctttggctcgtatggatacttgaaaaactccctcatgaaggtttatttggagaaaggatcaaaagtgcttgcacgcaaggtgttttgccaaatgtcaacaccagatgttgtgtcgtttaatatcatgattgttggtaatgctaaggaaggattctccttagaagctatcaaactttttcatgaaatggtgtctttgggtcttaaaccagatgagtttaccatgctaggacttatcatatcttgtggactatcaagagatgcaaagcttggtaagtctgttcatggatggatagagaggaggaaggctagtaattgtttaaatttgatattgagtaatgctattctagacatgtatgctaagtgcaatgaatttgagcttgcctcaaagatttttaatgcaatggaaaagaaagattttgtttcatggaacacaatgatttcaggatatgccaaggcggggcagttggaactttctctatatttgttcaatgaaatgcctaataaagatcttgtttcatggaattcattgatagctggctttgcccaaaatggtcattacaagatggtaatgaatctatttggaagcatggttgtagaaaatgttaggcctgataacatcacgatggtttgtttggtctctgctgctgcagaaattggagcattggaccaaggaaagtggatacacggaat

SEQ ID NO: 5416 - DNA, 1294 bp, Cannabis sativa
aaaattaaaatggattttatataaatttgattttgtctctataatttggccctttgtgcctgtcctcagtactcaccctagggcttttttgtcttcacacaaataaactcttgtgactatcagaatatatggcaggctaatcccataatataccgtcttctaacttctttattttaggaaaacataaattttaagaaatatattataagcttgctgctgctagtgctttcccataattctatatattccatatagattaattaaatgttttcctagttcttttactccaagtaatataattaatgagttttatctttacatgagaaagataaaaaaaggaaaaaagaaaaaaaaaagacactaatataattatacacctattttttttttggtaattaaaaaaaaaagagaaaattaaaaggactagtgaaaaattatggtaataaaatctgaaagtgagaaacccaatatgcaatgcatgcttcttctccgtcttatagtttacccataacatataacacacccaagagagagagagagagagagagagagagagagagatggggcaagaggaggaggatagagaaagcgcagcggtagcagtggcggaggaggaggaggaagaagaagaaacgaaaaatgatagaaaggaggaggcaagcagcttgaggaagcattctctcattatggaaatttcttctaagctcatccatggtgatctgaactccaagattgaagctgctagagatattcgaaagctagtaaggaaaacttgttcttcttattcttcgtcttcttctccttctccttctccttctccgtcctctttttctgggaaaactcggtccaaattgggcgcggcgggtgtgattcaaccactggttttgatgctggtctcacctaacccagatgcccgagaagccgctctcctcgccctcctcaacctcgccgttcgcgacgaaaggtcagcacactcttttaccaacttcgattttgttagttatagctctttttcatttttttcctgagattttgttgacttgggtctttgagatttcgtccgtaatatcaaatgatgaaataacttcttcaccgaaccgatattgatgctattgatgatttatttatttatttattttaaaagctttagttttcactcattttctcttcggaggcaattgggggaagtataaaattgaatccatcagctaacaaaagagttatccgaaaaattagctttttctaatctgaatcggtgaatgatctttgggttatggaacaatgaaacttcttc

SEQ ID NO: 5417 - DNA, 816 bp, Cannabis sativa
gtatgtaaaaatactgaaaacaattcaaacttcagattattaaaagaacaacacattcaacccaatatttatttcgtatatacagttacacattcaattaaaatttcaacatcaagggaaaataaagaaaatcaagctcaatcaatttaacaaaattaaaataaattttacttattttgggttctaatcattttgcatggattgctttctcctttctcggcaaccaaacaagtgtaattaggggtaaattttttaatactaccttaagacgatgacacaatgtaagaaaatcaacgacggaggatgtcgacgaagaattcgatgagccaatcgaggcatcggagtcctccaagcttgtcgattgcatgggccgaaacccatccggagtgggtttctgattacgaacacataccagccttggagtcggagcttcggtgaataaaccggttctgaaaaaggtccgattggaaaacgaaaaaggagagcgagtacggagacatcgactgaagtgagccgcagcacagtgactcggtgaattaaccgccattttcacagcaccagcaaacaccaacggcaatattttcttaccgaaagcgaattttggcttattgttttattatttagtcaacccgattaggtattttattcgtatttcccaacccggttcacttgtgtttcttaaacgacggtaacatttgtcgtttgggaatcaaaatgtataaaattcgaacctagcattaacgatgcgattggtttggtgaatgaaatgtagttgaaggcaaaacaatcaatttttatttgactttttttagtttt

SEQ ID NO: 5418 - DNA, 720 bp, Cannabis sativa
attgaattgtaaccatattaagtacatttaccgtgaaaaaattacttaagaatttaaggaggcgtttatagtagataaaagtattggaataaataagctttataatttgaactttgaagtgtaccaatgcctcatgtttatttttttatttggaattaattgtggtgggttccacacggtgtttttagtggttaataataataataagaatacttttgaaagggtgagttttagattccttattatgtgcatatcacattgttatgtacacccaaactaggatgatcattttattgaacaaaaaaaaagtcccatatgcatgagtaggactctacctaaattgttatggatatattttgtgtggttatgcaagaatgtggggcttgttaaaggtggcaagttaatggtaaacactagctagctagttatgggtggtgtagcgaagaggaagaaaaataacccctaaaggtgacaaattaatggtaaactagctaataatgctttcattgtgcttcgtgtggtaataatcccctaaaggccaaacactttgtcccacaaaatgtgagataccattccaatataacttgattgttatggtacaatcatacaagaatttatgacccttttatgctttttaatgacccacgtacaccatgcaagatccatacttgaaaattaatgatagcctttagcttcacatatcatcatcatcatcatcat

SEQ ID NO: 5419 - DNA, 642 bp, Cannabis sativa
aattcattaaaaataaatcaataaataagaaacggtgtaaatgaacaaagcactcaatcactatcagataagtacagtgcaggtataattgaggaagaatagtgagcaacatcatcctgaacctgaagattgttgaatataaaattccatggattttatgattgttcaaattggttagatgataagagaatcaaatgacacagaatatttgtattcatcaaaaataaatggaaatttatgagagagagagagagagagagagagtcatagaaagaacatacaaacggaagagtggagaggaaggagcgatgtgtggtggtggaggatgaagagtttagtagagagcaaaacattggtgttgttgcacctaaaccacccattgtcatgaccatctctctctctctctgtctgctgagaaaccattaacagagaaagtggtgtaagtgttttggttattagaaaatagaaagcgaagaaaattgtaacaacgaatcaaatcaagtcaacacctatggcctatcctcttctctttcagaccaaaacaaatggacgctagcctcaaatgtataaaatcccattttttattgttgggacccacactaagtaaatcacgaccccttccttggctcaataaaaatctta

SEQ ID NO: 5420 - DNA, 3113 bp, Cannabis sativa
attaatgatatgaataataactatctacgcaaacaacaacctgagagcattattgtcacttttcttttaaattggaaataaatgtcaaatgtcaaatgtaattcacaaatatagtaaatttaagctttacttttatagatattgcaaaataaaatataaaataataaagcctccaaaatatatatgacctttctagttttttctttaatatatttttgtaacttttttttctttatcatttctttgttttctttctttactatattcggttagaagagtcgaattttatattgaaaattgatattgtagtaagtaattatcactataatctaaagttggagtactaacaaaaatacagtaaaataaaaaaaaaattacaaaattactgtgatacagagtttttgatatttttatagcatcaactttataaaaataatatgtttaaagtttcaaaatgacaattatattgtgtttcagtaaaataaaaacaaccatagaacaatttaactaacaacataaaaataattatagtataataaaaatataactacaaaacagtaaaaaaaataacaaaatattgacctaattgcaataagcaaaataataatatgtttttgtattactaattttttttttacttagttttgataacttaatttatctttttgtactattatttttttttttcataaaatttgttgttacaactttattctttcaactatttttttcttttcctttttaagttagtgatatatagttaaaaaacaactacaaactgaaaagcaattaaaaaataacaaaaaaaaatacacatatatacaataaaaatatacacgataaaaagataaaaaaaaatgcacataagctaaaaagcaactgtacgataaaagactcataaaaataatagaaaaacaactatagaatacgtaaacaacaacataaaaataactataaaataacaaaaagataactataaatcaatagaaaaaataactagacatcaatattgttaaaatatacaaaatattcataaattaacactctaaataaataataaaatatccaaaaaaaaatatactacttttattaattatgtataaataataaatataaaatattcataaattaactctaaataataaaatatctaaataaatatatatactagttttattaattatataaaagatagaaaggtataagagaagtgttcttaatgaaaatttcattattacacacataccctatatttcacaaattataaaaagaaaatgtaaattgtactagggaaagtacaagaatgtttatgataataatgaacgaaattatttaaaatttatgaatggaaacaaaatcgttacatgttaacttgatgctactatgtctctaatatgtctcatgagatatgatgataaactataaaattaaccattttagacacatatttagataactatcaaatttaattttatactagatgtactagttcttatatgtattttattgaagtgaatagcatctggtataaatctaataaaaacaaaataaattatatgtaacactgctagccttgcattacattgaactataggagtcaattattttgggtttaacttaattatacataaatttacaatatcaaggacagcctatttttctaattcattattaatatcttgtatgataatatgatatttatcattgtttaaaatgatataatagtaaatgtaattgttatgtaattacaattaactgtacctgaagctggaagaggagtaccagaagctgcaaataaaacacgatgaattagtcaattaaatatatatatatagatagataaatggatatttaaagagtagtgagtccgtacatttgcattgtattgggacaccattcatgttgcaagcacttgggagtgaaagggcaagagttcggttaatgggaagttgaaaagggacactagcagttactagaagacaagcacagtccataccagagctcaatagggtccttaatgagctgcaacagcctgtggttggggcctgtgactgaccattactactgctccccgttatgaaattcaggcatggagtgaagctagttatcattgtgaatgtacatggtgtagaaatctgtccatttactaaacagatgaggataagaataatgtatgctattgattggaatgttttcagcccttccattagtgtgattcgttttctgaagtgtgttttgggtaaaaagatgatttatagatatgtgtgaattttacttaaaatttgtagagtaaggttaattttaagtgggtttttggtgttcaactactttaactactattactttctttgaaggaatttcaagatttcttttgttttgggtttttgacttggatggaatatggacaaccgtcttaactattaggtgtgtttggcaatgttagttatagctattatgttttataataaaaataatcatattctgttaatcctctagtattatttataatactacccaatactttaacaactctattttccacttggcacaaagtcagtcattaattcttgtttagttatcaaaatattattactaaattcgaagttggccacccaaattgtaccaatacactttgtccattacaatacgagcttccttatttaaatcccacttatatttcctactctctcactcaaactcgaacacaccaaaccacaacaacaaagcttgccctgttttccaacttgaaaagaaaaacaagaacaggaaaatgggtttgaaaaagattgagttgggtgtagccttggtcctcctcatggcaattctcttgggtagagccacagctcaatcgagttgctcgagctctctcatgagtttggccccatgccttaactacataactggaaactcctcgtccaacccatcctcctcttgctgctcaagcctcactagcgtcgttcaatcgtcaccccagtgcctctgctcagtgctaaacggtggtgcgatgtcgtttggtatcacagtcaaccgaactctcgctctttccctcccaggcgcatgtaaagtcaacactccaccccttagccagtgtaacggtaataattaactaacaa

SEQ ID NO: 5421 - DNA, 537 bp, Cannabis sativa
tgaaatgacgaaactaccctcaactattgaagcattgtttatcacgtgcaactaacaaatgtggaagaaacgtgaacttggtggcctcgaagaaattggaatcggaataggagtatgtatgtatgtgtgggacccacccaccttgatgtcggtctttgtcggcactcactgtctcacacgttaaataatccttacctaaatttgccgctacacccggttttctatacctaattataaattataattaactccctctttcatttctcttaattactatttattattaaaaagtgtagaattattactattcttcttcctcggaaccactcaaattatattttaatgcaaattattatttacttggaaccatttacatatatttttttaaaaaaaaaaaaaaattaggtagtaccttcaaaattaaatgaaaatgagtatagcacgaggaaagaatgtagtttagtaatgacattagataatctacgaaaataactaattaggaaatgtcatgtctctactattctatacttcttttta

SEQ ID NO: 5422 - DNA, 500 bp, Cannabis sativa
taatgataaaaagttattggtagctagcgtgaatatcaattcagctatatataggggttcaatatatcataaataatgggaagtaaattatattattgatcatatatctaataacttgctgcatttggaataaaccatggctggctttcttcaatatatgtaaacgtcgcaaattaaataataattaataaaattgcacccaatatattgctatatataaagccacctttggtggctttcatttcatcatcaaaaccaaccaattatacctagctagctatatattaaagtaccaattaattattaattcgatgaatatcatgaaaggtacttatcatattattgttatggtggtttcatttcttgtagttgttagtggaagagattatgatgatgatcaccatcaagagaaaggcggaaataataaaggtgattacagacatatgtataagaatcatggaggagtagggcttcgaatgaatttttatggaaaaagttgt

SEQ ID NO: 5423 - DNA, 813 bp, Cannabis sativa
gaattattattagcctatttgtatataataattaagtttgatgaagaaaaaaaaatgtaaaaaatgataataaaactgtatataacaacaaaaaagaaataaattaccaaacacaatatatagagataaatcgattaaaaaaattcaaaaagaaaaagtaataataataataatattgccaattaatgctaccaccattaatctcatattcaaaataataataacaataataatttaatcaaaataggtaacattattgtcactggaaatggagctataacctgtggtattagtagaggtatatagagaagaagttgaagaagtagtagaagatgccgaaacaacaatagaaggcggaggaggtggcggtggagacggtggcggcggcagcctagccggatgatgatgatgatgatgatgatcaggaacaggcaaaattgtagattgatcatgatgatgatgaagatgatgatgagaattaatattactattattattagctaattgagagggtaatgaagctatggacaccacaccaccaccatgatgaataatattattttgatgttgatgttgatgatgatgatgtggagacattaaattggctaataaagcagcttgatgagtagaagtagtagtaatagtagtattagtattagcattagtagttgtactagtactagtattattattattattattatttgtagtagtagtatgagtattagtagtagtggcttctctaaatttatatctcaatatctcagtccttacagcattaagctcagcttgtagagtttggatttgctgttg

SEQ ID NO: 5424 - DNA, 967 bp, Cannabis sativa
gtggttggtctgtcacttgtcgtcttgtttgagtgttgggacgcccattggccaacgtgttaacttgaattccttgttgctgagatttactgccacgtggtactgatattgtcaacgtaagcataccgtgttaggtggtcaataccgaggatagcatttgcccccaagtccctgtgcgaactttcatacggatagggacttatctgctgagttggaactgatgtagcctttactaaattgcttcatttttagtcttttgaaatacctagtcttgactgtatctcttttattgtagtaatctaagtgcttttacatgtctctttgttgagtatgtgtgacaagtgaaggagtggtcccacagatactatttaagtctttttggggggaaactctcttcatttttccacttttaactctctcactagaaagtaacttttgaagaagctcctccttctctctaaagagtcaaacccacataccatcattctactaggattttcgtacaatttcaacgatcaaaacttcccatcttcttcatgaacggtttctagctgtgagtacgctttcttattccatccattcactagattaagttgattttgccatgaatggatgaaatttgttcttcgctttgaatgtcttttgattcccacattatattataatctttttagtattttgtctgcatggtagtcttaggatatgtaatgtgtgatttctagacaaaaaagatctacttttgatgttccttctgattcttgaaaaaacacatgctcggatcctgtaccccttttggccgaccaatgaggtcttatttaagacttggccaaccgaagttcgtcgccatggtgtctgaccggccaagggcggtaccctatcgttgactggcgtatgcctagaagtggtgttcctggccggccctagactaggtcatgggacctggccagcctcttaggattgggaacca

SEQ ID NO: 5425 - DNA, 650 bp, Cannabis sativa
agaggatgttatgggcatgagtactttacggtttagagccaccatagacctcaacaatcccatcttcgttggttttttccttcgaagacagaaactcaaagacctatggatttaatataagtacgagaaactaccgaagatttgtttcaaatgtggcctattcacacacgatcagagtacttgcttcaaagcacccacaatggttaaggatgaccaagggaacttttatcctttgtttggcatatggttgaagaaagatgcccaggagaagtccactttcacaattccattgcctaagtggtttcagggttgggtgatgcaaaaacgacttgggaaggatcccatgttgcgcaaccaagtgaaggtacagaaggcacttcgaaatggggaagaggcggagataagggagtgtagaatgcaattccctgggaagagacgaatcatctccgattcagatgaagagagtgatgcacccacggcggaggaggttattacccagctcccactcgtttatctcccaggtattggagaatttgctcctttcgacaataactccaaaaaggtctccgttagtgacctgattgaggcagctgcagagtacgcaagaaacacgtcaaagaacaaagcacaaaagaggaataaatttgaaa

SEQ ID NO: 5426 - DNA, 705 bp, Cannabis sativa
cagtacaaaatgaaaagcaaatagcagtaacagagaatcatacagtggccatgttaggatgggcataaactcccccaggtggatacatagccgggtaaggaactggggttccatatggtggcattagaggatgctgaacaatttgccaacacaagaacaaattaaaatccaccttcatgaggaatatgcatatactcaagtttaaatccaaaggaagtaaatataatcacctgacttccccacatataaggatgaggagtaggagaagcaactgttgaggcgaaaaagggcggtggagtagcaccagcagtataataagcctaaaattaaactatcttgtaagcaataacttcatcaatcttaatataaaaattcaagcaagtttaacatatacacaaaaacaatgtttgtatacaaaccatggaattcgaccaatcaggatatgaaggtgcagttggaatttcctgtatagaaatgcaaaagtacttaaataactcgaaaaagttagaaagagggagaaggaaaaagggtttactttattttttacctgagttgaagatgctggttttgaagccttagaagctgcgttctcttccccagttcccataatgcttaacaaaactcttgcttagttgaagaatctctaactgggtaacctttccaattgattaataatgatgatgcttatgatgtacctgatcctaa

SEQ ID NO: 5427 - DNA, 1125 bp, Cannabis sativa
gatatgtggaggggactttaatgaaatcattcatcaaaaagaaaagaaagggggggggggtcctaaaccagagtacttaatgaggaatttcagacaagccatctctaattgtttattaagcgaattgaaggcggaaggaggagagtatacttggtgtaatggaaggacttccaatcttatttttgaaaaattggatagaatcctttgtaatgaaatgtggaaaagaaagttcaaaaaaaaaataaggtgtctcttttaaattggtggaactcggatcatagacctattttaattcgtgcacaactagggtctcatgatttcgggttcactaaaaaatggggaagtagatttcattttgaacaagcatgggcggaaaatgaggagtgtcaaaaaattattacagaaacttgggggcagcaaagggtgttacagccggttcatacactatttcggcttctacatacgtgtgggactgagttaaataaatggaacaagaagcagaaattagaaatgatggcccgatcaaaggaaatcaaggagaagattgaaagaattgcagattctactaagattgaagattggatcaccaagaatcggcttgagaaagatcttaattgtgtggaggaaaaaagagaaatttattggaagcaacgaagtcgggcactttggttaaaacatggggatagaaacaccaagttttttcattatgaagcctccaatagacgaaagaaaaacacaatagagggcctatttgacgaacatcaccaatggaagaccaaagacgaagacttagagaacattgctatttcctacttcaaaaagctcttttcttcagcaaatgagggcgtggagattcaagagaccctttctcgttgtgttccaaaccgtgtgagcctagaagataatgtcatgttgatggaaccatttactagtgacgaagtgaaatctgccatgttccaaacccaccctttgaaggcccccaaaaaagatggtctaccgggtcttttcttccaaaagaactgggataccgtaggtaaagaggtaatttcagcttgtcttgacattcttaataacaatgccgattgcagccccattaacgaaactcttatttgcctcatcccaaaa

SEQ ID NO: 5428 - DNA, 1983 bp, Cannabis sativa
tgaattcatgacaagaatcatattaaaaaaaaatagctttgatccttgtgtctactcaaaaggtaagttacttctcttattgtatgtagatgacatatttttggttgggaaaaaggtgtctgaaatagaggttataaagggtcttttgagtagtggatttgaaataaaagatctgggtgatactaagaagatactaggtataaaaatcacaaggcagaggcctgagaagatctgtctatcacacaagacttatttagaaaaggttttgagaaaatttaacacgagcagtgccaaactagtcatcattcctttggttgctcactctaaattttcaaaagatcagtcatctcaaaaaaaaaagatgaacgaagggtcatgcaagtttagtgggaagtttaatgtatgccatggtttgtacagagttagatctgacacatgccatgagcatcacaagaaggtttatatctgaccctggaggacaacactaggaagctctaaaatggataatgagatgagttaaaggaacccttgacattagtttagcttactatgctagctgcaatccaaaaggggaagttgcagggtatgtggacagtgactatgctggatgcatcgacactaagagatcacttgcaggttatgttttcacagctcaaggtggatgcataaattggaaatcagccctacaaaaggtagtatctttgtcttcaattgatgcagagtctatgacagccactgaatcaatcaaagaagccatatgggtgaaaggcctagctaagaaacttggctttaatttagaaagtatcacggtgcattgtgacaaccaaagtgccctacatttgatgaaaaatcttatatttcatgagaagtcaaagcacattggcatcaagatacatttcattcgagacatcattggtagaaatgaagtgcaagtaagcaaagtgaacactaaggacaatccagttgacatgttcacgaaaggagttcctattagcaggcttagatattgcctaaagctactaagtattgacaccaacatttaatgcccttaggggctctttgaatagtctattcattactggtttcactaacttcaacaaaaggtggatttggtcatgttagttaaagttagttaaatctagctagtattcagttacaaccagtaattttcttaaagctttaatctcgacaattaagttagttaggacaatattgtctctctaacactcttggatattgcttttaaataccaacctcttttatagtcaaagataaccttttttagaacatcttcttcatcctcttcaaaattctctctgtatataaattaagctgtagaactcgatcttcttgtgagttcatagttgttagtcattattactgttgtatggtgtgtcttagtcattaagtgtcactttctatatttgtcattgttagttagttaacaaaccgttaactaactttttgtggtaatctcgggtgtagactaatgttttgtatactgtggtatgttctataaatacctcaattcatttctgttaatcattgtactaaacactattattctcattcaataaagatcattcattttagttatttctctctctctctctctctctctctctctcgtgtgtgtgtgtgtgtgtgttctggttcatgtgtgtgggaagagtctttggtttcctgctgaagttgaacaagatcaacatgctttgatctccaacaattactattgtaacaccaagtgtgaatcaataaaaattaaagtcaaaaattattttattcgagaagtggacagtttctattgccaagcaactgattaaatctcgttaaattggtgtgatttgatttctgttttgcatttatatcttttttattctcttgattaactagttcatgttattaattgtcatttcagttcttaattgtttccgaggtgattaaaacaccacattaacaataatttcatatcaattcttttaa

SEQ ID NO: 5429 - DNA, 5697 bp, Cannabis sativa
ttttctaactgtaaaattattagtagaacacaactttgagattcatcgatgatgaaggaatcatccaatacaaataaattcatgtataaatatgtatttgaatttaagatttaattttattttcgtttctcgcaaaaaaaaaataaatatacatataattttggtgatatgcaaccaagaaacactagactagccgattccctatagttttttattaggtactgaatttcatttttttgttttttttttttaaaaaaagccaagaaatactcaattacattttttttttctgaaaacaatgcagttacattatttagcctaaactactgctactatgcttttccaatttttcttaacaaaccatttatattgattttgtaatcaattattttaatatatctatgctttttacagatcaacgacttcaattttgtttttttctaattattttgttagactttttttttattattattattattatttaaattattttgttagactttgacaataaataatgtgtagaatggcttctgcctgttatttttaatcagaaaaagttcttgggtgacatgggtgtatccaaataatagtatagtacacaaggtgtggtgtaattaccaatataaatattatattttatataaatatttataggggtagacactagacagttggttgggagcgacctactttttgtatgagtttatcaagttaatatatgctttaaataagctcttgtgtttgacctgaaaacagatcaaatccttcctttaattgaagtagctataaattttcaatgacaacaaaatatggctttgattttcttcaccaaactacattaacacttctcttttatttatcttaaactatcaaaccatattaggtagagaaaaatgaggttgtttccttttgcctttttaaggcctcaaacttttttgtgttcaatgatcttgttcaactaatatattgatattgataatcattacaaaaaaaagttaatattagagatatatattttaatgattttttttttttttggtttttaaatatcaattttggtaatcactaaaaatttatattttgaataaaaaaaaagtatttagtatttgtttttgaacattcgctaatatatttttaattacaatttttgtttacagggactaaaaattaatttaattattattgtgaattaatacatttagcaaagtattgtattaggtaatagttctttttgacttctagtcacaattatattgcgttatgtaaaagaatgaagtggtatgtctaattttataatttatcatattactgtaacactaattttaaattattgactcaaaaattaggactaagatttcttagttacacccgctcgctagattgataagaatgaaatagttgttaagtaattatataagagatacaataaatttatagtagttaacttcttgtatcgcgacattaatggaactacgtctatttcgagtttatttctcacaagatggtttacagaaaaaggctaagtgtcaaagctccaatttatagaaagagaaactagagagagaagtcctgacctagtagattgttttctgaatgtaaaaaataagctaagagagctctccttttataggtgaaggagacccacaaaaataggaaaaaaaaaataaaaattagatgtttttgactgtatatgatgatccaacggtaaaaaattagcttcttatggtgatagtctttttttggagcccaatgggacccgctgcaggtaacacgaagcttatttttgtaactccctcgtgggtaaaatttggtgccaatagcttcagaatgcaattgaagtgtgagacatgacttgatagaaaattgaaatagctttgaaacgttagttgaatcgcatcaatcagatcaatattgagtgagttatgactattttactgaaggtagctcatgacctagtgcccaggttgacatccagtgcctaagttgacatcctatcgcccaggttgacatatgacgtcaacctagatgctgggtaagtgcaaaaacgtctaagggatgtactttaagatgcctaagtgatattttgacatcacctagtctgtttttgtgttctagcaaagttggtcaccagttctcaaagatgttgctattctgtagaaatgagagactcgaaactcttcattttcgagtgagtttctcatgttagaaatgagatatacaaagttgtgattttgacttctcggacttcatggatcttagttattgagaaaaactagatggatggtcaaaatggaatcaaaatgaaataagcagaacccagcgcactaggccatttgtcaacttgggcactgggtactcattccgagctcctaggattttgttttttatacttctaaggttcttgaacttgagaatgaggtctcctaccgcatttttgaccattccaaattcattggtcaaattagatttggcatttgagtgaatgaaactagcgcaccaggttgattgtcaacttgggcactaggccaccaggtcaacctaggcgttgggccctatttttaggggcttgagtttgtggttttctactcaagtttacttgaatcttcattacttctaataacaaaaacaaaatgctaggaacactttttcaagaacttgattggaaatagcccaggttaacaatatgtcaacctaggcactgggtcccagttatggccctttagaagttccgtttggtccctaaaaatagttaaatcttaatattttatgaaaatggagaagattcttggaagagttcctggaaaacatcatcgaaatcggcccacgttgataaaatgtcaacttaggcgatgcggttgcttttggcactcaggaaggcctgtttcttccctaaaagtactcatttccttgtttctgatgaatacaaagaaaatgtaaaattcagatcatagatctaatacttggaaggcgcctagattgacaaattgccaacttaggcgctagagtgcccaggcactggctgctttggttgctcaaaaatgaacttgcttcgaatctaattttgatgcctcaaatatatctgtgggatgtctagttgcggtcctaatgcaaagtttgacccatttgcactaagacagtcccagaaacttaaaccctagctgagaatgtcaacttgggtgctaggtgaaaccctaggtgccaaggttaactttcgggctataagttcgtgtaatttcagctcttggggattgaatttgattgcaccatgtcttcttggtgcggagtactaaaatatagtgagttggatcaagttattgaagtttgaacttccatcccggagcttccaaagtcaacctggacacagggttagggtcccctcccaagtcgactactgtgactcgggtctactcaactccgtgatgtcatccttctttccatgtgtcaaacattgacatccacatcagcagggaagttttcgagttaatattttcccccaagtcaactttacacttgtgtggagttgacttgatgatgtgaaccgagcccgtttcccttaaaactaccagatgggcatcaattttgatattcttaagaaatcgcttctattattcaagcattaccaataaaattaggacttagattccctttcttattccttgagaaatttcaaaaattaattaacaaaaaaaaaagaggaaaaacttatctttttttcacttatcccttatgtttttttttttttgaaaatttgaaattttcttatatttttttatggcattaggattaattggatttgaattctaatcctatttgatagtgcaatttgaaaattagcgagagaaagaagcagagaaaagacttttgatcttttgcttatcatttatcttttccttttaaatctctaattttttcttaatcttagtagcattagaaattgatgttaccttttaaatttgaattcctattcctatttctataagaaatttagcttgaaaagagaaggacaaagatatatttatatcttttacttatcatttacctcttcctttaaagctttaaatttaaaagcctctcagttgctctacgattaagaaattgaagccgcttataaataagagagctttcaatcaaatttttcattcctcccatttttatctccactcccaagccttataaaaagtcttgaaatttcatcttcaggaagccttcaagtgttcttcatcctccaaggtagacatctatccttatgcaagtttgtctttttgggttaactaattatttaattaaattaatcagataaatatttgattttgaaaagttgttattgaatttcaaagttgttgaaatattctcttaagtagttgagagattccttcataaatatcagtaatcgaattcagttatagatatttatttattttaataattaaatataatttaattaaagggtttttgactactataaatagaagtccaatttaagaaattagtgaatgattttcaatagctatttttgaaatacaaagaagagaaaaagaaaataattttctctgtcaactatttttgctcatgtgttgagaaatcaacaagaacaatattatacactttatattaataactcacactattccttgtgtgtgatggattgatttggaagaactagtgtgaatttaattgtatatcatcctcatcatctaaattaagggatacaacatatgagaaatttcaaagataccctgataatattcaatgggtatatgttctaaacttattattttatattttaatttaatgtaccaacatctggagatccattgagatatggtacaatgataatcagtaatacagaatccctttgatgtgtatttgatttagtaacataaaactaatgattagtatcagagcaattccatgaatgtgtatacattaaatgttttgtgggttttattcatttatgtatatgtgatatgtatgtgaatggatgattatattattgtgaatgtatgagaggtgatgaatcattaattatatggtataattaggtgtgggttttattgttattatttttcatttttattgaaaataatgtaagtcattatgtggcataggaatttttatgtaattttattttaagaaattaattttacgtaaaaattatacaatgtaatatttattgcatgtgagcttgatttttaaacttgaattccgaccatgcaccataaagatcacgaccacatgcatgtgagctcatgctcatggagggaccccgaccatgcaaagtttacgtcaaaacatgcacgagattcatgcaaggactattgtccttcctagtgtgaggttgaaaagggaggagaccctttcaggtctaaggcaatggtcggtccatgtggccatggaccatggtggttgaaccaccattagaactaggaccctagtggtctgagccaccctccctaggcctgaatagcttttggttgttccctctcgactctcactagctcgacgtgagctgggttcttcgaactcgatgagacactaatgacccaatcgggtcttgggtctcttgattctcgactgttcgtccttgtgcaaattgtgtgcggctggaacctatggtggtcggtcatggccactgtggccatggtggctcccaggagttgctagccacgttgaggccatggtggctcctaggag

SEQ ID NO: 5430 - DNA, 2755 bp, Cannabis sativa
tcttcataaaatttataaaggaaaatcaagaatttgtgttatctttatataatgatcaatattcacgagtattactaataatctcattttatattgaatttacagaaaaaattatataaattattagtaaataaacatggccgaacagttaacccagtcggctctcaagaagacgattctgttcatcaggtgattaattaataaaagtatttaaggcttaaacctcgatcatcaaaacgtgcatatatatatatatatatatcttatttatataaattttaatattactttaattgtacaacatttttctccatgtattaaatatatggcccttattgtcgtagatatagatatatttatatatattgttaattataatatatatacttcgctttcaaaagtactaaattatctttaaggtattacctaaaataattaatcacatatttacatgactaacaattatagatattatagatattattccttcaaaaaaaaaaaaaaaaacaattatagatattatataatataaataaattgatggaatatgattgaacatgagtttaattaataattaattattattaatgttgtatatagtgggaataataaggaaattagtggggaagatgtgggagctgcagaaaccttaaatgatgagagtaataaggtgttgatgatgaagagtgaagaagtgcaagctggacaggatcccaatgcaagctttgatcctgttaggagaattgcctgtggatttaatcactttctcatccataagttctagtaagatataataatatttatacatacccacaagttttatggtgctagctagctcttaaaaatgagtttattatatgcacttctttatgtttttgtcatcctcatagttttaattatataattttttgtatgtatagttatatttttagatattttataaatttttaaaaaaattaaaataatttaatgtatcgaaaataaagtttagatgcatatgcgtgttttttattttatacgacagtttgaatcctactatttattataaaattatttaatttttttttttaaattttattacatatcttaaataattacaatatatattatcaaataaaaattgaaattataatcttttgaatgttaaaaattaaaaataatgcatcaatacatctattttcaaataatattttttcttaattaatattttggactctgacttcacctagaccttggaatctgaacggaccctagccccaactttggacctggacccggccttcgattgtagcttcgaacttgaacccaacttaaataaaatcaacaaatgaaaatgaaaataaaatttattgaatacacttttattttctgtttttaaaattaaaaaaataagtagttataaaacacatttttatttttcaaaatcaaaatttaaaaataaaagtattaccaaacgatacataagaatattataacttagtatatatataattatactaatgtaatttgttatgcatatatgggatgattttgcagcaggtatcctgattattttcgtcaacttgccgaagcacaacatcccaaggtaagttcgtgggtagacctaattaactaaataacatttttctttgtttaacagaagagaaaaaaaaaatacaagtgagaaagatgtattttttttttttttacaaaatagaacaaaattttttttaaaaaaattacaaaagtatttcaacacaatttatattcattttttactctttattttttttttatttacaaaaatacttcttaatatatataagtcaaaataataaattacattttagttgttttatagtttatttatagatatattatagttgttatatagttattttttagctatttttatagtttatttacaattgtcatgaaattaatttctatttgtttttaatttttttcttcttttttgttaaaaaaaagtgtgtttttgtaattttaaaactttaaaaaagtatttttataaattaaaattttaaattgtaatattgtaatattgtaagcaaaatttaaaaaattgtgtttttaaaaattataaaaaaaaactactatttttatactcgtgatgtaagaccagtattaagtcaacataacattaatttttttattaaaactatataaaaaattatttaaatgactaaataaaatattaaaaaaattatttagtaaaattattaattagtgacagttgagtaaataaaaaaaaaaataatattaattgtagtataaatttggcaaatattatattttatgacaaatttaactaaatttttagcatgtattaaatttggcacaccttttacactttggaacttcaatttttttaagatgagccaaaatatagtaatacaatatttttataatcctccaatagagatattacatctgcgtatacgtatgtatatatacataaatgtattatatattttgccaaacacgatataaataaaagaaaatgagagtctatacataaatgatatttaatttcctctaatgtgtttcttatttgattatgaaagaaatagatattttatatttattaataattgattaattaatcctaattgtacgttgttaaatgaacagtttcttgtatttgcttgttctgattctcgagtgagtccttctaatattttgaatttccaacccggagaagctttcatggcccgcaacattgctaacttgattccaacttttgacaaggtaaata

SEQ ID NO: 5431 - DNA, 786 bp, Cannabis sativa
aagatacatacctccaagagctcagtgtacttcccaaccacttcttcacaactagatttatgaagaaactgtagctcatggacttggcaacaaaatagcacacataaccataataaccagagagagaacacgtgaagggaaacctgggagaataaagacatgataattagtccagtacaaagtatgatttggtggcacactctcattggtgggacaagaggaacacttacattttaaaaaaacaacagcaaccaagaacctctgtcaaactgccataaacatctagtatggcctcatcttaagattctaagattaaaaacaaaaataacaattagctcagagcagctgaaatatacatctacaggaaagaaagatattatgtaaatgtgctaaccattgcaaaagaactgaaagctgagcaacttcaagaaatttcatatgtgtataaactacctggaccacaggatggaaagcacagatgtcagtaggcgcaaatgaagcatgatgcataaatggaaaaggaggattaacttgatattctgctaaataaaggagtatcttaggaaattgaattactgttcaaaacatttgcccctatatcagtttataagatctgagtaaggatgtgcactacactatggacatcaaatttcagcaaccgtgatcagtagtgttatatattgttactggtagaccaaaacatattattaaatacttccattaacataacaaatctaacaaataaactctcattccttccatcatgtggtggctttgggtgaggtt

SEQ ID NO: 5432 - DNA, 700 bp, Cannabis sativa
aaaattaataatatttaattattataataatttattattaatttttaaagtttaaattcaattattgattatttcatatttaaattatggttagattttaaaattttgttaatttcttaaaaatttacatattctctaataataagattatatattttaatattagatatattttaaattaaaagattgttttatatgataaattataaattatcttatgataaattaaataacaatacatttaaaattatcttacatattttcatagatatcctaatcataaagttttttttgaaattcataaattagttattgtatgatataatttactatttataaatgataagttaaaaaaaataatatttattataatattatatcattttacttattagaaatttataaataatactatatatatttaaataatttagatatttttgtgaaaatttaaaaaataattaaaatgagatattttagaatataatttcgaaaattattatttatttattgttttattttaatttaagacattattagaggaaattagagggaaaattaattatttacaaacaaagttatggtttacttaccggttaagggaaaaaagaaaaaataaaaattagttgttataataaaagggatttagatgctaattgaaaaaaaataaaacatatattttattaaacttatatgaaga

SEQ ID NO: 5433 - DNA, 609 bp, Cannabis sativa
gcttctaatctaagtcccagtagtcctgatgagtctgcagatatgataaatggagatgaaaaaagattgattcacacaggtccaaatcctctacacaactagtaagggttttttttttcattttttttcaaaaaaaaaaatgtaacattatgtttttttttttcataaattaaaattagaaaaaggagatcgagagcatagctgtagccttttcagagagatgggtttggagagagagagaggttattataacatcaattcaatatggtaagaaaagggaaatacggggaggctagtgttaatgctcttgtttcttttgcagcctttttttcgatgtataactaatgtactatgagcttaatattattattattattattattattatctcccataattaattcattgtgtgtttgaatttataaattattattgtatttattcttcttcatttttggggggccatattaatgcaagttgtacaatattattataactgggctatttgaacccagtaataatccttccttagttaaattaaatcacattatatgtaagatatttagttaattttcaagagaatcacaatatgcatatgtatatatatat

SEQ ID NO: 5434 - DNA, 524 bp, Cannabis sativa
caaattttgtgtgataatacctattaatataaataaaaaatatcttttttctttcacttatttacttttgttgaaaaaaaaacaattaattgaaatgattgtatatatgttgatgataattttagtagagcataaagctttaaaaaatatctgaaattaacgaagaagaaaaagtgaaaacaaaaataatcttactttgctttggtgttaaaataaagagataaaaaaaagcagaagagactaagatttggcacatgtatgaatataactatgatgagaacaacattttaatttgttcaactcgaactggtcctagcaatataattattgttcaaaacaaaagaatatattacaatactatatattgaatattccaaccaaaaaagaaaagataaagcttgaagataaatctacctactaacagtaacttatcattttcatataataatcatttctttattaaagaataatagtctgtgttgtccccattcacttgtacaagtacaacacactaataacgcatg

SEQ ID NO: 5435 - DNA, 843 bp, Cannabis sativa
atttactaacatagtcttatgattcgagaccatttactataaataatttctcattagaaaaagagaaagtcgagtttctcgaaattttttccatatagagaatttcttctcttgcaagaaaagtttcttaaacaattgcaaccaactgagaatagaacttttcataaaagaaatgaagtaattaggtcatcaatttatcacaataaaattaatttaattgctcaataaaaatgtatattaattaaaaaatatattttattaactaatttactaaaaaaaaattaacatcgagggtgtaaaagtttcgaccacaccaacttccaaacatgatcgttcgcataactgaagcgatgttgttgttcctacctttagcttatcttagtttaaggatttattttttgagagattagtttaagaaattcattgccctagatcttatagatggtgtagtatattatttagctaaatacactattttattagtgttacttagtactgtttggtggtctgattttcctatttgtatgcatattcttgttttagctgagattaataatgttctgcttccttcatttcttcaaaatggtttttctgaaaggtaggttcttttgggagtttttcttcaataataataataataataataataataataataaattagtgaattgattttccaataatattaatagagatgttgagcaaagtaagaaaagtgataatgaatatatcattgggatccctatgattcagattgataacgaaaacacaagaaaagaaaataaattaattagtgctgtcatgtaattcgacacgattgatcaatatatagtctgaatatat

SEQ ID NO: 5436 - DNA, 629 bp, Cannabis sativa
ggtgagagtactaataattagtactattttctatttttggttgccaatgttttgttgtcattggggtttggtagtcatttttagaaactaattaaacgtgttaagtacaaaagattgtgtggggaagaactaaatataaagacaattacattattcttaatttttgttaggtatgaggtttcatcttactacctgaaaaataacaacaacaactagttaccaaataccatttattagaggagaggagcattgttatgggtcaccaaagtgtctagtacctttatgatataataagattataattaaatagcgattttctataatctgtattaaattaaaataagtgggagccgatatcaaattgcactaatagcaatatattacacttcataagggtattaggcacaatcagtattgctattggacactactgatgcctaacaccttctataagtggtgttccacgattagtattatcgatattctctaaaagttagttttttagttatatgagacttaatatttaattacaccaataataatatgacaccgaagaaagcactagacactaataattctttttagcaattctctaagcacaatgagtcacctttaacatttctcttatt

SEQ ID NO: 5437 - DNA, 1966 bp, Cannabis sativa
aaaagaaaagaagagaggatacgaacttgattactaataaataaagcattctaatagctaatgttagctcgataactttctctaaatgaaacgtatattaatttggaattaaatattaaatttactattatgtttatatgcaagtttaatatcattaattgaaaaataaaatatcaaatatatagttatttataaaattatttatttattttatgataaaaataatattttctataaaaggataatttagtcaaattaaatcatcatgattatttttctgatgatgatgatgtaaataaaataaaataattttgattctgtttccaattaatttagtttagtaaatgtgctattagtgtattaattttatttgctatgttcttttttttttttaataatagtgttgttacacattacattgttattgttatggtagtagaacattattcattaatggtagggaaatctcaattggctcaaagtatatttgtgttagtagctagcatgattatcttggtctgatcaaattaggagatttttgaatttttattggcctcatagtttatggtgcgattatttgttatgattgttatcgctatggttggttgttttgttatttccttttattctagattgaataacaaggttcttattacccaaattttattgaagatctttggctgatacattaataggtgtaatttgttgtatgtttatttagattggagatattctagcattcttcacactttttcaatgcttcaacgaatgacttatttgtattttagttaaaggtgctattaaggttttcatttttatttttataaatcatatgatttgcctatcttgtcactacaagaaaaaacatttacaataacacttaaaaagtgtaattaaatgtattttataacactttacaattgtcaaaacaacccctgtaattaaaagtattaacatttaattacattttttacctgttattaaatagcatgttataatattattttagtgttatatattataaatagttagcattaattaagtgttatagttctttatgttacatttattaataacattttcaaaatgtaatcttataagttttaattacattattattatgttatatatgaagaaatattacatagtactattttttaatgttttaatcccttatgttatttgttattcatttcaataatattttcaaaatgtaattatatagtttttaattatattttaatgtcattataatttcttaataataactatttatgaatgttacaatttcttaatgataaatgttaactttcgtattttttttttaacatttttatagtgaaattattaaatcaaataatgtctattatttgtcacaaataaaatccaatataattacaattttataaaatctaatgtaattcgtatattaaccaaaatatttaatgagtccaataaaaagtataataagggattatcttagggaaactagctataagagcagttcttgcacagtagttcaataagtgatccagctaataatgctagagaccttatatatcaccaagttcttgtctacacgtggggtgtgacactggagaagcaatattttgctaaatatttaacaaaactctgaacaaaatatgacaatccacaataaacacttgaaaccagtttctaatacatcaaaaattcaaagtagttagtttagaactagttcaaatagattgcaagatcatccattttatagactattgtgtgacatagatgccctcgatcgccgaacaatttgggtttgtgttaacttggaactaattcccatagttttttgtttattataagcaattgcaaatgatatcatacataatataacaaccttacaaataatgcattctctagtaatatatattattcaaattacttgagtcttcttcgttttctatatttttaataaaataaagaaagt

SEQ ID NO: 5438 - DNA, 575 bp, Cannabis sativa
ctgaagaggaagtcttgaaagctctcctcgaaatgggggcggataaagcgcctggaccggacggcctacctgctgccttttatcgattgcactgggatactattaaagaggatcttatggctatggtgcgccatttcttcttgactgctaaattaccggggttcataaatgacactaatcttgttctcatcccgaagaaagagaacccggttctagtgaacgattttcgtcctatagctctgtgcaatgtagtgtataaatgcatctctaaaatccttgctctgagactgagacctattttgccaattttgatctcccctgcacaaactgctttcattaaagggagatcgatttcggagaatattgcgatggcccatgaggttgtacattccatggccaagaggaaaggatctagaggatttatgatgattaaacttgatatggagaaagcctacgataagatggattgggattttgtgcttgaggctcttcaatttcatggattaaaggaccctcttttgggttggattagaagctgtattcacttggagagactaaatttgttgataaatggg

SEQ ID NO: 5439 - DNA, 603 bp, Cannabis sativa
tgagcagacagattaaggaaagtaaaaaaacatgatcttaacacagcacaaactattttttggactggacaacgcatatttaataaagccatatgtatatatatatatatttaaaaaaaaaaccaccaaaaagttcacctgaattgaaaaaaacacacaccactgtccagggacttccatgaagtttcaaagtaactaatgtagaaaatcagataaatcatgagatgttaataccctatataatttttatatttaaacttaaatcattattagggctagttgtatgatataagtctactggatgttttccttatttttggcttatctttcttgtaggttctaatcaattcagggattgttatctaacactaggtctataaatagagttgtaatcctgttagagataaaacaataaagtccaatctttcaagcagccttcctgtttcgtttacaactaataactctaagagaaatttgtcctaaaaagaagcacatgaaacttctattctttataattgcttaagaaaggtgggtgattattgtctaaaacaaacaaatgcaattaaactgtaacaggtgaattaaactctaaagactcacagc

SEQ ID NO: 5440 - DNA, 1407 bp, Cannabis sativa
  modified_base (1085)..(1093): a, c, t, g, unknown or other
aaaaaaaaaaaaaaactagttttctattaacataggaacataaatctaacaaaaatgaaactattataaacatctaatcgctcatatgtaatcatttgtctttgccatttccctttgcaatatcctttacttaaacctttgccttatcatttgtattatcctttaatttttgcccccttttcaacacttcatcatttgttatataaccaccaatttatttccttctagcatgaataaacaaacagacaacaagatcatctcgatatcttgccaccatatctgccatcttagatgaaatgtcaccaatttttctatgaataaataagtcagcaaacttaatgacaaacactccactatcactgcatgaaacaaaacaataaaataataggaaatatgaagtccatgaaccggtttctatacaaaacaataccataactgacacatattaaaaatagagcaaacaataaaactggtttttataaaaaaaaaaaaatatatattaagatcaaaacaggacaaactacttattgacatgacttggaagtccttcaataaacttgtaattcaatgattctctttttctaactgaatctggaccttcaaccaaattaagatcatctctagaagaataaacatcaagatactccaaataaaacgacagcatagtagaataagctttgacatgatccaataaacgtttcttattgacagcaccaaacatggtgttatatatgttcaatatcctctccttgatatcaaaatgaaccaatatctaatatttttgcttttgaatattcacatatataagaagaacatggttagtaaacacccatggagtattgcaaaacatatactcaccaataatgtatgtaggaatgacattatcaaaatcaatcttagaaggatcaaaacccgattttaagaaacgattgtatgaattctaaatgacttgatcaaacaaacaattagtagtggtaattcttttgttcaaagtatcatcttgctttatcttattccttaagtaatagaataccacatctaaatgctacaaatcataaagcaaacagaaaaaaaaaaaaaacaannnnnnnnncaaaaacaaaacaaaacaaaacatgtatatgaaactggttttggcacaaattgagaataaagatataaactaaaaaaactttaaactttttaaaaataataaacaaaaaacaaaagtataaaaaaccggtttcttacaatgtcgttcagaaatttaccacaacaatgaagctgatagaaccacatcttttccgatattttgatgaaagaaaaattcataggtggtgataacaagttcaacatgcgagtacttcttcacattgctcaaaacaataaaaatcacaaataaagttaaaaaccaaaaaaaaaaaaaaa

SEQ ID NO: 5441 - DNA, 817 bp, Cannabis sativa
aatagcttccgctggaattgatatcattatatataaataaataaactacataagagtaagagaggaggagaaaagattattatgtctaagattaatatatatctatagagagagaaattatacgtaccttctgtttgatctgtttctttgtgagagagaggcattaacatgtaagcctctacggcatttatcagcggcggtagagttgaatcttcagtactattgaaccaaacactaaacactccttcactgtcagggttcatgcctttggtaagaggatataccgtagttgccgtcaagtacttgggaaccaatttcttgataaaacgaacattgttaatgtatatattaaactctctagtttcatttggttggagctttttaagttccgcaaagtgcatgaagaagtaatattcggtggtagtgttagcgccactccatgtgacaaacatgttagtattgtttgaggtagtgtatgcagtgttcattatggtgaaaggtacttcgtaatcgttctttgtgatagagtttacttcagttagagaagtgtttatgaatggttgccatttacttgtcccaaggggctgccacaaccgatcgtaagggtcgtccttgtacctatatatatatatatttaaatacgtaccaatttatatgaatagccaactaaatttaagatcacaatgatatattatccatacagtagtatatataggagggattaatgagagacctatatgtttcttcatcatcagttgatgatgatgaaaagtcaaggcgaccatcgagttgtaatgatgagccttctggtgcttta

SEQ ID NO: 5442 - DNA, 855 bp, Cannabis sativa
ttaacttcaattgagctattgtaaaaatcccagatgatgtttttttatgaaattttgatataaagttgttgaattaaaatgtttgtcatgtgtttgacaaaatgtctcaaacattgataatgttatattgttacttttttttaggttgattacattttgggagacaatcctagagctacaagctacatggttgggtatggaaacaactaccctcgtcaagttcaccacaggggttcttccattgtttcctacaaggctaatcctaagtttgttgcttgccgagagggttatgctacttggtttagccgtaaagctagtgaccccaatctacttactggtgccattgttggtggccctgatgcttatgacaactttgctgatgagagagataactatgagcagactgagcctgctacttacaacaatgctcctcttcttggtattttggctagactcagcagtggtagcagaggttataaccaactccttccaggtaactattttcttatctcattggtaaatctgatcttatgtctcttgtttttaagtattagttttgctaatttctgttttgttgttttatagttgttgttccagctccaaaggttgttaccccacaaaagccaattgcagttaacccacaaaaacctgttccaaggcctaaaacaagcccagcagcaactccagcaggtaatgtattgaatggtatttgtttgttgtgtcattagaataatgagatgatcaaaatctgactaaggaacttgttttgcagtttcaacaacctctggcccaatttcagttcaacaaaagatgacaacttcatggatttcaaatgggaaaacttactacagatac

SEQ ID NO: 5443 - DNA, 645 bp, Cannabis sativa
agctccatctatcattggtttcaactatttcagcaacttctaatattcctttcgacctcccagattcggactaccatagtaaagcgccatgtgaaccctaaataattttccacaatagcatctatatgtgaggtcgtgaatgatttaatctggacatcgaaagaatatctccaaagcatagctaaaccactatttttacccttggcatccactgtaaaacagccagcataacctagttgaacttgaactaactccactgcaacactagttaaatacatttctgacaaaaaatcatcttgggatgattatctttgacatgggacctaaacatagttaatgtccacgggttcccaagccctttaaaattccaaaacatggcattcattgcgctttgcgacccaacttctatgggttcgtcgcttcctcattctcaccatggttcaaattcatcattacagaaatgctccttggaccttcctcacaccacatctcaggttaaactatctcttcccactttcccccatagctacatgtgaaggaatccccttacgcttgtgtcgttatggaaccacacacttttgttgtttcattctttctccccgacttggatcacaactgattgccattggaacttcaaccaaaatt

SEQ ID NO: 5444 - DNA, 901 bp, Cannabis sativa
aataatggaagttgattggttcaattacaattttacatgcatagaattattacaggaatacagtcaattagatagtacatatcaattattgttttcctttttgaagaaaaaaataatcaaacatttttaacaaggccagtttggtaacttgcatgtttgaggagattctttttttattatttatttagctctaatataaaaactaaaagacaaaagtttgtgtatagaaagttaaataaattagcataaaacaatacgacgcaaatatgtataatattttaacttattacaaagggaattctttagttgatgaattgaattttccattgtaataagaatatttaattataaagcgattaaccaaagcaaatagttgctatgaaagtggataagaaagagtggtggatctagctggctttattagccgacctagctagttgagtacaaatgtgaatccatattccatgaagctcaattctttcttttacacattaaaatatcacataataataataattattttttcaatgtcttattgtaattggtgttattaagtatcagattttatatattttaaaaaattaatttaaaaaaaaaattactaaccaattatgggacgctatctataaaaatactccactattaaaactcaataacaatattaaaataatggtttaagaatcttttaagttttaaccctataaaatcttcaaccgatggaggatcctacacccaataaattaaaattatatatatgttgtatacattattaatcattgaataatataattttcttggcaacgcatgatttatttgttgaaattgtgatgagataataagtgatagctagtaatataacatgcatggactttctaataatcttgatcagtacttgaaaaca

SEQ ID NO: 5445 - DNA, 821 bp, Cannabis sativa
tgaatataccccagatggttccatattccaataccatctatcgccaacaatcgacatactcagagggatattaacaatgatactactatcccttggattgaatatatcataaatgagctcctcatcccattctcttaaccccggtttcattaagaaaatatagttattttgatcaatataaattttattttattatattttcatactaaattaaacacaataattttaattacaatattcattctaacaacaaaccaaacattataatcaatttctatcactatatttattccatttcattactattattactaatttactattaccattttattacatcaaatcaaacaccacagtaattcttcccgctccaaatagcatcccgattcccgatccatatgtacattacacagcttgccacgtcaaaaggagacctttcacattttttcactgtttttccatgaaacgttttcacttccttctcagtctgtgtttaccaagttatgttcttgctgctttatctttctaagtgagagtgagaaagagataaaaatggctttaaggaaattaatttctacgtacaaacatatctttattcttctgggtatgtaaactaaatctcatctctcatcatgtataatatataacgtctatttctctctttttgtaatcaatatattctcttttgaatgtatatatatatatatatgtatatctactccattaattgattatttatgctcgttttgactctgttggttgtgcatgtcagcttcatctcagagttttggccacggccgagggttgtcgactttggccag

SEQ ID NO: 5446 - DNA, 600 bp, Cannabis sativa
tcaagagttttcagctcacaccatatatactatagaattcttccatctcaaacaataaacatgagcagacaatggctccgtgtagagtctagcttgggtttttgagctgagggtttcttgtatacccttccttttctttgtgtagtaaactgggctttcatttgcctacagaccttttactgatcctttcgttttcctttgctcttttctctgtgaaaaatcgcttttggcctgggggagtggagtgtttgttgctctgcagcatggaaaaagctctgactaaggatgttatagtaaaatcggtggatgagaatatgaacaacactctggtgcgtgacagtgccctggagttagaaatgctggagctttttgaagatatcaccttggaggatgttgtggctaacaagtcttgtgtaggtaaagtcataaggtgtaaagatatgccagcttctgtggagaattaaaaagtgtgatgagggggtccttcgcttcttctttgaacacgaggaggactgttcttttgtcttacagaagaggcattggcttgtgaatggcgtgttgctaaacatcaagccttggccagtagaaggggaggttcga

SEQ ID NO: 5447 - DNA, 2787 bp, Cannabis sativa
taaaccaagctatctcattaataagttcaggaaggcccttgattactgtcaattaagggaggtggagtttgagggcagtgactatacgtggtgtaatgggagaaagaaaaatctgatttttgaaaggttggatcgggtgtgtggaaactcggactggtttgagatgttctctcaagcaattgtgaaacatcttgatcgcattaactcggaccattgcccgcttctcattacgaggaaggatccattgtccaaaatgcaaagcacggttagatggcgaatgtacggagattgtgcaatcggcttggctaaggaaagacccgattgagcagcctaaggatctaaagaactggcttagtgagtgtggggttgctcttcaaaaatggaatcaagttaaaaagagagagatgacaaagcaattgaatgaatacaaggaaaaaattgcccaactaacatgcagaaccgagagggaagattggcaacaactccgggatttggaatataaacagaatattttgctcgataaggaagagaaattttggaagcaaaggagtagggcggtttggctacaggaaggcgacaagaacaccaagttttttcatcggaaagctagtaatagaaaggcaaaaaaaacaataaaggggctggttaatgagcagctgcaatgggtcacagggaatcggcatatgggcagggtggcttgtgattatttcaaaaaattattcacctccactcctgctactgaggcagatttaaaagattttcaaaggattgtcccccacagaatttcacgattaaccaatgaacagctcctagatcctttcacaacggaggatatcttcaaggcaatgcgagatatacacccccaaaaggccccaggtagtgatggtttgcccggtcttttctataggaagtattggtctactatcggtctcgagataacaaaagtttgtttaggaattctaaatgaagacatgccagtgaaggaaatcaatgatactttaatttgccttatacctaaaactcctaaggccacaaagatgacagatttcagaccaataagtctttgtaatgctgtgtacaaaatagtggccaagtgtctagctggaagaatgaaaaacagccttcatcaagtaatatcggaggagcaaagcgcttttgtgggaggtagacttatccaagataatgctataattgggttcgaaagcctacactgcatgaagacaaaaaggtttgggaatgacaagaaaatgactctgaaattggatatgtccaaagcctacgatagagttgagtggaatttcttaatcactatgatgagggggctcgggtatgaggagaaatggattgaaaaaataatgagatgtgtaacaagtgtctcgttctcggttcttatcaatggtgagaagcttggatttttccaaccaacccggggtcttcgccaaggtgattcattatctccttacctcttcttactttattcggagggattatcatgccttatacatgaagccgagagagctggtcagattaatggggttcaattcggaaaagatagagtcaaagtttctcacttattctttgccgacgacagctttgcgttcctcaatgcaaaggaaagtgaatgtgatactatgaagctagttttgcaaaggtactctagactttcggggcaacaaattaatctggataaatctgaaatatgtatggggaaaaggatcactccaatccagggacatgagcttgctaatagattgggagtgcgccttgtctctaaccatgcgaagtacttggggctccctagttttgttgggaaaaggaagaaggaggtctttgatgtcatcaaggacaaagtttggaataaacttaaagggtggaagagtttgatgttttctcaagcaggccgggaaatacttataaaagctattgtgcaagcaatttcgagttacacaatgagttgctttcgtcttcccaagaagctcatcaacaatctccaaactttggcagccaacttttacaaagaaaaataagaaacttcattgggggtcttgggctaaactttgcaagcctaaagaagaaggaggtctcggctttaggagcctaactgagtttaatcaagcacttttggccaaacaaggatggagacttatccaaaatccttactctttattggctcgggtattaaagaatagctattatcccactacgccattcatggaggctggctgtccctcgggttcttcttgtatttggaaaggtatttgttgggggaggaggatcttgaaggaaggggctcgctggaaggttggaaatggaagagagataagagtttgggaagacaaatggctaccacgaccggatgggactatgctaactcaaaatcccggagtcgaacctaatacaaaaatcaaccaattcatcacaaccgaagggcagtggaacatggcaaaagtcactcagcattttcatccgaatgatgttccttggatacaaggaatttcaattaacatgtatgttgaggactcgttgcattggccctatactccaaatggccaatacatggtaaaaagtggttatagagttggtagggaaatgaatttacatcctcctaggtgctctaacatggaagaaattcacaaatggtggaagatgatatggagcatgaagctgccccctcggatgaaattttttagctggagagtttgcaataactggctgccaacaaaaacaaatcttcttcatagaggaatggaggtaaatccgaattgtgaggcttgtgagaatgatgct

SEQ ID NO: 5448 - DNA, 956 bp, Cannabis sativa
actactcacttttttgtttgactgagcggcttggagaaatctcctcaagaaaacaaatggtgtagggacagaaaagttgaattgtaactcattcacaatcaatttctcctgttcataaaagaaaaaagtaagagcattagtggacaacattctttgcaaatgaagagataaataaatagttaatagtagtgatttactaccatgtctagaacatcttgctttgtgtatgccttgtcagttatgagcacaaaatcctcaattacagggactgaaacctcctcatacttgcatgccaataacattgctgttaccccaactaactgaagcttctttctgatcactatttgtcgttctaagaacctatcaatcagattgacagtcaggaaaagtgtctcttccatgagttcaaacttgtggtgaacctgtttataaaaataaacaagttaagctctattttcacattctcagagatacataaaaagcaaacaatatattataaatatatatacctcaataagccagtcaatgagtatggctctcattttatcattaatgtcaggttgatgagccatgtaatttggagagacacagcttaaacactgcacaatatatatgatatcattcaataaagcaaatagtttgacacatggacaatcatttacaaagcattttgatcacattctttcaattttgaaaaatccattgacaataactactgactatatattaattgaattatataatggcattcataataaaataagtttatgaaagagaaagcttatcaaatagaggaaatcccatagcagccaaaacacattaaaatttgacacaagtttatggcacatgatttagatttcagatataaattagtcaattgaaactgcatatgcttccaaaaacaataaatgagactcgtaatgatctcatgtgttgaaattggatgcgtttccaaa

SEQ ID NO: 5449 - DNA, 1344 bp, Cannabis sativa
agacctaaatctgaattaattgtcaattcaatcattcttaacccttttcatttcctggttcaacactttacttaagtttcatgatttattttgtttaatttggtattaccatggagaacccttaagtatggagtcagatgtagctgttgatgatgaagtggatgagatggcacatgtgattgttgatattttggcagaagatgatgcacatggcgggtctcaaaatacgccatctaggacatttaatgacccacccttaaatgatgagtgtaaaaatgataagtatgatcatttattgaaggacatgtcaagtgagttgttccttggttgtaaaaagtactcaactttgaacttcttagtgaatttgatgcacttgaaagttattaataagtgtaccaaccattattttgatggtctactcgccttattaattaatgcaatgcttgaggggataattttacctaattcccactatgagttgaaagctaagttgtccaatattggattaggttattaatctattgatgtttgcaaacatgattgtgcactattttggaaagagaacgtcgctttcgaattttatctggtatgtggtgaatgtcggtagaaagataatggtggcacagggaagaaagttgctcacaagaatttgtgttactttccactgacattgagattaaaaaggatgtacagctctaggcatactgtagaggatatgagggggcactattgcaaaaggccgcaagaagatggtgtgatgagacaccctactgacggtatgtcttggaaattttttgatgagttgtacccagactctgcagcagaacatagaaatgtaagtttagggttagcaacagatggtttcaatccatttagaaacatgagcaactcttatagcatgtggcctgttatctttgttccttacaacttgccaccatggaagtgtatgaaactgtaatcattgttattgtctctactgattttgggtcccaattcacttggcatagatattgatgtctttatgaggcctttaattgaggagttacaaatgctgtgggagaacagtgttgaaactcgagatgcagacaataattccttgttcactatgcgagcatcaattttatggactattaatgattatccaacatacactatgatgtctggttggaggacaaaggggtataaggcatgccctacctgcaacgaggaaactccttccattccaattcgtaataaaatttcatatattcggcattaaagatttctcaatatgaatcatgaatggaggagtaaacgtgcattgtttgatggtaataaggaacttcaacttacccctaaggagta

SEQ ID NO: 5450 - DNA, 665 bp, Cannabis sativa
tcattataaaaagcaatctagttgatgagaagaggttgttcgagagagtttatgtatgccttaaagcttgtaaggatggattcaaagcatgcaggccactcattggtttagatggatgcttcctaaaaggatactgtaaaggtatgttacttgttgctattggtattgatgctgataactctatgttcccaattgcatatgctatttgcgagaaagagaatactgatacttggacatggtttttaaacttattgaaagaagatttagaagttaccaatcctacaaatatcactatgattagtgatagacaaaaaggtttagagaatgctcaaggctctacatttgagggtgcagagataagattttgtgtgcgtcatttacatgccaatttcaaaaaagattttccaggtcttttgttgaaacaaaagttgtgggcatgtgcaagagctacaacactagaggagttcaaaagaaaaatggctgaactaaaggaggccaatgaaaaggcttatgattggttgatgaagaaaaacccaagtgaatggagtaagagtcatttcaaatttaatgttaaatgtgacatgttattgaataacctttgtgaatgttttaatgctgcaatattagaagcaagagagaagcctatcattacaatgctagagaaa

SEQ ID NO: 5451 - DNA, 703 bp, Cannabis sativa
tgtcataataatacctataactatataaaaagaagaaggcacataatatccttcaagaagatcctccagcattatttgtcgatgctgctttaaaccatgaggatgccgctacaggttttggacttgttttcaagataggtccgcaccaaattctcaaatctgctaggatttacaagcctggtgcatccactcccatcttcgttgaagctcaagcttttttttgaaagaatttagtggtgcatctcttcccagttgaatccagatttcattttcaccaactgtctcaatcttgttactaaagtgaatggaacttagcacgatcactcgactttatccagcattattgcgaagatcaggctctccctctccaacttccctgaggcctttttgatgcacttaccacgccaattcaataccaatgctcattcacttgcaaaggaagccctcaggttgcgagacgaagattcgcaggaatcgttttagtttcctcttttggctgttgttgctcttcttgttttgtttctttattgcagcctcttgttcctaaaaaaaaaaaaaaaaaactatataaaaagagagaatactcttttagcctttctataataaattacgaaaatatcattggtcttcttattaattaccataaattttttttatttaatgacataaataatgatagttttttaatatgggttgtttatac

SEQ ID NO: 5452 - DNA, 677 bp, Cannabis sativa
atgtaacatgtttacataacatgttcaatataattacaatgtatactgttacgtaaaaaaaaattaaaaagagttgtcttttttaagggatgtactgtggtcttcctatatgtacaatatatacatgtataaatataattaatagaatttgtttgtgctatattttagacatgtgcaacatacttcattagttttacggtgcgtccaagagaatgggagtaagtaagtagtagataagatttaagaatcaatgtagtattgcttcaagtctattgtctcatttcttttttcttccaagagaatagaaataaaactaatgtgaagtttggcaaaaaattgtgaagtgagatttgaaagttctatgttcaggtctctgtttcagttgaagagacaatagaattgttttcataaagctgttaacataagaatttacaatttagaattggataactacttgtaagttgtaaatgtggattgatgaaaaaaaaaggtcaatttctgattgttttttgggtaaatagatcagtgtaccttactaatttgctaatctagattttttggctatgggttaaatactttattttgcatttattttttcttgagatgaagttattaaatattaatgtataaaatgtatcctttacagcagtaattacactctttttcttgtttagagt

SEQ ID NO: 5453 - DNA, 1440 bp, Cannabis sativa
aaatatttaaatattaaattattaaacaaagacactttcgagtttagtgtccactacctgacaaacctcgaaatatagatatttatattaataatattaatataattctctctgaaaaaaaatattattaaaataatttagatagatataaaactggacaaaattaataaacctaaatctaagactctctcttgctttccctaaatcacaacgttaccgtcagcccatttctccggcgcaacctgcaacaacttctaattctgcggccacaggtaactctcttatatgtgttcatgtgcgatttagattaagtagaggcttcgattttaatggggttctgggagaaagagaacttagttaagaagcaaagagaaacatgtatcttgtaaatattatttatttcccattgatttgagatttgaatgaatactgaagactcttaagactgctatatgagatttttatgcaattcagtcattttttataaattgattaacaatgcatttgagctttattgttcttctgaacacaaaggtctaaattactaatcacactaaggaatgtttgatggtagttttccatctctataattatattttagggttatttaaattcttttcttctcatccagcccataaaaccgtgtcgtaatcactcactcgccccacttggttgactagttgcattgctgttttggatcttacaaatatttcaacatgaattattaaagtaatcaaagcataactttttgtagttcttacatagacataactactatataatagttcattgtctggaaatattaagtgtcttgttaaatttacatttgggtttgtgtggtaacagaagaagcagcaaaccccatcatctaagtatggacgttttccacaatgctaaggcagtgcgcctccgcagccaccacgataagtttctactcgctgatgaagatgaggaatcggtgatccaagatcgaaacggatcgtccaagaacgcccgatggaccgtcgagtttgtttctggatctgactccattatccgacttaagagcaactacggcaagtacctcaccgcttccaaccatcctttcttgcttggtatgaccggtcggaaagtggtccagacccttccaagacggcttgattcgtcgcttgagtgggaacccattaaggaagggagccacgtcaagttcaaaacacggtatggacacttcctccgagccaatggaggtttgccaccctggagaaactcggtgacccacgatattcctcatcgaacctccacacaggactggattttgtggcatgttgagattgttgagattgaggttcagtctccggctgggaggccctcggctcctgcacttcctcattccgattccttggatttcgaatcgggttcgccttcctcgccttcaaataaatctgggaattactcgagaca

SEQ ID NO: 5454 - DNA, 672 bp, Cannabis sativa
tgaacactactctttcattctctcgcataccattgtcccatcacacatcaccataaataaaagacaaactcttatatgagagattatgaggttaattgggctaattgagagattatccaattatgagagattatgggctaattgggcctagaggcccaatttaagagaattagttattttggcacaatgagttaaataaaaatgtttttaagcgtgtttatcggccccgaacatgttaatacattatgtctattttattatggcttgatgataataccatgcaatactaattatatactaatcattatatatataaatactggtcttgagtgaacaatacttaattatgttagttcacataaatattctaacataaaaaaaatctaaaacaaatccaaatttttatttgggagaaaaaaagaaaagaagaaaagaccatgttgaaataagttataataagttgaaaatgtaatgaattgatggcaatcccacttatagaaacctcattttgtaacaagaaaaatatggcggcaaagaggatgtaccaaaaatcaaagaggttgttaggtattgaaattaagttgagtgttttttatatataaaaaaaatgagtcagatacattgtggggtaaagtgttttatatttagaattggaaaataatcacataagtg

SEQ ID NO: 5455 - DNA, 1811 bp, Cannabis sativa
agtattttaattataaaagagaattagataatacataattaaaaaaaaaaatccaacttatcttaattttatttgatattgacccaacctgagctttcagttctcaattcacaagttaggaacccaaggtactgtgttacgttcggtacacccaaatgagccgactttacagtctgcaaaaacctttcttaaattgaattccatttccatggaagcacctgagacgaccaggctgagcatatacaaagccgcacggagtataaagcgtaaggacaacaccatttacaacgcactgaggtccatttacgaagactcaacctttgtgggcgagatctcccagctatggccggaactccctctcctcgccaacctccgctgtggcctctggtacttctctaagttccactcaacctgttacttcaagtccaccgatggccacaacaacaactggtccttcaacacttctcgccttaatctccatgttgctcacctttctggtacgtaattcgtatttggtacaccctccctccttttgtttattcaatcaatattgaattcgtagtggtattgagattaaaagaatgattataattagtgctcttatacaagcatttttggcaattctgaggagtgagggtacatgtatatatgattttcttttttatattgaatatggtaggagagaaaggagggtgtatcatagtggattcaacccgtaaagggaagagatttccggatagcatgtcgaaaactatacccatttggacttgtgttcttaatcggtgtattcgaaatcatctgaacaaaatgaatgatttagctgtgttggagggggtgagtaaaaaataacattggtattgattaatgtagttttatagtttttgaatatcaataatgcacttcatttcaagccagagaggtctttctattgaatagatagagtttcatatttaattttccttcaatattgattatggctttcctctttttgtgcttataaataatcattttcttcgtttcctgtatttgttttggatgcagaattcaagtatgtccagtgaaagtgctcaggacataaaacatgcctctattgattgggattgttcattgcatcttcccctgtggatttccaaaactgagagatcttcaattgagggtcgcttagaggagtggaccaaacagttggaggaaagtggagctgatatagcagctcttgcggcttgcttgaaaaaaccattgcgccctctatggatatcccagaaatcagtgatctggttgaatgaagtaccagaccatgattcatgggatttcacacccatcatacttgtttctgcctctttctctactggatatgctcaaattagaactagctcagagtatagctggaattatatagctggtgctggggatgatgaagaaagctggtcaaggggtctaacacctaacttgttttggaatcatgtgtatgatcttataaactcggggcctgatttatgtaatcaaaaggtagctgatatggtggaaaaagatagagtttatcgggctcaaagaggacagaatgctcctcaagtcattgtcaagtcaacaaagttggcaggcaactctgctaatctatcacaattttcattggatatgttaaacattgaagataatttgaattcttatggtgaggatcagccaatatcttggctgggagaaactaatcttgccttaggcacaccccaagctggtatgctgaacataaacaaacttacagttgttgagtttctacaatggcttttgttcttaataaggctgtttacttttttttt

SEQ ID NO: 5456 - DNA, 1486 bp, Cannabis sativa
aaattattttatttggagatgaatagcaggaaaaattaaaataaatggggcattccgagaattgaactcgggacctctcgcaccctaagcgagaatcataccactagaccaaatgcccaactatgattacatcaagtaaagaatatacataaaactttatataaatactgctgttttttttttcaagtatcaaacatcatttccacaggttcacaatttcatattataggaccgagaagtatgtattcggtatttgaattaaaaataaaatatctattaaattgtgaaatcgttcggttctatttgatttgtgtcaaaaaaaaaaaaaaccttactgataaaaattgtctatgtgaccatcattttgccttaatttttgaattaagattttagaatgtcaactaaattgttgaaaaagtattgcaaaatagtgtgaactcttcgacaagtctattactactttggattagatgatcgatttgtatacaaaaagaaataagaatatttcctaatagatatcaagagataaaatcccttttcatgtagttagatttaatttatgttaattgtgttgagatcttgggtttattgtttatattagattcaatacaattttttttaatacttgatccttttttatgcttttgctgagactctgatatgaaccctaaataccaacactcatcaacaacatttacaagctgccatcagaattctaaactatctcaaaagctctataggataatggttatttttttatgcagcaactctagaacctctctagcttcaagcatgtattgaaactgattggggtgcttatcctgacactcgaatatccatttcaggctattgtgttttcttagaatagtctcttcaatcatagaaatccaataaacaacaaatcgtttcaaggtcatgagccaagacaaagtatcactccatgaccaatgcaacaagtgaactcacttggctcacttcaatccctaaagacttcaacattgccatcattctccatttcatacaataatgcagccatccactttgttgaaaatctcgtctattacgagagaacaaaacatgtagagatagactgccacatagttcgaaagaagataacaaatgacacactcaagatgaactctgtctcatcaaagacaaacattgtttatattttaactaaactattttcccaactcattttcattatattgtgtccaagatgggtgtaaaaagttttacactccaccttaaaggagcctatgactatgagagttagttatcaggtttgttacaagttagttacatgattcatattctgtttttgccaatataaaggccatcctttgtattgtaacacattcatacaattttctctatgttctaatatttataattttttagtaaaaattcatagaatttcattaggcaatcaactaagaagaatacaataacatgagttttaaggccaaagaccaccaaattctag

SEQ ID NO: 5457 - DNA, 1114 bp, Cannabis sativa
tttatgattttgtaaaggttattaggtcattctttgtacggtacaaacatgtctataaatacaatcactagccaatgatttccattgagctgatttctcatttcctctgttcatttcttttattcccttttgttctctgcattttctctgcactcaaacttggtatcagagcagctctacaccgctggtgtgttcgtgtgtgtaaatcatggcagagcggactcccatgcatggagtacctaaaacttgacaggaacaattatactctgtgggtacaactcttactcaaccttttgctttaaaacttgacaggaagaattatactctgtggaagaccatggtatctacgatagtccgtggtcatcgactggatgggtacctaaatggtactagggtcagacctgtcgagttcttgccagctgatgcatctttgggtgaagatgctactgttatcaatcctgagtttgaatcatggattgtcaatgacgaactcttgcttggttggctctatggctctatgacagagagcatagccacggaagtgatggggtgtgactcgtctacaagcttatggcaagcattggagacactatttggagcacactcacgtgtaaaaatggatgaatatcgtactaagatacagacctacagaaagggaacaatgtccatgggagattatcttcgtcaaaaacgtcaatgggcagacgttttagctctagctggggatccttatcctgagaaatagcttgtctctaatattctctctggtcttgacattgaatacttgcctattgttcttcaggttgaaggtagactatccactacttggcaagaacttcaggatatactcctgagttttgacagcaagttggataggttaacaaccttgtctgggtcctctaaataacctgtctcaggttctccctctgctaacgttgctgcaactagaaaccctggttttgtaggcaacagatctgacaactctgggcagtatggacaaggaaatcgtggtaactcaagtcaggctcgaggaggcagaggctcgggcagattcagaggtcgtggaggaatgaatcaaggcaatacgaaacccacatgtcaagtgtgtgggaga

SEQ ID NO: 5458 - DNA, 825 bp, Cannabis sativa
ttttttttttccttaaatgaattgaattgaattttcaaggttgatatgggcaagaaaagacctgctgaagctgctacaccggctacttgtaagaaggcaaaactggtaacccccgaaaagactgactcaaagagtggtgagttccctttattattaatttaatcaaattgttcttgtctctgattctaggcatcacagtgtcactacgctttgttagtaagtctgtgtatggaaacattttcttataattcagtcactaagatcatatatggatcttgtttgggaaagctttcacttttatttatatctaaaatagaaatttcagtcactgataccctatatggatcttgtttgggaaagctttcttttttatttatatctaaaagagaaatgctaaagagtatcctaggatgcccaccatcctatactttcttattattggtgcaaaattgcaaataaatttcgaattgaaaagattttaatttaaagtaatttaaaattgaaatgcgtgggatctgctattaaatgtcttaggtgttgggcaggatgccttagtattgttctatcaaagcacaagacatgtaaaagtttttaggttattttgtctatttggatagctataatgtaatagttttttttatcagtaacttaggaattataaaattatcataatttacaaaagaacttttttttaaggaaaattagggtaagtttactaatctgaaaagatattcgttaaaaaaatggacactttattttgcaccccaacaaaaaaaccttttcaattgaacagctaaaaagacagcttaaagaaacttagccaaa

SEQ ID NO: 5459 - DNA, 829 bp, Cannabis sativa
tttacggggttctacggcagtcccaatccgggcggaaggaaattcacttggcaattaatggagagactacgagatttgattcaaggagcttgggtttgtggaggtgacttcaatgagattcttaaggttgaagagaagaaagggggctgtttgaaaaatgactctcagattcgggatttccaaagagccatctcatattgtaactttaaggagataaagatgagcgggggggaattcacttggtgtaatgggcatcaacaaaacctggttttcgaaaaactagatagagttatggctaactctaaatggtttcaaaggttttgtgagtcttccgttaccctccttccttggtggagttcggaccatcgccccatgatttttactttcggcaatgtgaaggatcaagcaaacaagactccaaattggagatctcggttccattatgaacaagcttgggccgaagaggaagattgtggtaggattgttgaatcggtgtggcttgaaaactctaactggggttctcctcaagggcttagggggcatattaattcttgtggggaggcccttaaggagtggaacaaggataagaaggcagatctaaaggctagtactaagaaacttaaaaaggatttgaaacacctatctactttatcgggagaagaggattggaaaacccgtaggacaattgaaagagaactgaatgctgccgaggtcaaggaggagatcctttggaaacaaaggagtcgggcactttggctaacccacggagatcgcaatacaaaatatttccatcataaggcctctcaaaggaaaaagaagaacacaataa

SEQ ID NO: 5460 - DNA, 957 bp, Cannabis sativa
ttatctccccaaattctttttttttatacgcttggaggaaaactagactatatgtgctaagtttaattatgttctgctgttctcaatttggctggtaatggatgactgattgttctgaacttaattaatgattttttagatcttcttgaccgaggttggagaagatctggctctttcctttacaaacctgagatggaaaggacgtgttgcccttcttatacgattcgtttgagagcagccgatttttctccttctaaagagcagcttcgagttgctaggcgattgcaaaggtatacttttattgtctcttctgttagaaatggtcgttctgtgtccacactccattcaaatgataagataatggttacagaagtgcagaaggttctagttactttaccaatgcttctccttttttttttggtgaagcaggtagtcatagctgctttacaaatttatatggatattcgccttttagtttgacagttcattttatttcctaacatttgaaaatgagttctgatagcaatttatgcctaggtttttagatggtgacctggattctaataagtctcccaaactaaaagatgattctagtgcttccaaggaagcacacagttgtgctgatactcaatattcaagttcagaagtgaaaaaatgctcatctagtaatggtgcagagaagactgagggggaatctttcttgaattctttaacggacataattactaatgcagtttgcacatgtattgagagcggggtgtttcccaatgacattcaattgccaaaagcttctgttaaaaaagtctcacaaggcaaaaggaaactgtttgttgaaggatctgagactctcttgtactcgagcaatattgcattccagatttctgctgctataaaacgagcaaaaccagctctggagcatgtccaccagccaagagtctccaatgatactgtggatga

SEQ ID NO: 5461 - DNA, 536 bp, Cannabis sativa
ttccgatctaaatcctatatatttaattagaaaataatttaaagggattatttatgaatctattgaaattaattttattaatataattagttgtatttaaaaatttattgtggaaggaaaaaaattattgaagggctaaaatattattggatatttatttgagatcttaaaatattattagagaattatttaaattttagttatatgaaaaaattttaggaaaaaatggcaaaaagaaaaagaaaattttatttaataaatgaaaatctcttgataccctttctctattgctccctcatcttgcaacgccgtaaaagtcttatttcttgtagtgtctctcgctcacccaaccgctcgttctcttgttcctttactctcttccagtctctctcgtcgttatgacatcaccgccgctgccagcctaagcgaaccaagttggcgaagccaaaactggagatcaaaccccacaattaaccccgaaataccacctcatgctatctttctcgctctcatactcttcctctctcatctctctc

SEQ ID NO: 5462 - DNA, 660 bp, Cannabis sativa
aatgttaagcaatttttaaactatcaacagtgaagccaacttattttttgttacttttttctttattttaactttatataatatttataaaagtataaatgaattttgaagatattatatcatataaaaaaagtacactcctctcgtttaagaaaaaaaaaattctcaatttaaatcgtgagtatctgccactatatatggtacaattatcatcatacatgtgcaccttataaatatatatattatcagttctaaacaaaatagatctaacggctctatttatttctttcctctattctttcgtataattactgtgtactagagtagagtagtgccgtgacacatttgaaaagcttataaaacatttttttttatcctagcttacctatttttaaatgtcacatcagtacatattacattttctttataaatattattgttgttgttttgataataaagtttttgtattaatctaatatatatcaacataacataattagaaaagaataaaaagaagatgtcttttttgagcaggaatagtgatttacattcatggtatacatcattgcatattatgcccatgatcacatataaatacattaatttatacactggcaccaagttgtttgattattgtgaactagtacactattgaattcc

SEQ ID NO: 5463 - DNA, 534 bp, Cannabis sativa
gagccatatagagtagcacgtactgctggccaccgaaaaaaagcaccctaaaacacgattaccatactcatccttgttcgttgaaaccacgtggttcagtttatgttgaccgtggttaagaaagtcaacgtgcgttgaccaaatattaatttccactcctttgtacagagttagaagcattgctccacctattccaactaatgttcccaacaccttagccttccctgatgagcttcccaagttcagcttctctaatctgattaatatgtatgtacttgttcaaataaataaatgttttgcccaaaagcaataaataccaaaaataacgataaatatttgtatcaaagtagtaaataataaaatacagttggaaaattcacctattttacggaaggcaactgatattattaatctaagtaaaaaatatatagaatagagataaaaaatttctactaaaaataattctcagtgtttctcaaagtattttccaactcaccaaagtgtttctacagtttggctatacaaatgctctca

SEQ ID NO: 5464 - DNA, 1940 bp, Cannabis sativa
tatgatctccttcggctgtgaaggcgataaagaaagggtccttatacaaaagtcatggcattttcaaaaccaccatatagttctttatgaacctactgctcttcagaatgtctcaccaactgatcttaaattctcacccttttgggtacaagtttatagattacctttccttagtaagactcggggtctggctaaggctctaggtaacataattggaaaatttttagaagtttacactgattctctgcacgaaggatgggggctattcttgcgtattcgagtgaaacttgatgttactaaaccattaagaagggggcggaatataaggttgcagcaagttgaagacaaattttgggtagaatttcgttatgaaaggctacccgaatggtgtatggactgtggttgtcttggccacccttaccagaaatgttcaacctttcttgaacttgtggataatggaattgatccggaactcgcttatggaccacagatcaaaggggctgctttaccaacctcaggttatgataggtatcgcactgacttttcgaaaggcaatgcttggcctttactaactcagctagtaaggaaaaccatcacaaataccattccttccatatccttacgaaaccagccacaaccaagaaaacttctttatggagaatcctctaatagtcaacagcaaatccatgaagacacaaacaatcaagtggttcatcgcccacaatcacgttcagaaactgtcaacattgaaagcagtattcctttttcctttacaccagcaacactgtcttccgcatctctgttaccaagaaacatctcagtctccatgaatacctctgctggagatcttttaggaaagaataaacaaaaaatgggggaggattctgcaagtaatatggcaccagcaactttgcttgctactgaccacttcaacaacaaaaatattcaaattggtgcctctgttagggacatatcacaaggactgtctgcacactccaaacaaaataattttaaacaccccacaagacatggttcaacatttcccattgcaatttcctcaagcaaagatctctccaaatccacttccaaagcagtttccaatccatcattgaacccaacattcccaccatcacctaatgaaagtgatctatctgatttatatatgccatttgttggacaacaaagtgggtacatagccacatatccactagaagcaaattctattcacacattcaacaatgcggctgtcttcactcccatgcgcactaattgttcctttatgacagattccactatttgtatgtctactggtgtggaaaatgacaaggaaaactactctccaaatcgtatgtgcaaaagaggtcctgaaaaaatgtctatgaggaagacactcaaacgatgtaggggacccaaaccctccctctcatcttcaaaattgtcgcctgatgatgagatgtgccagaatgtttctgaaaaagctgcagatcctactggtgccgctgacaactttacgaaggatgctcttcagcctcgcaaccagccatgaaaattgttagctggaatgcgcgtggcttggggaatcctagcgcattcagacaactgtgtttgcttgtcaaacaacaaactcatcatgtactatttattatggaaactaaattagattgtaatgttgtttctcgtttttgtcaatctttacatttcaataatggacttgaagtccctagggtaggtttaagtggtggtctcctcttgttatggacagacaatgttgatgtaacactccttaatttcaatgcaaatctttttgattgttacgtgaattgtgataatgggccaacttggcatttctctgctttctatggcgcaccagaaactaataatagaattcacacttggaagctccttgagcgatgtaaggatgtcgcccctttgatgccttg

SEQ ID NO: 5465 - DNA, 542 bp, Cannabis sativa
ccaaaccaaaccaaaccaaccaaccaacccaaactgctaagcgtcagtgcaataaacagagaccaacatcactatatttatactgaaaataaaaggggataaaagctacttcttttaagatcacaataattaagtgaacatcttctactgtagaattgtaattattatacatatatattttttaggaattgtttcataaaatggatttgtcctgatattgctaaagtagtgtaatgtcaattcagtgtccctctactaagcataaatggtggtatccaaaggggcattaatgacattaaaacaagaccttttcacatggagagtcatattttcataaaggatcaaattcaaatatcatatttttgttacatataaaataaaagctactgggtagatgacaggtgcttcttgactttaaaaacgatatgcatgacttctggccctatgcatcacatgggaaatgttttaacataccattattatcataacaattaagaaacaaagaaaaaaacccttcacatagtcaaagattcaatgagcaa

SEQ ID NO: 5466 - DNA, 748 bp, Cannabis sativa
ttttcttggtttcacttgtagtgtgtgatagttgggacttgttcgttgcttatgtttgagcttcttctgtttgtgtgagaaagcttgagattaggctcattatgtcttgttttttgaaacttgccaacttttttagatctcttctctctttttcctgaatgttgatctgcactttcccgagaaaataagcttcagtttccttttcctctccgataaacaacagaaaaatgtcagacgcgttgatcaatgggctcgccggagctggaggcgggatcatcgcccagctgatcacatatcctcttcaaaccgtgaatactcgacaacaaacagagcgtgatctgaagaaagagaagaggaagcttggaactgttgatcaaatgtgtcaggttgtaaaagaagaaggatggggacgattatacggaggtttgacgccatcgcttgcaggaacagctgcttctcagggtgtttactattatttctatcaaatattcaggaacaaggctgaagttgctgcacttgaacagatgaagttaggaattggtgatggatcagttggcatgctttcttcacttgtggtggctgctttatctgggtaatttttgagtgggctgggaacaagaaaagagaaatttatacgtagaaagttgactacatattcatttatctcatgcattagtctatttcaggtgtgtgaatgtgctgttgacgaatcctatatgggtaattgttactcgcatgcaggtaactg

SEQ ID NO: 5467 - DNA, 869 bp, Cannabis sativa
aataaattaagaattttacttttagaaagttaaagctactgcagtataattggataaaatttagatcaattaaatatatataaatcatattgaatttttttactcaattattaacatggattcaaacacttccatttaattttattacagatacttaatatggatgaaaatttaaggagtacgatttagattaaaaaaaaaattaatcaaacaatatctataatacttaatggcatgaaaaaccagcaaagccccttataggagagattatgcttgttcttttaagagtctagcttgttgtggcagtgtcatccttaattaaatgagaacacacgagatgcataccaataactcaattaagagatgatgaaatataaaacttatataactgacacatagttcttgcgattgtctaagctaccgaaagggtatggaagaaatatgcaccatgaatcaatttattgatgtcgctacgaattattaatataattatagtattaggacttatttaatgggatggaaactcaccacatatcctcataggagggattatacttgaccctttgggagactagctagtcgtggcagtgccaatcttaatagaatatcaacccatgaggtgcatactgatgtctcaattaagagaagatgagatatataagactcctataactgacacatggtctctaagattgtataagctaccgaataagtaagaaagggatatgcaccacgaatcaatttattaatgtcgccacgaatttttagtataattatagtattgtgacctatttaataggatgaaaaatctaccacaactcttcccgggagggattatgcttgactctttggaaggctagttagatgtg

SEQ ID NO: 5468 - DNA, 1864 bp, Cannabis sativa
gggagaagatacatcaagtggtgcttgttggaaatggaaccaatataagcttgtgttgctgttggtgtggggaatttatgagttgcaggagtgatgttatggtgttgcactggtttagcagtgggaagcacaacatgagggaaaaaattgtcaacctaagatggagatgtggggaaaaaaagtagaaatgtgtgttcataaaaaacaacatctcttgatatatagatgtgtttagtttcaatatccataagcatatatgccttcatgccatgtggataaccaatgaagatagatgctctacttcttggtgtgaatttgtgccttttggaaggtagagtgaggccataagctagacatccaaagcttcttaaatgatcataccgagggggagtttgattcaataactcataggaggtgaggccattggataactttgaaggggtttggtttatgagataggtggcattttgtactagtaggggccaataaaccagaggcaaattagattggaatcctagtgctcgggccacatttagaatatgtttgtgttttctttcaactaccgaattttgttgtagtctttccacgcaagaatgatagtgtattatgcctttggaggcataaaacgcttgaagattcaattctttagcgttgtctaaacgaattgccttaatgtaagatgagaatcatatacgttgaacatcaaattaagatttaagcatatatatccaagtaaatcgagttttatcgtctactatggtgagaaagtatttaaaaccttctatgctaatgatatgaaaaggatcccatatgtccatatggactaaatcaaagattcgtttggcaaaatgatgattggaaacaaatggcaatcgtctttgtttagctagttggcaaatgtgacaatgcttattattaaaggaagtagagttttcactctttttattgaaaaaattggaaatgtacatagacgggtgaccaaggcgattgtgccaatggtttacatgtttattatcaaactgaaatgaaatagcattggctgcaacttgttcttgttgtagcaagcatagctttccacatttttcaacagtcccaatcaccatattccaaaaaagatcctgaataacacaagagtttttggaaaaaatgatggaattagaactgttagtaacaaggtcagaaatagatatgagattgatcttgaaacttagtacatacaatacattataaaaggtaatgtaggagtttatgtgtactgtacccgattttaagacattaatattttgaccatttggtaatgtaacatgctgaggaaactatgattagaaaaagatgtgaagcatgtaatatgggaacacatgtggtgtgtggcaccactatccaatatccaagtgaattgggatgaaggatgatttttacctgcaagattggaggcagtaggagccattgcagtcatgtcaacattagaattgttgttgagttgctggctgagaagagagatcaaatgttggcactgttgagaaaatctgatggaatggagtgcccttcttcctcattcgtggaagtactaacatgattggcttttgctttttttccttttcttgtctttttttgtccccatagccaggaggaaacccatgtaaaaagtagcatttttcgactaaatgtccaggtttgccacaattggaacaagagggacagggtttcttagctctaggaggatgagtaggctgagaagaggtagcaacagccaaagaaattgtgtcagctgaaccaacagacctttgtcgttcctcttgtatgatcatggtaaagcccgagaaagattggggatgggtttgttgagcaagatttgtgctctaac

SEQ ID NO: 5469 - DNA, 891 bp, Cannabis sativa
ggtcatacacgtgtcaatttctccatttctgatacgtagagttgtggtcctcttgtgagttgtatgtgaagccccgacacaattattgcctgcttctttaattatatttagttggattcgatagctaataaaagttaatttaattggttatggagatactaattaagatattaattaagatatatttagacaataaatttgatttttcatttttgattgtgtgttttgttgttttcaaaattagttttgggaattagaatggtgataaccaaaaatactaataagtacacccacctataataacagcatgaaataacaacacatatcgacaaagctttttcaatatataattccgaattgcataacagtcgaaaggggtgaagaatgaactggtaccgcccaattttcattttttttttgaaaatatataggccatttttgccaaaagaatttatgattatgaatagtactatataccttccaatgtgagtctaattaatcaagtatattgcctagcttaatttgaacactacccacctaaagctggaatatataatatatagttctctggttatacatatatataaagctaattaactatttatagtaacatatatgaaaaaagttgttactccctctttcttccatcaattgaaccattaagagataattataaaaacatatattaactactaaactaatgttgttggcttgaatattaggaaccaaattttgtgggaaaaagatttacaaagtgttaatagccgtactggttaagggggattcatagcctgaattatattaggaatataagtgatgtagacaaaaattggattgagggaatttgttgataattgttttaggtggttgggtgtataatataggggtctg

SEQ ID NO: 5470 - DNA, 861 bp, Cannabis sativa
ttgtgattttttatttcttttccttagaaaagtttaacaactctattactaattacaacctctttctctctcaaacacacgtagaatattttgtattttctcaaaagcttatggaaaaaccttctatcaaattactttttaccacacatacacatgcatataatcttatataaagctaatttgatttatgtattatgtagttaaagagaactgtagaaacaatctcaaaactggcttagtggacttaggccccttatataatcataataaatttactttgggagttctcgtgtcataagcataatcattcatcttctttctttctttctttcaaattaagaaaagggaagtttacatatggatttgttaattactataaattaccaattaacaaaatagagttagaattcaacaaaattaaaggttaaagtggtgattggttagaaataatgaaatagaataaaatagaaaaaaagaataaataatttttattttttttttctttagttgaattttaaagtattaaaatatcatctaaatagaatcatctttttcaactattttagtagaatgacttttattttgaaataaaagggaaaaccatctcaatacaagatttgaaaaaaattattaactttttatacattttaaatgttattcaatttttattctaattttcatccttattcctatatttttattgctcacaaccaaacgccgcctaagttaatagagactcacctataaaatagaagagaacatgatttatttatttttttaaaaaaaaaatgaagaagaggaagagaacaagataacttctgctaattagtaaacataaattaaaaataagctcactcaaaa

SEQ ID NO: 5471 - DNA, 1124 bp, Cannabis sativa
caagtaataattcattcaattcaatattttttagaagaagattatgcactcaaaataaaaacaaataattaagcgaataaataagaattaacaagatcaaaattaagaaaaatgaaattaaatatggaaattaagaaagaaaaagtttgagtttttgggaaagaaaacacacctgattaacctttctgacaccatctcgaatccctcctattcttttacggcaaccattttcaccattaaaattaacattaatattattgttattattgttataattataattattattgctaataacattgctgttgttgttgttgttaatattaatatcatcaccattattatttttcaccaaacaaagaccaacaatcttctcagcagcctcagcctgatctttgctctcctgcatgagcttctccacttcactctttcggagcctcatcgtgaccctcacaggcgtcccattttccggcgaatctgccggcaaaatgctcgtaggtttcatcatagacaaatcagaaaccgacctcctcgacaacattaaattctccagcctatccttcgcgctcatgttaatcccagactgaacccttcttggaattttaatattgttatgattctctcttatggttaccttaggtagctcaaccaggaagtagagtctcttggccttgagctcgtagctcaggtcaagaggtttggctcgagttccgtagtgttttacagcttcggactcgagcaaaacatgacccggatagtcttttactacctccccaacttcgattccggcctttactttgaactcttctccatttattctcatcactttcgcagctttctttgctcctaaactgttccccattccaatattttttggagttaaaaagatccaaatgtttttcttttagaaaaaaaagggatgaggtgagacactatatagtagctagctagtataaacgttagcgtttaattatgcaattttctttctttttttctttttttcgttataaattgtgtttagcttggtgggtgtgatctcattgagaagaggttttatagggaaatgggaatggtcttccatcaggtcaataaagaagggcaatcattaaaaaaaaaaaaaaaaa

SEQ ID NO: 5472 - DNA, 1580 bp, Cannabis sativa
ttgtatcccttttgctacctacgcccaatagttttgtacgccaattaaattaatgcatgtccccttttctagtttttttttttttttttgtgaaaatcaccttttctagttattctttgttatatactaattaacatgactaatgataatatacacatatatttttaaaattagttgaccaaactctatcactatcattcataatatatataatttttttttctgtagataatattgattaaaatatgttttttaaattatttagtaatgaatataataaaacgatgactttcaccacattaaggagatcttatcatacacaactgtgtatgtttgttatttattatttataaataaatatgaagaaaaaacaacaaaacaaaaacaaaaaaaaaattacgaattctcgtcccacccatcacccatgctgagattttgttatcatggttacatgcgcatgtgtctgaaagattggttatatcctatctttttagatatatgtaataattaactatatatattccattcaggtggatgatttaagcttgtagcttttagtactagcaattagcataaatagcatatattgataaaaaagaaatatatatagatttggaaaagaagaaactatgaagtaaaggtattaatttttacaaaccaaaggctttttatcatcaattaggaattcacatcattttgcaagttttagaataaattttattgcgctttaaaagcttcaattttaaagtatttatattttcttcagttttcttgttcctaataaaatgatataagactgttaaaaaaaaaagaaaaaaaaatgatataagaatgggaaacacacaaaggcatgtctaccaactcgtatattttatataaggtccaccaaaacaggcgtttaatgatttacaatttctttgctatgaaacattatgttaatttacagttacatacaactaaattgcttttttcgaccttttttttgaaaaaaaaaaaaaaacaattactaaagttgtattggtttaacattgttaacaatgaataaagaagaaaaacattcaaagataaggtattaattccctgaaaagaactgtgtagaattgatgtgatgaataagatttaagtgaattatttttgttttttgcggtttggagaggaagaggggctttgaaaagaaacgccaacaacctctaatttaggtgccacatatgagaccattatttatttggtgggggtatgtacgacaaatgtaaaatttgtcatggctttagtacgacaaacggattagagatgaatagcacgttcactaacaaaatgtcttgttttcattagttcagtcaggagcatcgaacatggcttcattttattaggttcaaaatctagatttatatatagaaactaaaatatctaagcaatgtttcagagatgtagtttcaaatatctaaaatatatagattttttttttattttttatttttgtgttatttgggctttcaataatattctcattattttgggtttagttgctacacttagatgtggaggttggtaacttggtaccatctatgttttatagtttg

SEQ ID NO: 5473 - DNA, 1148 bp, Cannabis sativa
ttttcttgtaccgataccctactcaccttaattaattaatcttaaccttaatgtactttttaaattaaatatgtcgattaatggaaggtagctattatttgtattaatgcattactgttttatggttgaaagaatattattagtattctacaataatgaatggaattattattattgttatcctgaatttttgttgatacacgtggttttctagcgaacaactaggtgtcgagtggggtctagttgagaggtaactagtgactaattatgttggggctcaagaacatatagctctgggaggaggatatcctctcgtaacgtcgtatcggtcctatggagtatttggatataatttgaatatgattgaatctccgcgaagggtcaaaacctcctagatccccttatcgcatttggtcccaacttgtgcaacacattcctaggagtagtactattgtttgtcccctccgtacaagtgaaaaaacaactctaccaccaaaattcaatatttttgggcattttccccactccttttctgacacgcatccttccaagacatagacagacagctgacgccctcaactgtcccatccactgcagacatgcagggtcttgtctcaccaaacccctacattgggccttgataacaagcccacgagggagaaaaactcccttgctaaggaaacaaccattaatgattatagatagcagagggaacaaacttagttttcctccaagagcccattcattcctctataaatagggatttaaacccaatgtaaaaggaataaagacttggaaaaatagagaaaatactctaccaaactctccccacaaaaaacaccatgtttgtaacctttcaacatcaatacaagtgactcgtggactaaggctctttaatatcctaaccatgtaaaaatatcccctcataaacacatttagtaattataagttacttaatcagttgccaaaaaactcagtaaatatttttgtatattcattgagagttgtaggaagctttcacaacttcatcttcttccctaaatgttcttgtcaccacggcattaaccaaaaacaatcgaagacctcctcatcatcctgacctccaaaatgccctaatgaggatttggcatcccgagttgaccctaagg

SEQ ID NO: 5474 - DNA, 923 bp, Cannabis sativa
attaatttatgctattttttattttgtatgttgatcaataaaggtgtttgattcatttagaaccttttatttgtgatgacagtaaaagactaagataatgttttagtattgttgggttttagtatatgtacaattcaggtgtttgatttgttgttatattttcttaaattaagttaaatggttttaatagtaatggcgattatgagtgagatatgtaattacactggttttgaaatcaaaattttcttaagatttatcaattatcttttttctttattatattgctattttacatgaggattcttcaatttctaaaattttcttcaatctagcatttaaagatatatttttatttttttaaaataaaaaattgtatgataatttttattaaaaaaaaagatttctttgaaataaattacaaatttacttatgtacgaaagtgaatatagttaatttattgtgtgatttgttgtgtgtatgtaaagatagtgaccactaaatatagaaatggtgatgacaacaactttgaatgtaacagtgactataaataagatacaataatgagaatgttgtgtgagtaacatgtcactctaaaatctctctaattaatcttatttcttttcttcttaattctcttattttttaaattttttattctttaaattctcattttttttaattttttttattctttaaattttattcttaattttctcacttttttaattttttttattttactacaaattctccttaaaatagctttattataccctatttcttttttgcattttattaatttttaaaacatatctaaccttaatctcagctgttaaggaaaatagcaccaacaggagtaatggattcaacaatgtcaatacaaatttttggagcattacagtctgccaaaccaaaagagttga

SEQ ID NO: 5475 - DNA, 687 bp, Cannabis sativa
tttagatattttggtccaacaccattggctaataataataatatataatactctataatttagaaaaatatgccaataaactattagtttaagcgtgcataatcatctataaatattaaaatatatataataataaacataagttaaacttaatataaaatgtaattaaagaacgaggattagtacaattaatatataaaaattaatggcaaatataataagacgatcaatcatcaacaacaagaaaatctcatttgtaatcatagacaaacattaatgatactatatataatagcacttaatcatggtataattacaacataatagtaatatacgtttgtttacaaattcaaatctctctctctctctttcggtaataaagaaaaaaccccatctggaattctttccaataattagatcactgtatatatatatatatacacacatatagttatagttatattaatttaatgtagagatatgatggtacgtggttttctcaagggcgccagcggaatggagaggtaggttgcctcccaaggcagggtcgaataatgcaagtgttcttgtcaagagacaatcatatgcctcactaaccaccattttccttatctcttccaatccaaatccaacaacaatattatttttaaatatatctatatataaacaattattattattattatt

SEQ ID NO: 5476 - DNA, 727 bp, Cannabis sativa
tattacaccaaaagagaagatgatgatcaatgaaaattatcctatatattaatgaaccattaacaaagaagcttaagagaaaatgttgaatataaccaacattaataatgtttccaaccaaacagcctgcgtctaataaataggcaacaattaacattattttataaaaatatattattattattaaatagagacatggaaaatacatacaaataattcagaattgaaatgattatatttttcagaaaataattattgttctccaaaaacaatgagtataagcaattgagtatggccaatgggactatagatgtaactcaaaattttgttttcctgagctaggagattcaaataatagtaacacagacttatatatatatatatataacaccttttattaattattaatttattaataggtataacttttcgtttaagaaacaaaggtgcccaacaaccaatagaaattgttcttcccaatacatatatgatcataaatataaaagataaggaataaagtcctttttatttaacaaaatattggttgaggactgaggggctttatatatatattaacacttcaaaatttatcaaatcacctcattttattatatcaccattattattattattatttattttgtataatatatttttaatatatacttacatttttgtgtcttccttttcgcattgtaaaagaaatacatatataaattaaaatata

SEQ ID NO: 5477 - DNA, 1119 bp, Cannabis sativa
ttttatttatttttaaaacaaaaagagttaagcgatgatttgaagaaaccttgagatttccaggcaacttggaggcgagagcctcagcaaaatcagctatggcgcggttgaggtagagaatagtagagtgttgtaatcgcttcgtttgggtaacgatggcgtcaaccacatcaggatgacagtgaccacaacacaccgtagcaatccctccaaatgcatcaagatatctccgcccagtatcgtcatacaagtattgcctcttcccatccaccacgttcaactatacaaaacgacaaaactccgattaacaaacatacaatgaatctgagatggtcaaataacaaatcaacacaaaaaaacaaataagagtacatatacaaattcgatttgatcgaaaaactcaccggtttgttgtagaagcaaaacatagaagggcttagatactccttgcgcttggccaaaatctcatcggcggaaggaccttcgtacggcggtggagagtaatcgaagtgagggattttagggatgggaataacaacatcggcggcagcgacgccattgtcgtggagagaagatgcttctttctgagctgcatgagagaaacacctattccatcggtgaaattctcttcccgttaaaaccttcctgctcgacaagaataatctctgcattttttggctgtttggttagcgagaaaaacctctctctatattctcgaatccccgaaaatggtgggctttgtttgttttgctgcggtgagtagtaataggaaaacgaagcgcgtgtaagcgcgtgaggggagagaaggttatatagagagtggttgtggtgatggtggacctgttggaattatggaggggagggtttatataggccttggtgtgaaggacagaattgtcattttacgaaccgaaggaaatcaagatgaaattttaggctaggttcagtgacgaggacaatactgtcttatcacctaacagaaaaaaaaaaaagaaaaaaattagaagaactaacaaaaaatttataaaagcactatttaataatttttattttataaagggaaaaaattaagcttttttcttactaaatttgtagttatgagggttttttttttttttt

SEQ ID NO: 5478 - DNA, 2016 bp, Cannabis sativa
actacaaatgacctcataccatcctaatattaatttttcgaacaggtaagatcggaataagaaaaatgtgatgaaattaaactttcaatatgaaatgatacaaatatgaataatatcaaggtcaatttaatttcatactatatattataatgactaacatctcatttttatttctttattttcactggtctgtttaacccaatgacaactatagaataacctatatcccgtattacataacatctccacatgacacacactcatcaatttgatcatgtaccgccttgacagagggagagcttcagataatgttgaccgaaactgcagcaaactccccgggccaaagaaaatacattgacatttcagttggtttcattattggttaccagcctcatttccccaaacattgtcccaagcaccgggtgcagaagccttaggcccctcgatgtagttctggttctggttctggaactggttttggtgtccgggtggtcctggtagttgaagtgggcgtccatcaggacctagttggtgaacctttcttgactttactttgatccctagaatcctaaatacaaatctggcaagctctccatacaacatgccagagcgctcaaaaagctgcaatgaaattcgaggggaaaataaaagagacggtgagaatgagtgtgagtgtttaagcaaaagtatttgcagaatgacaatagctataaccgaaaatatcttagtctagtagggaagtatcactgccacttaatcatgcagcaactacaatagatagagaaaatgttaataaagagaaatatacctgaagaaaagcagtcatgaacaagtgaaaagcttgtgtattctggtcaatgagaattgatatgcgaccgaaaaagcctactacaccctgcatctgtagtaacaagaaatgccaaacaaagcataagtagcaaaacaataaagattaaagttatcgcttccttcaacaacaagatagtaaaaattcattacaccccacaagcatatacatatttaaacatcttctaatcccaacacaaatgagattgattatgtaatgtgcattaagctatgtaacacgtaccactcttagtactgacatccaaaatcctggaggagatgaaggagcaccatatggattatttggatcttcagctccataaggaccacctcccatgcccattccatagccacccatttgtcctcccataccaccattgtacatcccacccccatataatccagaagatccataaagtccccctccataccctgctcctcctctgtacatgctgttcccatacattcccccagctccaccataagtgctgccatacatccctccagctccaccatacgaggagttaccgtacattcctcccactccaccgtacgagctcccatacattcctccaactccaccattcattgtagaaccataacctgtaaaatgttgaaaaaagaatccttaatgaacagagcaaaaagaaataaacctaatcttgccatgaaagccaaataatacctcctaaggtattgctcgtcccgtagttttgctcccaaggccttgtgggaacaggcctagaaagtgtgttagtgttaagggtattaatcctatcagaagtggaaacaatttctccaggtcttgcggttcctgaagcctcaactatgtcgcttgtgcttcccggtgatggaggtttgaatggtgcagggccagatgatgaacctgcccgttcccaaggttttgggggacgattactagctgcaagcaacaaccataacacatctcaaaattcttttctcttaagttcaaactgtctaaatcaaagaaaaaatgttctgttctcacaacaaacttcaagcaacatcaaggaaaataatcaactcgtgaaaatactccaaatcaaggaacaatcctaacaaattccaatcagctttttacaagttataactcaaatggaaacaacaaactcaaataatctgcataattcttataaatcagacaaaaat

SEQ ID NO: 5479 - DNA, 1229 bp, Cannabis sativa
gatatggcatatgctgatggatacctctcatagtgggaccgatttatagcacaagtttcacccatttctttttctgtgccatatatggttgcaaggttatatacatacatatataggttcaattacatgttcataatttctatttatggttttttttcttttttttttaagtattccatctatggttggttggtgatgaaatttgtacgtataaaatttgtaattgtgcagtgataatcatgaaagtgatgggccaaattcaagatctttttggaatactactgattctggtgaatgtggtgtgccatctgagactctctactaaggatacacatagagcggggaattagcggggaatgctcttcccgtcccatctccgttaaagattataaactccatccctgcttattttctattggggatgaagcgcagaattctctaatagaagaggagacgcaacaagaaattccctaataaaaaaataaaatttataataaaaatttaaatatataaaaacattagactacataaaatttaaatattacacattaattattatttaataagctaattattatcaaaaatacaacttaaaagtcataaaaaggatactataatatactactaaaatacaaacataaattacaaattacaaattattattagaaatataaaataaaatactaaacgggtctccatcggacggagaatgtaatccccatccctgccccattaaacattcgggaaataatccttgtctccacctcgttcctcatttagacagagaatccccaccctattaagggcagatccctatagggccgcattctcgttgaggaaatatgcattcctactctctactatgttccagatgataatagagtaaagcattgctattagagtaaagaaaaacttataatctattttgatcagcaataattatactcaaaaacttatatttattttgttgaattgttttatgataagtactcatttgatactttctgttttattaaaatacatagcaccctctaatgaatataatgatcaattgactctcatttgaaaaactacacatttagtatgttaagtgtattttaatattttactttcccaaatcaccccattttaatacattatttgatcatttttaattgacttaaatataaattattaattatatatgaaataaaaaccaaaataacatttatttttagggtaaataccat

SEQ ID NO: 5480 - DNA, 753 bp, Cannabis sativa
gattccgattgaggctatttttcgaacgctaccccctttattcccattgttcctttgtcaaacttccaagaggatgtcgacgtacttacgaggaagcttcaagatttttagttgagattatcttcggctatccaacatctaccacccacattgccaatcaccacaagtaagtaacattcttttgtgaaattttggtttcttcttatgtaattcaatttcttggctactgtagtttcgatgttcatactctgaataagggttttatttttgtattggtcgttgatcggaactatgtattctgccgtctagggtggttgatttacttttttttttctagcaaactagagacattaggaaggtactcgcagttttagaacctttccatgctttgaaaactttgaacactagggatttttgggttttgtcatttccacatgactgtcgattccagtggtcctggcagcattccctggggatgatgttgtgttttgcgcattttgttcggattccttctgatcccagacaatgttctgtttgttttcatttctttcaaagtgttctaattctattatttaagaacaaatcattcttggatatagggtccgatggggacttctccaagaagttaacaaggaggactctcttgtacccttaccgccttattttgatttgggtattaactgcttaatattcattttgttagattctttttatggcaaatgacattcctatggataaaagtagacaaatctt

SEQ ID NO: 5481 - DNA, 1866 bp, Cannabis sativa
tttttttttttttttgaagatgtaccatggcgactactgagggtgatcaccggatagacgaagatcttcttcaacttttatttgaagatcgtcctaagtcacctttgacccccaagttctagcttgcaattttgtacgttgggacttgttattatctatattttcagctctctcctgaaggggttatgccatgacgtcacaagtatataaagcatgcatgttcacgcgggtacaccacatatttcttgataagtagttcattggcatgtatgattttccctcctcgggcctggcgatgttgattcgttctctggaacaaaatcctgagacgtacaataagtgtagagcaacaattggatactcgagtactccaaatatcctctcatacatatattttttcacgtcgtcaaaactaaaataaaataaaagatataaagaaaaaaattgctaggagttctccctcccacctatctcaaaagaaaaataaaataaaataaatatgttgtaattgacctgcacagttaactgtaattaaggacggacttacttattggcgaagggggtgcaattgcccaccctcaaaaataataacccctcattttttattgaaaaattgtcaagtatactacatttttatttttttttatttttacattttttagatttttttttatttttataaaatttattttcattttgagattatgttgcttctgtttcgaagttatgttgtttttattttataaaatttgttttcattttgagtttatattatttccatttttataaataaataaaaaatcaattataaaagtataaataaaaaagccttttttttattttataagttttcaaaaaaaaaaaaaactattttatacttaaattctctttatgattatatatattttttatatatgctcctctttatgattatattctaggcccgtccctaactgtaattattaaatttagtaacaagcagtggcagaactacatatacttatggagtggccatggcccccttaactttttagaaaaaaaaaaaatatatacataatatataaattaaattagtataattagattttacttattaaaaaatgtgataattctcttattactaagcctaataataaattgtgaagttgaaatttaaaaagaagcccaaattcaatagccaaattaaattagaggaaattacattatatacacactttattttatttgttttagtttttatcttcatttttatattttgtaagatatacccacttttatagatgatgttctaattgtagcccttaggttgatttaaattttatgctaaacttaagtagagagtgagggtatattaggaaatccactcacaaaagagtactttttaataaaatataatatgagggtatttttgattaatgaatacaaaaatgaagtatttttcaacttattagttatctattttatggtaaaaagtgacaaaaaaatgattaatataattcattttcgaagagtacttttgtatgatatatatttatatgtgtctttatatatgtatttttatggtatccaatatcatattaatatgtcactttacaagtggttagcggtttcttatattatttattaaattaaaatatttaggactcgatattattttacaccaataacgatatgtcattttttatagtacttggcactataagatgccttttattatttctcattattttatatacgttgtataaaattaattaacttcttatattgatttataaaatactacatgttaaaaaaattagatgaaaatacattttatttgacccctccttattttgtatgagaagaaagaaagaaagaacagagaaa

SEQ ID NO: 5482 - DNA, 647 bp, Cannabis sativa
tgctttgcaggtctttgaagaatctggctatttggggtggaaaccagtaagcaatcccatggaacctaatctgaaactactaagtcaagtacaaggggatacaattacaaatgtatacaaggatcattgggaagcttcaacatcttaccataaccagaccaattgtatcttttgtgaacaagcttagcctgtttttagcaacacctcaggtactctactttacaagttgttcaaaggatacttcagtatataaaatctcatcctagtttagggggttgctatttcctaaaaactctgaagttaaactctaaacttacactgattcagactcaagatcttgtcaagacacaaggagatcaacatttggtttatgcatactcgaaaaatctctagtttcttggaaatagaaaaaagcaacacacggtgtcacattcatcagctgaagtcgagtatcgtgatatggctaacattatgaaattgtttggttagtctctatactaaaggaacttaaacaagatcatgtcggccaattgagtaattttgtgactatgcatcaatccacattgtaaccaattcaatcttttacgaatgcacaaagatatcgaaatatatagactatcaccaggtcaagaaataggttcaaacaa

SEQ ID NO: 5483 - DNA, 1521 bp, Cannabis sativa
atatatatatattaattataaaagtacaagacacttttatccttgttgcatgtactttttttaacaatgaacatacttgctgtaattgggaatttctatttattaccaattaactagtgatataatacatgtaaaagtaaagcgaatataaatccattttaaaattctttctaaaactcatacaatctgaaggaatattattatttgccatgggacggtatatatgttgataaatataatatattaattaggattatttattttaataaaaatgatgatttagcaagatataatttttgggatctattccttgccacttgcacggaaattaagccatgaacgtcagcatggtgacctaataaaccatacgtaataatataacagagaatttacgtttgaacaaaactatagacgtacgtacacacgtaacaaaacttcaatcaaatttccttcgtgtgaaggatatgaaagtgtggtgtgtggcagtgagagtagaaaaatgcgacatattaggtgaacttaattattaaaagggctaaataattttttaagtgtatgtacacatatttttatttatttataatttttgtacgtaaagatctttggagagttttattaggggtggtaaaacgggttttgactcggtatacgaacacgaacacaaattttacgagttagggtcggtaaaattagacacgggtcgacatgacttaacgcgaaataaaaacaggtcaaacacgagacgacccgcttaacacgatttttttaaatataataaaataaaaaagttattaataatataattatataaaaatataaatttagtgatttaatgttaagttaaaaaaaatttaatttaatttttttaacatgaaattaaaaatattttaaaatttttaatttttgttatttatataacaaatgttatactatataaatgtatataaattttttaatggaatatttaaatttataatttttctctataactccagtttcaataatagcaaaacaggttacagtgggtcgacacgaacacgacacaattttttatggtcgggttaggttgagaaaattagacacgtcaaaatatatgaatcgacacatctgacacaaaatataaaagcgagtcaaataatatatgacacaaacacgatacgatgacacgtttttccaccgttaagttttatttccacttcacaaaatttgtgatattgataatttattaagagaaagtaaaaaaagataatgtgaaaaatgaatagaatttagtaaatgtttaataaagaaaaattatgaattatttattaatttcttaaaaaattatttaatattaacaaaaattttatcataacaactattttaacagttatatatgattaattttcaaaaaaaaaaacagttatatatgattatgtttttataatttagatttgtaaactttttaaaaatgtaactataaaaaaatgtaacattgctttgcaagagtcacagtagaaatattttttgctactacaaaaa

SEQ ID NO: 5484 - DNA, 956 bp, Cannabis sativa
atatttaatatatttttaaaggattaatttttaattattttaaataaataaaatatataaatatatcatacaacttaatgttttacacaaaccctagccgcccaataatctctttctctcacctccttctctatgttaggtggtggtgaggcggagagtaaaactcagtggtgttcgtgctcggcaggcgacgaggcagcacaatggtcgatctgcggcgcttttccggcgaggcaacgtcgtttgactgagtttgaaagacttgactccattctctctctttggtttttcaaagggtttcctttttcctgttcttcgcagaggtgaggagatttgtttacaaatctgttatttgttgtttttgttcttgttttaagctaaaagtttcatatgttatagatttttctgttatttcattttaggttaagaaaaataggattgtgaattagatatattgctcatcaatagtttttgaaattgctttgttttccttgcagatgggagctttccaagtatgaaaagtttcccaaggactaatgcaaagagatggaactgctgcaaaaatgcaatataatttttttttctttgatttgaaattttgaatgtatctgatgattttatgtttgagaagaaattgtcttagaatagttaatatgttatgtatacaatttttttttaaagaaaaaataaattgaattttgttaatcttatcttactgcaatttgtaacaagataaatgtattttaagtttgtttaatacgtatttgagaatagtaaatttaaatatattattaaattacattcttattaaaatatgggtaataattatataaataattattttttaaataaaaaaataattataattattaccttttaaaaatccgagaatattgatttattgacgactaaatcgtcattgataagtcactcttttcaaaaaagataaaagtaat

SEQ ID NO: 5485 - DNA, 1053 bp, Cannabis sativa
tgatttgggttcttttgcaatgaagaatagtagaagtgttttcatttcaggattcgttttgtacgttgtattagatcatattgacatacaagtcaataccaaatataatactacataaaaatatgacatacaatacttttattacgtcttcaattttcataaatgtaatctcatactcggtcaatgtgggatcctaacaaaatatcactttaatctaagcaatcttcctttcacatttgtgctacttattaataaagcaaacaaaaaaggttgattccatacctgttgctgacaacaaaacctcatcaccaccagggtggtcctccataaactttgtcacatcatacacctgttttcaccaaaaaggaagatcagccctataaagcttttcaatgatttcatcttacaagtaaagaggacccccataattgaatttaaattagttttaaactgaaagatacgagaccctctactaaattacactaatagcctacggtgttgagccttaaaacttagacctatgcctcattgccctgcagcaatgtgcatttatacacttttaaaattaatactgagctataacagataactgttttctgtttaagatttcggtagggacatatgttcttatatttcactttctgctcttatattttcctgtgaatccaactcactaagaaaagttagagaaaatgagagccatgtcaagatggttcaaatttggttgtgtgttgtaagagatggggttcaaacccgagctgggctaatgtaacgaatggaatacaagtgatcgactacaaaggccaccgattgtgtatagtcgaaaactatatagattgatcaaacctctaattcctcatggatttcatagaagtaccataccatcccaaacaaaccagaagcatgagaagtcatacttctaaatatcgatttgctttgaagcaatgccacccgtaactcaaaactacaaatcaaatattaggatagccttttcccaatcgtttggaatctagagttattacatatgtctccaatcccaaaactaagagacca

SEQ ID NO: 5486 - DNA, 660 bp, Cannabis sativa
ttccctcaagtattctcgtaatcagtataattattattttccttcaatgtgaaacattaaactgttcgcttcagtatttaaagagaattgatgcaaataactgtaattccccttgccatttctttttgacccatttgactttaattatgtgttgtggagagtagtagaagcactagagtaaaaagaaggggaaaagggcaaaaggggtagtgaaaaagttgaaaggaggggcttatgtgattaatggtctactattcaatgaactctttgggtacatcttctttataattttttgatttttttaataatttttgagtttggggtcttgtggatttggttggtggtagtggtgtttgtttctgtggagtttctttgaagggatggtgtgttgtaagtgacttgttttgtttgtttgtttgtttgttaggttttgtactcaatactactactgatttgaattgaggtggccgtccttaatgagtctgtacatatataacctattctattttctgtttctttctcacccaaagacttctctgaaactgacacaggttttggtgggtcaggtggggttttgaggcatctcaatcaatctttgtacaatacatattatttaaactgaggctgagggagatatagaaaatgcagacaccaaaatca

SEQ ID NO: 5487 - DNA, 1725 bp, Cannabis sativa
tacttgcatggtagatctactaggacgagttgggcgcttggaacaagctcttgaagttattaaaacaatgccagtggaacccaatgcatgtgtctggggtgcattgcttggagcatgtcgtacacatcgaaatcacgacattgctctgcttgctgctaacaatctctttgagcttgagccaaacaccatcgggaattacatcttgctctgtaacatttatgcatcggcaggaatgtgggatgaagtttcggaggtgaggaagcttatgagagaaaagggtttgaaaaagagtcctggatatagctggattgaaggaaagaacggcgaaatacacgagtttttcgccggtgatatgaggcatccaatgtcaattgagattaagcaagcactggaggatctagtgaacagattaaaggctcatgggtacgtgccacacctgaattccgtgacttatgatcttcatgatgaagaaaaaaggcgtttactattaaatcatagtgaaaagctagctcttgcatatggactgcttagtacggatgttgattgcagtattaagattatgaagaaccttagaatatgtgaagattgtcacgcattcatgtgtggtgcatcaaaaattacggggagggagatcattgtcagggacaatatgagatttcaccatttccataatgggtcatgctcttgtggtaatttttggtgattattgaatcactaataggtaggaaattttaaaagctcacttacaatcgtacatctggttatgaagtatgacaggaagcgtgtgaattcaaagtcctcacagaaacagattattgttttgagaattagtataggtgtacccaaaacgatttttaacttggtacaagaaaagtgaaatggttaatacatatgggatacatttataatggagactgttgtctattttctttacccccagatgacgtgtggcctcatcaggtaggtccaataagcaacatgcccatctagcatctacggtataataaagcccagaacaaaagcgtctaagtctagggacagacttgaactttgggttcggaaggatcggtacatcaatatatatattcataacttaactttacaatatatattgttgtttagaatttctcccttatcagttaaggaggaagtaagtggtaataggatccacactacgggacatactagagtttattattttaaaagaattataacagattggttaactctcggagagtctactggaagatagatggttcctgtctcttcttcttcgcgagtgaatgcgacctagaggaggtatggaaggacagctagagtgtaacacactgcttgaggttaagtcattgtatacgcatttaatgtggcatgtcgaagagcatccaatacattatgccgaacagacgtgctcgagagtttaaacccataattctttgatttcacgatgctcatacatcaattgacggctacataatgagctattaaatcataagcaagagataagtcaagtctcaccgaacaatagtggttttttttaccaccattttatgtctataaatacattaatagggactctagaaaattctttgtaagaaaaacttttattaataacagtcactcgtacattaaggttcattaatatctcaaccacgtgaaatggttaatgctcattcattatttcaactctaattaatagttactgaaaacctcgatcaacgtatatag

SEQ ID NO: 5488 - DNA, 1463 bp, Cannabis sativa
atatgtatagcatgtgtctattttttatgtcttctatttatatatgaaaaaaaatatatatctttttagaaaagtgaggatatagaatattagaaactaaaagggaaaaggaaaagggaattgctagagactaaacaaaatcaactagtctcactaaaaacaaaaacaaattaaaaataaaaactaaccttctttcaaaaataaaataaaataaataaaaaaaattaaccattattgtgtattgactggaattccattttcaatttttctttattttatttattttttgaatagaattaaaaccttttttttctatataattgtacttttaattgaattgttatcaattttggctttatacacttttcaagttttctctcccttcacatgcaaatatgcaatttaaagcaataaatcccttatcttgaagaaaaaaaagatactaatttccactactatttattaaaagcatattcttttccacaattactacatttgtgtatcaccttttaaagcaataatcatattaaaaaagaaaaaaagaaattgggccacaaaacaggccttgcattgcaaatggtccaaacccactaaccataaatgggagggctgaaaatggaaatggactttgttagggaatggtgggcctaaattcctatttttagtagtatttttcaaaaaaaaaaaaaaacaatcatcttttgcaaattacaatccaacaaataaaatattaaacaattatttgaattatatcacagttggtaatttcgagccttacaaattattcaaacgtatgagtaattatgtgatgagaagggacattaatgatttgagttgattttggatttgattatgttgtgtggtgtgatattctgattatgaagagaagccatgaaaagttatttgtttcctccgaccaaaacctcataatcttttgttgcattcattactaaaaaatataattaagaattttaattaaaatatagatgatttttgagtaatttatgttattctacttttaaaatttacattcactactcattagtgatattttaaaattgggactagattatttttttgttaatattgaatgaataaattagtgtaaaaaacactttgaatgttcaaaaatatgtctcaattattactttggaccatctatgattacatgcaagtttaattattacaatgtttttaatttatattgcagtttattcattatgtatgatatttaagaatctttattatattatatgtttttgagtttaataaacatgaagtcatgttgtcggccaatatggctatgtgagctttaaatgtgtccgggatttaagttaattagcatgaaattaattataataaaaaatatatattttatttacaaaataataaatttatatatattttggctcataattattacaattagttgtatcttgaatttgaattcaacatggtttgtc

SEQ ID NO: 5489 - DNA, 1306 bp, Cannabis sativa
tattcagactataatatatttgatattgataatgatcgatgtttgtactaatagtacatatattgatgaaacaaatatatgaaaatacatttaattacctttttttcttcctttgataataagcctccagccaataaagaatgcaactaagagggctaataaagaagcaattgatgctacaatcggaactatatattttttcttctttatcttttggcaagaaggtgaagaacaaagatccttgtttcccgaaacactgtagataaaaattcatgatgttagagtcaaatcatgtcttgataataatcattttctataaaataaataaagatacaaaaaaaatatatatatagtgtttagtgtttattacactaaaataaataaatagttgatatatagcgtggaaccaaaagaaaaagaccttagtaataacgagccattgatggattttttaatgaggtcacttggaattgatcctgtgaggttgtttccactcaaatctctgaaaccatagacaaaattatgattctttgttaataaattggtatctaacaaaatatatgaaatcatggacaaaattatgattccttattaataaatatacatgtatatatttacatttggattgtactatagactaaacttacaaaacttttaagaactgtagttcagaaagaaattcaggtacaaatccgctcaagttgttatttgataaatccctgaaattattatacagataatcaattttttttcttaatcaaactaatccatgctataaattaagaggaccttaagtaaagttttagtatgaattaatatattgacttacagaaattgtatcatggtaagatcagatatggaggatgctatctcccccgtcaatccacttgaagataggtttctaatatttgcataaatacataagtggaacaagagttataagttgcaagtagtacatttataagttggaaactatagcctcaaaatttttgataaaaataacgactaattatagtaatttaagagttgaaatctaaaactcacaacgatatgattctaactgaatcttgaccactaaagctgcaatcaagaccagcccatgtgtatatttttggagaacatggatccccttgccaatttttctgtacgccgtacatagatttgatattcaacacagcaccaactagataaaaaaaaaaaatagaaggatttaatatgattagcatcttcaattagattttttttcattattttttataaagtcgttaattagtattctaaattcatcagaaaagtattaatgtta

SEQ ID NO: 5490 - DNA, 565 bp, Cannabis sativa
caatagggtaggcattagtttatctacaaaacacacataattgttccatttccattagtatatggattaaggcttataaaatagaatggtgatagaaaatgtgataaaaaaatctaatagtaatttttgaaattttataactaaataatgggtgttttacttatttggtatgttttgtttttatttaaatacaattttgaaatcatacatatttattattctgaactcaaatttgatcaatcaaattatctttaattatatgaattttaaatttaaatttaattatttaattacatataattgatgctaatttagttaaattgattagatttcattttaaagtactaaatatgtatgatgttaaaatacaagttagcatatgagtattattgaaaacataaggtatcaaatttatttttcgagaaaatacagagcactaaacaagtatattcccctaactacaacttttgattatttttctcataataacaatgccaaaaagtgatataccttttacaaacttcactaaaaaaatgctttatttcacagaaaaaatgttgcagct

SEQ ID NO: 5491 - DNA, 789 bp, Cannabis sativa
aaaataaaatccaaaaagagaatcaagagtgagaaacacacaaaagtgaaaaaaaaaaacacattgagagaagaggagatcaaaacttaatataccttattatacgttactttatatactttatatgtatgtaatgtaatatacaatttttttttatatgtagatatataaaataaatgtgtgtatattatatagtttacctaaaaacattacagctgtgaggctgtggggctttggtggtagggacggagttatccccacgagaaaatctactgctctcccgccttcccgctcttcctcttgaatctaaaacaagaaagaaaagaaaagaaaagaaaagaaaggaaaaacccatatattttttttttggttagagactgagagacttttcagggtggggaaatgggaaaggagagaaactatggagaaagatagttagtagagtgctaatcggatgggagggaaaaacttgttttcagttttaagagtttagtgagtaaatgttggcgaagaagttgaagtgactcactgcgtttctactccccttctactactctattctcttctctttctctttctctatggatactcctgagaagaacaagatcgggactcccaaatctaaattcgaggtgaccctatttctgtactttgttgtttgtttagggtttttttttttttttttttcatgagcagtcaattgggtttctgtactttcatgattttagtttcgaaatcttgttcatttatgaaaatgttgccctaggttttcgtttattaatttttttt

SEQ ID NO: 5492 - DNA, 3151 bp, Cannabis sativa
  modified_base (2496)..(2504): a, c, t, g, unknown or other
  modified_base (2531)..(2539): a, c, t, g, unknown or other
gggcacaaaacccaacaatgagatcatcaaaaacttactcttcgtagtgctggtcttcttggtgcgacagttccccatctccaacgcttccctgtcccttatgacacccacctgagagctttttgggggagctggttctcgtcgtcattggcggcattctccctaccatctccaacaagtggtttgaccactgccttttgggttgcaaaccttgttgtatatgatgattatggtaaatctttcctcagctctcaagcaccaaaatatttactgagatttttgaaaattgattataaagtaaataagcttaagaaagaaataaattaaagaaagaaacaatgattttacatggttggatcgttaatgagccttagtccacgaatcaatattattgagttagaaaagcttcaaattattcttacagaagagtttttgccctagctaaggaactctaattcttagcccttgattgcagaaatgatttttcaaccctttgcaagggataatgttctatttataggctagaattgggtttgggtgaacgctgacctagtaggatttaaaggtgtctactaggcccatagatggggtaaaatacaatatatattaactttggccaatttggtgaggcccaattaacgagataactatcgtccgtacgagtggagtcatttggtgattccaggtgtcatgcgcagttatatgttggtactgataatgttagaaaatatggcattggagaggtggtttccttttgttggttcacgcactccctgggtctaacataggggataaacctctaacatggtgggactccgtgtttggggacgccacataggatgataattggagacttctagacatctcttcaattgcatgtatttggattaatctggatagaccttttgtcttttaggccaaacaacattccccggaccaaagtggtccaactttgtagcatttgtaagctgaactaacatccgtatccaaagtcgtagcttaactccgttcatgggttgatttattaacttaatagggtctaagaatgggcctggtttggctgatattgggctttggaagtgcatacatcactggtctggaaatgtggataatagcggcaaaactctcttaacatttgtaattgttaaacatatcaccctaataaaaaaaagtggtggcaaaagtaagttatcttacaattttgttgcagatgtatcattttagtagttgagtgccaactaaaaaatacgtggcgacatattatttaacagcatattaaataattattatttattctattttttttttattaaaaatatacaaatttgaatagaaagactaaattagtttttctttaatcaaataaataaaagttttttcaaagaaaaaatgaaagtttttttgtttaatatgtggttcaataatatgtcgctacatgtttctgagttaactcttaacgagtttagttggcacttaaaagctaaaaaggtatgacttgcaataaaatcgtaagataaagtacttttgctgccattttttattaggaacatatgtgtaacaattacaaatgttaagaggatgttgccgcaaatatcccttaaaataattaaacgataattatgccatcaaataaataaataaaaaatattttttttatgaaagataacttagtcatgttaaaacattccaattatctttactagttacataaacaagataaaataattttaattctatttttaattagcaaacaacatcatgattcagattgtttgatctttttattattttttatcatttattaattacgattccaattacaaattaataatggaattattttatcaatacacaaaaataacaaaaaattactaaaatgcagttgtacagaattttaaatatattagttttttataatttttaagattttatttacaaaaaatacggtcttttagtattttcatgttatttttatattctactcttattattttgttgttggttttaagttatttaaatattatttttatattgtttgaatgttatttttctattattttcatataatttttttcgtgttattttataaaatatcgtaaaaatataaacatatatctattttatataaaatgtggctatgtaatgaattttttggtttaacggtatttttcttagctttctacgtacaaaatattatttattcatttcataatattattatatatattaataaataaaaattatgtaaatattttatataaataaatttaaaatacataaaataaccatattttttactttaggggaattaccgcatatactgttttttaactttttttttaaaaaaaaaatatacggtttgagtttctaaagtggttgcagcgctcgttgcaataggggttttatacgattttttattgcaattttggttgcagcactaattgcaataggggtttctatgtagaattccgtgaaaatgccaaaaaaaaaaaaaannnnnnnnnaaaatgccaaaaaaaaaaaaaaaactnnnnnnnnntgtaaaaatgaaaaaacccctttactttattagtaactttgaaattaaaaaaaaaaaaaaattatatcgatattatatataaagaaattttaatttaaatttaaaatacttaaaatattatagatatttttaactatatttttttaaaattttattagtttaattttgaattaaaataagagataattctactcaatcgagtacacaactatagctattcactacgtgcgatgtctcacttgtgttttattgtatatataaaatacgtatgtatagttatgggtgcactcttaatgggtatcacctatggatgggtaaaattagaaaattttagtttttatgcttaatttttcaatctaattaaaaaaatctctcatttttatatcatatgggttgagattgttccatcagtaaaaaaaaatttttaaaaaaagttttttagcaagaaaaataagaaaagaaaaatttgagtttgagttaaatatttttgtatggacatatttttgatataatgtaaaaaaagatattttttaatatttttttaattaagtagttaaattaagcatggaatttcaaatttgtaatttcattatgcgttattagatcaaaatt

SEQ ID NO: 5493 - DNA, 1188 bp, Cannabis sativa
tggcttgccacaatgccgagtgtggagcagcctcagcctgttgctaaggaggtagacattaagggggacgctgaagtccaagagatggaggatcagggcaaggtccgtctcgatactctttttgaagctaaggaggaaggtgcagctcggaggttgccctttggtggcttcaatgaggatggaaaacctgtgttcgagaccggtgaagactacattattgtggaatacaccgaggcattccttagagaagacaaggtgccgctggagcttggtgggtttctcctccatccacagtgacccaagaaaaaatgaagaatttgtagaagcacgattacttaagggatgtttaatgcttccttccctctccaaaccaccgatcgaccagtccaagggagaggtactgcgcttggtcaggcgcccacactaagtagggtgctatactgcccttgcttctgtacttcaaaagaattgcggattattaccatctctgccagacccaattcacttcgaagggcatcaagtatttgtctcccctgttcattctttatgcctcatagggatggggtgagccatctccgcacgacaccaattggctttttgatctgaaatcaacccccaagcagaaaggtcggggtatttctatttttctcagatcaaagaaaagtggctgacgggcaccgtggactctgatgtgagaaaaatagggaattttgtggatgagtacaacttcatccagggcatggataccgtctacactcggttccagcagattccctcgtactgtcgccctcctttcacattggagctcagggagagagcacaaaaaaattcttcaactgccgaacactgctcggaacatcattgttctggccactgaggccaattatatcaagtaaaaattcttcccagaggattttgtgccgaggcccatgaagaagaagaaggcaaatcctagccaggtcgaggtgaccgagcaggagaagtcgagcaagaagggaaagaaggttcttcctagtgaccaggcaccagtggagcatgctatcatgattaaggaagctaaaagacctgtccggtcgtccgccctagtggaaggaaaagggaaagttgtcctgatcgaggaggaagaagactcttcagatgatgaggctccgtccgttcttgttagggagaatgctcttgcccaagtgc

SEQ ID NO: 5494 - DNA, 527 bp, Cannabis sativa
tgagtcaactcggccgagtgatgagctgactcggtcattacaggtattggggtagtaggagagaggcctggcccaagatggtgccccaaacatccacggtgtctaaggtatttggctcaagagctcgtgaacggttcagatctgatctgactttaattgaagcaacggtcaggaatgaccgtggtgattcttaccgtgggctgctgaagcaggcgaccgctgctctactcaattcttactcaaggaaagggtttccgtacacttcttgggccgtgaagactcttcttattaaagctttggtttctgatgatgctgcggcccttcaggcccaacatttttatattgctaatgaagcttgcaattaatgggcctaatctccggcccaatagaaatatatatatgacttatcattagtcttactctgtagtttcgtacatatcgtgcgtttgtttaaatttttaatgatgatcttttgtgaaattctttgtttgtttcatgagaatttcaatatattattagaatttcag

SEQ ID NO: 5495 - DNA, 1625 bp, Cannabis sativa
  modified_base (168)..(190): a, c, t, g, unknown or other
atggcctatgagcaatccaatatagtcttataattattatgagatgccgacagcaatattatatattgtagtggactcgccaattattattattatagtgtatttgaatatataactattaaacaatcggtactactggggtcactttttatttttatttaataaaannnnnnnnnnnnnnnnnnnnnnnataaaataataataaaacaaatctcattaatatttgaatcacgacccatttaacttaaactgctaaaactaattcaattcaacaatttctccgatcatatcgctcgaaacaatgattgggttgaggataactctaaactcgattttgcgggaaactttaaagctcaagacttttcttcttccttggataaactttatcacattcctttggggattccgcctcttcgaaccaatcaaagacacggtatgagttctacatatgaatgtaaagaactttatgagagtattgtgtatttatatttggcttcgaaactggctaacatggtttttttatttctgtttcccaggggacttatctattgagcgttctagctctcgtagaagggtggcttcagttgaaaggttaatgaataatgaccccaagatcccaagctgggacctttggtatcggcgatgttgtacgacgcggagctcgatgattgtagcgttgggagaagggcataggtcgatgacgtagaggcggctgttgctgaggattttgatgctttgggtagctacggataagagattcttgtagaagggactgaatttgacgaagtacgtaaccattgaattgaatagggatttctgaagattggcatcttatcttcaatggctcaattctctttgactattctcggaagttttttttctcattttaatttgattatcatgcaattttctttgtatatatatatgaatattttctcatgatattctggtattttttttttatttgaactagctgagtggaatcattgttaaaaaaaaactagctgagtggaatgtgccagagtttgttttgcccgatgatagaattggcagcgtgatggagggtcaccattggttaccttccttaatgattcattgtcgaagtgatgactcaactaattaacccaacatgttactattgttaaacaaatgggtcaccatacaaatttcattaaaaaaatacaatcatttatatattaattaaaaacaatataatacttttatctttatgtcttattttaagagaagtgtaagaggagaagagaagagactgaaaaaactttcttaattctccgaagtattttgtttagtattatcatgtagagggagagaagggtaagtggttttcccaattctaagttggggttgggtttggttgggggtggtgtttttagctttactatctcagtgaaattttaactcacgtgagagagagctaataatatatgactccatcggcttcactcagcttcttcgattgaagccaagccgtaatagaatggaatcatttgttgataatttgaaagatctatttaacaaatccattccggaatatagggtgaccactgaaattcttgcattactgatattaacttttgataggtgagctttgaggttaaatgatt

SEQ ID NO: 5496 - DNA, 539 bp, Cannabis sativa
caacttcgaacttcattttttttttctttgatgatgagtatttcaccattggtttaaggtaacttacatacatatatagctccaacaacccatgtctataaattgtttttataacagtggatgacttaatgatttgtctctaatatatgtaatgatatgtatgaaactatgaattattgtgtgtttgacagatacttcgtaagataacgacgaacattataggctgggggcatcttttgcatgcggcattatttattaaaatatagtgagagtttttgttataaattgtgttgcagtataaatcaaaacgtggacatataaatatatatatacctatttacccattcgcaagtaaggaaagattaataaaatcaacaagccattgtcaatacgaagatgagatatatatatatatatattaattagcagcccactggacattttatttgtatagcgtcatgtatatttctttctttttatatttcattcctaggcgtaggtcaaattagtcgctattagattttctaggggacactatt

SEQ ID NO: 5497 - DNA, 608 bp, Cannabis sativa
ttctgcattgcactttttttttttttttccttatagcttctaaaaagcaagggtgccagactgtcgttccttattgagttcagaaatgaacaataatgtctgtgtaattatctgtggtaaatgattgaggcaggtcttaactactattctcaagtctcttatatgttacttatatatatggttcatcatgtcatgtgcctatctaccaatcagcaaaggcaatatattgttctctctccttttccaatgtaatttagcattctttctttttattatcattattggttaaaaaaaaaactttgttgttgagatcaaaggtatgtggatcttacttttcaaatatttacttcaaaataaaggaaagcctgagtataacaacaagtccgctcatatatatatatatgggataagattggcccttgcgcagattgagttagttgataggcacatgtcgtcaccattctctaaagcaactactgaatcattttacttaaagcttttgcataatgttcggaatatcactcttttatttattttttatttttctggaatttttaatattcaataacatatccgaatgctattattaaatctttttgttatatatt

SEQ ID NO: 5498 - DNA, 519 bp, Cannabis sativa
caagtccgggtcctagtcacatttccagttctaattttgggtccgacataggttctaggtccaggttcgggtcagggtcctagtttgggtacggttttttggatccaagtctgagtctgggtctaggttcgggtctggatttgcgtctgggtccgggtctagctcccgtgttttgatcccggtctcggtctgggtcggcattcgggtctgtgtttgggttcgtgtccaagtccatgtctgaatcccaatttacgtgaggggccatgtctgggtccgagatcgagtcctgagtttgggtttaggttgaggttcgagtctcagtccttgtctgggtctgggaccgggttggggactaggtccaggcccgagtttcagggctgggttttggtctagttcctggtcccgatctaggattgggtttggtctgagtttaggattaggattgggtcttgttacaatcccatgtctaggttctagtcccgttccttgttccattccgggcccggcatcagctcgaac

SEQ ID NO: 5499 - DNA, 513 bp, Cannabis sativa
atctcctatgccaaacatcactttgtgaaactgaaaaatgcttaacttgggactgatctaaattgacattttgagtattagcaacaccagcaaacagttctggtttgcgaactcttgattgaatgggaaaaacagatttgaactgagaagattttggtgtggaaagttgatagagactatctttaagcaccccttgtagcagcaccttctttgtttccttgtccttaataaaacacacattaggataaaactcaatcaatatcggattgtcagcagtaagtttcgaaacactaataaggtttttagcaatatcaggcacgtgtaagacttctttcaagcacaaggttttaccacagtttgttttcagaaaaccactaccaacatgagagataaggagtttgtttccattacctactgtgactgattccttacccccatactcctgcttgttgttcattgttgtagcatcggcagtgatgtggttgctggcactattggaattattttaccagg

SEQ ID NO: 5500 - DNA, 531 bp, Cannabis sativa
cccttataccaaacgccccctaagtttattactacgaaatagatttttggtttcagttcgacaaatacacttaaaactacttttaacattttttctcggtttatataactgacacttataataatttttagtgttgattagtagactaacactaaaagtataaccgagacgaatgaaatttttaaaatatatacttacaaaatgagtataagtgtcggtttataaccgatattaaaaaattctttggtctcaattataaatctagactattgagctcattaaaaaaaaggacaaaaaaaaaaccctactatatatacatattattctaaactctatatttcaaacccctctgtctttttttttttcttatgcctcacccgatctctctctcccttctcattttcatgcggcgccgccctcctccatccatctcctctggctgtccatctcctctgttcgcttctctctctatctctctcgataataggtatgtctctctctcagtagagttctttctttctctctctctct

SEQ ID NO: 5501 - DNA, 2206 bp, Cannabis sativa
acatggtccagaccatgtcgtagcgcgctcccaaaaattcatctttttaggatttcataaattggacagggctgtggcgtgggttttaccatgtcgtggcccgcatgcttaaaaattgacttgattagagtttttaaacccttaaaaattctaaggcgatttttttattggaactttaggaggacgaaaatagagagttgaagtgactttggagactacaaccattgatcttcaaagagattctctcttctatctttaatttcatgtttctaattagttttaatcaattgttgacaatgacaatgagtagttaaatttctaattagggtgttaatggatattgtttgatatttctctatggttttaatacaattttagttattccccaatttcgtatgtgcatttattacatttatgtctaatgcttataactgtttgatcaccaattatttgtttataatttcaatgaaaaatctaaaaagtgagtattgattatgttatagtaaaataaacatagatttcgatattggatgaatgaggaatgctaaggacactttatattgcactctctttataaatgagtgacatgtgtaactttttaaggtatatttgagtatagttacaattatattctttttactttttatcaataattaaaatgtgtcatctcatttacttgtttattttatttattttttagactattttattaatttcttactttttttttactaaataatatgcacgactatgcattttattaaaattcttttttctaatatatatgtaccattttatgttagaaaaatgaaaaatagtaattctttctttttttttaacaagttttaaatcagtgtttttttttcatattgtattattctttaaattattttttattttatatttgttataatatatatatataaaaaaaaaaaacaaagagaaaaaataaattaaatatgattatgcctagttaattgtatgtgttagatggatttacttttattttatttttttaagtaaaaaaaattcttttcatgaataggcaaaaaaactaattgatttaacatacgtatacatatttgattaaagaaaaatttgagaacaatttaagaaaatgtaaataaaaaaacacaatttttttttaaagaatgatacgaagcaaaaaaaatatatattaaaaaaattggtgcaaaatttatgaaaagaattatttttccattaattataaaggccaatatttatttattataaaagaaattaaaagaataatttattgtctgaaaaacaaataaacaagtaaatataaataaataaattattagttttaaaaaattaaaataacaattaaatgagatgactcattttaattatcattaataaaaattaaataagggtataattgtaactatttttaaacataatttagaaggttacacatgtcacttaattaagaagaaagtgtaaaagagagtttctttagcactcatcttggatgaatatacttatatgatttgtgtaacaattataatttctatgcttaatgcaaactatactataatttataacagagaagtgtaggactttaacatataatttaaattttatatatcttaataaaaatatacaatagattgaagtagttaatcgcccatcacatgaaattaaaataggaattaaaattatattaagccacaagaaattaatacaattggaattaattgccttaaactttgatcattgttatttacttattctattattgcttttaatttagtttcaatttcaaatctcctttaaaaattattgtcaccaaataaaactagaaatttaattgtttagtatttaacaacaatccttgtggattcaacctcacttacgtaagtatattacttgtagtgatacatacacttgcgtaataaaatatagcaaaattatgtgatagagacaagattgatcgcattaatctaaacaaaaaatatacaaaatcatgtgacgaaaacaagactaattacaataacaaaaacttaatcatagtagcaaaactatagaccccgactaagccacgcttaaacactagaaggatcaacaggtctggccgaagaaaaaaaaataacctctcgtggctaagaatttaggaagagaaactttaaaaaacccatacacactcttttattttaagtttcttgtgttaatattcaaaata

SEQ ID NO: 5502 - DNA, 644 bp, Cannabis sativa
aattatatatgaacttttgcataagattaggacttgtaattttgttgtctatattgtggctaagtggactttcacccaccagatgttcggctctgttccgattcccttattaccggagaacttattttgtaacgaccgtgagatctagctactttttaatttatgatgagtacgcttttatttaaaaaagaaacttttgcataagattttctcttaatttatattggacctcctaaattgtaataataaaaatggtaaaaacattttatactaattgttcaacttattatagttttgtttaactaatctactagttttgttaattttaccaccctttgctattttatatacatttttttataaaagaaattagcataattaattgtaagaataatataataaattcttctattttcctaatatgatgatagtaaatttgtgggatcaaaagaaaacgaaaatatccttgagatagaataaatttctgaaagctctattttgggattatccttgctttgaaaaaataacaattaatcaaatatatattttaaaattaaagattaattatatcacttattgttttttcaaattttgacataataataactagttactattgcaaatttgaaagaaaaaaataactt

SEQ ID NO: 5503 - DNA, 697 bp, Cannabis sativa
atgttcttgatttttgggtgtgtattgtattggccgaaagctaaagggatttattcgggttgtatttttcggtttggttttttggccatgaggatgtgaaacattttttgtggttcggttttttgagtgagtaaagccgtgagtgagtgcttttctgggttagtattttcgggtagaagatttgtgttttttggttgttcttgtttcgggtataaactgttaaggaaaaataagaagagaaaagaaacattagtaaaaccaaaatcccattttatatttcagcaataagaaaagaaaagcttgaagggaaaaatagaacctttgaagaacattaatccttgcggctgtagcaagaagaagagaagaaattaactccataaactcttgttgcctttgtgttgaaaagaagaagaagtgaaagaaaccctaaccctagaaaaccctagcagctgccattagagagaagaaggttttttggaaagttttgaatattttagagagggaatgatagtggctgccgaatagagaagaagaaagtattaggtttttagtgttatacctttggcttttatattagggtttattaacttagggtttcatttaagttgggctgatatacttgttgggccgaatatatatcaaaggagagtcttgtttgaattcttgcattgactgaaggagtgattggagagagaaa

SEQ ID NO: 5504 - DNA, 2752 bp, Cannabis sativa
  modified_base (2560)..(2562): a, c, t, g, unknown or other
gccggccaagcaaagcagccaggtgtaggcctagccagccaaggccagctctcgtttcagatggccagctagggtttgtagttcaacacgggactgggtaatcttcaccatacactctcccagggtatggccagccagctcctatctctttagaatctgtagcctccccaaggagggtcagtcaaccaagtccccacagcaatagatccttttgtgcaagcgcagttagaccaaccagggacatgatccaaggcatagctggtccgaagcctttcgaccttaaacttgatcgatcaaggggatcaccattctcggtatacataaatgccttgctcttacccaagttcaaaatgtcagtatggatgatgtacaccggtcaagaggacccacttgctcacatcaagtatttcaagatgcaactcaatcttcagaaggttactggtgatgttcagtgctgcatattcctagccacattgtcagagacagctcaacaatggtagtttaaactcaccccaggaagattcaactcttggattgagttctcacgagaattctacacacaattattgtccttgatacttgtaccattgcaactagaagtccttgtcgaagtcaaacaacgacaaggggaacctctaaaggattacatccagaggtttatggccgaagctactaaaaacaaaggccttacagaagaaggccaatatacggtcatactgggcgggatactcccactgagtcacttctggaaagatatttgatggatttctaccaacaacatgaagaagttccttgatagagctgatcactttatcaaacttgaagaagccatacgagaagcccaagcggggcatgtcaacaacaggcagtcacgaggcatccaacatcctcatgaatcactaggcgcacaggcatacacaagtaattctacccacacttctagtggcaaagcactagaaacaagcgcgacaccaacaactctggaaggatcaacggtaaaaaggggaagttcaacacttctccaacaccacagaagaataaggaggagaagtacatcggcttcaccctcctaacaaagaagcttgaggccatcttcatggccactcaaggaacaatcccataccaaaagccctttcctatttagaaagacatgggcaagagggacatgtcgaatttttgccgagatcacaaaaagtttagccatgacaccaatgagcgtcagaatctgaagagggagattgaatacctaataaggcgtaataatccccacctacattgttatgtgcaagacgaccagacccatgcaaggaggcctaaatagagatccgatgccaccgcctatggctgaacacctgggggtcatcattggtggaccccacattgcaggcgagaccagcataactagcaagcgctatgctcagacactccgtcacgagcccaaaagtaaaatcctaactacccaagactggagctctaagcaataaaaggctgaagagcccacggtctccttcactaaagaagatgctgctcgagtcagtttctcgcacaatgacctcctggtcattactgtacaaatcaagaacatggtcgtggcaagatgtatggtggtcgacgaagcctcctccaatattcttttcaaatcaacatatgaaaagatgggactccaactcaccgacttggcgccttgcaaccaagtgatgtatggcttctttggccaaggcatcgcacttgtctggtatatcaaattacctctcacagttggagaaaatccaaccaccagaacactgatggcgcacttcattgtgattgacgttccctcaaatttcaacgccatgataggtcgatcggccctcaaaaacctgaaggcggtgacatctatctaccacctatgcctcaaatttccaacaaggcatagggtggcatttgtgaggggagaccagcagtattcccgtcactgctacaactttgccctgtccaaggctataaaggagaagatgcccgccaaaagctcagagaatgagcccaacaaggcagaatgaagtctagcccaagaaagggacacaaacatagatccttactttgcggatcttgcaggaagctttggacctgtagaagagttggaagaagtggagtgtaatcccacttttccgaaaagaagactgaagatcggtaaaggttttgctctagaaattagataatattgatagaatttctaagggcaaacctggacctttttgcatggtcacatggagacatggtcggaatcgacccctccgtgataacccatgcattcaagattgatccaagcatctggcctattcagcaaaaaaggcggttgctagacaaggagcgcgcctaagcgctcaaagatgaggttgaaaggctgagagccaatgacttcataatagaggcattctaccggcagtgggtatccaacccagtattggtgccaaaacccaacaagaagtggagagtatgcatcgacttcaccaacctaaacaaagcatgtccaaaagactactttctactacccagaattgaccagctagtagatgccacnnntggccatgaaatcttgagtttcatggacgtgtattcaagttaaaatcaaataaaggtgcatccactagatcaggagcacactagcttaataacggacctaggcctctactgctacaaagttatgcccttcgggctaaagaatgctggggccacgtgccaaaggctggtgaacatgatattcacagatctc

SEQ ID NO: 5505 - DNA, 924 bp, Cannabis sativa
tatatctgataattgcactcattttgattagtttccgcatttcctcctagattacattttgttggaggagaaaaaggctataggtgaccccatgtttgacttgatattggaccctttttggaaagaaagtcatttcggaaaagtcttggaatgacattcctatactaggtggcgtttggttgggagaaatgaaaacataaaaatatgaatgagaatgggaattggaataaaataaaatttaaaatgtataaaaaaaattgataaaaaaattattaaattttttctcatgttacattggaagtctttttttctatttcaaaatagaatagtcattttaccaaaatgatagaaaagacgttcaattaaaatgacattccaatattttaaaatgcaaccaaataaagaaataaaatgaaaattatttctatttcattctattttattacttccaactaaatgccacctaaatttcaaccaaacaaaggagtaaaatggaaatgtattcattttcattgaattacctattcacagagcggagcttaattattgaacaacttattttcccggtgaataaacaaagtttatgtgatgaccacaataataaagttgcatagcaactatgtctaaatcttttttattgatcccaataatgactttaagtttggattttttcattgttctatttataattttctacagcactgcatacgctacatagtgtcaactttattatcaactaacgttttttatgtgtcatcatccactgtaggtgctattgtattgttcatgaagataatatattgggagctatatttagtatatgggacgaactaaaagaagcaaaatcctgggaagaagttgagcacactgtgtggggtgacttaaacagttacaaaggtcttctttgatcatttttattttttt

SEQ ID NO: 5506 - DNA, 1398 bp, Cannabis sativa
cttatgttagacgcaatgttaatgttacaactcatagattaatttagcatactcttagtaaagatattaaattattttggatataataaatctcacttagtgttctttgctacttgcaccaatcatatttagacaagtgggccctggggtctatcctaccttcatacagctccattagaagcattctaaagttttttgacaagagtgtctctattattcttcttacacgtggttcctgatcttcttcttttgaatcagatacgactccactttgcctccgggaaatacattctgcggctttgtcaattcagccattaggtcttctagacttggtgtcgtcttggagttcacacccacagactcgatcattaaaatgattccttaggtcgtttccattaggtctcaccttctcacatctggcttgttctttctttgtgtctaaacgtgcctggaggtcatttgttgaaaaactaccttctaaaattgggtgaatctcatctactctatcactatggttaataggattactctagtccatcactggggttaataagattactagggcagtttttccttccctgagcggtaggcctttgttccttagtacttagcttatcgtaactatgccttgtagattaatcaggtggctttactctggagcattgatcgccttcttttttccgtaaaggtcagttggcagtaatcgtgtcactctgtggagtagtgggagtaattttttttgttggttctcccatgacacattttcctttatcctttgcaggatcaaatgtttcagggtcttttgggtttattttctttgtagcattgttttcctaaggaccaggatcattaggaatattttcatcaggttccacttctcctaactcaattctgacctctaattaaagtttcttccattcaatgggagaattcctcctgagcagccaacttattcttagtttcagcatgttctttagccatgtcaacgactgtagggtatagctcataataatattccctttctttgtctttttcatcgtcttttggattatcgtcctcgggatcatcctctggatcttcattgatggggttttcatcaacatatttcttagtatgttgagttttcctagtaggactattggttgcttctgtcgggtctccattgactcttgtttttgtctgagtattagggttcacatcgtccatacgaatatccgcatcatgattactaggtttaccaacagtggtttgggtggcaacaacagttgcagtatacaaccattttggtatcactactttcttcatctctcaattaaaataccaaaatatttatcgacatttttagaaaccaatatccaagagggggtgaaaatgttaatcaaacaaatgcaagtaata

SEQ ID NO: 5507 - DNA, 515 bp, Cannabis sativa
gctaatgttgaattgttttcacatagaactatctatatatgtacaacaaattatgaatttagatattttgatatatgcatattctattggcttgcttatctttagggttacttggtaaaagaaacattccaaaaaatgatgatttataagctcaacaattcatatataatgagatataagaatacaagtaaccaaaatccataaaagcgtggtaagtcattaatataaaaatctgcgggacattataattaagaaaaaacgacatatcagtatgagcaatataaacatatcacagttttcattcttctaaataaagaaaaggtgctatgaacttctttgtccattaatattggtttttcctttgggatgcagctctacttgcttagaaagtataagtttttgaacaaggacaaaattgttacttgtataagttatagagctgtgttatgatgattattacttgtataggttatggagcaatgttatgatgattgttttgggatgaatgtatgata

SEQ ID NO: 5508 - DNA, 1102 bp, Cannabis sativa
acaaaattaaaactaaaatgtttggatttttttttggttctaaatgctatgtagctctaacaaattactaataatttggttctaaatgaaaaaattggattattttgcaaaatatatttttataattatttataaacttataatttaatttattttgatattttattttttatacttttggatttctaataaaagatgatgattttacaaaaaaaaaaaatcaaattattttgtaatgctacgtcataaaaagtctaattttccacaatatttatgatattttacttttattttgaattctagaccaacaagttatattagctgttgttgagagggtaaatttacccaaagtttcatcaacaacattgacaaacaataattaaaattcacaatataaaaaagattacaaaaaaaaaaaaaaagattaatatatagaaatgactaaaccaaagacgaatctaactcttaaaggcattaatcttctcaatccagcttacaatattttaccattaatacgatgaattcaacaaaatatttactttataaatcacaaataaacgaattaatgcttaggagtaataaaaatcttctctatgttctcacatgtctagctaaaaagtccttaatagtaaagtaatgaggataattaatcaaaaaaatcaaatgaaaaaacgataaaaataaatataattacccaaaaagtcaataagattctcataataaaatctagtaaatctttatattaatcttgtcgataagataagtctacaatcacaacaacgatttaagttcttacttctttagagtaaatctatcaattttcaatttttaattttcatggtaaataaatgtaaatctagatacgtgtaacagacttaccatataattaataatagtacatgtaacatgttgattttgtttaattttatatatatagaaaaaatataaattaatatagatgcatatatatatatatttattacaatatattaatttttaaaataaggattaatgtgttgatttggagttagtggagtccggttgctgtaatgcgtaccagctcattaattttcattttcttcctttctttttcatactcatc

SEQ ID NO: 5509 - DNA, 739 bp, Cannabis sativa
ttactcgataatctctaagggggaaaggtagtcctcgaaggaaggtctagaaccacaggctggttggctagtggagggtctgaaaaaggaagagacaagtcgttttgggtcacatcggaagactcacctgtccgactagaagaagagccacccaaggacctcttcaccaagtctctcatcttggaagccatatctgcaaaaaggaaaataacaaagttaaaatacaagttataagtactaaatgcaagtaaaagtaagaaagttactaccgtctggagggttgtccgggagcctctcatcctcagaagaggaatcatcggagttgtcctcagaagcaacaaccttgcctttatgtctagacgcatgtggtggttggacaggcctagcagactcctgtcttttgggcttgatcaacatgggggcatcgtcaacagtgcctccttttgacaagcgcttccaaagggcatgttccctcttagttttgttcaagccatcttggccagtgggatgtcatcatcagacctggccttttcccattcaggcatagcccttttcttcttgccagcctcctttacagcaggagtgtcgtccaggatcctcagaagggtaacaccctcgacatcctatccagaaggatacaagcagtagctcctaaaattctcctcgcaagccaattagcaaatgttacgcctttcagcagggagagacagaatatgattagctctgtccctcagcttga

SEQ ID NO: 5510 - DNA, 613 bp, Cannabis sativa
tttccatattataatcgaatcaatccaaacacaccctaatgtagccaaattaagctataaagaagagcttatataatcaaccaccaatacataatgtatattcatgtcatataatggaatttgaatatgtatctatagaatagagtgaaagaagaatttggaatgacatatcttcatattgaataatgatgaaagtaagaggcccacacaagaaatgataaggcaattgacacccacaagaatgtatagagaaagcataatatatataagcatgaatcataaaaatggtggggtatatatatatattatatatatacacatttatatatataaattgagtatgaccctactctctaaaagcttcttagagggtaccactcccactgccagactctatcatggtcattcattcaacacattgtaattgcccaaatattaggctttgcattaaaacaaattacaaaaaagaaaaaaaaaattgttgatatatatgatctccatatattgaatgatattataatggtaatatgtgcatgatgggtttatttgttaaaagtgacaagtataggtgtgacactttaataggtgtagttgatcatatacatgatatatc

SEQ ID NO: 5511 - DNA, 1530 bp, Cannabis sativa
aaatcaataaagattgttcttcaccatatgttaaataattttaggatgatgtaatctatagcaaaactcatccactttttctttcttctctaatctttcaaagataagatatttgggtgacaaaaattgagtcaaaagctaccaatcttattttagagcatctaatcatgaacttttaaactctaattgctttaaagaataaaaactaccaataatatcatatgattactttctatttagaaaaactactttttacccttctaagaattttcccttaaaagttcttaaggattttagatataaataaatggtctccatatgcttaaaaaaatggtctccatacttctttacttctaccaactcagctaacagtcttaatctaattataaataaaaatttggtccaccacaacactaactgtctcaagttctaatttttgcccaaacaaaggaacctccctcttaatgactaagaaaataaataatgagagttaataacatttttaattttctctcatttcttttaaaaaatatatattatttagttttttttttttcatttctatttatatttattttcaatgaatcgctcaatgaagaaaaaacaacaaaaaaaaaatgttatatcgatatatatataatattttgatacatattttgagtgctattactattactcgtataatattattaataacttattaaacaataaattagtattgaaattgaccaaactaaaaataaataatctaaatttaaacaagtttgtatgttttagttaatttttgacaaccaaataatcgtgtgaaatattattattcatcgtgaaaattaactcaattgcacttgaatttgtcatttaggatgatggttcatcatcaagataatcataattgacatatattctaagattaattgtaataaaactcaaattgtacttggatttatcatttatacatgaaagttttgattgtatcggtttcaaagctcgttcgctttcattcttttatcaacaccattaaacaaagtgacaatgagtaatatcaaatacctcactaatcaatttcctattatttttgtaaatttgaagatgaataaatttgtaaggttgcattaattaataattagaggtacacattcatggtccttaatttaatggtaaaagcctatattatatagttttatcccggataatattcatttagttaacaagaaagagataggaaaagaaatcaatatggctttgaaaagattcaaaacaatttcatgactcatttaaacatgattttctttctagggttttgactaattgggatggctagttgatcacttttgatgggatatcttttgcaaaaacaaaattcaatagattaagatggatgcatttaaataaattaaaagagggtcctctttattcaacttggcctgtccaaaccttgaaaatgtcaagatgggatagacaccaaatgaccaaaatgtggggtactttgcttttcatttcctctcatataattataagagtattggctag

SEQ ID NO: 5512 - DNA, 878 bp, Cannabis sativa
ttgtagtggtgatagagaatcatcttaagtaaatttggcttgttgcagaagatgcaccatttatgtaaattttcattctttctctatagatgcacctattttgaggatgaactatatcctataattaattcctatgttaaactaatcatatcagtttagtatttctcccacatcgtatgtcataacacaaatttcattttctgctttgtttttatgattttgataaatttaaaataaaataataaaataactttttaattaaataaataatcttaactggtttattatgtaaagtaacccgtaaaattctaacggtcaacatagattaatttgaaatttacatgtcatgccatgagcataaaaaataccaattttgcatattgtattaattttgtttctttgaaatgtgttggaaaaaaataaaggttgcagattttagtttaaaattccaacacatgcaatgagcatagtattcacatatgaagttttaaacttttgttttaacatgaacttattgaacctgaagtactacgtaatgtcttaaagaccgttttaatccatacagtgatttcttcaacagaccgacttttatcttcagcacctctttgaatcaaaccgttcggttgttgctgcattagaatttcttctttgtttggagattcccatgaaagaagggtgtctgatcaatcacataatataatcgcagttcactcccatttcattatacatttctctaacttatttttcatacagtcaacacttggaaattatttttcataacagacaatataatataccaattgtactaagaaaatgtaccaatcatgcactatatatatacttgtgatagctcattgcaccaacaaatattgaagaaa

SEQ ID NO: 5513 - DNA, 534 bp, Cannabis sativa
cactacgactctacaagggcaacatggagtttgcttaataaaccatattatttacctaatttacgacaccaattttacctaataaggtattccgtttactttattttaagcacgaaatttacctaataagatgtttcatttaccttatttgttaaatgattaattcaagtataagtatttttaactgaataataatacataagcttggaaaataatatcaaagagatttcactaatgaaaattatgtttttaattataaattatgtttccttttaaccttatttatggaacaaaaatttacctaataatacttatcgtttatcttattttaagcatgaagtttacataataatatttattatttactttatttgttaaaatatcatatgtatatatatacaaattatacttctaattaatttgaacattagtttttcattattaaacatttactaataattagaattaacaaatgacatgacataagattgttgtttagcttatttaaggtagtcgtttaccattttagtataa

SEQ ID NO: 5514 - DNA, 1304 bp, Cannabis sativa
cacggcctgctgtcaaccgtctgctatgcaggatatattccaaaaagggatataaccccaagactttcaagaacttcatcactaagcaatgggtgggccggtttgctgtgtccatctctgattatgatgctgaatcagattcctacacaattacctttggttgtgaaggtgatctcaagagaatattgtctaaagaaccctggcacttccacaaccagcatatgattttatgcctcccaagtgctctgcaaaatgcttctatggaatcatacactatcactccattctggatccaagtctttcggttgcctttcctaagtaaatctgaatcccttgctaaaattctaggcaacatgattggcacatttcttgaagtccatgaagactcacttaatgaaggttgggggccttttcttcgaatgcgtgtcgaaatagatgtttctaaacccctgctgcgtggtcaatttgtcacatttccttggatggctgatgaactttggatagattaccgctatgagagactacttgatttttgttatgaatgtggaatcattggacatgtttttgacaagtacccgctgttcttagagaagattgatgacggtattgaaccaagtttgctttatggtccttggatggaaggttctcctcttccaaggtctagttatgatcggtataggcaggatttttcaaaagagggtccttggccattcctcacaagacttgctcgaaacacaatcaagccgattctttcacaatcaagacccctccctgctgtcccagtgaatgttactaacgctgagaaagggaagcaagttttggactcctctctaatcattgaatctaataacaaaaatttacactccttgcagatcaattgcctctcttctcaatttccaaaagaccacacttccaaaggccaagcatctacatcaggatctaaggaaattaacatggataagctcatcaatattcattgtaatactccccctgtcaccacattttcaaaagaaaattgtccaccatttaacactaccagcccctcttccacaacaacttatcctgttaatagttctcagaattcaacatctttacccattgccacttatccacccactaccactccacttttgcaaaaacttgtagccatatctatgcccattccaccagcgtacatacatgtttctgcaccagaattttcttctcctctgcaatccacctccacggctgttactatttctgctgctgactctctactgtgcactgagaatcgaatgaactctctcttctccaaacgacagcta

SEQ ID NO: 5515 - DNA, 989 bp, Cannabis sativa
tagaagaactagaatttggaatatagtgtagagaacaagtatttaagtttaatgtaattgtgggatgctttgcttattgatttctttgaagtttaatgtaacataggttggtaatttacccaatagaaaattggtttgtaatgatatttttaactttttttttgtagtgctttccctatacaatttattttgattataatcatttgaatttttagctaaattcctcatgcataaaatcttagatagtgattgcatgaaacatttaagatgagttgggcaaatcctatcttatcttcatcaaaataatcataaatcacaattgatatcttcattgttttgtagctattgctatgaagattaaaatgtctctatgtatattttccctctaatttggctcttcgtttcttgaaatagacatgagactggcaaaccccaccttgacctactaaggcttggcccccattccctttgtttacattgataactcaaataattatttatattgatttgttctttttaaaaaataataataataaaaaaaaagcttacaaatgtactaatttgtttcttcaagtaaaaaaggaaaagggaaaaaaaactaggaaccatgtcctactatttgtattagttaaactagtttaagaagacttagaagagaggtatatccgtaaattgtattttgtttttttattagttttattaaagaaataaatgttatttacttctttttttaattttaaatatttaataagtatttatattgaatatacaagcaaatcactaacctattgacattaatagttttaatagactaatatagtaacagaaatacaaagtgttaaatccatcaaggaaaaaaaatatagtatatatgaactcgaaaatattaagtatttatattgtaaataaaatttaacaaaataagagagctaatccgtcaaaaaagaacatttgatatataatacaaaattaaaaatataagatattta

SEQ ID NO: 5516 - DNA, 776 bp, Cannabis sativa
atcctattttattatatatacatatcaatatatataacatttagtaaaagagattagttagattcgttttcttgaaaatttatggggccagcgccatcccatcctatcaagtgcttccgccgctgatcatagtctcatacctcttaagtcttctaaaaaattgaaaggtaaataaagacgaaactaaaagtcaaggaaaaaatatatttacacttgtaatctacaataatcaccagttcaatatcttcattagatctttataatttaagcacatgatatataattttaatcatgggtgataattatcaatgatatatatattgtatataccttaaaaataaaaaagaaactatatatatttatatcggggtcagatatagtgcagagaatagtattattcctgcccctgctccatccccgtttcaggtattaaaattatctcctatcaccactccattaactaccaagatgaagaattcccaccttattaaaagtgggtctccacgactacccttcccaacggtataaattttgatttcttgctattaaatgaagaaataaccttccccaaaatgatgaaaaaatgaataaagaatagagacttctatataatatcacatcgagtacagaaaagaaaataattaatgaagcatatggaataaatgcagccccatttattggaattaatatagctaacttcaataactattgaccacccaagttttttgtttccttgtttttaagaccagatttaatttcataatcgtttatatagg

SEQ ID NO: 5517 - DNA, 1934 bp, Cannabis sativa
tatttttcattttgtaataagtttgattacatattctagttttatacgtacatataccttggtttttaataccaataataataataataataaaagataattaataaaattaatgtcaaccaaaaaaattaattaaaggaaaaataaatcaaggggctctttattaatttgtttcagaaacttcatacatagctcttcgtggcatggatatacattaatttttattttattaatatatcaaatataaatatagctctaattacaagctatatgtatgtatataatataacccttgtcataagatctcaacatcaaaccctgcaaattcatagattaaataacatcaaaacacattagaattctacacaaataaatagctagggatgcactatttataaataaataattaaaatgtgacaaaatctttaattattagttatatagtacttactcaatgaatttgatgtttatttttccggcgttaggatcagcgatcatagcgaaagcttcttgagagagatctatggttccttggcaaccagcgggacaaaaatcgacgattttgacaacgacagagcctcctctgcatgggttgtggttggcttggccgatggtgccaccgatgcatttaaccttgtactttcttccacatgcgcccttgtcgtcccatatggctttgcttgctgctgcgatcataactccttcctctttgtttccgtcgcaagctgacgctgtaattcatacccaatatttttattagtatgttttgtcaatcaatggcattataatgaatattatttttgtaattaatgtaattttaattatactatacatcactataattaatgatttaagtcaaaatcgattttttttttgagagatttgtgtggtaacaaaagttcattaataaaaacattccatgtatacatcatatggatttaattttttaatttcaaagaaaaaagtattacaacaaattttgtcatcataatatactttaggcactatattttttacactacataaaaaattaagttttttttttcttttgctgagtaggtaactaagtttatttgttcactttgaaaattataggtaagctgcaaacatatatatagaaaacttcattgctagctacatattattactgtaatttaatatcgagtctcacacattttaatttaataattaacataagaaacatttaactactcataacgtgcaacatcgatataatattaggcatcttagtactgaaaataaaaaacacaaatagcaaaagtaatacccctacctataaaaacactcatctaattaaatatatttgtatatatatgtgcatgtatacttacgagtataaggaggtgtgtagaaagttgcagttcctttttctgcaaatgagactaatgattggcatatcatgatcatgcctacaaatactattattactctcattgttgccattttgatgatcaatttgatacccaaaatattaatatatagtactaaatttaaacagttattatgttattttccctttaactgttttttcttgtgtggtacttaaaactcaaaactttccttctaatttatagatcaagactaagccaatcattattgagtttgatttggccaaaaatccttgcttacacattgttaattattaattaatttattttggagttacacttacgtagacaaatatttaattaagatatagtaaattaaatagtgtacaggacaactttgatattttaatttggaccaagatcttctgtcctacactaccccctcatgataatcatcgatccatctccattttatttttatttttgtatttactctgttagtcattttcactcttatcatttttcatgcatgcatgtaaaaatactatattttgttttattgactcattctaggaaccctaaaag

SEQ ID NO: 5518 - DNA, 1397 bp, Cannabis sativa
cggtcttatcgtccaaattagctagactacgttagctaatagcttgattgttttcctgggtttgtgccttggtctgcaaatatatataactaattcactatatatatatatatatatatataatggagaagagtgtgagaagtagtagtagtagtagtgtaataatactactcatgaatttggttgtgttttttcactatgcaatagcagcagctaggccaatcaataataatcaaactcaaactacatctacatctttggatgaagaaaaacttattgattttaagttaaagcttctcaataagcctccccttaagactatcaaggtaacaattagttttattttgtgttttttttttctactcaaattgggttatttaaatctttatttatatatttatatatttgcagagtagtgatggagatattatagactgtattgacatatataaacagccagcttttgatcatccagctttgaaaaaccacactattcaggtgggtattgtacatcattatattttaattttcaattacaattagtgtacaaattaaaaaaaaataataatatgggaatttaaaaaaaaaaatacataaaaacaacaaaaaaatacaaaaaaaaatacgatttttactgttgttatattttatttacataaatactgtttatgttgtatttttgttattttattgctttttttattattattttgttgttattttaatgttgttttctttttactataatgtggttttcttgtatttttataggatattataaaattgttaaaagaataactttgaatgtaaaaatgtataaaaatttaaaaataatatgttatatatattgtaacgacagatgaagcccagtagcgattcattagagagaaaaaacgacacgaactcaaactactcaaagagtgttgtttttcaaacatggcaaaaaaacggaggtttttgcccagagggaagcattccaattcgaagaatccaaagaaaagacttagtaagattgggcaactctaatgttgggcgttttggacagaagaacccttatgttgttaggcaccaccataacacaactctaaacgacacaccaaatgctgtcattttgctaaacgatacccgctcagtctccctacctgatttagtcaaccgctctgtaagtaaatgaaatgaatatttgagtgtgacagttgaatattttgaatttatgtaaaattaatgttacaggtggctttgctagtgacactggggtacaattatataggagctcaagcaagtctaaatctatggaacccaatagttttggcaaatgaatactcaacatcccaaatttggctcaaggctggcattgcagacacctttgagagcatcgaatcaggctgggtggtata

SEQ ID NO: 5519 - DNA, 870 bp, Cannabis sativa
gagtatttttattgaacaccaataatagtaccttccaattagttagtaatattctctaaaattaatattatattaaattatatgacatttaatacataatttcactagtaatattacacttaagagggtgttaggttttagcatttatcttatttataaaggttacattgtaaatttataagtgttaagctataattaaagtgttttttaaaaacgaaagatggaagagcatgatgtatattgttatattttagccaaattttttttaaaaaatgaagatttaatgatagtgtaaaaggtgtactaaatttagtacatgttaaaagtaagatttaatttggtgcaaaagtgaaatttattctacgttatttttttatttactcagttactaatatttaataatttttgttaattaaaacctttttaatattttatttattcatttaaataattaatttatatagttttaataaaaaattgaagacaataatggctttggaagttaatattcaccttatgcattaaagtataattataaaattgaggccaaatataatataatcatatttttttgagttaactttgctataaaatttgcagggagacgaagatggtctaactaatgtcatagaaatggtaatgtagttcgctttaaatagtatttatcatttgtcatttgtcaatagtctaataaatcttcatttaatttccaagactatacaataaaactaatgtttttattttagcattgctatgataatagtatttcacattttttataagtatcacgtaatatttaattagcgatattctttaaaaattatttttttgaaactatacgagactcattaggcaaaccattggtgcagc

SEQ ID NO: 5520 - DNA, 562 bp, Cannabis sativa
tctggcttcaagaatacaggttatgggaaggtattcaaggtcaagaccacgaagaacattggagactaagtgatgttcagggtaaggatcccctgctaaggctagcatgtcagcccaagacctcttatgttgaaggtaatctaccatagatgtacttcccttgcgaacagtttgaaggttgtctctgagttcatccattcttgcctttgaatgagctccaaacagcttttccaaggcaagccatagccctcttgcagagttacaccccataacttctgttgctatggattctgtcatagatccatacaaccagcccatgagtagttgatcacagatgatccatcgctcatactcagggttcacacgaacttgaacaccagacagaccttcaccagaagcaactccagctggtatatactctagtggagcctgtttcactccactgatgtagccatccaacctatgtcctctgataatggtagaaaccatagttttccaaagagtacagttattacgatcaagtttaaaggcaaagggttgtgaaagagtattagcgaatggg

SEQ ID NO: 5521 - DNA, 990 bp, Cannabis sativa
attttgttaaactaacaaaaatcactaaataatcacatttcatatatatcgataataatatatatcaaccctcactactttttcttttggacaaattatatttccattttattttatatggcatgtagttataaaatatatagtatgtttttaaaaatattctttagtgtctaaaataaaatttaaatagtcaataacaaattgtttgaaaattattttaacactgtaaattatttaaaataaacaaaattcctgctacaattataatttacacatataagaaattgatttataatttatctatctataaaataaagagatggcctaacctatgaatgatatccctaattatctagcgaacaactaattatagtagggtatcacttctcactataccgataagatatttatgattttcatattagaagatattataatcgtagatggtaaaatctacaattacaaaatttaagcaccaacaacccgtcaagaacaaagaaagcgacaagagttcaattgggagcacccatggagtgttagctaaagggactttgatgttcaagtcaatataaatgtaataaaaaataacaataagagaaaatattaaatgaaacgtaaatggtagtcgaacggatgagtatataagcaaacaggcggacggaaggaacaagtacggtggtgaagcttaagggaaaggtttaaaaatgacgattgtctgcttgcacaagtgatcattgtgagtatggaatgtttgatgccttgcgtctattgtatagttccttttattgtgttcttttaataccgttgccccattcacgtcacccattggactcgttcaagttggttgcttctctaatattacatgtaactatttttctgactggttccaatatctacttggtttcacccgtttgactgattggccgaactcgaactcggttgcgaggtgaaccgacttatggcccaaaggctttgtttttttcaaggcct

SEQ ID NO: 5522 - DNA, 591 bp, Cannabis sativa
ataagtacatattatctatagaacgattacatgttccataatatctggggaaacaataactaaattgcttattatctataaacaaaactcactgatttaatttattattaacacaatgattcaaaagtacatggtcaaaacagagtctggactggatatcacttacaatatttcattggtcaagtaaccaaccatttctaaaaccctgagatctcaacaagcttaacacttaacacagactccgaacaattattaccaaatctcaataaaaaaaaaggagaaataaaaaaaatgataatttaccagacggaagagaatgacagaaacatataacaatgatacacaatcatcagagataaatactctaattgacaacagcacagttcttcctgatctcaccatctgagccagtcttaacattaattcttcccattttctccatggacttagcaaactcagagaagaaattctctgagccttgaagaagtttttgcatgtaagattttgtgaagctgtttgtggtcaaagcagagtcagattggaagagtcctctcctcttgagtacgagggtgtaatagctaagatcaaatg

SEQ ID NO: 5523 - DNA, 680 bp, Cannabis sativa
ttgcactagtagtctcgagcacctgtattcccaatcatcaccaattgaaaatagtgtataatacaagtgaaaattgttttcttggtacattatcttgtaggactagtgccactcatcttacaaccataaaacatagaattagaataaagaaaaataatgctatcattgctatgacaacatattttgatcccatattgaaaaatttagctacatattttttcacaacaaacatagggtgacaagattagttataatataaaataaggccaatgatatatttgtacaatatggaacaaaaatttgtatgttgggcatgaagtttagactacacgtggaaacacatatgtgagatcattcaagtaaagttttgtttcctctgcttttcaacttccaattttgcatggcattataactatcttttgaagcatcaatggactgatatcgctcgatacagtgactactatttgtggtattatgagtgttttaatcacacaagttatggtgggaaaaaattatctaacgcaaaaggaaaaagaagaaaaatttaaaacacataaaactttagtctaatcataccttttcttctgtatcattagcgtttttctttgccttttctccttcggtttctgtttttgagctttcttcatggctgtcagttattccttccctttccatgtagg

SEQ ID NO: 5524 - DNA, 590 bp, Cannabis sativa
tataaatttttctaagttctttccatatgtttcataggtcggtgatgatgaatttggatacatgctagctaaaattttaaaagataacaatgtcaataactctggcgtgcgatttgatccaactgcaagaactgcattggcgtttgttacactcagagccgatggagagcgtgagtttttatttttccgaaacccaagtgctgacatgctttttcgtgaagaagaacttgatgttgctcttattaaaaaggtgtgtctctcttcccatttttatctagaaaacagaacagaaacaattgacatactgtaataagcacacttagctgatattatccgaattcaatcttaaattttattgcaggcagggatctttcactatggctccattagtttgattgaggaaccgtccaggtcaactcatcttgctgccatgggcattgcgaaaaaagctggttgcttcctctcatatgatccaaatttgagattagctttgtggccctcacctgaggcagctagagaaggcataatgagtatatgggaccaggctgatcttattaaggtataatactccctctgtgattttcatagtt

SEQ ID NO: 5525 - DNA, 774 bp, Cannabis sativa
  modified_base (527)..(540): a, c, t, g, unknown or other
tgtttagatatgagggactaaacaataaaatattaaaaatttgaggggcattgagaaattgggttgtgtgatattgatatattatatatggcatatgccaaagcatattgagaatctttattatggatgatgatgtggcaccaaacacaacacatatgtagtaaaatattctttaatgaaaatattccattgtttaattcgacaaaatattagttttgtaagtgaaaatataaatagtaaaatatcttttcttctttttcatctgaataattatctttcattttaatttttcttcttcaataaatagaaatgataatacaacgatagatacaagacagacacacaaatcagatatcttttttttagatatttcttcgagtctgttctcaaaaaataaaaaaaatatttcttcgagccatgttcaaaatattcctacccaaatcagtaattatgttgtaaaatataatttctaattaataattagttaatagcattatttttctgataataattataataataataannnnnnnnnnnnnnataataataataatagtaaatattattttagactctgtattttataaaatttattaattaaattttttattttgttatatgatatattaaatcttgtattttttaaatggtataaaatagtacttattttgttaaaataaaagtaaatagtaactcgatttaaaattattaaaataaaattgaatacattttctatatctcgtcatgcaaaaattattttcaaattaattatat

SEQ ID NO: 5526 - DNA, 2316 bp, Cannabis sativa
  modified_base (1873)..(1880): a, c, t, g, unknown or other
acccgtccaaccagcctggacccgacctggtgaacccgtcaaattaaaaaacactcatcctattcaggcggggcgggttcaacccagtacaatgttgagcaggtgagcaggttggttctttatggtcactgggttaatttcgggttgaacctgaacccgcccaccaacccggtcactttttattttattttttatttttattacatatatattaaaaatatataaaaaaaaccctaaaatccaattactttaatttgtattacatagataatatattaaaaataacaatatataatatattatataaaatctgcaacttgacatttatattttagatttgaaattaatgtattttttattttttttaatctaacgaatataaattgtggtgttataagtttataacgtatatgtttaatttaatatatagaaaaactacataaatttcatttttttaaaaaaaaaatatatattaacgagttaaggggtcaacagccaacctgatcaacccgaacctccagacttgcgaacccgcaaacccgcgagcccaaaacctgcacacccgaaccatttcacgagtcgggtgtggatacaattttttgaacctaaaacccgcaaatccaaaactcggtcaacccgcccgatatccatccctacctatggaagcagttattatggtagcgattattatgtaataactgctgccataggggtacgttttatttttttcatatatatatatatatttatttttattaatatatttaaattaagtataaattctatataaatagagtaagtaaaaattaaattgacaaattaaataaatacatgtactgatttacattactctaagtaaatatattacagtaatactttaaaattacttcaagtgtttaaaagttatctaaacatgaaataaaaaatattcttgtataagtaggttaaagaatttatcaacaggactactcaaccagcagatatttaatgttataaacagttagtatcacttctcatgacgaatttgaagttaattaggttaaagaaagaatatctcgtacaaaagagtatgtcttgacttccattaaagtcacgcaatggtacttgttgcataccacactgattaatgcttctgaatatagatttttagagaaaaattaaataattgcctaaatgagaaatttaataacatctatagacaaattaagagtattgagctacacaagaattataagatagaaatatcaatagtgttttatgttttctacccaaatttaattaataatgtgtaagtgatgtttctaggacttgtccaatgacatgagttataaagtggtgtttggtgatatgatttatgatttattaacatgacatgatttatttcagtactccttaactttaaagatggaatacgtgatttttcatatatgacaattgcagtttatgattatagttattttcaaacataatcctaattgtattttgcatatacatgggttctttaaactaaattaaactagttaattttcaataatgcaaaactctataaatgcttggaatcctacatgaaattgcacggtatcttctccctctcatgcatctgtgatttatccataatgtaaattaacaaaaaaaaaaaaaaatccttacaagtatgtttaagagaaacatgaatcaagcaattttatcttaattctatcgatattttcgtagcattatagctataattgaacgttttgaaaaattaaaactactaataacaacaaaaaataatccaagaaaagatcaaacaatcacaaaagtatttaacaatacaaaaattttgcacctatccaatcacagtacatgtattcgcagaacctatttcattacnnnnnnnnatttaagatattcaaactccactagcattcatattaattctatgtttatcgtaggacaacatatcgcagaacatacttcactataaatgaatatttaagatattcaaactcttctaagtattcattacaataattattaatgaataacaaaatttagttaatgtgtacctctaacaagctagaaaccgatcaacaataaatatgtctgatccttacaaattaacctcaaaacctacaatataattatataacattataaaaaatgtcaaaatataaaaaagaaatactacaaaattagaaattaaattacttagttactagttattaaaaaattactaacaaagtaatctatcataatttatatcatcaaatatatttatattcaggtgcactcttaattagtattactaatgagtcggtagttgttgggttttgt

SEQ ID NO: 5527 - DNA, 848 bp, Cannabis sativa
caagttcagtaaagtcatctcaacatagaacattcaattacttatttacaggattgagtttcactgaagctcagaggagattgaaagaaactggcccaaatgttcccattgacttttcatttccaagctggtggcatcttctatgggttgctttctttcacccctttaatatcattttgattgtcttgtctgcactctcatacatagccagtgatggcccaaatggatgcattatgctggttttggtattcattagtgttactctcagattttatcaggtatatattgtcttgtgttgttgcttgttataaatcttcattaacagatgaaactatttgtttctatttctattaataaggcatgattataacaatattgttattgctcaatttaggaatatagcagctcaaaatcagctatgaaactttcagaatttgtaaggtgtccaatcaaagttcaaagatgtgctggccgtgttgtccaaacagaattagtagtacaggttgatcaaagagatgttgttcctggtgatattgtcatatttgagcctggagatctttttccaggagatgtgagattgttatcttcaaaatatctcgttgtaaggtatttttttctgataattttcgctattcagtagatgggaattcacgtcatttcgttgttatctctcaaaagcaaatattagagttaaaaaccattgactcttctaataattcttgtacagtcaggcctcattaactggggagtcttatacaactgagaagacagctgatatcaaggaagatattaccactcctttgttggatttaaagaacatttgcttcatggtaggtataattactctt

SEQ ID NO: 5528 - DNA, 1033 bp, Cannabis sativa
ttggtttcctctttgcttttaactttcaaaggttatgagtttgacgcaataaaatttgaaattttcggtaaaagtggtaaaatgtgtcattatgatgtatttatacctttaaagtatgatttgtgtaaagctttgatcaacgacctgaattttctctctaagaacacaaggtggatccaacggctccaaaacccatcattcaggttatttaatgccatgtctagaaccaaggtaaatcaaatgatgatattacctttgagactcgcacaaaagtaaatagctaccattataattactttgttgcacatgcctcatcagtggataaatgatttgtaaaatggtgacacaatgccacgtgtactcttaaatgcaaaaattgacaaattgttttccatccgttgaaactatttggaatatgtaaaggtttcacctttagcctccacttgtccatctgtacagtctgaagcaagcaaatccacaacattcctgaagcttccgagtaaatcttctctgtatttttgataagggacacgtgaattttaaatagaagcttagggcccataaacaggcccaaataacataaactaggctaagtcctatatccattctaccttctaggagaacatctaaatgactcggctaggtgaggttctgtcaagtatagtcaacatctgaaaggaaaatatccatgtaattgaaagaggtcctcagcgtgtgtctggtagcccaatgctagtttcttgtttttgccaaatcgcataatattaggaattacatatcgagaatctcggatagagtataatatctcactacataaggaaactaaataattaaaaattaggtaattaatatgtcattaattacccatgaatataggacacgatatcaacaactagcttcatgaaaagacctccatgtcagcatacataagaggtctcacgggttgggtttaacagataagcgcaaagtcaatgtattacttgtaaactctccattagaagaaaaagagtaattagtatgacctttataacac

SEQ ID NO: 5529 - DNA, 951 bp, Cannabis sativa
tacaaaagccagaagctttcgagagaatgatcaaatgggtaatggagctcagttagtttgacatacaatatgtctcgcgcatctctcaaagggcaagccctagcagacttcattctataatgcaaaaaaaaaactgaagcagttgctcacaaacctaaaatctgcgcccccacttggaaaatatatgtggatggagcttcaaacaagcacggatcggtagtagggatagtgatggtgtcacccgaaggattgaggcttcacatagctttgcagtttaaatacccttcctctaacaaggcatagtatgaagctctactagcagggttaagactatcgaaagtcgtaggagctcaaaaaatagaagtcttcagtgattcgcaattggttgttaaccaaatacttgggaaataccgaacttgtagagaaagaatggcttcttacgttgttactgcaagagacctaatttaggagttcaaaggctataaaatcgagtagattataaaggagaagaacgttcaatacttaacaaagttggcttcgaacaaagacgtagaaagactagcggtggtacccattgaataccttctagatccaagcattctggccaaggcagaagttacagtcaattatctaactaagggataattaccccaagatcaggccacctcctggaaagtacaataccaagcccctcagtatctcatgatcaatggcactttatacaaaagaggcttgtgtatgccctacttaaggtgtgtttctaatactgaagctaaacaaataattgaagaaatcctgaagggttctatggagaccacactgggcgtcccagcctgtccaaaaagatcctaaggcaaggatagttttagtccacaatgaaaaaagattgcattgattatgtctggaagtgtgacccatgtcaaaggtttacaaacatcctaagggcgctgc

SEQ ID NO: 5530 - DNA, 1229 bp, Cannabis sativa
aataaggtttgactatgtgatcaagagcattatttgtcactatgggcttccacaaaagatagtgtcagacaatggaacgtagtttcacaatgacctttttaccgacttgaaaggcacgaactcgttaagagtttttcagcaatcgctcctccataagccaatgggcaagtcgagactgtcaatgtcaattaaactcttaaatatatgctaaaaaaatgagattggcctgaagaattacccaaggtgttatggtcttaccgcaccataaaaacaactgctcatacaccttttgctttgacttatgggtatgaagtaatgatacccgtcaagctcacaacaccatcccattagagactcacttacaatcaacacgccaaccaccagttattggctgagtccctggaaaaaatagaagaaatctaagctctgtgaggctgcgtatcaacaaagggtcgcacagtactataactttaaggttagatatagaaaattcaaacctgtatatatggtgctacgacaagtattcctaaacacaaaaaggcgacaacggaagtactttgcccttcctggaagggtcatatgtcgtcaaagaagccttagattaagggaaataaaactaattgaaataataaattattttaacaaaataaaactaattaaaataataaactaaatggaagggtcatatgtgatcatgatcaagttaaataataaattattttaataaaataaaatttaaaattgaaatattcatttagatgattaaaggaaatgagtcagctaactgataatttttaatgggttaaaactaattatatttagttatttattaatcaattaatattgcgtttttttttttttttgaataagtttgatcatttgttacttaaaagagttttatcaattaataaatactcacatacatattaagagagatcagaaaaaatatatacgatacattattcccaaaaactagatcactcatatagcttttccttaataaaaacgtagggtactagatttatcaaatctcatgtgtagatgatatctgataaatagaaattcctattacgtttattatgagccgacactcatctttgagttgtgagactgttgaggaaggtgtgagatttgaaagatttgccatacaaaaatatagcaaaaggagttcaagtttaatttttttccttctctatttttagtacattttattttcatgattgtgtacc

SEQ ID NO: 5531 - DNA, 610 bp, Cannabis sativa
atgctcttagtgggatagtgctgaacaatcacgataggacacgtggcatgcctaagaaatgacaccaaaaccaaaccaaaccactttaccttcagttgcttagaatatatccttttctctttttcttgttcctcctcaaccatactcggagagttctcttaataataattagtgcttttttttttttttgataaaataattagtgctttttttaaataagcaccaactgagatatttacgatctttatctaatctaaataaagtataataaaatattacaacttccagaagaaattgtcttttcatttttaaaataaaattaaaattatattgctaagcattataacatttttataatgaactattatcattacctgtttagtcctttcaattgtatatatcaacaatgtttcaccatttaagtttcattgaccaatacaaaacttagttttggactaataataaattaaatgtcgtattaaattaaaattgccaaaatttgtgcactataaagatgtttataatatacagttgtatttgaaaaactatctcgttatcaaatttggatgtaatccaaactaattatttatgcttacactctcgtagaatt

SEQ ID NO: 5532 - DNA, 655 bp, Cannabis sativa
cctggtctttggtgaaatcctttggccactagacgagccttgagcctttgaagagatccatccgaattgaatttttctctgaatatccatttgttgccgatgaggttttgacctggtgcaggaggcactaagacccaagtattattatattttgagtgctgtattctcctcatccatagctttgttccaacctggatgagagagtgcttcttggacattgttgggaacacatgttgaaggctgccagacagattgtcccaagaagactttcggtttaaaaatacccacctttgcacgagtcaccattggatggccttgaacaccagcaggttcaagttcagatggttgctgcaatattttcagacagatagggaaaaataggtatggcagaatcagtgttgttagttcccctctcactgcctggagctgaggaggcagaagaagcaccaggtgagtgaaaaactactgtaggatcagtagtgtgtacctaagattgtgttggtgttgaaggttctcttccaggtatgctcgaggatggaggagaggctgctgaaatatgacctgtgggtagagaaaaggtgggaaaaacagaccaggaggagctttgtataataacaggtttttccgaggcatagttacttagaaatccagattt

SEQ ID NO: 5533 - DNA, 898 bp, Cannabis sativa
ctatctatgcctttggatttagtactgatgatctcatttctagtcaaggacgtagagtcaataaaatgaccatatgaggtttgaattatgaaaataataaagaatatttatagaggttcggccctgaatcgcaactgacttactctcctttcagttgtatttatctaaaagataagatgatcacatgaacctggtcaagtgagtttcttgctatctctaaaagttataagtaatttggcgacgtaatagccctcttgagaaagcaaaattcaatctctgaatagtgaatattatgcatatgtagcatctttacatttaattactgtcaacccgaaaagtaatcttggtgacgtgaatattaatgtgtgacacgtggcaagaaagaaaacatcatcgagttagtagtcttgggtcatagcagccgacctgcgagggatccctagccctacgcccaagttgacttcaggaactctagaatgggtgtttggatcccgctaagttgttttcaactcactatcttttagtattctataccatgaagatgtgaagaatccaagtccaaggcctgaaagctaaacatacacgaaacagcaccctgaaagtcaactcgagcacttagggtttcttctagtgctcaagctgacattccaactagggttttagtttccaggtccgtcttggtgcaaatgggtcaaattttgtactgggacatgaagtagacatgtcacgaacatatgtgaggcatcaaaataagatttggaacactttcaattttaagcacttggagcatcaagtgcattaggcacctgtcaacctgggccacttccaagcatcaaattgaagaattatctcatgcattttattcgtcttcatgaaaacaaggaaacaaatatgttca

SEQ ID NO: 5534 - DNA, 1169 bp, Cannabis sativa
aaaaaaaaaacccatttttcatttcttccaataatttcactttaagaaatgaaaaaaaaaatagtctagtattcttctataaaatcacctctgaattatgaccttattgcttggatattgattgtggtaaaatacaagtaaagcaaaattacacaattgaaataaaaaaacaaaataaatatatatatatgaagtatatataaatatcaacttcaagttacctttttctatacctaactttttattcattggattcttccccaattggaccgttagcttgaatatgaaccaagtaactttacataatcctaattagtacaatctaattagtttttaatgtctatttttggggttaattagttgtgaattgaagatatgatgttacactaaataatcccatatgttaattaatttgtatttgatgttaatttggtctctaccgacttattcaaaactaaactaagttaagttatataatgttccaaaatatcatcattacaaacttcaatcttagattatgatcattattaaaaatatatttggcttaaagaaaaataaaataaaattaaaattgacatatattaaaagaagacttggtagaatgtcatattcttatttggtgtacacaccaaggttttattttgccaaacaaagatagaatgtcttaccaatcaagacaaccaaacataattttgtgtataattaaatatatttttattaattaacatgtataaatatatggaatcattataatctatattaccaaaagttaatatttttacattgcccacaagttttttttcaatctcatactaagataaagttaaaaaaacatgtgtgtaaaacaaccaattcattgattcataatcacaacaccaaaagaaaataatgataataataaatatatatatataattaaatattatgttgggttcttcttggatttattcaaaattaaagtttaaatttgaaattttgtttaaaacatcattgtgttttgtaatccatttaaacatagaataatggtcaaataagaccaaaatactcataaccactactaattaatttagattaaaacatatctaacttattataattcaaaaatcaaaacaattaagtctaacaatcataacataacatgttaccagctgctcaaatcatcttatagt

SEQ ID NO: 5535 - DNA, 924 bp, Cannabis sativa
ggacgttacaccattagtcgtgtagagtttgagaattctattgactttcttcttttgggaggcatagcgatggaagaacttaatgttcttgtcaccttgggcaagccattgagttctggcccttcgcttccagtaagtctcttccttatagagcagagcatcgagtttagattgaatgtccttgatgtgtccaattgcacgatcatcccaggtggtgctattcctagcacactcaaggtctctctcaagcatattgatgcgatttttgaactggaaatcttttttgtgattccaggcattaaggtgattagcacaagtggcttgagtggcaatgagacgggggatttcctcaggggggccaggggagttagtccaagacgattccaaagttgctttccaatttggttcagagagccaaacattttcaaaaagaaaacgtttataaaggcgattaggggaggggattgtattactggtggtaacaatttcaagagctcggtggtccgagccaaaaaaccaagatgagtgagaagagcatctgaaaaaaggtcggtccaagaagagtaagcaatgccccaatcaatacgctcctagatatttcttggagaggccacattattattctaggtaagcaaagggcctttcgggtcaagggggttaaattaaaggaactaagcaaaagcctgaactcaggggccggacccctgtcgggatttcccctgcttatcattcgaggtaaggaaagcattaaagtcccccatcataagccaaggatctctggggttgttgttgccgatcctgttcaagattttccaagtgtggggtctatgagcctcaataggcgccataaaaacaagtgagatggaaaaaacattactagcagagagcgacacatagcagtcaaaatgactaatggattgagaa

SEQ ID NO: 5536 - DNA, 720 bp, Cannabis sativa
gcatgtaatatttacgccaaagcatagtaaaaataaactaaggatccaacagttccttagacacaataaataaaattaagcttgctgctagttattgttacttcatcaaaatgagtttctaacaactactcatcttcatcatttatatttattattattttttttttttgcttattattcatatataagcagttagttgttaccatattgatttttaataatttcatgtgatttttaagttatacatataatccatttcaaaaattaaaaaaaaaaaagtatatataaaaatggtgtgtggttatatatgtttcttcatttttagaatggtaataagagtgagtagtatatgttgataaatatatttgtatttgaataatttttttagtaatgaaagattataaaataaagagcattgttattaaaaattagtgttgtctagcaccttctaaacgtacgtgtagccttacgattggttagcgatactcaataaaaattactatattaaatcatgggaaactcgatctttaattgcaccaatagcaatattgatacataggagagtgctagacactaataataatctttagtatttctctaaattaaaggtataaaaatatattgttatataaattatgtaatgatgattacataggtgtaaagctgcaattcttattcatataataaatggtgtagcggtgattacattggcattttgta

SEQ ID NO: 5537 - DNA, 1124 bp, Cannabis sativa
ttgtctttcctaaatagttacttattatgtcacccaattaaggaatatgataagaaagtgcaaagtttgttaaaaagtaaagtggctgtctttttcattcacatgaatcatgttggctcataaataatcacactatatcattttagtaatttatataacaaaactagatatatgtttttatttttataagttatttttcaaaattatattctatttaaattctttgtaaaagctaatgggcattgaaaataccacgcattgatataatttagataattgttaaaaggtatattgaggcctaatacttttttcggtgtcatattattgatataattaagtatgcggttccatataatttaagaaaataacttttaaggaatatcgttaactaatcatgaagcaccacctataaaaagtgttggacaccactaataactaataacaatattttataattttaatatggaattataatccatatttaataatttattaattattataaaaacaacaaaaaataaaactatataaaagtaaaatagcatcaaaataattacaaaaataacaaataaataagaatatatcataaaaatacaattatattttttgtaaataaaattataaaaatctgaaaaatatttaaaatttcctacaaccattttctttaaaattatctctaactaaagaaaataatctgataatggaagctgggttgtaagttccttaattcttctgtttagggtgcgtagagcttcaatatgaggctcatcttcctcaactggtataattttagcgaagcttccttgttcaagataatccacaacaaggttggcagattcaagtccactcacataagatttctcctgtcaaacaaaacaatccaaaactgtacattcctctactcttgtctctttctataactactctttactctatatgttaaaagactcaaaagagtagttaaagtttgttgagatttctaacctgtgcccatgaaccgtgccggtttactatccagtctccggccatgaacatgtttgggaaagaggttggactacgtgtcatgaacttgtatgaacctgttatcataaatcaatcaatcccattactgtgtttggtgagag

SEQ ID NO: 5538 - DNA, 607 bp, Cannabis sativa
aggtttttgtatgcttggactcgagatacttcttgtaaagaggttattcgagaggcttggagtattgacgttagagggaccaaaagctttcagctggtgatgaagttgaatcacacaaggaagaagctgatgctatggagcacaactaattttgagttttgcaaggagaaggggaaaatccttgacaaatttctcatggatattcagaaaagactgccatcccgtgaaaatattcagctggaggcagacattctccttgaaattgaagaggtcttatctagacaatgtgaaataaggagacaaaaatatcgtgagacttggttacgagatggagataggaattcttactttttccatgccttgaagattgttcgaagaaaaaggaattttattggggctatttcgaaggatggagaaaattggattggtggtcgtagagcgattggtgattatttctcgcagaagtttaaaatggtctatcaatcgtctaattcggtcttcactctcgagttagaagagctagttgtgccatatgttagtgtgattatgaatgataggctctatttagctctttcaagtgaggaaatcataagggttgtgtgatcga

SEQ ID NO: 5539 - DNA, 1173 bp, Cannabis sativa
tgagggccaatatacatttgttaaacagctaagaaaaatatttagaaaaactttgatttaaatttagtcccaattaattcatgagaatgaaataataaatactcaaagattagcagaagcttataacggagtccatagaatagattttagagtggtatgatcttctaatctttacatcaaaactttctctggaaccgtagtatatgaaggggattcaagattagaagacagttacgatgcaaaaataggactagtacctatttattaataactgaaaatcaaaaattaattctttttgactattttcaatttggtccctcatcaaatcagaaattatttttatagtatctacatattaaaatcataacaatcatgccctttgttatccaaattattgcaatatgacgtgacatccatctaagtgacacgtgtaacatatttcataacctaggcggatgattttactccttgtaagtcgtgtagacaattatgatgctcaaagtcacacaaagaaggtgagatgtgttaggctatttttaacctaagtttcaagtcactctttatagttgtttttcttctttattattatttttgaaatagaattacgcttattttttttggtttcaagtttcgacacttggaatgtataaattgatcaaatttcgaaaaataacgatttatataaaatacaaaaaaatttacaagaaaataaagctgaaacttcaagtctaaattagactatgttttgattagaatttggaaaaagtcaaaacagagaagttttagatctccttttcatctttccaatgcatccagaatcagctcatttagagtttgtatgtgaaatttatgcatattttattgagagaggttgaagtaggaaattgaatttcgtggtcgtgaccaaaaatgttgtggtcgcgtccaaaagtgggcagaatggtttttttctacttttctatagtgttcgcgactagactatctacggtcgcaaccatggcttcgtacgggacatgggcaacttcgtcttttttcatttttgggctgaaaaactctattttaatgaaagggggtcacaaattttagtggagatagacaataattgaactctaaaaatacaagaagaagactcttgaaacgagcgtgggtaattcgtgacaatcttccatctag

SEQ ID NO: 5540 - DNA, 829 bp, Cannabis sativa
tatcttcacttggtatcagagctagggttgctcttaccatgtcgacgggaggaagtcagacccctcgtggaggaggtcaccgtgctggtactgagcaacagggccagaatcccagctccccacagatcacaagtgcagtctcccaatcgagctttcatcttggatctggaggtttcaacagctctccgtttggtaacactctcacccatcctttctctattaaacttgatagaaataattttacgctttggagaaatcttgttaccactgtaatcagaggccataggctcgagagctttgtaaatggaacaagagtgtgtccaccagaattcgttccagccattggagaaggtggagacaacacacctgggtttggagttcaaccaaatcccgattatgaacaatggatcatgtgtgaccaactcctaatgggttggttgtatgggtctatgactgagaacatcgcaacggaagtcatgggatgtgtctcagctagatctctttgggtggctctcgaaaatctgtatggagctcattctcgagcaaaaatggacgacactcgaaccaaaattcagactactcgcaaaggaggcactaccatgcctgaatatcttcgacagaagcgtgcttgggctgacagtcttgccctcgctggtgatccctatcctgaagcccatttaatttctaatgtgttgagtggtcttgatgcagagtatctcaccatagtgtgtcagctagaagctcaagccaaagttagtctcacatggcaggagatgcaggaaacattgctgagttttgatagtaagttggaaccgctgcatcttctaac

SEQ ID NO: 5541 - DNA, 3530 bp, Cannabis sativa
tattattattaactatttaactttgttgtttttggaaaaataacaaagacaagaatcaagctctcgatcaagcactatatgtagtgggttggaattgaaattaagactcttatattcagcccttataactaaaattaaaacacaagaatataatgttagacaattaataatactagtgtttaattcaagatatatataacgaatttcacacataataaaaatgtgttaattaaatatcatacataatgagatattattttaattattaattaattttaagataaaactttaaatatcttatcaaacaatcataaattctaataaaaaagagagattattttataataatatacaaaaatgacaaaaaaattatatttttacggatatgttgtttttttttattttatatatttgattttattttttgttataaaatagtttttttttattttcaaaaacaacgttgtttagatattggtgctacaggaaataatataattcttttgtacaacaatacaaagtgttgttttttcgttgttttaaaaatattatttcggcattgtagctaggtgaaagtgatagttttctctcaaaaaaattaagtgaaaacctattaaaaaaacttcataaaaatgtaaataaataataataaaaaaatttgtaaaaatatacataaaaatttttatttttaagtgtattatgtaattttttttaagaaaatagtatgtttataatataaatgcacgtgattatcgagttgtgtttatagagatgacaataatattttgtatatgacatatctcgtgttatagctttataattattttatttttgatatatttgagatcgaaggtagatagctaaaacaaatatacataaacaaaacaaattgatagcaacaagaattaatgtacggtatgaatattatttgatttacaatacaaaaatttgtaaatagcgcgtgaattttctcgaactaaataattcattatctagctgaagagcatactttattaaattataagctaataaaatttattacaagtcacgtgaaataaaaatattctcaaaaatttaaataataaaattataatattttcaaataacacacttccttgaaataccacttgaaatatatcaaataaaataaaataaaactacaaaaataaaataaaatttaattcacatgcaataatgaaccaaataataaatgaaaattcaaactattttttattcaattatggaccatttatttataaaataaaattaggttatgtttgtaattaaagatctaaataaataaattaataaaatggttgtgaattggggtttaaataaatcaaaagagtgatcgatcgagctagggaagagataaagtttgattgataaactatgtgtaagtgtaaactataaaaagtaaaacaaccatgaccttggaactaagatcatcatgatcatataaattaaataatttatatatatatattttaaaaaatcaaatcaattgaaaaaaattcaatgtactactatgatgggacaccatgcttaattgggcacttgtcaaataagccctttaactataaatattattaaccccacttatgtccgaccaaagggcctacacagaatattctctttttcttcttcttattcttcttctttcttttctaatattttcattttttatttttaaaaaaagagaaactttgtaagaagctaaggtggtccgtcaaatgtggatactattactagttaaattattagaattttaagaaaaaaaagcatctttattatttaaccttcactcacttgatcatcactatccaatatccactaaatataaattggtgattttatggcctcaaaattcattttctcttcgccgcgtgctctattatattctttttatttatttatatatgtgattaataatttttgtgagtaatgtgaataacattatgtttttttttggaagaaaataaataagcaaacaccaaaaagaaagaatatactctctttctctctcaatatggagcaaaagcatttatatatataaataattatatgaattgtcaaagatataaatattttaatttgggtttgatgggagaatctgattttaagtggttgaaatttgagtaacactaagtagttagtgatatttagatggcaaatggtacagagtgtccaaattggcggaaactttttgactctacaggattctccattccattcaattctatgcattacaatacaattaattctattttttatttaatttctataaatacaaattttttataattttataattttctcgtgatttttgttgttataatgatatatataatattgattaaggttgcaattaagtcatggttattgtgctgaaaaacagtttaatatatatggaccaaactgatctctctctctatccatatatttagttatgtctctaaacagtttaacgatttttttatttttcaacaaaattaaaaagatttttatatagaatttcataaaaatacaaaaatatatatatttagaactctaaaaattaaaaaggccctaattttttttatatataaattttaatttaaattagcattaccccttaatttaattagttaattttttaatgtattacacgttattaattaatttttttatgcattacacgttattaaatattagttttgtttaaaatatttaactaattatttgtttattttattatttaattaaattagttagatatattttttttataaataaattaacagtaaattaaattttatatgtttgaaaaatatacttaaattgtattaggtttaattttcattattattatttaaattaataattatgtaataataattttaatataagtaaatatgcatattacttagtattgtatcgtatctataacatggtgtgtttaattaagtaatgtatgaattccttttttttttttaatgtaatgcatgaatttggaataattgtaattttgagaatctttgtaaacataactattatatagagatgtcactttcttcattacctagcctataattaagtccatgcggtgggacctatggtcaaagtaaaatgttgtgtttgttttttttaaagaaagtaataaacatataaataaacaaactatatatattaaattaattattatactattccaatttcttatcttattttctgtccgaatctattaatatatatttatgggtgttgttgttccaaaatatatatttgtgggtgcttacttatgtgagattctgtattttatatctaattaatacatgtttgatatatactctgtgattttaaatttgatcaatatgtatataatgaactgtcttcaatcatatgagtcttcaaattcaaatttaattacgaataatttaattgaaagcagttgtgtctaattctcatggaccaaatttcttttttaaagattaatacatacatttttaaagtacataatatctaatatgagtattataaaaaagacaaga

SEQ ID NO: 5542 - DNA, 1103 bp, Cannabis sativa
agatgcttcaacactattccaggcaccttttcctttctgaatgaggttgaaagcacttttaacagagtaattgccgctgagttcatgatgccaaaccagtttgtctgctgctggatgttgcagaataggaactgatgagatagcagcaacatctctgctattgaacaggtcctggagcagctccaaatcccacctttcaccaccaatctccatcagattacccacaacagccgtggatagtgcagggtgcatggaagttatgcagggattatcttcaaacaacagccacggttcaccagtgacagccactttactgtctgaaccaaccttccatcttgctcccatttgaaccactctttgagcttcgaaaatactacgccaaatgaagcttggattgttgccaagggatgttgtgagataagttccattcggatagtagcgagctttgtaaattctagcaacaagagagtcattgtttgtgagtaacctccacccttgttttaccaagagcgcaaggttatgatctctcaaattacgaaagcttaaacctcccatacttttatgttgacaaagcttatcccaagacatccaatgaatccctttttccttcgtgtttgacgttttccaccacaactttgccatatgttgctccataccatggctaatatccaaaggtagtaggaacacgctcatagcataactgggtaaggcttgagccaccgttttgattaggacttctttccctgctttagaaagaaatttagaatcccagttttgaactcttttcctaacccgctccttcaagtaacctaaaactgcgttcttgttcctccccatagtgctaggcaatcccagatacatgctattctcatctgccatcaccatttggaggaaggtgcaaatactattacgaattgccattattgtgttggtgctgtaaaagatagaagatttaccaaaattaacttgttggcccgaagcttgttcaaacagagtgagaagttcccttactttagtggcttcttccatggtagctttgcaatagagataactgtcgtctgcaaacaatatgtgtgacacacgaggagcaccatttgccactt

SEQ ID NO: 5543 - DNA, 801 bp, Cannabis sativa
ctattaaacatagccttaaagaacacctaagggacccgtgataataaatgataaatggtcgacttaattttttgctagcccatactatatatatacaagtgtgtaaaatgtcattttgaccctaaaattccatgttattttgataaaaactaaccgcctatcatgtcaagtttccttcaaatttaacagagcacaatagaaattgtgcaagaagttgtagtgctggatctgaaacttcaaaaatgtctctttttctaaatacttcatgtcacactgaaccctataatatttggaagggggcaccagcaaatacctaggtagatcataaggagtgaaaaagaaagaaaaaaaaaagaagtcttgtttttagtgtccatcaaatatttataaaaaatatgttgaaagggactaatttgacacttttcagtagcttttaaggaccactactgtaatagttaaacgaccaataaggtaataagtaaattccaaatgtctactatggaaaaatacagttttagccaaaatgattagacctatggtttcacccccacaaagtttaagttcaatcctttctgagtacttacataacaattgctatagttttcaattcttcaaaaattgtaggaaggcgaggagccaagtttatagaaaaaaaatgggctactatagaataacgaaaggtcaccaaaatgaaataatgatgcttaagtgtttctattgtccgcagttagatttataccattgaaacagctgttcatgtctacatgcttaatttgtctacatgcttaatttttataggac

SEQ ID NO: 5544 - DNA, 544 bp, Cannabis sativa
tcattaaaagaaaatacaaaaaaacatgttcttttattaccaacaatcacggaaccaaccaaaaaaaacaaaaagaaaaaagagaacacaatctagtattctgaaaaaataatatgcaaaattgaggatattctttattactatataagttgtaccttgaacatccattcagttgcaaagaactgggcctcgtcattgttggcgtcattgctggaaatgccctctgcaagtggctccaattgttggggtaaagtaagtaaatattcaccaacactggttacataggcctgaggataagcactgaaacttggtagagggaaagcactttgctcctccacagacgaccatattggcaaacgagaaacatcacttagtcgttgccgtactttggaaatgaggacatcatatacaagttcatttactgtgtcagcaaatgttgtcactctttgagatgccaactgaagtgtatgaaacctgggatctttagactacataacaaaaagcaaagcttgtcagcatcgttccattaccccacaagaagttc

SEQ ID NO: 5545 - DNA, 1150 bp, Cannabis sativa
atatatatgataggacaccacataaaatatctaataataatgcttttatgtattaattgttaatcttgtgaaatcattaaggttataaatgatttaattttatttgttagttgaaagataataagatcggagatttagccaatatcaacgataatatgttatatacatattttttaagattaaaatgggattgtgttaattattctgatttttttaaggtagattaaaaacttatatagttaactaaactttttttcttaaaaaatattttatagaacctataagagcatctctcattcatgttatatttgattaagaaatatattaattttatatttggtttaaattttagaatgtagtctattatatatgtatttagtgtaaatttaaaattatttttattgaaagtatataaaaaacttattaaataaataaaaaattgtaaaattgtaaaatacatttattagtgatatgataataaataaaaatataatattatagtgataaagatttggctaaattatattttgtgctacatttttacaattatgagaatgtaataaatgtggcacatattttgtattactattcaaggtataaaaaaattacaatacatatcactctaattgtgttagtaagatcttattttttacgagcacggatctcttatgtatcaagatctgctaataattatgcttatattatagttaaatttactcttacgatggatactaaatatttttagttggaaaaatttccatctccactattaagcgttatgtaatttctctcaaattaatataatagtttttttttttgataattatataatagtttttttcttaaaaaaaacaaatgataggttatatggtaattaattgtcatttaacaaataaaaaagaaaaaagcagttatgttgtatttactttttcggttgttgctattaattattgttttactcaaaacaggtgttcatgcaagcaacgagaaggctttgacgtatggttttatattttaaaactattttggtcccaccacttaaatatgaggtttttttttttattattatttttacatttaaaaataattttttctttaatatttttacgaaaatttacaacaacttacataaatcgtaattaaaattcac

SEQ ID NO: 5546 - DNA, 951 bp, Cannabis sativa
caattaaaaccatgtaaataataagcacattttattatgtgacatgtttggtacataggacatcattgtcttcttcagctttttctgagtcaccttctgttttttgccctttttcttcttaataaaataatgtcaccattaggtaaataaaaataaccactaccactcctcatgacttgatgccattatcctacatattgaatggaacaataattcttaaataaaaaacaaaagaatggaacaataattctcaatccaaattgttattgagtatctaatattttttataagtgacattttacgattagatatttatatttttttaagttatatgagacccattacttaattacactgataataatataatatcaaagaaagtattaagtactaataatacattttataattaattctctaattctcattaaaataataaaacaataattatttttagaaaaatttatagtacaaaagaaagattttgttacattttacattgtaagataattttttaatctcatatttttcataattttatatgatagttatttaaaattaaccatcagacatcatctggctgggtcttgccggtatcaacaacaagaaaaaaacaaccaaatggaaacagcaactaactatggctcttggcccagacaacgccctaggcgtagggtagatcggagcaacaggaaacgcctagacgacgtttttattcctgggctgcaggaataatttaaatatgtgtgtgtgaggtgagcaattgtttggatcttatttttacactatcgattattaaatttttttaaaaaatttataaataattataaatactattaacaaattacactaaaattctcctaaataataataatattttggctgataaattaagcatttcattacatttatacatataaaaaattggagtaaatatttactttcattgta

SEQ ID NO: 5547 - DNA, 960 bp, Cannabis sativa
tgtagttgacttatttaaaggactacaatgtttttttatttatttgtaaatggtttcacactaatgggagtagaatagaaagtgatggtgttttcactagcgtttgcatcaactgggagtggtaccaaaataaatcattcatacttgcatcttaagcaaaattgatatattacatctctgatattaagaacggtaaagactagttgattgtgaatgagcacatcccgcggaatgtgtgagatttcccaaacgatgatggggatacatcctttatacaaagaaaataattcagttggaactcaattatttgttcaacttccacaattggatggtgttgactatgtccttcatgatgttgacccaactaaagttcgaaacattcattttgtgaatacagaatctcaacaattagatgtttcattttcgatgacgatgaggaaggttcaaatgaccaagaaaaaaatgatgattgcttagagttagaaagtgatagtgatgatataatattatgtatgtcactgatgatgatgatgatgataaattgtaattgtaacgatgttataatagcaataatgatcacatattttcttattttatttttttgaataagaaatccgctttaaaaaccaataacttcaaccaccaaacaagataacaaatcagttggaacatcctccaaactaaaacgacgattaggaaataatatagcagcctttgtaaagttatgggccactacattagtagatcgtttatcaaaagagacagaaacattaccaatagtatcaagcaaagatttataatcttgaataactaattcaaacacagaaatcattttaaagaactctgaatagcttgaatcacacatagacaattggactccaaacaaacattctttcgttgcctttctttaattcaactgagagcttccttgatgcctacgacttcagcaagagaaggatc

SEQ ID NO: 5548 - DNA, 2440 bp, Cannabis sativa
ctaatagaaactcgtttaaaggttctaaaattttcagagacttcatgtcctgcatcttttaacttttccaaaatcttctcaatgttctcttttccctaaaaaacacttatacactttagtttcccaagtatttgcataaaaataacagtcatgcatataataatcttaccccaacaactggaaaataaacacatttcagtcgcacattggcctcgtgattcaaccgcgaacctgacacaacttcaaattgagaaatagctattaacataacatagatgacactcaaaaacaaacaaataaatgtgaatccaaagttcacagaagaagtagccatagtcagttaccttgactcttggttacattgtcttggtttaaggacaaacgaagctgtaaaacaaaatcaggaccattgcaagaatgcaaatttgtaatagcaacttctccaccctcaatctcagtcaaattagtaccattaacctgaaaaatgacataatcaactcacatacatggaataaaagaaagctacttaatttcttgcatgagaacataatcacagaacggtaaccaaaattaatcaataatcacataaacggaattaaattgcttaacaagaacacagtaaacctgaaattctataggtgttattgtcttccctgagttggacaactcatcacactgcaatcccaacaaaagcaatgcatcaaagacaagtgagaaattaagagtggtgttatagtacaaagatcatacagttaatgtatacataatccaactcaaatataatcgaaaacagaaagagagaagtacataacacctgaatataagggaagtatatgtccttcagtttgcactgaagttgtaatgtatttgaaggctttatctttggttcaaagatttcaacctatacaaattagttttaatgttcataaaaaaccatacatttacagacttgtgggcacatcaatgttggcaacaaatgccagtgctcaatgcatcaaatgagtcaaatgcccatgaaagaatcacttggaagccattaaagggttgcaacaacctacctttgtaaagcttccatgttttgtttttgtaagctcatcctctgaaggatccctaagccctcctgaagtctaatatgaaaaagtagagttagccacataagagaatgtttcatcttcaaagaaaaataaaccgcttatgctattccattaccgtccattcaagtccagagcgcctgagcaaagcctctctagcaagacgtaaagtatataccttccttgaattctttgtcttcgaagacactaaagcatgtctgaaacaaaattgtgaaaaagagaggaaataaatgattgttaaaaaaatagaagaatagaaaattgtgaatcatgttcatacctccctaaatgcatggaggcaaacgatcctccatacccaaacatgccaaaataaggctgcatacgacattgttacaagatagtattggaagatactcaatcgttccagcaacatgatgatcatataaaatgcaaatcaacagaatacagggaatgtttcattctagatatatgttaaaacgattaataaaatccattggtataccattagatatggaggattgcccccaatagcctgttctttctctgaccggttaagcgaggcacccattttacccctatatagtagagcactagttaagacacttaaattcaaatgcacacgaaatgctggaaaggacattggtagcacgtaccattttgccaaagaattttcatcgctgccatccataccagtaccagtgtcaaagactgaaattctatcctctaaaagatccacactgcaaatattgaagaaaaaaaataattgttactagtctaatgagaaaagataaaggacaatctctatgtaatacaaatacaaacagaataacttattgcaagcaaataaaactagtgttgaatcatagttaatgtaagaaaagaaaaatgtagctataccaatattacattagcatcatacctaacaagttttcgatcgttgttactgttagcccatactgcctgcagagaattgtcctggtaaaaataaagcacaagatttaaatacaaagtgaacaggagataagaacacagcttcattcaagattttccaactcaaccaaacacttacaattaaatccgcaagagcagactcaaatgtgtaggattcaggtacctcccttaaaatgtcagtatcaggagtcaaatcccacatattctgcaactcagggaatcaaaacggtttaagaacaaattctttatcagaaatattagtaccaccacagagataaatttactcaattaatctgacctcaaaagtttgaacagctttgccagaaccatcctaattcagaagcaaaacaagtaagaaacaacacattataagaagagtaaatcaaacaaaatat

SEQ ID NO: 5549 - DNA, 2139 bp, Cannabis sativa
catctagaaaaaagaatttagtgtaatttttcttatagtcacctatgttaaatatcttgtaaaattatgagacgtttaaaataatttataatataagaagtaatgtttaaactatttatttcacatgtgtataaaataaaaaaactcaagtatgcaacagagttttcgaacattattttcgatgtgttaaatttttttaaaattttttaaaaattttgaaatattttaaataactataacgtatacaattataaaaaaatataaattaaaaaaattctttcaaatacctaaacaatacattagtgtacctctttcttttaaaggatagtattgtaaaaaaattcatatttataaatggaggtaaatttggcaaataattttgtattaataaattaattttaagatattaattttcacagtctcacacgcgtggaagtgaaactagattttgcttgttatagaagtaatctctgtggtagtttaggacatctcctaaaatttaatcatttcaaagtggtcctcctttagtaatcagatcctgtggctcatatccaatcagaactgtactaactactaaattaattaataatccaaaacttgtatttctttacagtaaactacaaaacataaatattatttacagtaatacctatgtctattgctgtggctactaattactctagagtagagtattaactcccatttggtactttctaaaaataattaattaattaattaaatattaaagtcttgtgtgtttaagaaaatgaagtgggttctctttttattatattatataaatattgttaattttttttaacaaataaatattgttattgaatattagtgttatctaacatcttttataagtgatattatacaattgattagtaatattttttaaaatttatttttttaagttagatgagatttattatttaattacactaatactggtgtgatattaaaaaaaagtgttaaataccaataatattttttaataattctcatattatatgtactaggtaaggaaaagctctctctaggactttatttattgtcatcaaatttggtttttgtttgctactagttactacctacttacaaatagattggattgaacctttcaatttcattctttatttaattaggatttattttagtttttgaaagttagttgttttattttgactctctaatttgatctagttctttcaaagtacttaggatttttttcattatttatttttgaatgaactttgttattttgtccggatagttagaaatctacaaaagttgagaccccatggcagaatttatgttttagccacagaaccatacaaagtaggttgaatgtcaacttagtcgcaagcttagctccagtgtcaacttgagcgctaggtccctgttttggcccacaaataatcttgtttacttcccgagaacactcgtatctttgttattgatgaatatgaaaaaaaatgtttgggaaactttctaggaaaaatgcttacaagtgggttatgttgacaaaatatcaacttgggtactggattctctttttagccactagatgactctgtttatttcctgaaagcaccagtatcttaattgtagatgaaaacaaagaacctggaagacttcgttagaaatggtccaagttgacaaatgtcaatctaggcattgggtgtgctttttggcctctaaattgatcattttgtttcccgaaagcacttattttctcattttggatgaagacgatgaaaattttcgaaaaatatcttcaaaaacgtggttggaaaccccccaggttgacaataagtcatgggtgcacaccaagtcaacttgggagctaggtgtccaggtgtctcaaacgagaagtgttccgattctaattctggtgcctttctttaggatgtttgtgacatgtcttattcatgtctaagtacaaatttataaatcttcaataagttagtgagatcactttgagatttaacctaattttcctatgaacaaaatagtaagaagttaaatttgaattatgtttttcattatcacaaattaactaatattccaaccatgaaatattaatagtccttgatttttccaaattggaatatatatagaaaaaatgtggta

SEQ ID NO: 5550 - DNA, 1408 bp, Cannabis sativa
tcccatgattactcgtgggaaggccggtattttcaagcctcgtgtactgcttaccaaggctgctgctatgcaacagattcgtgaacctctctctctcgaagaggcactccaccatgaggggtggaacaatgctatgaactgtgaaatgtatgctctccgaaagaacaagacatggtatctcgtgcctccctctcctgattataatattgtaggcaataaatgggtctataaaattaaacttaatgctgatggttcggttcaacgtctcaaagctcgcttggtggctaaaggctttcatcaaaggccgggtttggactttggtgagacatttagccctgttatcaaggcctctacagttcgtgttgttctcactatagccattgctaacaattgggagataaggcaacttgacattaataatgcgttcctaaatggaacacttgatgaagatgtttatatggcacaaccgaaagggtttgaagaccctaccaagccacattatgtttgcaaactacagaagtctatctatggtttgaaacaagcccctcgggcttggtatgaccaactgaaactcactctaattcaatggcattttgagaactcgaaggcggattcctcattctttatactgaagcaacccggttatgttattatggttttgatatacgttgacgacatcataattacaggaagcaatacgaaggagctgcaaaattttataactcgcttggacaagattttctctctaaaggatcttggcagcctaagttacttcctgggaatcgaagcctatagggatgagactggtttatacttatctcagggaaaatacatcaatgaactgctgcagcgtgttaacatgctcaatataaaaccaagtcctactcccatgacagccaacaaacccttgtccattcatgatggggaaccaatgacagatccctctctttatagaagtgtgattggtgccttgcaatacttgagtcacacaaggccagacatttcttttgctgtgaacaagcttagtcaatttttaaaaggtcctacaagtgttcattggaatgcaactaagcgtgtgttaagatatctcaaaggtacattgaaccatggcatacatattgcaccatgcgatcggttgacactcacaggcttctcggatgccgattgggcatgttgtccagatgatcgaaggtctatagctggctattgtgcgttcttaggagattctctcatttcttggtcatccaagaagcaaacggtggttgctcggtctagcacagaatcggagtacagagcactggcacagttggctgctgaactaacgtggctgcaagaattacttaaggaagtgaggttcaaactccctgcagctccagttatatggtgtgataacatgagtgcgagtgca

SEQ ID NO: 5551 - DNA, 566 bp, Cannabis sativa
tggatactggttgcggggtacgtaggttgctcatgattttggttcatttttttgctatactcaagctgtatatgtcataaaaaaaattaatttaggcctgaatatttacaagaattgatctcttattttcttttatctgtaattccattgtagaaatttctttcattagttcatggttctctggagtctggactaataaaaccgaacataatgtaggttgcaagttggggtgcatacttgctgaagaggaatgttttggctatgtcttttgcaccaagggacaatcatgaagcacaagtacaatttgctttggagcgaggtgttcctgctgtaattggtgtttttggaacaatccatctaccatacccatcaagatcctttgatatggctcagtgctcccgatgcctaattccatggactgcaaacagtaagttggttttacatcttacaaaattgactatcatgtttaattctttgaaatataatttactcattaaagtttatcaaatgcaacatccatcaatatacaaaagttatatgcgtttctcgcattaatcatgaaatca

SEQ ID NO: 5552 - DNA, 727 bp, Cannabis sativa
aagcaaaacttctcaccaacattcatggagactgaaaaaagtttctcgtcagcgttcatggtgatcggcaaagcttctacatcgctggtggtggttttgatttaagatctaagattgtttggagaagcttcaccgattatggaggagctgacctattttgtggaggagaagaaattattttgggaaggtttgtagataccgtattttttaaaaggaaagtttttgttttctaattttatttatttttctaaatagcaataaaaaagtaaattgtagacttaataaaattataatagaaaaaaatctcttaatttttttttaaattaaacatataattaagtataaatgcacgttctccatagtatttatatatttgaccaaatgaaaaatcttattacatatatggatgtattgtatagtataagagccgagatgtgcatggcgttaaaagtgcaccagatcagaactgacagctaaaagtgattgataagcttaattcatacatatttccaaataatcattaactgccctcttcaaatttatatacatatatctttattgcaattaattatgtacacagcaaaagctaggccactattctttatttcaaacaaaacatataatagtataaaattatttatttcagcaactcgatcggtcttattaattagtatacagcacattgatcattgtatatatttttacatatatgtataataataataat

SEQ ID NO: 5553 - DNA, 517 bp, Cannabis sativa
gaggtctgttgccttagactgttgtttaacgcatcgttttctctttttagcttctggtttactcttttgtgtaccttgtgtttcggcctcaccatggttacttacattacttattcccaagacttctttttgatctgtttggctgttttctatggatttcttcacattcctcttctttacttctctgcttggaacaagtaaatattagaaacagaaggatatatataccgagaaaaaaagaggtatccgagagaccaatcgttccttaaaatttaccttagttttccagcttgtttgttagattgattagtgttctcactattagccatcaaacgcaatggaccgaaatcaccagggcaaagagcaggacgttctgactctctatctacaaaatttcctataaaagcggctttttgtattcttctagctgcttgaagcaaaggaacctcatccggaagcaacttcttccatctcctggatacagataaaaaaagcagcagtaacagaaagttaaaac

SEQ ID NO: 5554 - DNA, 747 bp, Cannabis sativa
aaaaaaaaaaaaaaactccatcaagaaaagcaaaactaatattctctcacctaaaaagattaatcttggtttaagaaaattaaaaaagtgagataatagaaaacgtgcgctgtaacacaatttcccacgtaatatctataaatgtaaatgaaagattccaatatgcatgtgtaagtttttctttggcccacaattaccatctccttaatacccgccatcaacaaagttgagactttttcttcagtgatcagttacagatttcactcacacatgtaacagttagttttatcttccctacattgcatctactttttactttccaaagttgattgcataaaaaaaacatttataaataataataaaaaaaaacaaccttctctcattacaaactcaactacttctaccactaccacgtacaatatatctatctatcttattacactcttctcttcttccttcctacttgtactgatttttttcagttcagtagttatttttgaatgtaacaacaaacataaataacaacaatggttaatacaggagtcataagaaccgttgtagggattattggtctgtcataacatatcctaattaatctatatatatgctttcatttaattaatttctttaatttccatcgataatattattattatgtatatagtttctaatcttttttctctttttgttttaatgtttgggcaggaaatgttatatctttctgtttattcacctccccaatgtaat

SEQ ID NO: 5555 - DNA, 787 bp, Cannabis sativa
aactcagttgaataacgggcaacgacatggttcttcttagctgaccacgatatgaggtttggaccaagattaacggcatatccaccagtagaccttcgatcattagggcaactcgcccaattagcattagagtatgcttcaatggatagacgagttgttggtgaaatgacaagaccatgagataaagtggcctttaagtatcgaagtaatcttttacatgcttcccaaagagcattggttggagcatgaataaattaggatagcttgttgatgatgaatgcaacatctggtcttgttaatgttagatactaaagtgctccaagagtgcttctatatagtgttttatcttcaaaaggcagacccttagttagagcaagtttgtgagcactactagtaggacttgagcaagttttggcaccatctaaatgaactttaaccagtaggtttgttatatacatgcttttagacaaatacatgcctttggagtccctgcgtatttccactccaagaaaataatgaacaggccccatatcgttgagtgaaaaagtatcatcaaggttgctaataagctttttaataaggttgggatcagcgcatgtaattagaatatcatctacatatacaagtaggatgatttgagtggaacctgatccacatatgaataatgatgtatcagctctcgaagccttaaatccccaactgaataaagttgttttgagtttcccatcccaagccctaggtgcctgctacaatccatagatctctttgttaaatttgcagacatgat

SEQ ID NO: 5556 - DNA, 1850 bp, Cannabis sativa
ccttagaaccgaaactgcgacccaactcattcagggagtttatcccattatcccaatggggccgtggcggggcctttgtcaattgatttggataataaaaatacacgtgttctcttccaaaaacacaactaacatccagtaataattataacaattaattagatgtaattgatatcatccactaattgcttcaatttcatcaaacttaatcaaggactgcatgcggccaataataatttaaccaacttctatacataagctataatatatatttaatgtctaatcattgggaaagggctggatgaagcaataggctatacagataggtacatacatatatagcttggcctaattgagcagaaaagggtggaggttaagaagagagcgaaaataaccattaaattatgctttattataaatagatgagaactttcatatgagtgagattacgttttaattatgtcatcattattcatgataattgtaattgtgatcatcattgtatcacataatggcgaggattaaaaattgggagatgcataattaggtatgttataaagcatatgtgtaagtggatcccattgtacatatattcataaattaaagaacccaacacatgattaagatccacttcctcattatctacattatataaaatctttgacgccgccaaatcaactatcaataaacaaataatatacaattatggtttggttttcttcctacatggcatcaccaagaaattgtatgcctatacaagagatatagtggtccttatcaattatggtgatgacatatataaatatatacacatcctgttatcctttaacatatacatgttaaagcaaatgttggagaagcatccagcaagaataatataatgatttaacacacaaacatatttatatacatcataaagattcattattataaatattaatttcccttttaatgcgcgtgaaatgtaaaggaggagtgctatattttttgccctcttccacacttttctcttttgaacatcttggaaaggcactataaatgattaaatttttgttggaacggggtgtggcataaggtggtagatgatgatttgctaatatgcttattctttggacttttgaaacctaattaactgtagctacctaggtgtttcagggcataaaggagagccatggtatattgtttaattaatgacatagtttaatagtactaaaaactagggtgtcttcatggcagcaagcatgaggggcttggagaggaaataatatgaattattgaaaaggaataagggatcattaatttaatttgttagtccatagtacaactaatctcgatctttcattaatggaattaatccttcgtacgtttctgattgtgatctgaattatatttccttttaatttctctctttcagcaatattttattgaaggacgcgtacatgagacgcacgcgaataaatataatatatatttagaaagataaatgttaaaaggtactagtggtgtttaacacctttctatgtgttaatatcgttattgatctaattaagtattgaattcaatatagtttaatataataattttacggactatcgtttgtcaatcacaaagtgatatgtctagaggtgctcgacactactgatgtccaatagcaatgctcattgaaaatgctaaaaagcaccagtggtgcctatactctcttacgtgttaatatcgctattggaccaactaaatatcgagtctcatatagtttaatgcaataacttttaagagatatcactagcaaattacaaaacaacacatctaaaagatgttagacattactttgaccaataagaatgctcatatat

SEQ ID NO: 5557 - DNA, 636 bp, Cannabis sativa
tatttgttttgcatgttttgtttttcctactaaactcttttaattttactttggagcttctttttcttttttggctatttatgttacataaataagattctatttttctcttcaaaattaattttggttaagaaaatatttttttttatgaattagttagtgttttcattactccaaaatccaaattacaaaataagagcatccttaactagaagatctcaaatgtagtctatacaaaatttacaaattcataaagatataaccattataaatctttcgagctaaattttttggaccaaacactgttaatgctttgtttgacagatttttttattaaacaaatgactctttctttagactttgaattccaaagcttttcattcttagtcttctaaacatgatagacaaaaccaaccaaagtagcagataaaacttgctgaaaaggaacaagtaacttgtatctaaatggtacctcctgcttaaaaacacattgttatattaaaaaattatttgagaagttattttcttagatggctctatacattccctacctgaaatccttttagcacatatgagaacccccaagtatgtaagcgatacctcctgcttaaaaaaatattattatgtttaagattc

SEQ ID NO: 5558 - DNA, 890 bp, Cannabis sativa
gttaattgtcaaatgctatacatataggggcggagggagggaccttatgggtcatttgtccccctccacttcttataaattaatttttgagaacaaacattttttaaatattttaaattttgcctccataaaattaataacattttagttatatatatatttttaattttacttttataaaatttatatttttaatttttatccgatataattttatttttatctcacataattttatttttatctcacataattttattttttttcctactaggtttatagttttcatttttatttttttccatataatttatatttttcatctcatatatttttatttttatctttataaaatattatctttttcaattatacgcctttaatagaaaaaaaaaattgccccatttataagtgcaggttctgccacatgctatatatacacaaaaaatttagagaaaaaatctaaaaagtatatactttattttaactcttaggtgaccttttgttggatgtaatgaaatagaatggaaagaaaataatttttatttcattcttttatgtagttgcattttaaagtatcggaatgtcattcaaatagaatgactttttcattatttggtggaatgactattttttttttgtaggttccactataatgaaaaattaagggacgccaaaacatgaaggaagatggatctcttccaaacaataaattttttttttctatcctaaaagcatgcaaagatactttagaaaaactaaacaataaaacttaaaatctgtagttaaataaacattcaacttgctttctttattgtaccaaaagaatatctacaaattacaaaaatagaaataaattaataacaaacttttaggaaaaacataaaaat

SEQ ID NO: 5559 - DNA, 2327 bp, Cannabis sativa
tgaacttgatgacaatacaaagaccctagatgttgtcatattcacagatatcgtggaaaacacattttcatgtattgttgcccaactaataaaatattttgcagaggtatagttttaaataaataaaataaatgtacttgtttatcataagtagatttattaaattgattatttatactatatatattataatattaaatgaaaaataataattttttgccggaacaccgtaactttatcgaaactaccatatacaaattcactaaaaaatagacaatccaattatatgtggaccaactagaatgaaaagtacaaaatataaacattacactgttgtctctcccaaaacaaaagaagactaaaactcaaccattaaaagcatctttattttttctttttacattagatagatgttatcttcgattatcaacaatttagagtttatttttttaatttttttattttacacaattttaagctgtgtctgctttattatttgaacattagtttatttttgaattaatttaagaacaatttgcagttagattatcaaaatttcttattcatgaatttgttgcattcaatatttacttttaatttgcaacaccattatttacattaattgaataaacataaaaataatctcaaacaataactaataatattttttcttcaattatttattgtatcatttttaaatgaagtagttaacacctaatataaaactaagtatgtgccttgcacgtagcttctttctagtaaataaatatacagttatctttagaaatatatttatatagttcatttttgttgcacttaaatttttatgtaaatttttttaagaattattacatgaaaaatacatattgacactttatttacaaaaatacattcataaggtgtggataatatttatacaatgcgcttttaattaccaaaatacatcttacactatcacttacacaatcagacgatggttgctgggtgattggtcgaaggttgcatcagacgaaagttactgggtggttggctaaaggttgcatcagacaaagattttaattaaatgaaggttgctgggtggttgaccaaaggttgcatcaaacgaaagtttcaatcagacaaaataaatgttagcaaattatttatgcagctgtaatataactattatgaaacattaaaaatcagaacaatattttcacgtacgtaactctgtctacatgtctcttcatgatttaatatgaataaattcaccattagaaatttggaaaacaacgaaaatacaccagaataaatattataatatagtattcaattgatgtaattttttggggattatacatgagttggattgtttgggaactccagttcaactttttgagatctgcattttatgaatctgaaaagtaaagtcaggacattaatttatgcaaattaaactggattttcggttgaattttagtttcgtagtagtttttctatacttttttatttcatgaatttgaaacatcctctgttttgattaattttggtcatcttctcaggtgaagttactggaattaatggtggttctctttctggttgaattttcatttcggttgcgttggattactgcgtggttgcacgatggttgctcaagaagcatgaatcgtgtgttgaaggtgtgtgtaagtgttatttgtgtaattttttttatttaagttgtatatttatttatttagccagctagaagtatttttaaaatactgttatactttttttttttttggttaaaattgaaaaaaaattattttttatggcaaaattttttatattatttatttttttcacttaaatatctatataatttttttggcggctgaaatttctataaagtacacatataatggagaaaaactttaatgggagaatgctcaatccacttgatgagaggaacttcatataacatatacaacaacttctaatcattctaacaatttataaacaaataatacaaagaatatgttttattacaacacacatggactcatttgaattaatcgagttatactatacagacaatcaaacccaaacactaaaaatgtcatttaaaatgttccatggtagaaaaaaaaaatagattattttgtgtcgttttccaattcatatgctatatggaaattgtgagctctatcttcaaggtttactgcggccaaaaattatgatacaaattttttatataaatattttttctttatgggatatgatagcactttaattcaaacttaatatattctttctcaagttatgattgatttatgaatgcagttgttgtgtcaatgtcttaacga

SEQ ID NO: 5560 - DNA, 1060 bp, Cannabis sativa
aagaaaacaaagacaggtagttatttgtgaattgtgagctaccaaacaagcacccctttttaaaagcaattgcagaaacaaccacaacttagcaatttgagaaaaaaaaattagcatgcttccccaaaaccagaagaaccacaaaaagacagccacagcctacacacacccaacagttgtatcctcaaacagattaaaaacttagaaccctgggataacaaaaacagggctatcaccctcatttctccagttcaaaagataataagctggaaatctgccttaaatcagaaacccccgccatcaaccttgaataatgctcaagggagctttgccactcctccatgaaaagcacaatccttggcactcctcagactgtgacacaatagagaagcatacttctgactgaaacccaaatttgggtccaaaatccaattaaggatatcaccagtgagttaaaagaaagaagctcacttctcacctcccaattaaggagattagattaagacttgattttttttagtaaaattagacaatgaacatgaaacgctaaacttccataaaagtactgaaaaagcagcttcgtcagctgccctaactgtgaccattttttcacacagatacattatataaacatatcaactacaatcaatatcaaaatacaaatagccaaacaaaaaatggcatcaaaattgaattccccgcctatcaattcaaagctacagaaagttcaaatttataaatattgggacataagttgttcggacaatttttcatttgtgttcatcttgaagaaaatttatggctgaatgtcatgacttagagatatttaccgagagaagcgaaaagaggaaggccgagccggcgagtgaagtccgcggtggccgacgatgatgagctatgaagagcgcgagcgttgtcgttgtgtgtgtggtggaagaacaagaagaggctgcaattcaaagcttggtggaatatgtttccgttaatttctagggtttctgttgggggtaaaaatagtaaagttacttttgtaaaaaagtaaatataacaaattaaatat

SEQ ID NO: 5561 - DNA, 600 bp, Cannabis sativa
ctcaccatgtcagaagacaagacttcgagagtgtatcgtattgttaatattaattgtggattatataatgtatatttatttttcttatttgcacagataaatatccgcacctaccatttttggaaactaacatttcggtgttatatacattatacatttcaaaatcaatttttgatgtaaatttatcatgctttccatgtgatcttttttaatattattttatgtaaaatatatatatatatttatatatatgtcatcatattatatatcaacacctataaaattaagagtcgtctatagtatttttaaaaataattgccgacagttttaaaccatcaactatacagtgatccatttaaaaaaaattagaaaaaaattagatcgatgtcgacctttgtcatcaatcgtttggggattacctttttaaaaatttcctgtttccattttttagctattttaaatcatcaaaaatactaaatatttacctattaatggtcctaaaaaacaatttaattgttaatgggagtagtgttttttttagaataagattaattatatatagatgaaatagttatatatatgaaatagttacatacaagc

SEQ ID NO: 5562 - DNA, 694 bp, Cannabis sativa
attgattgatagtgcttagctctaaacatttggtcaacttttcacattggattacaactactcctctactcaaacattaatgacatgtttggtttagtgtaatgagaattgtaatggaatcattattatcattacattgtttgctttgatttttaaacctttgtaatgactttacattagaatggtcattacactatgtattgtaatccccattatattataaaaccaatgtaatgataattacattattaaaaatatctcttttgccttttttttattacttttttttttttaaaaaaaatattttacatattaaaaacaataaaactaagggtatgtttgtcaatatataacttatttatttggttacaatataccattcttattataattcttattccactaagggtatgaattaaatattatctgatgatgtttttgttggtgatgaatggttcactagatgtagtgctcgtacattctttcaatgatacttgtcaagtaaaaacatttgtattttagttctgattttctttctctgcacactcatattattacaacttacgaagaagcaaaaactgtttaattattggggattttttaattatacacgtaacattataattattaacatatatataccgctggtaaaataattataccattctcattagtgttgcccaatatatcaaac

SEQ ID NO: 5563 - DNA, 1281 bp, Cannabis sativa
ggcctcaactgtccgaatagtcctcaccatagcagtgtcaagatcatgggaagtgcgacaactcgacattaacaatgcgtttcttaatggacacattgttgaggatgtgtacatgaatcaacccccgggttttgaagacaaagacaagccgaatcatgtgtgcaagttgatcaaatctatatatggtttgaggcaagctccaagggcatggttcgacaaattgaaagaaacattggttggctggaagtttagaaactcaaaggcagactcctcattattcttcctcaaaactgcctctgacataatacttgttctgatatatgttgacgacattattgttacaggaaacagtccattgaagcttcagaagttcatcgaaaaacttaatctaaactttgccctcaaagacctcggacctcttcactattttttgggaatcgaagctcaccgtgatgcgactggaatatacctcagtcaacccaactacattgaagaacttctcaaaaagatgaacatgttgaatgtcaaaccatgtcccactcccatggctacaggaaaagttttgtccctctttgatggtgaacctatgaagaatcctactgagtatagaagtgtcattggaggcctgcaatatctaaccaatactcgtccggacataagctttgcggtgaacaaacttagccaatttttgaaagcaccaacaaatgttcactggaacgctgcaaaacgcatacttagatatttgaaaggaacccctcatcacgacttacacatcagatactcagagagacttcccttgactggcttttcggacgccgactgggcttgctgtctagacgatcataaatctgttgctggtgtgtgggtctatttcggagacactcttgtctcgtggtcctcaaagaaacaaatgtggtctctcgctctagtacagaattggagtatagagcattggcacatgtcgccgctgaaatctcatggatacaagggctgctgactgaacttgaattttctctgccttcaactccaattacgtggtgcgacaatatgggagccagcgccttagcctccaatcccgtctatcatgctcgaaccaaacatatagagttagatgttcactttgtgagagataaagtcctggagaagaccttggaaatcagatacatcccttcaaatgaacaggtggctgactgtttaactaaaagcctctcacatggacaattcaggttcttaattgacaaacttggagtggtatccaccccactcagtttgagaggggat

SEQ ID NO: 5564 - DNA, 2099 bp, Cannabis sativa
tttttttttataaaacttatcagtttgataagtttaatatatatttattgtaagtttataaacattaaaactaaatagaacgaaaccctctttctccttcgatgaaaacattttcctcctctatctattttctttgattttcaacttaaaatttagtgatttatgctccggtaatagagggatagaaaattcttgaagcgcgaaagcttaaggtatggtttaattttatcttaagctaagaacgattggttttatatataatgattttgtgaattagaatagttatggagattctgaccttgtagaattatttcgatattttttgttgaatttgaggtgattttgagttagaaattgagtttggaacttttatagcttaagtccaaacattagtcgcgtttaccaattaagggctcgattttaatttctattacgtaagaatggttgtatgtatgctatttgtgtgccctgtgaagtttagagtggtttggacaggtttcggtagcgtttcaatgagtgcgtaaattgagaattgagagttttcacctcctacccagtcggtcaccctgttcttgtggaggcggctcaccggttctcaactagtttgtcgtttttgggcagtctcgtgaatttgggaatcgtatttttattgtaactttttacttgagtgtttgttttggacgttctatagaccgtctcgaagcttgaaacgagctctacaatatggtgtatattttagagccaaaatataagttttattttaatgtatttatattatgggttgggtaggaaatcataggttgtcctttgcaactattaagcagtgttttggaataaaaacgtattggtttgtcattgttataacataaggcccaagaatatcaattgttctctaagcaggtcggccaacatgcctaaaatagaacttgacgtaagaaaagtataatgcaccacatggcatgataggttctataattgtcaattgtctggtaaggcaatgacgatgtgatgacaccatggatataatatacgggctcaccttattacgtgatgtgttatacctggcggcatactttattaggtacgggtggcagtgacatatgagtaccgagcgtaagtacaggctcgtctaatcaggcgatgcgatatattagtgccaggctacgacatagattgaaactattgttgggtttcttcttggcgacataccatattaggtacgggcgacagtgacatatgagtatcgggcataggtataggctcgtctaattaggcgatgcgatatattagtgccaggttgttgcacgggctcacctgattaggtggtgcagtgatattatatatgatgttgcattataatacgagcttgaccgattacgcaatgcgaatatatgagcatatctatttctatgcatatggctagttatattatctattattgaatgttatggtttaattatttatgataataaaacgtataattagttatttaatgtattcttctttattacttttcttgctgagtctgtgtgactcacgggtgctctgttgtgtaggtaagggcaagaaaaatttagagcagtcatgagatgacaatcttttccagcaatgtacatattgaccccaccagcctgtgtgcccagttgtcaggagttgttttggagtgagtgtatctgttgtgtattttaattttgtgttttgcactattgttgtatatagtcttttgtaaactttttataacagggatccccgaaaaacacctttttactgtcgttataatgtccatttttaatattttattttagtcaagattttattatcctcacaatttttaataattaattaatctattagtattaaactagtttgtataatcacacatgtggcatccctatggaatagggtgttacatcattgttgcattttatctccttttttattagctcctccaagtttgctagtgtagaattggttagaattagtattccaattattgtgtagtcatcataacttattctatctgcctattggcctccatatttgatggcacacattgtggtcttttaataataatagaaacagcaaccctagttgccata

SEQ ID NO: 5565 - DNA, 974 bp, Cannabis sativa
aaatatgattagttcctatggaagttggagactaatgtttaattttgtttaaaatgtgagattttatattagtatgaaatgatttgctaagcttagttctctttactaggaaaataaagaaacatactgcattgttatagatcttaattggagcctttccatgagtttgaaattcttttacttgttggaggcctaacaatgtccccaagatcaagatttgtgttttgttttgttccatccgcattaattcgaaaattttgtttcaggttgggctggcagctcaattgttctgttggacagggcagtttataggacatggggtgtttgaggttgatattagctctgtacacagaactataattaacttcttctattttgaacatattgcaactttctatgctaaaataattacatttttctgtttccatgttttgatgtggttgtagaaacgtgcaccagctcttctggacaaccttgttcaagccttcttgatggctcctttctttgttttgctcgaggtaacttgttttgctctcggagctgctaattgatttttttatatggtttgttgattaccatttatttttaatgttatgagcattttgtttcttgaaggttcttcagtcgtctttggactatgaaccctatccggggtttcgctcaactgtggaagcaaggattagtgctaatatccaagagtggcaagagagcaagaaaaagaaaatctcttaaaaatggggttgaacatatttagatgacatgtttaatacatttagatgattaagaacagccaactgattgtacactttttctcatgttaataatgtatgtgcctttgcaatctatgccaaggtccaaaaattatagtgcttcagtaaaatttgatacaagaaatgagcagacttggttcggtctgcataaatctggtctgatgatgaagctttgaacttgccggtctttcaatgaatttctta

SEQ ID NO: 5566 - DNA, 540 bp, Cannabis sativa
gctcaagtggccatatagaaggtattggggtgtgtgtgaggggttggtcatgggatcgaatcccaggtatgtaactcaaaaatgtaatataaagacgcttctatcagaaaaagaacgaattattggcttggctgcgtgctcgttatgcaaagtgcgagacgagtagaagagaaaaaaatacttactcaggactctctttctgatatccaaaatcggttgctgctttgagtgctctctggtatgtctgtttcattgcttcctggagatcgccaaacaaaatggaatcagaaatcataaaacaaataaaccacttcaagttccaatctgacagaaacactccaagtgggatttttggtgtataatcatgtttatttcaaaagctacacatcttgtcaatagaattttagagtcacctgcaacttagattcaaagtcctcaggtgaccagttcattgaattgcactcgtggtttaactcaagttctccagcaacaacctgcagccaagtagataaaacataactttatcactgagaaaataat

SEQ ID NO: 5567 - DNA, 913 bp, Cannabis sativa
tagaagaaataaatgctttgaacgagcaggttaaacctgagtcatcttttatgagagagcatgcgctagaatgtggtgttgctgcagcctcttttagtgggaagctcaacaagggaaatgaaggcccatcatcgtctgataaatgcagagatgacccttcggaaacaaaggaagctccccacttgaagcactattgtgaatttaaagaaagtgcccccgtcagctcaatgaagataaaaatcaagacgaagaaaaggatattaactgatcctagaagcccatcaactttaaaatttgttacagttaaggatgaactgactggtccaagagatgactttatgtctaaaactcctagcatggagcaggatactgaagtaggaccagctagaggtactcgcagatcatgttcttcactgttacataagtctaggtctggtttagaacgttttgatagtaatttggaagaaactacttcaagcaccaattacctccgtgattcaatgattgatttcccagaagcaggtactgatgtatcgcgtagaacaagatcctttaccatgaaagcaacttctcgggaaacaaacacaatgagtagtagctttaagtcaagaggaaatcatcatgcagcagggacattaaaaggtgcagaagagtactactcaaaaatgaatgatacattccataaaaaatcaaggtcctctaggattcctcagggcacttctaataattgtgacagaaattcgtcagccaaaaggatttcaagccaacctgtcggcaagctatcatggctaacattgtcagagtatgaagaaggttatcgttatattcctcagcttggcgatgaagttgtatatctgagacaggtgattccacatcgaatgaataaattttggtttgtctcctattatctttt

SEQ ID NO: 5568 - DNA, 587 bp, Cannabis sativa
ttttattttatttttgtttgcatggtgaaaggtctagattttttatttttttaatataaaatgaaattattatttggggactttgactcaactattttagaatttggtaccaatatgtttaattgcattaagatatttgttaactacctaacgatcgttatgttttttttttttcttctatgtataatttgggagaacatacgtaccaaattgtcggcaaaatttattttattgctatttttttatagagaaaaataaatagcttttgttttaagtattttctgtaggttgtttttaatatttaagtggagctaataattttcatttaaatttaattatcaaaaagaaggaaaaaaatgaaaacaaaaaataaaatagtacatggattagaaagaattacaatagatactcatattaaaaaatttatattaatatttttttaaatatttttaaataaatcatctaattttattaatagcaattagttaaaataatagtgtataatttaatggaaaaatcgccgtttgataaattaaaattacaaaatgagttaaataattaaccaattaattctcaaattaaataaa

SEQ ID NO: 5569 - DNA, 864 bp, Cannabis sativa
  modified_base (607)..(608): a, c, t, g, unknown or other
atgatatgtacattatcacacttggaattccataatttgttgttcttattcttccaaatgtggtaaaccaaactggccaaagcggcatgccaacactacttttttttcttaaatttactgtactttgatctttcattcaccacaccaattttgttgttgaatttgaaaatgttgaccaatacagccattctttgattttcagtaggtaggaaagtgagaaagaacaataaaataaataggtgtgaattagatttcttggctgttacacaataagcagacaaaatcatcaatggttccaaatcccagtagcctgtctcttgtcctcaatctattctgaagtgctatctacattatgaaagtatattttattttggtatatagtatattattattcaaattattttgctatgtataatagtagtatataattttgtttacataatataaatattttaatatatgtatatgattttattagcatgcttcatatatttaattattatttttatatattttgtgatatattttttaaaataatatttaattagtttctattttattatatataattttagtgtcatgatatatatatattttaattgtggtnnataatttggttagtatagtatacacatgtattagtaatatatatatttttttattattattgttagtatatatattttggtgaatagtatatgtattttttattatactatatatataaatcatttttttaaataatattaagttttattttttattatacttttgttgatatgatatataattttattagcatcttatatatttttatttttatttattgttattatatgcatatatattttgattgtaaggtat

SEQ ID NO: 5570 - DNA, 775 bp, Cannabis sativa
tatttactcaaggaaaattaatgtacaatattaaggaaaggaataaataaagttggaaaatttgtataacaccaagggtagttttggtagtttattttatctatttcagcatctagtataattttttagttcgattttaatttttatgatcgtatacattacatctatttagactcacttataaatttttaaagaagaattactctatatactatttttttttcaaatttatagtttgagttgcttcagtgctctattagtttttatgtgtgttgctatgtagattttagttgcgattaattaggttgctccattaattgttatatggatttttgtaaaatgcaaaaaaaaaaaaaaagttactttaaagtgtaaaaattaaaataaaaattatttttaaaatttttagattaatttatagtatcaaaaataaagttataacacttacttactatgtataagaaaaaaaaagtcgcttaaatatttaaatattatttttaacattgtatattactctaaattttgtaaaaatctacatgtaaatttaaataagtttaatatatacacaatcatacaaaatatttagattaaaattctcacttaaatgccaaaccactataggtgtataccaaaacacgtctcttttaagtgagtattataaacttacccaataaaattatatatatttatttaagaatatatatagaacaatttaattaaaaaaaaattgacttcaaggtacttgatatagttttagaaataaaaaataaagaac

SEQ ID NO: 5571 - DNA, 882 bp, Cannabis sativa
atatgtgatgttgtagccattgttgtatacgtagtggtctaattcaatccaagagagttaacccaaagtacagtagtgtaaataatatgagatattttcaacactatattattattgtaaataattatagtcttaggtatttatattaagtttacattatgtgcaacttgttagtaattgtgtaattactaaagtaataattacatataagtgtaattaaattttattttaaaataaaatgtgtgtttgaacttcttataataattacatattaatttttattttcatcataagaaaaagagttaataattacagtaacattaattatcttaaatagtaatattatgtaactacacatgatcttatcgtgtaattatctagttgaacaaacacagcaaacttcataattacatcaaattacacttccaaacgtgccctaataaaatttggggtaaaggaatctttggaagatgttcagttttgcatggttgatacacttcaatatttttgttacaactcattttgagtgaaggggtatgtgtctctctgtttctgagaataggtacaaaaacttgctacttcatatgtatggatcaatcgatctgtctggattttgttcttctactcttgtttattaatttattcgttttgttgtgtattgatcatgattcatgatgttcaatccaagtgtcttcatgcatggatattatcaaatttgtagagagtgtagaatatgccctattgctattgggattctacatattatcatattgagaatgcaatgtattgtgtggagttaatgtttgtcagtcattaagttcttggatttcatatttattatgtaaactataagacttgatcgacattaaagataaattaaac

SEQ ID NO: 5572 - DNA, 1607 bp, Cannabis sativa
acaatttccattcaaaacgacaatggtatccttaataaacgacaattgtttctaatgaccatttttcttgagaaacaacaattttaatttggaaacgacaagtttattgcaaaacgataattttgtggttgtcgtcattttttaatgtcaattttcagagttgtcgttcttctaattaaattgttattttataagaaaaatgtacttttttttttatttaaaatcgtcgtaaaaaaacatttttttgtatgtttttatggcttacatatatatgtatatttataaaaattgataatggttattatatgagggaatatatattatcatcaaaagcacacattaatttcataaacaatataataggacatgagtaccatactttttgctatataatttcttgattttatttggcctagaagcaaagttgcaacacttaattagtctaaaatttcatcattatgtttttgtttgagcttgaaatgatccaagagcctactcccatcaaggccttttgtaccaaaataagcaatataatccttcactgtggtttctctatactttgggggattattttctgataacaactccttaatgggtccataaattttcgaggttgggatcacaccggtgcaaaaaaagctcgctatagatattcgaggaccgacatggctcgccaaaactctgtgctcaacacttttgaatctatcattcgttataagctaaacaacaaccaaaaaacaaatatggtgtataattagtacaaaactacattgaataaactcttctatataagattcttaattaggtaaaattacctgaagaagatctccaatgtttactactagagctccgggttgaggtggaacatcgatccatttattgtcaatgagaacttggagaccaccaatgtcatcttgaagcaaaacggtgaggaagtccatatcggcatgtttggttgctcccatagttagctctggttgcgggcatggtggatagtaatgacaaaaaagtagttgaccctctgcgcaatctatgttgttcaagtgatttggattcaacccgagagcctcagagattaactcgaatagaaaaattcctactttcattacttgtttcgagtactccacaagtatgtctcttcaaaattgaaaaaatagagtaaaaaatgttactcaaaaggctgtgattatttctaacatgttatatgaatatatgcatatgatgaaccaaactaacactgaattatttatataaaattatgcttttgaatagttcatacaaaaatttatacgaacaccaaaacaaaataggatttttttttcataaatacccactaaaaacaaaaatatttaaaaaaaaaaagaagttatttttacaccatatactaaaatttctaatttttttactttttcattgtcgggcgaattttttttcaaaaatactgtgtaaattttatattatatactgtgttaagttttcacagttgttccatagttgtttcaatgttgttttagttgttctatttttttttacggttattttataaaaaaaatagtatttttgtaaaaaaaattgtgcgacaataaaattataaacttttgtccaaa

SEQ ID NO: 5573 - DNA, 834 bp, Cannabis sativa
attagactaaaaaacttttatagatgtcgatatatatatatagatgaatattctatcataacatttttttagagagtatacaaaacttagcataggaaaatttaaaacggacagcaaaatatattttgcagtaatgttttatttatgttattcttaatacataaaagagaaataatgtaacagagattggagaaggattatatgaaccatccatccaaatcccaaaccttcttgggggaaaatccataaaccagtactaattccttaaagtactctattttgtaagcaaattaaaatcaagtattgggaacaaacatatcttcaaaatattctcttggatataccaaacctatgtgatcaagattcaagttcatacttgagacttgagactgaaacgatcctcacaaatcaaaataaataatagcaaaaacaagagatcaaaccaacttaagtactacatgtgccttaaaatccatgttggtgtcttcctatgtataagtacatctccctacatagtcgggtgtggtccaaaaataattaacaatttaacactaaccaaccacatccactaatggacaacaacactagaaatctcttcttcctactaacactattccccctcacgtgcctctcactctcacgtgccccaactccacgagctcctaattcgcgccaatgcgagaactgtggcccgactctggttccgtacccgctaagtacccgacccggttgcggtgactacgctctctacaaaatacgttgcaccgccggggctctatggctcgacaccgtgaacgagtcggcttacccgatcacctcggtcaacccggtcac

SEQ ID NO: 5574 - DNA, 5488 bp, Cannabis sativa
  modified_base (4788)..(4790): a, c, t, g, unknown or other
aaacaaagccgcgcctaatggagcgatgttatttggtaagtgttacttaaacaccatatggattcattaatggtttcttattacattttgtggtatttcgcacatcaagggaccatattgttatagagcattgttattaagcactagtggtgcttagcaccctctcgacatgtcgcgttacgattggttagcgatactccctaaaagttatattatatttaattatatgggacccgatatttagttataccaatagcgatattgacatataagaaggtgctaggcaccactgatgtcttttagcattttttttttaatggcattgttattaggtataattatggtactttagatatattttataaaagttattatattaaatcgactcgatactttgttgtatcaataacaatattatattttgagtggatattaaacgctactaataccttttagttttttttttcaaatatatagtgtaattaatataagatgataaaattagtttaacatattaattgatcatattagtggaagtgaatgtcataaaaattagaaagttaattaggacttttacctctaacttttgatatgcactaaatcatgcatttagaactttttaggccgctaaaaacttcttctaaactatatgattactggattaaattaggacttctttctaattttttactaacagaattctaacgtagatgaaagttcagatgacacaatttgatagatgtcaaagtttaggaggcacaatttagtaaattttaaagtttggaagcacgatttaattagtacatagagaattgttgtgttagtaaaattaaacagaattagatagaagtctttaaatctaacaatctcaatattttagagagaatttgtaatcctatttagtacataaatataatttaatatatgtcaaagtttaggcacacaattttttagtcaaattaaaatatacattcatgatcattaattaatactgaatgtgacaatgcatgatttgccatgctaagtgaaatatgcttagtttaatgtatacacatatattcccatatgaaaaaaaaaaattaattaaaatttaaaacaattaataaaatgtagaacatgaataaattttttgtaagaaattttaaaataaaaagaaaaaaaattatagcatcgggtaaaatgtgtttttagtttgattagttaaatattttaaaacttctttaatttagaaaatataattttagagcatgtatgtttgtactcttaagaattttaacagttaataaaatatctttcatctggttttttcaggaaaaaaaaaaaaacattcagcttattaaaaatgaaaggtgtgcagtttctgacaatgacatattgtcaccccaatatcgatgatttgaagtaaaacatttttagtaactttagtttccattgaataatataattttaaagaattgggtgcagcaacgttactaaaagtctaaaacaatgtattttttttttattttttttagaattggtttggttcagaaaatgactgctagaattaaactctagaaatctatcatttgcatgctgagtagttctcattaattttgtgctcctgaccatttacacctattagagccagatcctgatactccccaagagaatcattttagaaattgagagtgtttgtcgaagctttctctgaattaaaagggcaaagtaacatggctggttcagggaaaatagcttgggacaaactgtgcaaaccttagaaagtaggaggattaggttttttgaaaatctcggattgaaacacaatagctcttataaaacatgtgtggtcgattgctaataagaaaggacaatctatggatcaaatagatacacagtgtgtacattaagcaagaagattagttgggtagtatccgatctcaaaaaggtcgtcgaagccaaagacagaataagatctctaaaggacactgttcagttcgcacttgacaattataagattgttgctggttataaattgattaaccaagcggaggaacatttccattggagtaaagaagtgtggtgcatgcaggctaaatattctgaagcatagttttgtgatttggttggctatccaagatagattaaaaaatagagaaagactgtttacttttaagataatagatgacccaatttgtatcttcttcaatttggcaattgaaatagaagatcatttatttttgaatgtcctttctctcttgattgtcttaggcagttaaaaatatgacttgggtagaatgtatgctctgtttcattacaagggctgctgaggtggattgaaagaaccaagcaaagcaagatcaagaaacaagtagtgtatccaatttgatatgttaggaatgataaaatttggaactcaagtattgttagttgccacatgttactacaacaaactaagtggttaatcaagaatattaggtgtgtcatgtcaaagaaagttacacaaaaggatatcgggacttgtttgatacattatttttattatttaacaaaatagaaaatcttattagtaacttttgtaaaatacagagtccaaaatagtatttaaataatattttatgaagtaattaaaactgtacttagtttatgtctattttgtatatgcaagaagagaataataacattcactagaaaaaaagcaacaggaaaagcaaagacagattcattttgatttgatcaaatatttaaaatatacaactgctataggctacagcatcgatcactagtacagagatctatatatagcttttattgaagaaaaagaaaaggacacacatatattacatataaggtacaaacatgatcataaataaataagatggctaattaaggcaagatagaaaaacgtgaaatgtgatgatgaagagattattgagttttggtgagagaaataataacattgaagaagtgagtgttttccttagacattcgatgaacaagaatttgtgtgtatgtacgaaagacttggtcaattattgcttccccaaagtgactaacaagcaagggttcagctacagctctcatgcacttggccacacagtaaccattattctgattaatgtcgtttgggtagtcttcctcatcatcatactcattgatataaaacgcagtgtcgttgttgttgttggtggtggtggcactccaagggatttgggaaacctcaactttgttaaccttgaatgacccttctttttctacctcttctctcaattctgatggacatggtgtgtactgtggaatattgaaactttccactttcctttcatctataactccctgaaaataattaatttaatattcaaatttagtatatatagaatatgtgtgtgcatgaactcatataaaattaattataataattatctcatatataataaaatatgtgttggactaaggcagtctaggcctaggcttaatttgtgttttagggtccattcagtctagatgctcaaaaaatacaattttttttaaatatataaatatctagtagtttttaaaaacatttcataattttttttataaagaatccaatactttttcttttatcttaaggtacatccactcttaagactcattgctataaatatgaattgagtgatttgagcatatgagcaccacccgatataaaaaaaatatgagtttggacatgacaagacacgatattgtaaattggcacaaatcacacgaaaagattggctttagcacgacacaacaagcctaaatagtctagtaatccaaaagcacagcacgttaaaaattggggaattttaaaatgtacctttcttttatgttttatttataattttacagcttaaaattttaaattacagaaatacactttgctcagtaaaaaataaaaaaaataataaaaacgaaaaatcaatctcacaacaactataaatcaactataaataaactataaaacaaccaaaaaccatttattatttttactgaagaggtatttttacaaataaaaagttcgaagagtaaaaatgaatttttttttctattgacgtatttttctattttttttttaaatttttatttattatgtaattttttctttaaatttcttcttattattattattattataataaataataataataataataatacatatatattattaaatattaaatttagatcattctaatcaatgatttatatgattatgtgtaaagtattattaaaaaattatataaaaagcaattgtaacgataaaaatatatataatttagtgattaacttattaattgtaaaaaaaaatagcacaaaatcggagcctaaattcgagcccatataaaaaaacgggctttacttctttatgaaaaatatatcagcacgactaaaacacgacacaaattcatatggaaaaaaaatataggtttacgagtcactaggccgtcttaaaggctctgttctctaatttaaaatttgggtccctacaaaaagaaaatataatttataaataatatttttaaatattatcattcagttatatatttcagaaaatactaaaaaactccaactatttataaaaattgttattgattccaatagaacaaaataaaatgataagaaaaaaagaatataaaaggtttgaaaaaaaataataaatagcagtaatagattttttttttttttttttgcttaaaagcattagaattgaaaataagttttggaaattggaatagaagtgactaatacaagttgaaaaatacatcttttttgtatccattaatnnnaaatactctcatattatttttttagtaaaatatacccattttttttagtagattgcctaatatacccgcattatctacttaagtctagcatataatttacataaactaaggtcatggaagtaagaattaaaacaagtaaagtaaagtgagtataaaatgtaatttcctcgaattgttagtcccttcaaaaattaggttcattaaaaaaaactattgggtattaaacaaaaaatatattggaccattttatttttattttttttttagccttgtgcagtagccgaccttacacaccattatggccgaccatgacaggccgtgccgagtctatcctttaaaatattggcacaaaatagcatgacctatattttttatgggctgagtacacacaactcatattattacaagcttctcaaaatatgaatcgggctgactcaacacacacttatttacaactagccaatccattatcatggtgcatatatatgtcatcaaatagaatattactattaagtatcgatgtaacacgttatgagtagttaacgatcttttatattatttattaaattaaaatgtataaatattgatttgcaccaataaacagtacctggcactaccataaaataccccttaatatttctccattaaataatattgtagaataagttgtaacacaacaaatattattattattatta

SEQ ID NO: 5575 - DNA, 610 bp, Cannabis sativa
ttgttgtattgatttattcacccctgaattttctcccaaaggttcacaagcaaaataaataaccgactcttttaaacaacctatacaacactaaaaaccatcaaaagaaacatatatgtacagactaaaaacgtgactagacccaaaatgtactcaaattgtaaaaaaaaaagtcctgaaaattgatccagaagactttttgaagaacaatcatctggactggctcactctgaaaaaggagagatattcttctaaaccaatagccattttgccacttttagaggcaacttgttttacaattgtaggaggtctagttttgtgtatactaaggtgttgtttgagcaatttagttaaggcagcaaccaccaccgcctcgagatgaactgtgtgcttgcttctgcttcattgtgtttctcttaactactgcggatccattttccagtaaacttggtacttccagtatctgtaaaccaaaactaactctgtcaccagacacatttctacaattcaacaaatatgtaaacacaagatgtggctgcatcgactcattgactctagtttcttcccaacagatactaaaagcgaaacattttttatgacaggattagaa

SEQ ID NO: 5576 - DNA, 590 bp, Cannabis sativa
aacttactaaagttcttacaaaattaattatgaaagataaatttactaatgaaatagatttgtctcttagtattcatgataatcacagatgtatttttgtaagtttgtttgtgataaagaaatatttttactgaaattttataatgattggaacgagagatattttagttttaccgatctccagtttacatatacatataatcttgaattcaccctcattggtgtatcaagttgaactgtgctttacatttgaatggtcaattgaaactttatttacaaaccttcacagtatcatatagcatataaatcaagatatgaaattgaatggaaaatcacacttccacttaaactatttacctccattatttaaaaaaagaaaaaattgaaaggggaatataaagactaatcaccctccctattctacattcccaaaaataatgaataccttaactgattaggtagaccaatgacgacatgatggaattattttttagagacatttgtaataaatttggggtggaatggaatcattctataattgaagtgtaagttattgttggaaaaattataattataaatataattcatgt

SEQ ID NO: 5577 - DNA, 857 bp, Cannabis sativa
gacatattcagtttgaatctagagaaaaatctttgtggtactgaagaatttgattgaaaaggtcattgggttgatgtttcttcaaatgtttttgacatattcgatttcaatttacacaaacttttttttgttgatgtatgcttttcttgcatagttatgtagtgggaaagttggctaaatgatgaagcttgcattgcaggttattttggtttatggattatatgaaacactgtttgcatttacaaatttagtggtgaaggaattgattgatcagtttgaatctaaatcaaattctttgtactattgaactgaagttgttgaacctaaaaacatacatggggtttttgactgacagatatatgtttctttttcggaattatgaagcttgatttgcaggttatgtagtgaggagctcatgctatatgatgctatctctcatgttatggctaggaagactagaaaaatgtatgttgtatcgaatgggacgagtcatgagtgagaattagcataaattgtatgcatattgcatatggtgtgagtggttttcgatatctattttctttgctgcaaatgcaagtgggttttgataagttttatttattgtttttaagggttttacaacttatgctgagaggagaattgtggaggttgttcaaggagaagagaaagctgttctgaatattggaattggctggaggggtttgaatgaggaaatggagagattcaaggacaacatggagtttacaaagcttaaaatgaatcaagaaggagttgaccctgatgatgtgtattctcaggttccatacgagaaaggttttcagtttctatggcgaatcgaacgccaggtatgtttgtgt

SEQ ID NO: 5578 - DNA, 795 bp, Cannabis sativa
ttaattaattaattaataattagcactataataaaaatgattccttttactttagaaataatatatgctctatttctatatgtatatatattaactaacattataatttttctatatttttaaatttatatatatatatttattatctcaatcaccttttttgttgcagtctcccaaaacccttctttaatctttattctctctactcatgagaatcttcacaacttttctcctctcatcttatatatatatatatacatatttataactatttgagcaagattgaattaatcagttgaaaataactgaatagacattttttttttattaaaaatatacaaaattcattccctatatatctatataataaaaagctttactaagcttcaacaatggtgaaaatggagttatttgagtacaaagaagtgttagaagccacagacaatttctcccaatcaagaatcatcggtaaaggaagccatggatcaatcttcttagccactttccccaaattactcgctgtagttaaaaaatctcataatcataatttgattattgaaaatgaggtaagaatattattatcattattatctcataataatattaataataataatcacataataaaccttatcggaacgagtcaagactcggtctcaactcaccgagtcataatcctcgagttcatgccaaacggttcattacacgactcgctccacgtcatcaaaacgccgccgtcttggcccaaacgactcgaaatcgttctccaaatcgccgccgccgttaaattcctcc

SEQ ID NO: 5579 - DNA, 1080 bp, Cannabis sativa
  modified_base (628)..(634): a, c, t, g, unknown or other
aaaaaaaaaaaaaaacacttcaattccgtatacacctagcaaatttgcacgggtccatctaatattaataacttaaatattataaaaaaattataattattttaaagtttaaaaaattagaaaaatttctttttttttttttttcttttccttgaaccctaactctattatcacctccatcaccattgccacaacccatcacccaccacgataacttatccaaatcatcatcaaaataaaccaaaacaaaagctaaactaaaaatacaatttgagtcttagatctaaatcaattaaaaaaaaaaaaacagaaacctccacttccatcaaagcctcatcctaggttgcccaaggcctagaaattttcaacccgagaacccctataagcttgacacttaacataccaaagtagataaaaaaatgaagaccaaaacaacattgaagtttggagaattttacccaaaaattcaatagaaggggttgattatgccaaatccaaaagtttaaataatttgaccgttatacaagtgtttgagttatttcgtgttatttatttttattcattataacactgttataaaactaattctattttaattataattggtttgagttattttgtgttattnnnnnnnattcattatgttacagaatcggttatatttcaattataaccggtttgagttatttggtgttatttgtttttattcattttgttatagaaccgatattatttttattcatatctcagacatttacttctactgacttttccggtgatgatgacttttttggcaccggtgacttttccagcatcggtaattttttcgacaaaacttattattgttttacaaatatgggatttctatatttttgtaataaaaaaactcatataaatataaaaaaaaataaaataatttataaccttatggtattatttatttatgtcatacaaaaataaattcttattattttctaatatattgtgtaatttttatctttttaaaagatattttgaacctagagactttgggcgtggacccttactgctccatccttgagtcaaaacctaattatagaa

SEQ ID NO: 5580 - DNA, 2018 bp, Cannabis sativa
aaaacccaacaaaatctcagcattcaagtgggttatactcttcagggtgtgataatcataatctcaatcatgatcatggagaatcatcagaagctcaaagtagtagtagtagtagtactactactgatcatgtctctcctcaaattctggagagctctcaatattcatctgctccatcaccccataataataataataatattaatagtactactggaaagtactgtagtagtactgatgttggtatagtactacatgagtcattattaagtgatcattatgaagagtacgataccagtttctggactgaaccatttgtggaagataataaagtgttcatgcccatccaagatgatcatcagtactactatagtactacatattttggagattcagaagccaataatattgcctcgttttataatctttcattgtataatattactgatgatcaagggatggccaacgacttcttatatcatataaatactagctagtatatatcttaaactacgtcttgtactcaatagacgaaaatttatgtatggatcatctccatatgcaagtatgtaaccagtttctgtatctatatattgataaggtttgattaaaacatcttaacaaagctggctcatcagttttcattacaattattttagaacatgttgtaaaactctttggtctttgtgtttccatgctgtatagtatctttaaatttctttgtgtacaatattctatattattgtatgttcccatccagcaatttgtaagctggttggtaaattataaatgatctattattccttttattaataatttatttttaatttttagaacattttaaaatcaatgatgacatttgttaaaaaaaaatcatactcacatgagttttttgaaaacctatttaaaatagaataaacgctaaagagaataaataaaatataaagatcaagacgaggattttttacgtggtttaaatattaacgaactctagttcacgggttaatattatttagctagaaaaaccttcgagtattacataagtgttcttgtctggtttatgaattctagccctttgcatgaacgggtttggttatatttaaaggctagtgttttcatgtattcagtgagacccagcccgtgaggtaatagttatctgtacacgtggaaattactttatagtgacaggtggaaaacgtgcaccgtctctgtgtataataatgataatttaatagctattgacagtcaccatatatttccttttatgaaatgcatgatttttggatttaactttagaaacaaagtccaaatctgatgggattcgatgttaaatgagcgtcgaatcatccttgacatccgaaggcctattaattatacctttccaaaagcatcacttgaaggtattcgaaagttctcttcgctagactcttcttttgcttggatgagatgttactctgaaactcggatggtctgacctctttgatgagctcagtccattatcctgattgggcctgcaactaggcctatgatgattgaatttggatcttagaattacatgtgtccctttttctgaaacgcggataacatttgacctctaagcttccgaaactctagagttgtggaggcttgcagtcttctttctagattgtatgaggacacacggatgtttaaaaagtatggaccttttcaaatccccaagccaataagttatggatgataacttttcggtttttcaaaattacttacacgtggcattattctcttagttcgtgaagattacatgcaaagggaaagcacgtgagccctgtatttgtgaaatggcggttgatcatgtcagcaggtatctcgaggtgaatatcatcatatcaattacctcaattccacacatccattaaatgctaagcctttcgcttcctagattgttggatatagttctgtttcctgagatgcagtctaaataattgatttgggagcgcatggatcaccattttctctataaataaggcgaaaatcaacct

SEQ ID NO: 5581 - DNA, 788 bp, Cannabis sativa
catgacctatataaatagatatgaactcatatcatcaattaatcgatctcatattaattacaatggcaaatccatactcacaagttttcgtttacacagaagacgttaatcactactcatcatctgatcaaaatgatcaaaattcatcactagtcaccatcaaatttatggttacaaggaggtaccactcccgcagtaaccacagcaactcaatcgaggattactcgaccactcacgagttcacacactctttcgacaaattcgagtcgatgaattcgtcgtgctccctcttttcgaccatggtttcgagcatcgaacccccgtttcaaatggagaatctgtactggaacaatcccaaccttggtaacatggaggatgagtcaaggatgatgagagtgagctacagcaccatggtgtggatgatggctgatgccgcgacacgaatgatgaaggccagtagtggaagggaattgaaggtttggattgaaaatagaattatgatttctgagtttaaaaggaatagaatgattaaggagtcggaagagttaaaatgtaataagtcaattaaggataatgaagagaagaggaagtgtattatgatgagtgagacatggttgaaattgagtgaagggcttagtgctgacatggttcggttgccactttgattagcctccatctactctctctgctacatcatattattaattgttaattcacttattaattagtttttacaactatgtctttagtatatatattttggatttttaattttttattcaaaaaaa

SEQ ID NO: 5582 - DNA, 878 bp, Cannabis sativa
ttaacagtagtatatgtgctaattcagtgagattgttaataaaggttaaagctttgaatgtaggttagtgctgtcaaaagtggaaggattcaggtagatggagagatggtgccagtttcatacattgttaaatcttctcaaaagataagccatttcttacacaggtgtgtggcagttaatttagttttatccagaaaccttagttggccaatttgctagaaaagacctacttctttgtcctcatgggtggtctgatgtgtacaatacgtacttcagatagttttgttcataattctttattttgtgctggtgctgatcttgagattagattattttagtttgtttcatgtttgttgtgcactttgtggttatttttgtttgcttgatttgaattggttttgagttatcaagttagaaattgattgcgctaagattttttaggcatgaacctcctgttttggctttggatgtttcaatcctccataaagaaccagaagtggtcactatttgtaagcctgcatctgttccggtgagtcatcacttatctattttacatcttttttcaatatgttaattttgtgttacagttccaaatgaagaacacagatctcttgaatgcttatggctgtcacttgatcttgtttctcatttggtatgacatgaaaaccaacataatgtcttgtctcttctctgtactttgctttgcattttgactttccactggtatctaggttcatccctgtggtcaataccgtaagaacactgttgtaggcattcttcaagcagaatatgatttggcacctctgtttcgtatccaaactaccaaacaaaatgcttcttgatatgaattatgtcttttcacacattatgttatctgt

SEQ ID NO: 5583 - DNA, 657 bp, Cannabis sativa
agagagagagagagagacatatatgtacctgtataagcaccattcttttcataatcttgaatgaagtgcttaataactggtgttggaatgacataaccaatgttctccgcatcctcatgtttaagggactgaaatgcaatgcccacgcagttacctttatcattaaaagcaggtccacctgaattacctgagtttatagcagcatctatctgtagatacaaaaatgcaaagtagagttaaagacaaatttaagagttgtgaccagcactggagcaaagaaaaatagccaaaatcaccatctcataacctgcaaaccaagaagttcggtggaaccataaacataggatagaatctcaattcgagatacaactccactagtcacagaaatggtgtcacctccaattggataaccaacaacagtcacggcatcttgaagtgtaggcaaatccccaaattctacagggtatactccttgccaaaactcatcatcatcaacagtaagcattgctgcattacataaataaaacattcaattaaattgttttctcataggaagaacacaagttcagagaaatactactaataccaacaattacttcacattacacgttgaggctctaatagactaatacttgccacttccttgaatatttgctc

SEQ ID NO: 5584 - DNA, 828 bp, Cannabis sativa
agctatattagttgggatcgatgctcataatataagaaattttggctcaaaggttcagtcttttagacctttaacattgcttaacactaaattgaaagaaaaaaaaatagattactctgcctttgcatgcaggggacgatgcccctataattttttggtttattataatagtataaaggaaattaagttttatacaatgtgtacaaaaatatttattattttttaaaacaagttttgtatgggaaaaaattataaaaatatattaaggaatatgggaaaaactatattaaggtactaattactccccatgggtatccatcactattttttaactctttttttgtcccataaaatattttttttctaaaaaaactcacatttttgcaaatttacgccttaaaaatcataaaaaaagataatactcatatatatacactttgcttccatatataaaaataagtatttaatttttaaaataagtactattatgaaaggtgccttatgaattgcccgattaatatttaataaattttcttaggaacttgatcacttgcaaatttaagaagaaaaatgaatattcatatttggccctccttacatattctttaaataaatagttaattagatgaatatacccgtgacaatacacactgaatacaaaccactgatgttagctcagtaactaagaaataatgagaaaaaaagagaaaacatgagttcgaacattatatataatatcatattattcttaagacaaattaaataacactgaatagagtgatgtgaaaactgatcataaggacgaaaataatgttacactagctctag

SEQ ID NO: 5585 - DNA, 719 bp, Cannabis sativa
gcgggtgttgtcgacggtaagatctacgtgatgggaggttgtgcggtggactcttcggccaggtcagctcactgggctgaggtgttcgatcctgtcatcgggcgctgggaggccgttccgagcccgattgaggtccgggacaagtggatgcacgcgagcgccgtggtgggtgggagaatctacgctatggcggaccgaggaggggttgtgtacagcccgatgaggaaggaatgggagggagtgggcgttgatttggacatgggttggagagggagggcttgcgttgtggatgaggtgttgtatagctacgattacctggggaagattaaggggtttgattttaggaatggggaatggaaagagctcaagggggtggataaagagttgcctaagttcttgtgtggggcaacaatggcgaatgtgggtggtaggctgattgtgctgtgggaagagaaggttgataggaatgagaatgggaacgtgagaaagaaagatattgatatatggtgtgctgagattgaagtgaagaaaaatggggatagggatcagtacgggaagattcattggtcagaaaaggttctttctgtcccctttgggtcgtccattgtccattgcactggggtttccttgtgatcaggtatcaagttttctgtaatttgattgcacacaaggatttggtaatagcatgcttggatgagaaagcatgatactacgatata

SEQ ID NO: 5586 - DNA, 639 bp, Cannabis sativa
ttttttttatagccataatcttaccacattcgtctggctcagttagtacattgactttatttataagcaattatttctggtgtgctacgtacgtgttcctagctacttttataaccttcccacaaggccacaaccatttttttccttaataataataatgaaaagagagcaaagcatttttaggatgaaattaatatgcggtgaggtatattaattaaaccatccattatgtttttataattttgaaaaagtttaatgtatgtaagcattccattccatcatctgttctccctctcccactgtcccacacactgtacattataatggttcacagactataaaaatatgcgcgctttaattgaaatttgttgttattattgatatattatttttcaattatttgaattgagatcatctccaacttataaatgtacaattataatagatgctttccttcttacatctatgaacatttgaatatatattaataatagagtgaacccttgagaatatattatacatgtagctagttagtgttatattctactgtattaaactcagaatttattctttgtagttaatttcatatagatgataaattacaaggtaaagataaatagtataagacaaaagaaatat

SEQ ID NO: 5587 - DNA, 922 bp, Cannabis sativa
tcactacgcttggccacataaagtctatttctctgttttgcagaacaaattagcgttccaaatatggaaataataatcacattattaataaacttaaacggattttgccaacacacttggcagacacttgtgctccattgcccactcttatagtcacatttccatcagccagttcttttgacaaatcaagtatttacattgaagaataaatattattagtggctccaaaatcaacaatccataaggatttattatcttccattaaattagcttcaagaataaataaatcgaatttactttttttaagctcaaagagatacttgttacagtttctctttcagtgttccatcacgccacactggaaacacttttcttttgccttcttgtccttggacttagggttgactttgttcttcttggctttaggtgccttcttgcctttcggctaaggcttgctactgttgttctccttattgtccgctttccttttcttatctaagtaagaaggaaagtaggactttgtttcaacattgtttattaactcactttccttaggacttatccttgttaaggttttcaaacacagttaactcgtttaataattgagtcatgtactgaactatagcttgttcatcacatagtttatagtgaacactttgaagcaacgagtaaagcgactcaagaataatgcatacttgagtcctcttgtttacgatagattcttgtatctctgcctcatgtattagccttatcacttgcaatacatgagttcctacagagacactactcagttaggacaaatttgtggttctgacaaactaccatcaaatttagattagattttcattaatgaaaatattcaccattcagtttttcaatttctaataaaataataagaaaatttggtatagtagacattttt

SEQ ID NO: 5588 - DNA, 1502 bp, Cannabis sativa
gggaatgaatatagaaacgacctgctgttggtgtggaaacaatgaagaaactatagcccattgcttgtggttctgtcctatgaatttcgccatatggaaagctttctcatataaaaggcttctgcaccagaatatcgaggaccctattattatactattcgaggtgcatcgcaagttggccaggtatgactggctatcgtttgttgtcttaacttggctaatttgaaactgcaagaacaagaaatgactccaactcttcatcccgagtacagaacattggattgatttggctagaggtgaagtggctgagcagctccataactgcaacacttccaaccctctcgattcaaacttgcagttggccaatcggatcaagtgggagaaccctcatccaggctatgtgtgtataaatagtgatgcaagtgtcccaaaagaagggtcttactgtggtttaggcgttgttatccgagatcatcatgggaaagttattgcagctgccattcataggttgaagggccatttcaatgttgagcttgctgaatcgttggcccttcatctcggtcttcagttagctgaaaagatccccccttctccttttatcatacaaaccgattgccttcggatagtgcagtatcttaatggatttgaatgattgtcaaaaaattctttctattatccatgtcaaaaaagattgtcttcggatactgcactatccgaaggcaatcagttgctgattgtcaaaaaagtcttttatcatacaaactgattgccttcggatagtgcagtatcttcgtgatgaatcttataatcttcttaatgattgtctttctattatccatgtcaaaaaagattgtaataaagtggctcataagttggctgctttggctttgaatgtggctgaacacaaagtctggtttggagatttacctctttgtgcatctatgctttgacagcaaatttgccttaccctttgttttgggctttttgattaataaagtcatttcaaaaaaaaaaaaaattaccttgtagtaatagtaaataaaatctaattggtaattctctctaattggcttataatatatgtgccgacaaaggacggcgcctcgaaagaatgtgtaaaatttaatttggtttctctttttctatagctttcaactaaagttacttgttaaaaactcctaagaactacaagaataggagtaatctcctactatagtagtagtaatagccctagttgaaatctttgtaatcataagtttaccatcaatttacaataatagattgcattgtttcaaacgctaagataacgtagatgagtagaagtgttggggattacactaatattatgttaattaataattgggaattaagatcattttctcagtctttcaaaaaaaaaaaaaatcattttctcaggtatatttttatcggtggtggtaatatagtggtaaaatatatcctacaaagattttccttttaaactatttaataattaactctca

SEQ ID NO: 5589 - DNA, 984 bp, Cannabis sativa
gtggctgccattaggccatcggctatggctccacacaacatgactaaccataatatcactaacaacaatcataatcatcttcagaatctgaggctgcccacatcttcttcagaagggcaagtgcctttcactcttgagatgttgcataatagtccagggaatttcgggttctccgggtttggtgggaactcgggaacgagttcttacatgactcagtctcaactcacagacaatgctgtgtattctaaaaccaaagaagagcccagagatgacaacacgttcctcgaatctttactgtgttgaaatgaattaaaacaaacaataccaaagaaagaaaaacatcaaaaataagaaggcatcttgtagcagctagctgatcaagtccattcaattcattagattttgtttttgtattgtgttgtatattgttttctcttaggataaaagaaaagaaaaaaagaaggattacaattacaggggattggtttgtgtatatcaaacgttgtatgatataggtgttcttatatatcttaatttattattatatattttttcttaggatgagataaaagccttaaatctctcttttttttttattttttttgtaccacacatgacgtggtggtagtctgtttttttcttctcatttttgggagttatatgtaaaacaaagaaattaagttgattttaatttaattatatttagggaaaacaaaatccgatgtttaattttctcttgtcttgtttatttatttatagtcatatatccaaaaatagtacacaaattaagtcaattaaacgactattaactaaccacaaaaattctgtacatcacaatcttgaggtttttgtgtttaaaacaggaaaatattttcacttttcatatgacaaattacagaaaatgagtaaagaaactgaacattattaccttaatagcttatgcattggttttgagacagtggatgttacgtcattagatagaga

SEQ ID NO: 5590 - DNA, 683 bp, Cannabis sativa
taacgggacaaaatcacatccctacaaacttgttaagttgtaataaataatttcaaccaattattttaatttaagatgatctaacattttaaaaataattaatttgtcacataaatatttattatgttatgttattcatgtgtatataaataatgattatttgatcaactgtatttcaaattgccattattttaaatacaaattatcatttgatattagataaaccggccgccaataactatcatttacaatttttttttgaagtgtcatgttaaggccagatcatatatgttaattatgattctctacatttatatatatagttataataattcaataagttctttatttaaatttattagtggggataaacattgtacttgaaattttgtaatattttattttggagttgttaatatattcataaaatttaactgttatagcatcagattaacgtatattttttttttttaaaaaaaaaagaattagattaaaatagttaaagctttaaaattaatattgatgttataaatacttattttgaagtattattattttgtgttgcttgaattttctttttaataaaaaaaaaaagaaaaaaataaaaaacttatgaagaccaaaacatacctcgtatcgtattcatgcttgaaattaatcaatggtatttatttttcattgat

SEQ ID NO: 5591 - DNA, 951 bp, Cannabis sativa
tctctctctctctaagatttttctctttctctctcttcattctcggttggttggtggcgattggtggtggtttttcgagctttgagatcttcagtgatttaacgaagattctgttgaggaagacgaagaagaaggactatttgacgtgaacttgtctggatatttgtctttttttttttttcattttcctgtctgtgtttgttttctcggaaaatagatcttgttttccattgttttctttggaagtttaatctggttcttaacgagtcagtgttggataatttctgttagatctgtttcactcgacgtgaaacttggaaaaacacatctgaagcgcgctcttgttagggttcgaaacctaatctttgactgctcatttaatttaaaaactggatctaaatttgatttcggattggaattattggatattaaaattaaaatttttatatattttcaggactgaaatcttgtattggattttgaacaatgttgggagctactggttctgctctccagcttcgaacaaaaccctgccttagtcctcaactgcatgcttctcggataaccagactcagcggtagagtctcgagatgctctgctacgaggaaatcgtcaaatgctgttgagaataagttctttggaacccgtttaaaggcctctggatcggagagagtccatttatggcgttctgacggtccagggaggtcgcctaagcttcgggtggtagctcgctctggattctccgccgttccggagaagccacttggtctttacgactcgtcgtttgataaggactcttgtggtgttgggttcgttgccgaattgtctggtataagcagtcgtaaaacggtgagcagagcacgttgtattcttaaagaatgaatacccaatgaatgggaatgtacttgtttgactgagatattttcgcttttattgtggtactgtagatta

SEQ ID NO: 5592 - DNA, 1353 bp, Cannabis sativa
cattgtaggaattaaaattaatttctcaaatcacacatacaaattttaatcacacacctaattataaccatccgagccaaaaggcttcagaattttactttgttattatcatcctagatagctggtagagcattaactttttttttctttttctcatttgggtttcgttcttgaatttttggcaaaaaagtgataaaaaaagttgaattcgacttaaatattttacatataaatatattttttatatagtgtaaaaaatagatattttttgatatattttttttttaattaagtagctaaattaatcatagaaatttaaatttctcttttattattttctatcggatcaaaatctaatggtttaatatttttaaaattaatatttatagttatatttgtttattacccattaatgaataatagccattaagaagtattccatatatatatatttatatatatattttaagaataatgacatgagataagattacaatgattaatttatttgtttatgacactcaaaccaatatttaatatcttaatcccttgtgctcatattgagcctcgaagtataagtaataatagtgatccttatgatcagtctaattataacgttgcaaaagtatacaaatgatttttttttttgttcatgtatgtaacagcttttttttaaagcaagaaaataatttattaagataaatctacttttacaaaagtactcaaaaatcgtgaaaaaacatctatccaaacacactttcttaaactagtaacagaggttatcaatgtgttaacaacaccatttgccaatcgttgaatagcgctacaagaaccaccaccaatagcagttaataaagaaaaaatatctaataaaattaaataaaaactaaaatttaaatgaaacttattaatctaactaattaccacggtagaatcatgagtataacaatcttatatagttggtcataaacataagttgtttcactcctagattgttcaaatctccttctaaaaaataaatcccatataacaatttgagtaaaacaaaacaaattctattacttacatttttattattattatttttttttttaaaaaaaagtgatcgtttgattttatttttcttcagggaacgaatgttgtgagagattagcttattatgggatgagtacaaatctagtgaattatctaacatctcgattaaatcagacaaatgtggctgcagttaataatgtgacaaactggtcaggcacatgttatgttacacccttgattggggcatttttagctgatgcctaccttggaagatattggaccattgcatctttctcaatcatttatgtgtttgtaagt

SEQ ID NO: 5593 - DNA, 991 bp, Cannabis sativa
gcaagtcttttttaccaagatggtatataaatatatagactataaaactctggcaagcaaaaaaattggctgcttcaattgagaagaacctttcacctaatcacaaatagattgatgcaatgcagctcttgtggtatagcaaattagaatgcgtttcgaaactcttcccaacgttttgtcttgcaccgatagaaattgcagttgaaagacagctttcagaactacccagaacagtaatgacggtcaactcacctgctcgccgatcaaatcgagacctacaactagaaaagtgattccttgaaatagcaggaagtagaagtggattccttgggcagacaacaagcttcttaatgaagcagtcaacagtataaatgctagagcaagttcctttctgtatagacggttcttttttgacttaaccgattttttagaaacttctaatttgctcagttcatcaatgcctgattctgaagatgacctgtaaagtgagttggatctgacaaggggaccggattccttctcgaaagctaccagatctgtttctgatgatcttcccgatttctttgtaactatccactcgtaggaacttccaaaccgaaacaatcctgatatcatagcattaaatttcgtcaccgacatggtgttctcgaaaaggaggaaggggactataaaaggaaaagaccgaggtgctggaagaatattcaggatagacattactccaggaacataacaaacaacccatgccggtaattgagcttctggtaggaacattgtcaatggaagaatgatgcaaaagagggtgaacgagtagaatggcagaataagctttcgcaggaggaagaacaaaaatatcaagtttactttcttcgccaaactaatctgtagtgattagcagaagaaaaaaaatacagactatgagcttgaagcatacaaaaggattcatagttttctagtaggcaaccacatctaagcatgcaaaaattttcagcaa

SEQ ID NO: 5594 - DNA, 865 bp, Cannabis sativa
aattaatggctctctatctagaagtgtaatgaataagatcttaattttgaatccatatttgaagcatacatgttcattgacgtgggtacagacctattctccactggttcattgtctatatactccaagttctaaaaaataaaataaaaagcattataataagtaaaattattattaatctgtggaagatattatagtagccgcacaataggggcactatggacatttcagatgaattaactttgaagaacggttcataaaagtgcagaccagctccttttttacctccttggtttctttaacttgcaacgactttacctgtcgacctcatcatatacataatacatttgcgtaatacggaaaaacaaaattaaaaaactaataaatgtgtcttcataattagacggtgctacgtgtcaaaatacgtttggagaatctaacgttcactatgcactttttcattttttaaaacttaaattaattaaagataatgtccttatcattacatatatatttatatgtgtggggcttaagagcaactgtagctaagccaatggctcggccttttctgggcaattgcacatgcagttaggtaccagtcatataacagccaaccataaatcgacacgtggacaaaaagccaagccggcggtggcgaagtcgtggccatgccacgcgcgtctctcatcatcgacacttgtcctccccaccgcgccgtgtggcacatgccctctcaagaaccataatcaataaatcgcacgtgcctcaagtgaccaagtccttcttataacgagattaatattggcgcacgtgcctcaagtagaaaatttgtgtgtatattattacatacatcaatattttcttc

SEQ ID NO: 5595 - DNA, 815 bp, Cannabis sativa
gcataatcagttggaagctctaaagcttttggtgaatgttatggatggtgattaccaatttgtaaatgccaaaaatgattatggtatgacaattttgcatttagcagtgacttataaacaaattgaggtaagtataaagactatttttttttttttggaatcttgaatgcttaaaaggaacaatatttataagtatattttttatgtccacgaaattttaatatataattatatatttttttagtttagtcatttttcatacaaattttttgatattatatatctttgtatgttttacaatttagtacctatattttgatatttatgccctcactcttataatattttatttgaatttcatattatatatctttgtatgaaatttttgtctgtgtttagctcatttagctcacagacccaaaaaaatatttttattccttcgaaaaatacacataactattatttttttcattttgaaaaaccacatttttcttaaataatggcccaaaaaaattatttttccttaggcctactcaagttcagggttagtcctgctataattagttgtgttaaaagtttggaagatacaaaattatacattcaactatatgcatgatttgtttcactaatcaaagtttactaatactaacatttttttgttgtcttttattaaccagacagtaaaatttttggtaacaaatactagagttgaagtgaatgccaccaacacaaacaaattcacagcatttgacatcttagcagagagtcaacgaagtgaaaaggactttgatatttcagagtctcttcgatcagta

SEQ ID NO: 5596 - DNA, 1138 bp, Cannabis sativa
tactaagcttcctctttttcaagaggaacacagtggatcggagaaaaatccatcctttttgtatttgtatcaatattcaccggccaaagagcctaataaaatagactcatagactaaggataactaacgttaactaacgcctaaaacacgtaaaaatttattgtctatattcttgctatttgcgtttttattactttcttaagctcggtaattattcagttgccgaaaaactcggtaaacaataaggttttatgatatatttttatacaacaaattaattgcaggcttttattgtatcgagaatgaataagaaaggccagcttgttcaaagtttacaaaaggatgcgattgatgaaagaagacgtgaagaaacccaattaacaatcactcataatcatcaatctggacataacaataatagtgatgatgatgatgatgaagatcatcaacatatacagcacatgcataccttgaccttaatggtgtcgactctaatcgcaggtattacatttcaagtaggcattaccatgccagcagcagggaaatacaatactccaaagggcttggaaactttcgaaaaattcatgcaattcaattcccttgctttttcattgtcatcgtttaacatgttcttacacttcattgtgagtactctttccaacaagttcttacggggaagacaatataagaggtttattagtattgcaacaattcccataatattttcatctgttattgcatttatatgcgcctttagtatgggtacagaaacacttatgcacgagaagaaagagctaaatagtttcattgataagaattctaatatgtttagggatatcttaaccacttcaccaggggctgttgtactggctgcaatcatttatacatggtacaatagactattttgacttctcctaagtatagtactggtattgtttttataaggtcactggttactttttcgatgtattatctatttttattgtaattattgtttactgtgttttgctaattagttatgctattttgttatattataaagcttttcacctcaactgggttattaattaattaggaatgtttattaataaataatttggagcaacataaactctttattactttgcgtagacctaaa

SEQ ID NO: 5597 - DNA, 1353 bp, Cannabis sativa
ctggacagagctctggtttcttcagtatggtttcagaaatttccaaacgcaaggttagtcaaccttgaaacttcctcttctgaccatagtccattactgcttgaatttgttttacctgataactcggcacctagtcgaagatttcacttcgagaatgcctggcttaaggagccgttatgccatgagattgttaaggattgctggagtacttctggtgttcttgatattgagtcaaaaatcaagctttgttctgagaaattagccacctagggcaaggaaattacaggtaatttcaagaaacggattggtgtttgtaggaaagagcttaaattgctcaaaaataagcaggatcctgcttctgtagctagatatgctgaagtgaaaaagcagctttttcttatccttgatcaaaaagaggctttttggaaacaaagggctaagcaattttggctcaaggagggggatcataatagcaaatatttccatcgtgcgacaagtaatcggcatagtttcaatcaaatatcgaagcttcaagacaatgatggtatatggagggattgggagtcgggtttatcttctgttgtggtgagttatttctctgaattatttactactgctggagccgattgtgatgatattattaactgcatttctaataaagtcactcctcaaatgaatgaaactcttctattacctgtttgtgaagaggaagttaaaaaagctattttcgatatgcaccctgataaatgtcctggtccggacggaatgactccggctttcttccagaaatgttgggaggtggtgaaaaaagatgtcattgcagttgtcgagaatttctttcagtcaggggtgtttactccgaatggtggtgatgcgaatgtagtgatgattccaaagaaaaaagtgcctgtaaatatgggggatctacgacctatcgctctatgtaatgtcctttataaagtcattaccaaagcgatggctaacagaatgaaaagtttcatggatagtattgtctccgagtctcagagcgctttcatcccaggaagacttatttccgataatattttagtctcctttgagatattacactatttgaagcgaaaaaggaaaggaaaagaaggttttatggctctaaagcttgacttgagtaaggcttacgatcgcatagaatgggatttcttgaagaaaatcatgctgaagctcggctttgcgaatgaatgggttcagcttattatgtcatgtatttcctcggctaagtacaaatttattcatggtggtagagaaatgggtccggtgataccttcgcgtggaattagacaaggcgatcccttgtctccttatctctttattatt

SEQ ID NO: 5598 - DNA, 743 bp, Cannabis sativa
  modified_base (485)..(492): a, c, t, g, unknown or other
ttataataatgtcattttctaacaaacatgcagcaactactgtgcaacagacaaaatagttagttaagaaccgaattacttgtgtattgccaaagaacattataaggagggatcgagattggtttgatggtttataatagatgtaattgatttattatacttctgtatagatactttggcctttcatctgaaggtgcacatagattatattaaacatgtttagtaatgaatttctcagctcatacatcaaaaaaaaaaaaaaacaataagaaaggtaaaaatataagagtagtcttgttgtaagagtataggggtaatgtttttttttatttttatattttttttatgtaaatattccatttttttttctagtaatgataggaatacataaaaatataatatataaatcctattaggtggcatttacatagaaatggaattaagaataaaattaggactaagaatggaatagaataaaatttaannnnnnnnaaaaaaattaataaaaaaaaatcatttaatttttaaaaatggtactttcttctattttaaaataaaatagttattccataaaaatggtaaaaatgacattttattaaaatgatattctaatactttaaaatataattaaacaaaaaaataaaatgaagattatttcatatctatttcattccatttcattacctccaactaaatgcgaccttatcttttcatttaggttaattaatatgtaatgtaacaat

SEQ ID NO: 5599 - DNA, 1038 bp, Cannabis sativa
tgtgccctttggaagcttaattggactttggtccaacgtggcatgtggttgacacgtggcaccaactacacattttcctccttttatcttctaacaaaaaatattttcttttttcttactttctttcttttggagggagacactctctgatagagaataaaacccaaatcaaaggaggcaaggattttgcaataaaaacagagagagagagaaacaaaatagactgaaatagaaattgaaagaaaagacttttccccaatttgggaatgattttagggtttttggaaattgtactaatccttacatttcattccaattctcatctcaaaatcctatctttaattaatgactacgccattttcgagcagtgatggtggtggtgtggctgtaatggctggtccagttaatcctctcgatccatcttcatcgaagacttgtttcaatgactctgctatcgaatcccctgtgttaatcttcttactttttcataaagctatacgctctgagcttgatgttcttcatcgtactgctgtgggtctcgctaccaaccatggaaatggtgccgatgttaagcctttgttggagagataccactttcttcgctcaatttataaacatcactgtaatgctgaggatgaggtgatggttttgtttattgaattaaaacttgttattcttgaccttgtgttgttgtagttaatagatagttgtgtaaagtttgaattttgataattctttgatgttgttagaattttttttttattggggaatgaatgttagcttgtaagtttttctgattacattttctgcatataagaaatccacatgattggtcttgaagtgatgagtatttagtaagagattaaattgaaattttcaactcagacaccataaagtgttaatgttgttaaaatgccagcaatattgaaaacattagtaagttctaaaaaatatagaattgttttatggttagtaagactagccatctttctaattcacaattgcatggattttgcaattgatcaacactggaaggaa

SEQ ID NO: 5600 - DNA, 1180 bp, Cannabis sativa
atacataatgttctatttatattagacaagtatggttaattatccctatacacgaataaaatgatacaccaaccaaaaataagctaaacctataacccaataacaataattaattttcaagtattcattcagaacttgggaaataatatatacaaaataattatatcattatatgatagaccaattgcgtgtaaagccaaaaaacactttatttctaatgagtgatattttgtatagttttgggataatgaaattgacagtgattacattaataaaaacaaaagtaaaaaagaattgaattcaagggggtctagtctagacctactttgtatccttggagaatcaaaagctacttttatatatcttttacaaggaaaaaacttatttaaaaagtaaataaacaagtgtcacttttctcttgtttgggataatttttatctaaagctcaaatgattgtatttctaaaacagtatattttataaagtggccaacttaggcaagttttgataaattaagatcaaacctaacctaacattaatcaagtttcaaataatgaaccttcaatacccatttgaaccaattcctcaagatagcatagtttatagaaaaatcatcatcatcatcatatcacacacacatacacataatatatattaatttatataatgtgaaagaaatgtcatacatatacatacgtatacgtcacaacacaatgacatgtagataatcatgcattatatatttgtatcgtttagtttagtttagagttaatgtatgtacacatatatgatacatagtccacaattgttgaacaaatggatttacattacattgccatcaatgggtcacattcaaccatatatatatgtgtatattttattttaatgtatataatggcataattttcacgaaacgtctacttagtttatagctaacaatttaatttcttcccacttacttgtttgagtttattagaatgtgattgactaatagtctatagtactaatcatatatatatatgataattaagacgaggtcatttcttggctgaatttagtgatgattcagtgtgttatacatatactatgttgaaagtttttacttttcaagtgaaattgtgtgtgtgtgaatacatactataagttggacaacatcataccactcccactcccactcccac

SEQ ID NO: 5601 - DNA, 2246 bp, Cannabis sativa
  modified_base (362)..(362): a, c, t, g, unknown or other
atatatgagaaaaataataataattaggagattttttatgaagttattcataggatgtgctgtcttgaaacaatgcagagggaattctgtttattaagtcacagtttagatgagatattcccaataaataagaggtcagtgagattagaaacacaatgctcttgctatgttgaggagtaggtgttgacgttttctttccacaattaaattctgttttgggcgttctacacaagaatggtggtgaagaacgcctttagaagcataaaaagatggcattatgagatagctaagagtatcatgtactttgatcttgccacagatatgtggcatgatcttcaagaaagattcaatgagggtaatgnacctcgaatctttcagttgcaaactcagctcacacgtttgcagcaaggtgatcaatatgtcacctcttactttaccaagctcaaatcaatttgggatgaattaaaggaatttcaacccaacactacttgcacatatggtgccatgaaattgtttcttgactattacaatcaaaaccaagttttatagttcttaattggtttgaatgagtcgtacgctttagtacgggctcatattcttctcaatgaacctattcctaatctctttagggtgtgcatgttgttcaagaagagaggcaaagaacatggtttgatcattactcttttgaaataaaacactttcttgaaaaaaaaaaaaaaaattggccggccttctatctagacctacgtctataaatatggtctcttcacatccactcaaaaccatcctgatccccttaatcaaaacaactcttcccataccactccatacatatatataatgggatcatcatcacaaaagaattgctcatttccctgctcattttcccgagatgcaaagctcatcctttccaaatctaaaaagtcagcaaaagaaagggcctctcacaggtctgtttatacttacaaccaaattatttctaaacttggaccctattttcaacatgatttttaattcacccaaagtatccttttgctaatatggtcctcctccagactgcatttttcactgtaaaatccatatctcatattttttggtatctaacatgcatctgtacgattgttgtcgaagtccaaactatggctcttcacactgctatatagttttcctcgaataagaaaaaattaagccagtctactaaatgcaaatggacattttgtcttggtacgcttggaaaaaatactttgggatgaatgaaaaaatgtttgcaacaattggcacatctttgtttatccatcaggaccacatgtagtttgcaatcccaccttaatgtgaaattggacgagaacataaaatagtttgcaatcccacttttgaactatacgactcccaagaagcacctttcagagaaagttcagagtacaaggatctccaaaaggttattttgagaaaaaccagactattccatcagaaatttggccaaaaatagaagatgatgccctattggaaatgtttccctcagattattcacgaagcatagtaaaggctctagaaaattttcaaatttatgaaaatatcacaatcaggtccaagcccctgaagcaaagaagtaaaattcatcactattcaaagaaacagacactgtaggggtcctactctataagacaagcattttttatgattcacaaaatccacaaatagaccaagaaatcaaccaggatccttatctctttgagtacaatggactaaaatgggagattgtttattctaaatatgatgcatatccaccagctggaagtgatgaagatgatgaaccatcaggttggcaccacttttataagataacaataagtggaaaaattcccgatagttatgatgtttgtaggaatttttatgattgtttgtttgtcggtttgtcattttctatatttgtcagtttgtccatttgttgttagattgtcactttgttagtttgtccttttttatgtttgtctgtttttaaaaaaatttctttggtatcctccctcgtgtaaatggctacatatagagtcatcattttcattgtaaggagcatcaaaaaaacattctactaaataaaatttctagtgttcttctaatttttttaagagatttctaaagtagtgatgatgtgcattatgggtcatactaaatatattattgttatgagttagaagtatcactcgaatgtaggagtgttcataatataaccgatccaatccaatcca

SEQ ID NO: 5602 - DNA, 2281 bp, Cannabis sativa
ttttttttttttgaaaaaaatgagggtaacaatagccaataaagcatattatatgtgaagaaacttttttatttttttattctttaattttttttaaaggaaaattattacatgtaactaaacttgaaaacaaataaaaaaaaattagaaatactttgaagagaaaaggatgacgacatgcaccaacaaaagagagagaatcaatatgattatttttcttgcaaaaaataacgagattttgatgattaaactcttgtagttatgatttaacttgcacataattcttttaactcaagttttagtagtaaattccgccaatctttatttttgttagcaaattaaatagacaagtgactatgtgccaatatagattattctatatatataaataaagatacaatctcttgttcatattggttcatataattatatatttatattcagaaaataatttaatgaaagctttagaaataaataacttataagtaagtgagacgaatgatttttacgtggttcaaatattaattatttctagttcacgagtcagtatattagtattataggcttattaaatgtattacaagtggtgtttacaacataaaaccctaactctgtctctctagatttctcttgaaaaagaaaaaacttagaggatatttttgacaaagcttcggctatttttcttttcatccccctttatgaaaaaatgaaggggtttatgtaggctaaagcttgggtccaagcatacccatgacccgtttagggttttgtcaaaagtttgcccactatcaaagtaaaatagattatatacatgactattggactccttacaaggtttcctcttgtggggcgatagttccatacaactgggaccactgttggtgcaaggcatatgtaaggtaaaaaggtcacatctcgcgggaaaagtgcttagaggagttgtcgaacaaaacggagtattcagaagaggtgcgcgcactaccatgctctgacacaggggacaaaatttgatcttgcgccaaaatggtaaacacgtcaagggagacgtcaagtttccacttcgtagcaggctttcgatattccttgagtacacgacattcatcttagactcttcagatagcttccaggtttcttcctgtagacttaatggatttagttttctccatgatccggatggatgagaaggcttccaggtcttggacggttgctttatcttgtggcgaggtgctaagcctttcctggacctaggcctcttccagattaaataagtcttctcgcgatgtttgtgattagagagaattaatcgataattacatgggtaatcatcttctctcttttgccacgtgtatctactctgaaaacatggataacattatacatattaaatttcatacaaaaattaatttttttaaaaaataaaataaatgaaaatctaaaaattaaaaagattaactaacaaaataagtcacttaaaaaattaggttccactctaaaaaaaaaatgagttcctatttttaattgtaaatttgataaccatcactgaattcaagtcaccatgcctcaatctttcccataaagtatctaatattttattttatttttttatttttttataaggaaatgtaaattatttcaaagcttacttcatcaccttttttttttcttcttcttgcagacgttggtcgaatctaggtaaaggtttgtcagatatgggtcgaaattagtcatatctagtctgggcacctttaatctctcttcgtgttagctctaacagtgcctagtatgttggtaggttctaacccagcttcttctgcttcgtgtttctcttcaaggaggcaccggtctgcatctcgagtgcgactgggaggacgacggggctcatgtggctggctctcaatgattcgacaagcgcagcgacaatttacacatggacgtcgactttggagaagaaaatggctggttcttaatgtctataagattgttttttctattaaaatctgattttttttgttatggtttatgttaaaaatctgctgaatgatctaacttaatttaagtttgtagatgatgataaaaatgggtttgatgattttttggtattcaaatgcatgtttgttgtatttttttttttaaaaaattcagatgcatgattagaaaaataggttttataatctaagttcatggttgaaatctaagttattaatggttgttgtaatttctttttctttaggtctaatctttaaattttagcggaccttgatttggcagtgaagtggtgttg

SEQ ID NO: 5603 - DNA, 585 bp, Cannabis sativa
ggccctgcatctcaagatagggcagtgctaccttcacactaagggcaccaagtaagcaccaagatttaacaaagtcatttatgagtgttatccttcaacaacaagtcaccatgaccctaaaatgatgagccatgaagctaaggagtcaagtggacatcccagggcttaacctgggaccaacatcagtgttgggtgcccaagttgacatcatatgcatcgtctcacatcagttttggttcccaacaacttcctatgggaaatatacttagccattgtcctaggatacatgtgagacatgccccaactaagtatcagattttggagacaagtctacaagaaatggaacccgagtactatgatgtcctaataggagcccaagttgacattcagtcgatctaggtgcaccacaactagggtctacgtttctagggacatattgggaccccaattcctctaatccatcatggaacaatgccaggacatgatatttcatcaacgatatcccgaaggagcccattccaaactatggttgcccaagttgacattttaacatgggcaccgattttgtttcatctggtgacgccc

SEQ ID NO: 5604 - DNA, 743 bp, Cannabis sativa
tattgcaaactctaataaaaattagaatactttaaagatattgttagtgagttgtatagttaatgatagtcttgtaaagtttggttcagtttctgtttgtcttggtttatggactagtgctaatgctagattcttttccactcttgtatatgtactttcctcagcctgtaatttctcgagatattaatgaaggctttactcccggttactccagctttttcttctttacacttaacaaaaccaggtataatttggtttaggctaagaactattgaaccaatcaaatacctaatgatcacctctcaaattattatttcaagtggatttacttctagcttttccatttgatgtattgtactaaataaagatgttttccgtaatgggttacattaagaaatgatgcaaaatatggctcataaatgacaaaatattgaaagaattgaagtatgtttaaaaacaacccaagaaaacatctttcatacatcagttaatcagcagttcactctaaaatcgtgtaggttagaatgaacatgacatgggtggagtttctcaattaatttatgcttgaaaggagctgcacaaataaaattataaaacatacaaaagaaatcatgtttagaatgttatctcacagggagcatgaaaggttctgccacggcatatagcttctagattctctccagcatatgaacaaagtggcgatacctctacacctggtattaagatgaattgcatcagataac

SEQ ID NO: 5605 - DNA, 968 bp, Cannabis sativa
agtcccaagcccagccacaacagtattcaacaaatcatcttgacctcttaattgaattaccccactttccaaaccggcgaagatcaatccaagaatgccaagagtgtttccgtacctccgtccgagtgagccgcccgaattaagaacacggttaacgcggagcttgagcgtatcgcctgcctcagctgccttgagaccttctatggatcccttggtgcctccgatgatcgcaccggacaagtaaccacaaccggtgtagtattgaaggttctcaccccatgatcgatgaggctttgaggcttcttcgataaagaggtgttctggtgcggttggaagattgtagaggttctgcatcgggacatggagatcatggtacgggttgtaaagccggccctttcgctcatcgttgttcgaactagataaatccgccattggaatcgagcaaggtcaacaagagagagaaagagatggagagggttttagagagaaatttctgggttaaagaaaaccctagcaaaattgacgttggcggaactaacagggttttgggcttagctgacttggcatctttgagcttaaaaataaattaattaattaattaataacttatttattattttcacggaataacgatcagtaagaacaaaaaggaaaaaaagaaaaatgagtgctaattataatcttttagttaatttttacgtcagtttaccatgcacgtttaaaaaattttaaatgtattttcagcattgtaaattattcgaatttttttaaaaatttacaggaatgatgttgtaagcataacgaacacctccgtaaaaaaataattgaaaaaaaatattccgacatatattttcgagcgtagagattgattaaaaaattgtaacaggaggttcacagtaacactcctaaaaaaatgaagaaaaaaaaggttcagcgactgagcacggaagcttcggcactagaaactc

SEQ ID NO: 5606 - DNA, 840 bp, Cannabis sativa
tacgttaattaaaacttataaatacagaaattaatgtattaaataactatttttttgttagggcttaaagaagggtttaagccatgttgtggagtaaacaaatatgggacatgtgatagcttacaaaagacttgtagagatagaaaggattatgttttctttgatggatttcacctaacacaacaagcttacaaggttcttgctactcaatgcttcaatgctacttcttctgatgctgcctgtgttcctatcaatctccaaaacctagcaaaactataatatatttatataaaagatatggtgcacaaaaattgtttaaatatggtatctaattgagtcgcttaatatatatattttctttaatgacagtgtattttactaataattaattttgagaaattttaaattatttatcatgatcaaattaatgttcaaattgtttgttgtactgtttgcacctttatttgttgagaattatagagttttatttcatcatctcaaaactaattagtgatgaatagaataatttatattttttatatatggctcaatatatatttttatatttaatatctctaattgaatcaatattgttataaataaaaatgcttcatttaaaacgtgtcctaccataaatcatttttttttttgcttatatataatatatccattgtaatgataatgatcaccttgagtatatttgtatatatacatttcagttaatgcagtattgtaggcattatcaatatgatatatactattataaaatgtctgcatacacatatacttgaatgttgttatatatgtgtgtgtgaaaacactatttattatatatatata

SEQ ID NO: 5607 - DNA, 640 bp, Cannabis sativa
cactccggcacgctcaccactatatgaattgggttaatctttcttaatttgtcaacaataacaaataaacaaactgtttttcaatcaaccatatttcccaccatttttttttttggttaatattattattattatttaatattgttttttatatataacgaaagaaacaaaggaccatattttttttttcactgtacactacagtttaatgaaaaaaaagttaaaatgattatttaacctgtattccattttatgattattaggacaatatataaaattttactttaactagggataattttaaggaaattaatattcgaagccgtgtccattagtgctttatttttgttgagtgaaaatttgttaggaatgttgtggtactcggcttgggtacttaattgcgagtgaactttagatatgaaaacgaaaaccttaaatatattagactcaaaataaatttacaattaaagaagaattttatatggcaaagagattattacaacttttctctaaattaaggagagttcaagtaatagtacttgtaaatactgttattactgtttgtaaacaagttgcagttagttagttggtttaactgcttttctgttagtttgttatgtctgttttcccttaaatgact

SEQ ID NO: 5608 - DNA, 739 bp, Cannabis sativa
atttgtttcaattgtcgattacttcagagctttcccttatcaggtagctatcagattctatcaacgttcttcattttttatcgtctgcagggctggcctattcctactccacattagatcaacttcctgtgtaaccttaagagaaataacacctggagtagtgaggaatgttatcacctttaccattatatcgtgtatatggataaagttactaagagtaattgtgacctttatcgtgaagaatacttctatactcctgtcataacctcgagggacaccaccttccaaaaagctagaccattcaagaggccagctccgttaattgacatgaagctaaggccagatgccatgttgaacaagattgatttatgggagatagtcaggcaaacgttgcttacgaatgacaacatccgtcgtgttgggctaagagcgtcttgtcaatgagtttacgttgatgctggctttaaagatgaatcttgaaccatgacccttgatgatgatgaaagcgggcggagtggcactgttattacctctgaagaaattcgaaagatagtgacttctcttctgatgacatagaatatttaggaaaatatttgtgtctctcaatccagtagtgatgggatcaattctatgaatgaggctgagatagagccttcagatcacactgagcttcgtgtgcctaaaatagttggtgaataataatgttgttgatgttccacttgatgaagcaagcaatagc

SEQ ID NO: 5609 - DNA, 1253 bp, Cannabis sativa
  modified_base (497)..(498): a, c, t, g, unknown or other
acttggggggtaaatattgccccgcttattcccaatatatgtggcgactgttgtatataacatgtggcaggtataggcacatcactcgaagatgagttgaagacacccaaatctcctcaagaatcaataagtacagttcagtggccagctttcagacatgagcaaatatgcccatcttcttctccgggagctgaagcgcgaacgagcttctccgggccagtaaagctagagttgaacagtcactttgcatttaatgtgccatgggcaaacgtttgagaatacccataagaggacgtgtcagacgtcataaaaccgactttggacgattacacgataatcaagggagctagtgacggctttgttttgaagaatcacatcaatcaagaagggatgaaggctaatctcacctaaaacctaaatatcctattacgtaggtaatgcatgccctattttgtactttttgggaacttgtgcatgcccatagttggcacttaaanncaagttactccttttcttcttccctccaattgctataaatacgcgtcaccaattttggtgaggggcatcgaaaaaaagacaccaagaacagtctttataagaaatactcactcattaataacagagactcgtggactacggctcattaatgcctgagccacgtaaaaactactcgcattaattattcctaagctctcattattacgttagatatttagttgccgaaaacctcggtcaacaatgtgcatgcacaaaaaaataactatacgtaaattataaaagttcttagattctctaatattttttctaccattataggaggattatttcttaaatatatgaaagaacttaatataaaatctatttatatctacgataaaatattatttcgtagccaaaaatatttttttttataaactaataggtaaattatattataaaatttatttttaacttatactcaacggcgaactcatgaaattttacaaacgttaatgcaaaatttatataatatatatgaataaagtatattttaaatattttggtaagaaattgaatttatatgaacacttaataaaataaagtaaataaataaaacatattaatataattatcttatcaaaatattaaaattatttgaatttaacacaaaaatatattaaagtaagtaaaatacataaaaaaaaatataaaaatatcaatatctaagatgaatgaagtttggatggcaatatttagaacaagtctggaaggtt

SEQ ID NO: 5610 - DNA, 1034 bp, Cannabis sativa
ttttttttcttcttttaatgtaatataatgaatttttaagggtgtgtttcgtgacattattattagttgatatgatttttccttatctttttcgcattatcaaatttcatttgcacatgggacaacttcgtggccaatcaatcgctatataattaattttaaataatatttatgatgcattttcaaacttaattaattgaatttaattaaataatattgcaagttagagtatttgtccttactcttgtttggctggcgttcataaaaataaaccaaatacatcatatattcttgtattcttccttttaagagagaaatttttagatagacccttcaaactaagataaccaaaaacttgatatgaaatatgcttaaattaaaattagaaactaatagaaaagatgactatatatacatgtatagggtttcttgactaaaattaaagaggtgagatctacttttcatggggtcgtggaatgagtaacacaacccaccgcacatcatgataatgttgttcctctcttaataattatcattattattaacaataatacttcacagctttttcacgttcatttttcttactttatttttcatgctaccaagataatcatcattattttcttttttcttttgggtattgtcactatttcttttcctttcctttttcttttgtaggggacttaaacttttgcatattctattgttatttttattgtaaaacttgaattcgggggaaaaaagaaaagaaaaaacctacatggccgttggtgagtttctttgctttgttttgatttgatttgtctttctccaaagctatatgggaagaatgagactttatccctttctttttcttttttttttctttaattgttttaaggcattttcctttttgtttgaaattagagtgttaacttatttttctaatgttgattagaggatgaagaaattgatcttttaccctttgtcactactcgaaatataagggaacaaacaaaataacaaggaaaaattataatattatatatatatat

SEQ ID NO: 5611 - DNA, 754 bp, Cannabis sativa
tgctaaatattttactaatgttatatgtaataattcgttagcattttttgaaggtgcttaatactatagcgatgtgttttttaataattggttagcattttttttataaaagatatttgtactattttttagtaaatagatttttatactattatagttatgtgacatctgaaggttctcataccttaaagatgtggtaatcaataattggtaaacaacttttcaaatcatttattaaattaaaaaaatgtaagagctgatattgaaattcaccaataacagtatgctaccttttgtggtccttgacaccttaaactgtccattgatatatttattattaatatgtacatatctctaattttttttaattaaacataagattaagaacatttctaatttaagatgttaacattatataatatttgaccgaaaaataattttgtgatatatttgcatcaattttcagcattatgtgtttcaatgcacaattgcaaatgttgtttggatttctgcaagacattacacgtggaatccaatatagaaagtcaaattaatccttagttgattagagccttctgccaaggcttctataaagggcctccccagaaggtacatccgtcacaatgtaaaggcatgtggaagctcacttgcgcatgccacctcttcctcccaggtggagaaggaaagatgttccttccagactcagaagagacttgctgaaaggccttcttcatttatgttcatgtaagtagcg

SEQ ID NO: 5612 - DNA, 2451 bp, Cannabis sativa
ctcaaacccgaactcaaacactggacccgaacttggacccgaaactcagaccttgacgccagaccccaaatcggatcccgaccgagatctcagaccccagacttagacttagacccagacccggacccaaacccgaaccctagacctagactcgaacccggaccgaacccgagactcgggcctggacccatacccgaacctgaatccaagacccagactaggacccagaccctagacccgaacccaggctcaaacttgaacccgagatccaaaccaggacccaaatccaagacctagacctggacccagactagaactcgagactggaccagaccccaaactcggactccaaccccgacctggaccccaaaccttgacccaaatcctggaccttgacccgaacccagatcctagaccccgaatccaaactcagactccaaacccagacccgactaagggcctcagacctagcaccgggttttggattcgagttcgggttcgagtttaggtttgtggttagtgtacaaggtttgaggtttggggtcgaggtctgggttcaggattcgagtctgggttcagtgtccaagtctgggtctgagttcgaggtggggtctaggttcaggtcgaatctggggcaggatgagttcatgtcataatatagtgttaaaatattaattttattttagtaagaaaaaatctaaaaatagttttaacaaacttgtgtcaaatgctattaaatttttaaaatgacaaaatactattttctattctcacttttaaaaacataattttttaagaaattctacataatttttttgttacgtattagttaactcaaaaaagaattattcaacttatatttaataaaataatttaaaacattaataatataagcccacaaatattataaagtagttagttggtatatttggtaaatactacaagagtattatatattagtaacagcaatattagtgacaaaaaagtgtattgtaacactctactaatttaagcgtgctctggtgcttttctaattactatgcacttttttgataattagattgtttgttgaaaaagtgaataattaaactttttaaataaactcaaactttaaataaataattactgaatgctttacataattttaggatctcaattttattttacaaacatagccaaaatatttcatatataaaggtgtcgtttgacgactaaccaaatatgagcctaactgtcctaaagaccgaaatactccaggtttaaccgtctcaatatgtacaatcttcatccagctccagatgtactgttgctcaacctttgttttgcccttacctacacatttatttaaatgtatctttgagtcatcagactcagtaagaaagcataaacatagatatataaccgaaccataaccaggcgcccgtacacctaatcatgattctatatcttgagttcagtgcgtatagtctcgaacattcttaacaacagtataattgaccataatatcagtctatactcaatactctagtcgtactgatgtgataacttcaattcatactatattgtcaaacatatatccgccgatattcaataactctcatgtacactaatgtcgctcttactgatatgttatatcgtaggcaaccataaaacatgtacgctaaatatgtatgcatgtatatctttatactaaaatcttaccttgaatttaaattcagatgtgtcggtcaacttgagtagaaattgctgctcgacgatttaaagaccctaagtcacaatttatgtaaaactggtaagtgattcagtaactcacttttacaaatttaaattcaaaactagaaattttcctattgataaatagcgtggcaatattctaaatattgataaaatacaaaaattgaggctcttaaattcacccaactggtgaactggattttccaaatggtggaccattttttggggttcagcttgagaaaacagttcaccatttttaaaaaaaaggtggactgtttttctgcaaaaaagcacaaaaactccatccaagctcaattctaccccaaatcaaacataacacaaatgaaaaatacaaaatcaaggcactcatgaattaaaacatgccattgttgagcaaggtttaaaaatttaaattttctcaacacaccacacaaccactaaaaatcaatcaaaccagtctcaaacaactcaaaataatttgagaatacaacccctaaacatcctaagcacaaacaaaagctaaacttaatattgtatattcaaactaattttctatagaattttatataaaagatgaagttagagcttaccttggattatctcttcactagctatctaaaatcttgctcaaagcttcttgctttgatctgaattagcaggaaaatttttagttttcttgttttcttatggccgaaggtaagagagagagagagagag

SEQ ID NO: 5613 - DNA, 852 bp, Cannabis sativa
tatttttgcagtatttatggaccagttcaagatgttagaattccataccaacagaagagaatgtttgggtttgtgacttttgtatatgcagagacagtgaagctcattttggctaaaggaaatcctcattttgtttgtgatgctagggttcttgttaagccttacaaagagaaaggcaaagtccaggacaagtacaggcacaaactctttcttctgttctttcttttgtgttttttttttttcaattttgaaaataccattttttcaatttttatcaaaaatgccattttcttattttttgttcaggaagcaacagcaaccacaagtggaaagaggtgatttttcaccatgtggtactccaactggacttgattctagagacccttttgatctccaacttggtaagtaaaaaaaaagtttgtcttttttaattttctagtgtgataataataattaatgataattgtgatttattttgtgtatattttaggagcaagaatgttttataattctcaagatatgttatggagaagaaaattagaagaacaagctgagttacaacaagctattgaacttcaaagtagaagaattatgggtttgcaacttcttgatgtgaaaaaacatcatcaccatagagcattatcttctggtagcccaattcaatcaccaactcaatctccaaatttgtacactcaaaatcttgtcttttcttcaattcaaaacaacaacaacaacaactcatcatcagaagtctcacaatatggtataaaactctctatcttaactatcaacacttaactttttttctataaaagcttcattctttgtatgttatttgttagaatttagaat

SEQ ID NO: 5614 - DNA, 1786 bp, Cannabis sativa
taatacataaatactagaaatctttttccttttctctaatttttcaagttagtacatttagatactttatagtataagtaatgttattggacactttaaggtgtctaatttcaccgatgtgacacattgtgattggttaacaattttctatttatttattaaatcagaatatataggatctaatattaatttacaccaataataatatattatctcttgccccttaccatttttcctcataagtcatagcatatgagtaagaaaataaatatttttatttgttctaacaaaaaaaaaattattttcttcttaatttgcttagaaaatagaaacgtaactaagacattaattttttctttcaggtgattatacgtacagtggtataacttataatgcatcagcatttggctcaagcatctacaagtgcagaaaagtagctgataaagctcttagactatcagattcatgttcatacataaattgtacattttctgggatatggaatggaggaggaggaattggagtgagtaatctttacgtcggttccttctttttcgatagggcggctcaggtatgttaattccctcattgttattgtgtttcacttctaaattacaaggattaattgaaattttgttagctaatttgtttaactacataatttaattaggttggctttatcaacaaaagtgaccatgttgccaaagcttatccagcacaatttaaagatgcagctactcttgcttgccaaactaaattcgaagacgctgcatctgtatttccaggtgtagacgagtctgatttaccttatatttgcttggaccttgtttaccagtattccttgcttgttgatggttttggtaagttttatttcaatacatattgagctattatttgacttaattttctctaaaaaatttcttttagaagttagagtctcagtattttactcgtatataagcaatgtggaacaaaatacacaaacacaaatttctttttttgatggattaatcacactaaacattttatccaattattaaaactctattatgggatcacttgtgctttattattataagagaataatccttaattacaaacacatacacacaaacaaattaaattattgttgttttgtgataatatatataggtttgaagccatgggaagagattactttggtgaagaaagtgaaatatcaagatggttgggttgaagctgcatggccactagggagtgccatagaagctgtctcatcatcatcatcatcatcaaaatctcaactttgatgagcatgaacatggctacacctaattagtgattatgtgcagaatttgggctctgaataataattaatgttaattattggtttgtatttgagttagttaatttaattagagactgctcaattattgtaaccatctattcccatataaataatctaataaatttattcagagccatttccaaatttctctctttgacactctcatttgccttacattttttatttttattttttttaattattatttataggaaagtaagtatctaaagaacaactctaaggtacccaacactccagagtatatgacaaggcccagcccaagtgtggagtaatttaggctgtagcccaagatcttctaccttaatccaaaaaaaaaaaaaacattttttaatagtttatattttagatttttactaatgctaactaacacattttttcttttttcaaaaagggattatttcccaaatatacaaaaataataaaaaaattacaaaatat

SEQ ID NO: 5615 - DNA, 812 bp, Cannabis sativa
tagttcttgaaaataaactttttattagcaaatatttaagtttaactttatatttttcataattttaaaagttgtctcttcattttattttgaacaaagtggacactttattaataaactcttgacataaaaaatgtcttcctagatctagtaaggaaattatgttaaaagttattattcaagccattccttcttatgaaatatcttgttttaaattacctagtgtcaacaatttaagttttttatggctaagttttggtgggactctgagcaagatatacaaaattcatcggagaaaatcgttgacattatgttctaaatattttggaggataaggaggctcatcctcatatttggcattgtaagagacctccttaagcaaggtttgatttggaaaataggcaatgataacttagtccaaactattattagattcctaaatttatatttatcacacaaataaatctcatgtttccccaccctctaactaagtctctttagtcttaccagtcacaattttcaactgagaatcatatcatgaatacagcaatggttcaatgatcatattaaaagaaataaagaatatgcccacctttacaatgacaataacaatttcattagttatttatataagtaatgatatttagaaatatccttacaaaccaaataaataaaattgacaatgattcctaagatccttaagaacaccatgagtactgtttttattactatatgcaaacaaacaagagatacaaacacatatgaacatcaactatctaaatcaccttgtataaataagaaagcccatttct

SEQ ID NO: 5616 - DNA, 505 bp, Cannabis sativa
aactaacagattcttggttaataattatatatgagacccaatacataattatactaataaggatataataccttgaagggtgctattattagtataccttttaacatatctcttgaatttattttcattagcagttggtctaatttatggtgtactatagtttggctgccctagagctaatgtcgaggcagctcacaccgtcttgctgcatgggctgcctctgtgttatagttttggaagggtatagaactctttgtttctatcattaattactctattttgtggcttgacttggtgttgttttatttgaatgaattagttttttcagttagccaaaaagaagatatggttaattactttatgtataccaaatagtatttagtaatatataaaaatatatatatatgtgtaggtgaagtgtacaaaaagcccatattgttcagggaaagcggttcgtgtagtaataacagatgtatgccccggatgtctcttgggtttcgacctg

SEQ ID NO: 5617 - DNA, 501 bp, Cannabis sativa
cctctgtgatgttatacacctgtaagtgctcattgtacaagaaaagcaaggtaacttgcttggagagtgtgcttgtggacctagtttggatgatggaaattattaaaattgtgcctctcctaacagctataccttatgtatagattggttttgtctgtcctctttcagagaggcactcataatgagagaactacagttctctttatcaataacaagaacacctcattcatctgttatgattaagagattaaaaggcaatcaaggattgattcaatcgttgtttttagcaataaaatcagggtttttattattctgtgtgtgtatatatataaaaatatttgaattaagtatttattttcttatttattagtgatttgtttcctagttttttgcaataattataataagaaatcagcagtgttttagaattttcttctctagtatctttctcacatggtatcagagctggaatacctttgagaggaaagcaaaatggccagc

SEQ ID NO: 5618 - DNA, 850 bp, Cannabis sativa
ttttgctgctggtttttcaactggtgctgttgaggagcagtcttttggaagctggtttagggatgcggctgttagatggagcgaagtcgaattcagtttgacaatcatgctttgttagtctttatggcaggcccgaaaagatctgcgaatcatacaccatcgctagagcttccgtttcttttgttgattgtacgtacaagaaatctactgtccctactacatttatggatgtaattctgagtgatatcttataaagtatgcatattttatttttttaagaaaaaaattaagccacacgaacaaatcactttattatcaggctgccaatcctaatcgttctttcgttttatttcgtttttgttgtttggttttttaatgccaaaggcaaatattaattgtacggaaaatctaaatggattgctagtcactttagacatctttaaagcatgacaaaaacaaatcacgagaaaggggaaaaaaatcattatcgtctttataagcatatatagtatatacccaaacctttaaaaatgaaaacaagaccaaatttcactaataatcaccagtatccaataaatttacaaagtttattacacgcccaaagatggtgagctcacagcttacagctttctataactttgaacctctgaagtttaactatgtagtttaatctttttaataaattaatgaaaatttaatcacaatttgttttttctttcgaaaatattacctagagtaatagtgtacgtatatataattattgcaaaataagtacgtataaataattacgtaattgcgactagtgggaaaaagaagaataaaaacaaatcagtacatatacgtatatgtt

SEQ ID NO: 5619 - DNA, 1105 bp, Cannabis sativa
ccttccccatgagttttactcaagtgctaatggatttcttcttgggggcttggtcgggtctgtgataaagcttgatatggaggaggacaaaccagcctcgtgcacaacatttttcaagatcttggtggatattgacattcataaacccttatgttcagggtgcttttttgatttaaattctggtgtgaaacaatggttgcaagttaagtttgaaaagattgggattttttgctaccactgcggtcgtctgggtcatcaacgacgaggctgttcgttgtcgtcgccggtgacggtggcgaagtgtgatggtattcctttcccaatgtatggtccgtggctctcaacgtcctccgcgtaccacgacgtattctctggtccatccttcggtggtcctagtactgtctcctccttggccgtggtgaagaaaggtggtgcgtatcgtccattaatggcgtctccggctccggttgctggtgaaccgatgggtgtcactgggatgtttcgtcgaccgagacgctctttgatggtgacccatcgtgcagcagctaagtctggggagctccagcgattggtgtggcatcctaagcaatcggctgcaggtggtaaggactcttttgctacttcgggtaatagtggtggtattggggttcggatgcaaggaaaagactatgttggaatttcttctttgaggagaccatgcgtggagggtacgaatttaattttaaattcaaatgctgtggccgttgacttgtcttctctggatggtgggccgtctccgtgtgggccgggtttgaagcttcttgggccagctgaagagcagttggaatgtgggcctaaaattttgaatcaagatatctcccatcccagtgggccggtccaacaggttgtgccgtttttaatgagtggtgggcctgttttggaggaatcaaatttaaataatttttctaatgttgggcatgtggacccgattatttctaatcctactcaaactaatattgggccagttcttttggaccaagctaatggtgggcaaattggtctcacatcttcaaagcccgttggtgattgtgaaaatcaagttcaaataaatgaagagcaagctttg

SEQ ID NO: 5620 - DNA, 2052 bp, Cannabis sativa
gagggtacctactctccaactcatcttccaaatcctacataaaaacttttaaacttgctattttgatcctatacgaagtgctgagactgaggaactggcaaaaaaggtagtctagtatatgtccttcaccaaagcctggttaaagttcgatggtttggtcaccacacagctgctccgcgagaattgactcattgtaaacttttagagaattgacagtgtcaaaaacatgggtccaggttaggcttcaaaagaggccaaggaggtgatagctcatgacttggccaaaatcattacaaaggccactaaggaggaaaagctcctggaagctagttggatgctccgtcacccaaaccttttgatagaggttgaggagatctaggagaggtatgatgcaacatacccggatgagggtgccccgggatccagcacttctagaagaggtaacaaaccctttcgtgtactttgtaccacatatcttgatggatcaagggggatttgacaaatacttcttaaatttagaccacactaagtacccccatgagtgatttcatagataagggtagatgagatcattaggagtcctaactatctagagttgtctcgaaataccattagggtggatccttttgtaaccatgtccttcccactcatcagagaatatggcaacttcataggctgggagaacatggtcctttttgctcgtagagaaccttatagttgttcactgaatggttgcacccactagcacacttcttagaatgtgttgttgtatgctaattgtgctttcgattttgttgtttagggttggattgataatcatctggttgttgtgtttgcatatacccctgaagcaaagattttgaagtctttaagcgagaaggtcatgaagggcctagccaaggcagagggctccaatggaaaagggaaaagcaaggtcagggctcacacgtctcgcaaactgaggcctttgtctacttcttcctctttgaacatctgggaggttcctcctcctatgaaggtaagcataaatgcttatggctcccaagctcccattgggggagacaaaactcttgttgccactattggaggcttcaccgacaccatccgttgagggaactgtccaggaggtcttggcaggaaccaatgcctcagaccccttggaaggatgcatccgtgactccaaagctaagacttctcctccatcttccgaaagggacgccaagaaggccaagtctactctgattagaaaagtttctacatgaggggatggtgatcttcgaagaaccattactctaacactaccagatccatcatcatcaaacacaactaaccaacaacaataacaacgaaaccaacaacagcagtaacagaaccaacaacaacaacaagcaatagcaacaacaacaacaccaacagcaagagcaataataattctagtagcaacaacaacaacaccaccaacaacaacgataataacatcaatagcaacactcttaatcaggagctatctctcctttagggggctaactatctacttctagttagccatttaggcttgtcatttccttggccaggatcccatctttgggcttcaagtttccactgaagcctactcaccttgaccatgaaatcttaaagaaggtaggagaggccaaagacattttgaggaagcaccgtgacaagaaaaggattgctcttcaaaagacgattgaaaacctttccacagtaaagagagctaagacctccaagggcattcacactataattgaaggagggccgatgatagacaccgtggccctaaaaaggagaatggtgcccaaggttgggagagaagtagcacctttcgctgcaaaactctagattaattggcaggcagtgcaattgagctaacctcagagaagtgggcaatccgcagtaacagcgaggcatttactctagctcaggctatgaaatagtaggcaataggagtaaggtctaacttctttgcctttatttttattgttgcatattgttttcttacattgctttattttacttgatggccttgattgt

SEQ ID NO: 5621 - DNA, 554 bp, Cannabis sativa
aaaaaaaccatggagattggtcagattgtatgggtgaaggtacaagatgatgaatcttctggaacgtgttggtggcctgggcttattcaaacaagggaagaacttacccatggttgcttactcttcttggtctccttcttcgaccaccaacaccctcgccgtttccaactctctcaaatccgttctttcagtgaaaacttcctccaactgttctccaccgaggatatcgaccgctgcagcggcgccaatgcaatgctcgattccgcgttgcgattgctctgccggaggatcgctcttagcctcagatgtcgctgccggtcggaaatatctggtagttggctcggagactcagaaacagtttttggcacagatgcctttgaggcgaagagctcgtttcggcccaaggtgctgctggatttcgtgcagaacaaggctgttttgccttatgttgaagttgagggtttcatcggcgcagttagaggaattgcacaaatgcaggttcttcgagatttcattgcgattcgacagagggaggcttaccgggaagcaaggcg

SEQ ID NO: 5622 - DNA, 1005 bp, Cannabis sativa
aaaaaaaaaaaacattaaaaaggggacacaaattaatgtaaaaaaattacataaatagactaaaaatacatataaaagaaatattaaaattttctatgaattttttctaagtggtgcagtttttcccctagtatacacacacgtaggtcagtgacatgtgcatactagacttatgcctagtttagtacaactgtactaagaaaaaaaacaattgtagttatgctgtaaaaaaacaactactgtaaaattgtgaaaaaattaagctaagtatttgataaattataaatttaaagtgttgttaagattctattataataatgttattattataatctaattcattataattataaatatattcattttaattacaaatgtataaaaacttatgttacaaaatttttattttctatatttgtttcctttctatattcttttattattgttttccaaagcataaatattcatatgtatttgataaaaataatttataatattttaaaattatatttttatcacatgaaaaaaaaactcaagtatataagaaattgtaggttgatgtggtttgttaattttaaaaataagaataaaaataaaaatattttttaaaacaaaaataaaaaaaagtgatttaaatattatttattttattatattttatttttattttttgtaatagataataaataagtaaatatatttttattacaaataaatttattatagtcttttaatcaaaaatagattttttttttaagttgggttttatcagttttaattttttctttttgaaaaataaaatatcaacttcattgaaattagcattcagaatacaagatggcatgaagatcagccagaacattatcctcaagaatgctacgattgtaaaattgagagcgtttagccacaaaatgagccactcgatttgctgatcgtttaataaaacgtaaactagtattaggtgaagtagacaataaaatcttacaatcattagtaatcaagcca

SEQ ID NO: 5623 - DNA, 752 bp, Cannabis sativa
atatatatatataaagtctcacttctaactcgagttcataaatatatatatagttaaaaatgtatagttaggttttgagatgcttacttgcttaattaggctttctcaaatgagttgtacagattaaagtttttgcgcatggagtaactgagattaatttgcctttaatagtcaatagaataattcccataaaaaaagaaaaaaaaaaaaagaaaataattatatattaaattttctaaaggtgatacctcacaattatatataattagttttttttatcccttaattaatgtttcatctttcttatatcatagcctttaagatgataatgatttccctttttatccataaataaagaaaataaaaaatctacttttgtgttttgtttttggtcttttgttttttgaccacctttttttgctttgtttttaacaagccttagccacttacacgtttggtagtaaaacttttaaaaaaaaaaaacacagacaaaatatgtttcgatataaaccaaattaagtatcttaaagtaaacctatgaatgttttaaagctcgaaaaagcatatataaatgtgcctattttattttgtcaaatcattactttattatgaggaaattaatgtatggtatagcttgtataattttgaagagattatgtgttcgactttgatggaaattaaagaaaaaagatcccagaaaatatctgaatccaaaaaatcaaggcttaatattctctttacaataaaaaaaa

SEQ ID NO: 5624 - DNA, 563 bp, Cannabis sativa
aagaagaagaagataatgggattaatattgcgattaacaacggcattgatattgaaattgcggtggaaggattaaatcatgagaataatactactgtaattgataataataataataagactgtctgtttgaattgcaatagtagccgtcatagcgtgagagggtcatccttgtatcgtagtaatggcagtgcctgcaattaaaaccgttcatagttagacaatactataattgaggattaataggaatctctttcatgtgagtttagagttttgatattacaatttttattttattattatttttttttatcattttaacatatatatttaatatgtatatatatacacaccatagaccattttattaatcaatatttttaactaattattttttaaaattaattactaattttgttatttgtttgatatttttaaaatttatatccagcacgaaatacatttaaacgggtattttttatagactttctaacgttattatatttcaattaatgcatattcaatcagtgtcacaaaatgataaagtttaaaatttgaattcta

SEQ ID NO: 5625 - DNA, 744 bp, Cannabis sativa
gttcataacctacaaatgttaatgtaattaattagaaggtattatgaaactcatactgttgttcatcaaaatataatatataacacatatttttacctaaaaaaaattaaaattactagacttttttgtagcacataattaattaatagactttatgcatttattatttacacataagttatactactcgtcaaagttttttaattaagattaatttcaatctatgaatatttaaattatacattttcacccatttaaaaaaatatattttttcattttatttatttgaaaaattaattagcttaaagctcttgcttatttttttctttaaaaaaaattacaaatgcattaattattacatgagacattttgcacgagaggttagaataatacactttcttgtcttctttttttggttcttatttccacttttttggcgacaacttttttaactcacattcaactaatcatataattaagtaagtaattaattaataattctttagaataataactttttatttgtttaatttattagtagtgcaactaatggactccaatgagggaaatgtattatttttatatatactactaaaatttattaaaaaggatttaataataacatttttgtttaattattaattaatggtaaatagtatatatgaaagtatattaatagtggttaataattagtacttaattgattattaattaagccgcttgaccaaataaaaactaatatag

SEQ ID NO: 5626 - DNA, 793 bp, Cannabis sativa
aaaatggggcaaatatcatttggttcttatatttcatcgaaatatataatttctgtaccatctattttcaataatactaatttcctaatttgtaatataaaattgtagacattttgtttccgaacccgaatttggtcattaataagactaaagtattctctgttgtaggtaataagtattttggacatatttatcaaaattttatcataaaaaatgagtctatgtgctaaatatgtatgattatataataaagagtatagatgattttaaatgtagaatttacactgaatatatggatttaaatttttttaaattaaatatggcagctttaagtttggctatttttatggtatttattttgtttttaaaccattttatggtattttctaaatcatgtatatataaatttaggtgacatttggttggaagtaacgaaatgaaataaaatggaaacaattttcattccattcatttgtctggttgtattttgtagtattagaatatcattataatagaatgctctttctactaatttgatggaatgactattttattttgaaaaggaaaggaagatcataacatgagaaaaaatttaatgatttaatttttttaattaattttttattccattccattcatattcctatgtttttatttctcctaaccaaacaccaccttaactttcaaaaatcatatttaatctttagataattaattttagaaaaataaaaaatttcatttctctcctctgtcaaactctacctccatggagagagaatgtagaaaagaaaga

SEQ ID NO: 5627 - DNA, 1433 bp, Cannabis sativa
tgtaaatcatagcacgccgcatcacacacttgggacatgaatcatgatcgattcaagtaaaataatactttctttcaaaaaataaacaattctttggagatttatagctacatatgtatagagaatggaatccttaatttaatatagatttatatagaaattgctttaatcatataaaacggttttaagatgaattagtgatggttaagtcgggtagttttgttggtctaggtgttttggatttggctgaaatagttcgtataaaagaagcgttaagctgattaaaactcaactataacgaaaaatagagctggagtgagattgctttgtagccgtctaagctattcgaaattcattactcatatttttttttttcttttgaggttattatagaagattgtcgtaaaccttctaacataattgctaatagttcttgttagagcattttttttttttacaaatctagtgtaagagaggtgatgttcttgttgaggtacaacttttttttttttttcttttctgatttaacaaataaataaaagttctgtttttttaataaaaagaaaagatgaaactacttatagaaaaatgacaccaaattttttatgtagggaacacttgttaaatcggatatgattccgtcaatgcaatcttcaatagttaattttttcagaataatcaacaaataattttcaattaaattgtgaaatctaaacaacattgtttctttttttcttttctcaattttaaaaataaaaagaaaacataaaaagccgaatcattaatcctaccaggttgggacaaatatagacactaacttttgttagaaaatatattttattctagaaagccaatacaaattatgtatatactaagttaggattctcttcttcttaattgaaaccccaccaagtcatcaatacacaaaaacaggttaataaatgctaactgtcttaacggttttttaaaatctgactcattcaaacctctgcaaacggctctttctcttatctctatggccaagaaattttaagccatttctcattctgaggctgtctcctctctggaccaaaaaagaaaccatcaatgctcactatgcaaagagcaaatccaattaagcagaaaaccaaaaatgtgttaaaaccaaaaagttacagacaaaattatttacggcaccaaaaattgtaaatttccggttaagtaatggccgtagattggcttcttctccggccgtacttattgttttcattcactttgattgggctgtcttctatgacaaattccatgagcgaatatgatgctctgcttaaactcaaaagatcattcacgaccaccatcgctcttaattcctgggatccaggctcatcaccttgcggcggaagaacacagtggaaaggtgtgatatgttacgacggcattgttaccggtcttcg

SEQ ID NO: 5628 - DNA, 840 bp, Cannabis sativa
ttatctctactcgtaagtattcatctttcttttcttttttgtacaaagttttattaactgattggtaggacactcaagcaaattgtcaacaacttgtttaagaaattgttgctgtctttctttgctcaatttcatcactctacattgttcacttacataaattgatcggttaatgtctaatcattttcgtgtcagctcgttttaattgcacacctcaggtgtggcttggcatgtgatcatttatatccatcgagttcttgatttaggtcttttaactcttttcattggaagagatactgagcttaagtgtgtcaatcttgaattccctttgagtatagtgtttacgttttcatgtgggatatttatttgcagttctaatgtgctacaatttatatatatatatgttctttattaaatacgtagggtggatattcgctccaacactaaaactggtgaggcaattttgatccataagagagggagcaaagttgttggactccattgtaatcctgttcagccagatcttctcttgagttgtggaaatgatcactatgtaagctttgtaatgcttatttgtatgtgaatatttaatgattattgagctctctatccttccttctatccaagtgtggcaacacctttatctgtgatttttgtacgtataaataaaaatgtacaattttatgtttatgcaacattattgttgataatgaaatgcttagtgaagcatgtcctttgtacaatttgaaatacgtgatgtttatttacatattttgtctgtaccactatggtcatactactcttgaaattgacatctgttttcacctcaggcccgaatat

SEQ ID NO: 5629 - DNA, 1705 bp, Cannabis sativa
gcttcccactgctaaaccagtgcagcaccataacatcactgctgcaactcaaaaattccccacaccaacagccacacaagctgatattggttccatttccaacacgcaccacttgatgtatcttctcccaatatcactccttcagctcacgaagctgatcatgcatctatttgtaataaaaaaccactcgtagctattcttccaactcagaaccaacatctgcctacaccttctttttcaggccgcaccagtaaaaaaccagcctatttataggattacatttgtcacacaacatctacttctcatcctattgacaaatttttatcctatataaaattaaattcccagtttcgggctgctgttcttgtagcctactcccacattgaacctaagaattatactgaagcatctctctttcagcactggctccaagccatggacaatgaaacccaagctctagaaaagaataagacttggattatcactaaacttccttctggaaaaacagtcattggctgtaaatgggtttacaaagtaaagtacaacgaacatggagatgttgacagatttaaagctcgtcttgtcgccaaaggtttcaaccaaaggcaaggcataaatttttcacaaacttacgctccagttgccagtttgatactctcaaaattttcttggcacttgcagctatctacaattggcatattcaccaattagacatcaacaatgcatttcttcatggagatctccatgaagaggcctacatgaaaattcctcttggatacaaggcacctccaaactcagtttgcaaattgcaaaagagtatatacagcctaaaaaaggcttctagacaatgatactccaaacttagtaccatcctcattcaatatagcttccaacaatctaagtctgacaattccttgttcatcaaacgaacacagtcagatttcataaccatcttcatctatgtggatgatacaattgttgcaagtaataacaccttgcacatcactcaatttactgaatctcttggccaaaagttcaaacttaaagaccttggaaaacttcatttttgccttggccttgaaatttgtcgaaccaaagagggcatatccatctcccaacgacccttcacacttcaattactcaatgacaccgattacattggtgccaaggctacttctacacctatgaaaccaaacttaaaactcagcaaagacaaaggaactttactagctgatccaactgcttatcgaagcctcattggtaagttaatctacttaaccatcactaggccagacataacatatgcagtcaatcatctcagccagcttttagcctgtccaagggttcctcatctacaagctgccaataaggtcttacaatatctagaaaagacccccgaccaaggcatcttcttctcctcctccaacactgcccccaccatcactgcctttgcagaaacaagtctctcttcagctaatgttcagctttcattgtttgctgatgttgactagggcagctgccaagacacaaaaagatcagtcttaggttaatgtatatttcttggcaaatcacttatatcatggaaatctaagaaacaacaagttgtcactcgatcttctgctaaagctgaataccgtgccatggcaaatgcaacatctgaactcacttggatcctcgccattctcaaagactttggcatcccaat

SEQ ID NO: 5630 - DNA, 1238 bp, Cannabis sativa
acaaacccacacaatacacagtagcagaaaagccacgatgttgaaggagaaaactgttgaaattaccttctgaatggctagactaggagagactcagcaggcggtgttcctggcgaggttttggtagttgaagcttggatcgttaagagtagcagcggcgtcgaagttgagattgagagggaaatgccgaatggttaacggccgcattggcgcctaaatggttgtgaataatgtttcagaatgctgggctgggcccaaatatacaaacctggaataactgggccgctttttactgatgctattgggccgctaaggacaatagtagaaagattgcgtgatacgtggccgcatttcattggttctagcattctgtgaccttgaaaatccagtttattctggtggtggtggcgggtaacgaaaacaaaattatctcttctttttttaaaaaaggaataacaaattagagagaaagagaagttgaatgggggatctttatgctttggattttgatggagttctttgtgatagctgtggagagactgctgtttctgctgtcaaggttctgcatttacttctttactccctctcttctccatttgattgtttcccttgagttgacagagtcaaatggttaagtcaaatagtttgtttttaatatctaaattagtggaaaagaattcaatcagacacctgcttaatcaatttttttctttacttttttgttgggtttgataaagtcgagtatttttatcgataggctgctaaagtaaggtggccgggtctctttgataatgtggattctacattggagaattggattgttgatcagatggttacagtaagctgttttcacaatactgagcagtttttcagaacctagtgcctcagacttgatttgggacgtgaatctttatcaccatttaacagtaggaattttcatttttattttttatttgattataatcttgatttggtaggtgcgacctgtggtggaaacgggatatgaaactcttttacttgtgaggttattgctggaaacgagaataccttctattagaaaatcttcggtaaatatatatttatactcatgcagttttctggcattagtcattagatttctgtatatttggaaaatggtaatcaagaaattttcagtaaacctcaataaaaaagattaaaaaaattagtagtgcggacttgataattatggtttgatgtgcaaggtttcagaagggctc

SEQ ID NO: 5631 - DNA, 1060 bp, Cannabis sativa
  modified_base (914)..(919): a, c, t, g, unknown or other
taagcatataaaatttgttctaacttcacatatagttatgattcagaaaactatgctttaattatgacccattaattaattatctccatatacatatataatttttcttaattttttttttttttggtttttcattacaattttacatatgaatttgttctaacttcacacctagaaaactatgtgtactttaagacgtattatgtacgtccatataataaactttttttttgttcaaataaaaaacaattaattaaccaattacttgttattattttttataaggctaattaaactttgtttggagagaagatacatagataaatagcttctgagaaaaataattatatcacaactcgatcactacttttggtcaggtttttgcttctttaatttcttcatcatatatgatgatctcttaattatatacattaataatgatcacatttcttaaatatctaattaattgggaggatctattatcaattatccaaaatgattaattttaagaatatctttttacatctctcatcagcccctctaaaaggagtcgccgccctcctcctccctctatttcttttactagatccctctcatctgcccaaagatctcgctgtcctcaactcgttcgatcctccgtggaagcccaaatgtctgccatggaagctcgtcctccgtctccagtcctctgtgaaagctcgtcaaagacccgaaatgtcccaccacaaagttcggatgtcgaagctcgtggactaatagataagtatttttttaaataattgtaaaagtatactctattttcagtatatctatgtggttgttatttgtatttaggctaattatgatttttgccccctatactaaatcatgccccctgaatttttaaagtcgttaaaaatgccccctaaactatnnnnnntgttagatttaaggactttttttcaattaactctctctaactatagagaaataagttaatattaggggttatttgaaaatattaagggttatttctctatagttcagagagagttaattgaataataaaaacttatttctc

SEQ ID NO: 5632 - DNA, 1305 bp, Cannabis sativa
gattgtgtttccatcggtcctggaactcaaaatctttggattgaacgcatgacttgtggtcctggtcatggcattagcatcggaagtctagctaaaaacatggaagaggagggtgtccaaaatgtaacagtgaagcaaattattttcacaggcactcaaaatgggattaggatcaaatcatgggctaaacttagcaatggcttcgttgaaagtgttcatttctcgaacattgtcatgagaaacgttcaaaatccaatcataattgatcaaaactattgccctagccacatcaattgcccaactgaagtaataattattctcaaaactttaattagccaaaatactacacttgatttcttttcttaatacatatagctatttttttaatgttattaactaagatatcgaacatatgattgtgtgtatattacaggtttccagcataaagatcaacaacattacttacaaaaacataaaaggaacatctgcaacattagtagctacaaagttcgattgtagctcgggaaatccatgcaatggcatcagattagaggatattaacttaacttttcgaaacaaatcagctcaatcattttgtgccaatgcaaatggaaaatcttttggctcagttctacctgatagttgtttatcaaattgaggaatataattactttcattttctttgtataattaattattttattatttgttgtaattttgtatatcatttattatattcttttttatttaaaccactattatttaatttattaattgttatttctattctttctaaattcaattcttatcccaatttgatgactacattcacatgtttattatatgcagttataaattcaagatattatttcggacttaattgaaaaactaataattaaatcaaaaattatctcttaatttgagaactaattataatataaaaattagttctacattctgatgaagtcttaagtaaaggtgcatcacaaatataaaaatgttatgatataataatatttttcttaaaagaaacattttaaggtgatgtaaaacttaatacattttaaattattacaacttattttattaattaataaaaggtatagatatagattatgtgaaaaataactaataataagttgatcagtgcattgaggatattacatggcaaaatatgaacacaatattttaagcttatttaatgattaataacacaagaagtttcatgaattaaataacctattttacaataatctaaaagcctaaaaggtcttgccaatatgaaagtgtgtattaagacataat

SEQ ID NO: 5633 - DNA, 1179 bp, Cannabis sativa
gaatatgtttaaagaatatacaatgacagagattaaaatttcaagaactaaaagtgtccatcaatcagtttggtcagttcaattgaacttataaaatatgatttgcttttgttatcaatttggcatatcaaagttgatcaataaattgttatacgaaaataaattgagagagcattgctataaaatactaatactaagaaccatttaaaggtagcatcttataattgattagtgatattttataatacttgagagttgtgggaggccttccctccccctcacaatttttattttttttttaactttttttggttataattttgtaatttttatttgtaaaaaaatatgtattagccccttaaattttatatttacattttattccccctcatagtcactacgatactttaagtgacactaaaaatgtgaaaagcaaatgcatttcatcctcattggcatcaaaatgtgtagtttctttctagtatgggaaattaacactaataaagtacatatatcatttttttattattattataagatcactctccatccatggccatgcatacaaaatcactaatggggattgagctgagaaaatacaaaaagagacccaaaaaaaattaatgggaccactcactttccacttttcttgtctaccaaacaaaacatagtataaataaatgttgagatatattgtattgcagaaagaagttttattattattattgttgttgaacttttctttcatggccatgcatattgtatagcactaatccacaatgaattaattcactatacttgtaaaaatgtttgctaattaacatatgtaactaagtaatataatgaatgagactatttacttacctatatatgatattttgaagaactaatgtgaaagtacattaatttcaaacctaagaaaggtgtgccttttcctactctgtgtgtcttgtattatatataggagataaaattacagcagtagagatctccaccattgattagaaatagtcatcaaaggctccttccttgtcactttcagatcctgaaataaatgaaaacaaaggtaataaaatgggaaatttgccaaactaaatgtgtaaatgcaaaataactacattgaatttactatgtttatagggtcgaacagtgtaaattatggttgtttattttcacact

SEQ ID NO: 5634 - DNA, 708 bp, Cannabis sativa
ccctttaaatctcacttttgttaactatatacctatattatttaaaatgttctgttaagtgttacggtagacatatcacagtatatacaaatatacacgcgataaatttttagtgagagatattaacagcaaaattatctgaatttttagttagtaaaaccctttaaatcccacttttgttaactatatacaaataattattattttattttagtttatttcactatttcaaaatagtatataagatttatgtgctcaatcaaacactataatttaattaacagtattctaattaatattaccgtgaataaccaaatacaataataagtttacagataatcatattttccttcataatattctccttaattagaatattttgaattccttataccaaacgccccctagtaacatttaactacataattaaaccaatttgttggtggtaaagtgacacttaaccaccaatttgttggtggtaaaatgacacttaaccggccaccaaaaaaattagtttatgtggttaagtgtcactaattataaaatattcaagtaattttaccattatcgcgaattttttttttaatttgtaaataaaaatatttaaatcgtaaaattataaataaaacattaaaaaaatatatatttttaccatataataaataaaaattagagaaatttactgttaaaaccatactaataagaaaa

SEQ ID NO: 5635 - DNA, 1264 bp, Cannabis sativa
aataagtttatatcaaacaacatgcaatattgaaactcacatattaattatacaaaatacttcatgattgtcacatatttatcacaatgaatgagtttgaaatttagcaaaatatttacttacttttgggccaatcaatatatttaccaattacaaacatacagttctcttgatattttaaaataaattagtcaacacaaaaaatgccactttagcgacatattgtttaaactaatttattcaaaatattagacataaactaatactaaaatttaaatttaattatttccaaaatatcttaaaactaaacgtctaaatcataatatatataacatacagatacatattatccaaaaattttaatggaaaaataataagatgggttggggttataatgatttatatacatttcaataaaatactcactcgctgacactaaaccaataatgtagctacaaaaataaataaaaaataagtcgtaaaataaaggcttaaacacattaacgacaagatgacaattataacgtatatagtatcaattgtatcatgcctattgtatcatatatacaatataacataaaagaaccaaaatcttaacatagtgaaaaaattaactttaaactaatatatacatctatcatatatgtaaacaatatatatacaagatgttatcactctaaataatatatatgtgattgattagaacaaaaatattatatcctaaaagtactaatggaatacccgaaatacaaaaataatttcatggaagattaattctattatacttctagaggaatgctctgatactaaatgttaaggatactataatttgaatttagccttaattaattcatcagaattttaataataaaatcaaagattagtagaagcatactagagtctatagaatctaatttaaaatagtatggtcttctaattttgcatcaaaatactttggagcctttgttttcttgataatagggatttaggactatgaaatggtacaatgcaaaaatagggaccaatacctatatattaataattgaaaaacagtaattactcatttttttactttttctaattttgtccctcatcaaattagaaattgtcattatggtattcatatattaaaatcatgataatcatgcgcttaagttataaactttattctaaaatagaccacataaatttgacttatttaaataatgatccatcacaaatttaatatatacaattatggccctaaacaaacaaatttctaaca

SEQ ID NO: 5636 - DNA, 935 bp, Cannabis sativa
catttaatagtttgtcagtttatattgtttatcggatacttgttgaaatttcacacttgctgtaagttttttttttctttaatattttgctttaatccaaacacattaatgtgttcttaatggcctaatggggtttcttcaattgcctttagaaaaagcttttaaatacaataatggggtttcttcaatgtgttcttaatggcctagttcagatggttatgttatttatttattgaaaacagttcagatggttatttatagtaaagaaattcaatcgaaatatatatttaatttaagttaaaattgattaaaatgaggcaattaattggtcacactcacatcaattacaaagcataagcactgtgattttttttttttattttttaattttaattttcacaattctccagacagccgcgccctctcctcggtttccgttttgaaaccgaaccacttggttcgtagtacgttcggaatccgaacctgagcctcggggacatcaccatttttaacggttctgatttaatctttccataattcatgctttaaaccccaaccttctcatactcactttcacttttttctctctttctctctaaaaaattcttcattctctctctcatttttttctttggtgggagatcaatggcggagcacgagcccgactcactcattgagaagatcaccgagaagatccacggccaccattcgtcatcgtcttcggattccgatgatgacaagtcatccaaggtcgaagcagttcaagctaagattttcaggctcttcggtagagaaaaacctgtccacaaggtcttcggtggtggaaaacgtactctctctctgtctctctcatttctgtctgaatttaaatacacgcatttctatttaaccgatttgaatcgatttgaatgtgtatgtgtgttgttttgttgatc

SEQ ID NO: 5637 - DNA, 955 bp, Cannabis sativa
  modified_base (147)..(154): a, c, t, g, unknown or other
  modified_base (186)..(193): a, c, t, g, unknown or other
  modified_base (220)..(227): a, c, t, g, unknown or other
attattaaaattggaaagaggaaagaaaataaaaatttctaagaactttttggtgtggcattcatgaatgtctaattaatagttggtttaagaacaaataaggaagaccaaagatcacatcgcacattataatgaatatatatatannnnnnnncacattataatgaatatatatataaatatatnnnnnnnntaatgaatatatatataaatatatatnnnnnnnnatttatatatatattttttaattagtattttaattgacaaataatgtaattttatagtttgtatatacttacaatttaaataaggagttttacaatttctattgatattttagaattttttttttaataaaaagagtagatatttaatcaaaagaaaaaaaaattgcaattaaagattatttttaattcattttgataacacacatttaattgtcgcatacttataatacatatgatgtgtatcaaatattgacttataatttattttaataaaaaattatctaataatgatttttataaaatataattcataatatcaaataaaaaatttaagagttagtttttacttttctatgtacaaattaatgaattttgtatatgtgtaattttttaaatttatatatattttagacattttttagtgaagaagatagactttgtatgcaaaattaaagctacaggatcatagaaataataattaaaaatgtaatggtgaacattttagttatttataatattttataaattttaaaaaaatttgaataatttcctatcaaatataagatttaaacaagttattttacacgcgtataatataaaatatgcacatgtaaaaaagaagatactttttctcggcatattaattatctagataatctgaacatttgcaaaaatattttaaataattataatgtacattttttttagcatgaaacctgtatccatta

SEQ ID NO: 5638 - DNA, 991 bp, Cannabis sativa
acaattgggcactgagccttcctgaacctcttcactgagtatctcccagcagtgtggggaacataagtggcgtgcttagcgggtacaactccgacataatcagcaagtgaaatgtcactcacctacatcagagcatgagcacaagcacaaggatatggttacgaataaacaaaggctcgcaatgaaaatcttgaagttttttcatttttacacttcaaaacagtttatttttgtatttttacgaaatttcacacagaaacccctataggacagaacaacttaaatcgtaactaaaatctgtatagcaacccacatagaaaccaccgaagcaacctaaaccgtaaattttaaaaaaacaattaaaaaatagtatatggggtaattccctaaaaaaaacttctatatgaacaaataactaccaaactcgtattatgctaaataagtaactaaaaaactggttctggttcataagcatagagcacaaagatatagttgtagattacaaagtggactaatgaaactcttccaaaatgaccaaataactatcaaactcattatgcacaattcactataacaaagaacctcgttaaaattgaaaagaaaagctttgacaagttaatggaaatttcccaattcgtctttttttgatggaaataaaatttcattaacaagacaaatggtccaacactatagacgtaaataaactcagtacgaacatcactcccaccgaaaactcgttctggaaaagaacaggaagctctagcaaaactatgagctactctagcaaatcgatacacaaacagactccaatcatacaatcaaataaatgtctatagtcattaacaactaaaccatataatagtggttggttcttaaatcaacaaatataatatttttcaaattaattcatattcatacaaacaaaaagtaattagctgagaaaatatcaatcattaaaaaaaaaaaaacactttgaacttatctaccaaag

SEQ ID NO: 5639 - DNA, 675 bp, Cannabis sativa
tttctttaaaatttgttaaacggtatgtaaacaatgaagctcactatttagcgagatccacttgttttatagttgatcgtagtttgagtgtgagcaatgctccctctgtattgatgaacgatttgattgtttagtgaaatttattcctcttttgtcaaaaaaaaatataaatatttctttaagtactcgtgttggtatgtaacagtctataaaacaatctataaaacaaccagagtgacatgcggtgacatgcgcggaaacattacaaatgctcacattaatgtgacaatagcctaaatgcaaaaataccaatttactagtctttattatattaaggtgtgctgtatatatcacatcgtactctgccactgatctgcatcaattctcttggaaactaatctcagaataagctcatgaagaatggaaattattaatgagtgaagaacagaaaattgcaaaatcagattgttgtttatgatattaacaatgttttacattgcaatgtggtgtttttactcgtaatctgcgacgcatgtgcatgcattagcaccattttaataccaatgaatatgacacatttgttgtgtccatttggttaagaacttatgaatgtatcactgtgtttcagatgatctttgttaccatatcaagaagaagtaataataatcaatacta

SEQ ID NO: 5640 - DNA, 1044 bp, Cannabis sativa
gttaatatatcaatgcaattcttattactatgaattaaactatttatcatgcagattattatttgactgctgtaaaatgttcttgctttatagtgtatgtgagtggaagttatgaagaaaaacattgagacgaaggtcctgtgtttatgagggactctcgtctcaaatttattaagaatcctcatttatggcggaggaaaaccattgtaacaaacatttattagtatatccatatttcttgttcaatttctaactctatttcctattttggttataatcaatgaatacggctacgaaacatgcaggtgcagcagctgctgagttctcagtacgagctttgcccggattcctgcaatctttgggctgcataagcagcaggttaattttcgggatttcattttcagttcttccctactcgaatatgtacctatgcattatgcatatacatgtctatctgtaataacttattttcatgtataacatacagtcctgctgatgcattgaaggaagcatttgtgaagactgattctgcatttagaagtgaactagatacttatcgtaaatcgaaaagagcaagtcagaaagactggcatcccggttgcactgcagttactgctcttatagttaagaacaagctttttgttgccaatgctggtgattgcagaacaatcttatgtcgatcgggccaaccaattgctctaagcaaggtgagtgtgaatttcttgttatttgttctcttctttcggtttatctttatgttctaaaatgtcctgaaaaaacgcatttgtacgcaaatcaggatcatgttgcaagttgtcccgaggagagagatcgagttgttaaagcaggcgggcaagtgaaatggcaagttgatacatggcgggttggtgctgctgcgctccaggtctgtccctttatcttatatgatgatcgaacaacaatccacaaatctgaaatgtcaaaactaaatcagcaaagatgaattgaaaataaaactgagaaagaatgctaagaactaatgctgtagcataaacagaaaaggaa

SEQ ID NO: 5641 - DNA, 1072 bp, Cannabis sativa
ttttgaaggaaatttgaaatatttttcaattgttttatttttatacttattttttaatggtaaatatactaaatatttttaatataatttgatttatatttgctactaccccaaggagttgaggctttctctacatattatcagttgtatatatattctgaatatatataataaaaaaattcaaatgaagtacccagaagcaataggtaaactccagcaaaagtagcttaataagaaaacgagccatgaaaacaggcaaaaaataacaagctccattgaaatagacttatatatattggctttggatgtaatcattttctttagtggtcacatttcattatcgagtaattttataattttaaaataatactatattgatgataatgtaaattatctgaaacaagaagcatacgatagattaaatattaaatattactttttacctcatttcatcactatcattctgtaattacctatggaaaaaaaaaaacacgtgtaatgtaatcttagttatttctttgaaaaaagaaataatctaatatttattttcaaaaacttatattaataatataaactaaatctattcctaaatataaacctaaaatctgtaatgaattaaaataaaataaaataaaaatacagcccccatattctcaatcctaattaagaacaatttttcatgtgtgtgtataattatgtttttatacataattccaaatgattaattaatgagtgggcaaccgccaaagggcattgagaaagcgattttatactgagactgacttttaaccaatactatattcaaaacgtatagtaattccatttcagttggatgagaatcactttgaaataataacactttttttatgtatatatatacatctcacatgtctatatatatacatacatatgctatataatatacctctctctcctattgcttagccattttcatttttcatcttaaagctttttcctttttcttaacggtaaagcttatcagctagtagtgtagaagtattgctttttttggtgttggcttaacgtaactctcttcccaaacaaacatatc

SEQ ID NO: 5642 - DNA, 1342 bp, Cannabis sativa
taatcagcactaatctaccagcaaatgatatttttctattgctccatattctaatctttgctgttattttttgcaccagaataccacaatcagcagctgatattcttgtagcacaaataggcacaccaaggtacttgaaaggctcattttgtcttttgaatcttgatttgataagcactcttctaactcccctctcattcattccactacaaaacacaatagattttgctctatttagctgcaaaccaagtgtgtttgaaaagagtttagacccaaaaacaacaaatatatactcttaaaatcccctgcagaatagcaaaacataatctgtaaaactaagatgatttagcttcagttcttcacatctttcatgatatccaaactctttcttctttcctactttaagcatgattatacttagatagacaaagagcaatgggaacataggatctccttgcctcaatcctctttgttcttcaaagaaaccatgcatggttccattgaacatgagaaaaaatcttggagttgttacacaactcataatcagtttaatgaacttatctgtgaacttaaaggcttttaacatctcttttaaaaaaaccccattctattgtatcataagcctttaacaagtcaagcttgatcatgcaattggctttggatgtttttcttccataattcttgatcaaatcttggcatatcattatattatgtgcaatgaatcgacctttgataaatcctcattgatttagtgatactagatcaggaaggatatttttaagtctagaataaataagtttggttgctattttgtaaagcacattacaacatgatattggtctatagtcacttactttgttagggcatttgatcttgggaatgagtgtaattactgttgaattgatttcttttagcaagttccctgaatgaaggaaagaggtatggcttcatagacatcattcccaagcaattcccagttttcttggaagaagaaacttccaaacccatctggcccaggactcttgattccaggtatgttgaatactgcttgcttgacttcatctctagacaaatcagccatcaacatctcagcttgaacctttattaacacaggcccctcttctataaccatagcctttacatgttgcctaccctgcatatttgttcccagcaatgccttgtagtaatctaaaaaagcttatgttacctcttttggatcatcgattctctccccgctagcatcaataatagaaaaaaatttattctaaattctcctttctctgatgcttgaatgaaataatattgtatttgagtctccatctttgatccaattcaccttgga

SEQ ID NO: 5643 - DNA, 575 bp, Cannabis sativa
aaaattcatatgaaaatagaaaaagatttctatatcttaatagaaatactgaaatttaattaaataaactaaaaaagaactactgaaaagatttaatcataaacgtgtatagcatttcattagattttttttttttttaatttgaaaagaaatttcattagaaattattaagagtgcctgagatctaaatatttttctaattaaaagaggagatgagcagtgaaattagaaaaacttaatcaatattgatatgattaatgtagaagtagtatatcttatatatgagaagcaatggagatggatttaacagaataatacccactattaaaatgggtattattattttaattaaaatataagaatattaaaaataattattgtaacataaatctaacagtctacttaataaatgaacaatttgaactaaaacaaaaaacaaaaaaaatcaaacagaatcaaaatcttggaatacttaatttttttattgtaacaaaaaaaaattaaactaaatgttaaaatacttcaaagtgaaacaaaattatattataccgtgttctaacaaattaataaatatt

SEQ ID NO: 5644 - DNA, 525 bp, Cannabis sativa
ggccttgagtaatgtttaatgggccctcatttatacctgaattccaaataacccaatgacttaaagcacacaatgggccatcttcaagacctgagttgggccttaagtagggttccaaaaattcaagctcacatgtctccaccatgtacgcagctcctccacgacctggaacaaaatcaaagcacacgagcgacttttctgattttttcgtcgctgatcgccaaccgaggctccccggcgaaaggaatgtctttctcagcactggtggcgacttcttctcttcccccgtcaacacccacgccggcaataggtagttttctgacgacactttcttctcagacgactccaacaacagacgaacagcaagagtccatgaaaagagccctccctgttgcttctccgacgttgcttccaacctctcgttaaccatcgcgtgacccggttgcattgaatatgtttcaccaacaccttcgaacctttcgaatctgcaattgattccagcgtgagtcctttgatgcgactcca

SEQ ID NO: 5645 - DNA, 831 bp, Cannabis sativa
taattaccatatttataataagtctaattattttaattagggaggctaatgtggtaattaattacacatcttaattatggtaagtcttcacttatcataaactttccttcaaagggctgctgaggctttttataaattaatgaagttagaggtgaaaaagaatatatttgatataagaattttggcatactaataatgaaaagaaaaaggtcccacacaacttttgagtcctaaattcaaatttcaatctctaatttaaatgtggtacatatataattggcagaaggtggttgacatgttttttttttctttgcttttctttctttttaaaatctctgtaatcaaatctctacaaaaagtggcatatataagaaaagctaaaaagaaaaggaggactttcatccttattaagggtccttactcaccttttctcttcattttaagatctcacacactcatcattttggacaatttgatgctttaaagaatcaagaaaagcaaagctagggagtctcttcttctttttcattatctttctttgcctccttgctgtgtcttcatctttattattatcatgatctaatcaatccatcctgtccgtccattaattattgatctaataaagcacgatgtgattgccagctaaacattggtagaacccacaacattgtatctattgatggtatctaatgatcatcattagagaaagaaaaaaaagtaacataaccctaaaaataaaccattcatttaatcccttgatttttccaccgcgatgataaagcagctcagtcagcctgcgttttatattatatagaaaagcattcttgttag

SEQ ID NO: 5646 - DNA, 1567 bp, Cannabis sativa
caagaatctatagtttgcatcttttgattccaataaccgtcattcctactaattcaaatctaataagccaattcaacaataatcatagccgaaaaaatctattgcttgaaatttgctattttagctcgtgaaattcacctgagcaaagtactcctatttgtaaaaaaaaaatataattagtaataattaagtaagaacctatgcacctaagctgaagtcacaggcaaatagaattatgattttcaaaaaagaattaactactttttcctatatttatatgtgttaattaacctatatgagctgttaattattcttatgatatattgggattaaaaaaaatcatattagatagtggatgtgacattaacattgacaaacaagataataaattatatatgtcgatcgaattattaattatgagtcatcctactcgagttcaagttgaaaaaaaaaatgtaccatcgatcgatctttcacaaagaaatatttggtaaatatattgtcgtagataactatatattgagtgatattttagatgtaatacaagtattaatattaaggtaaatatctctaaattttgatattcttatgattttgatcttgacttaaactaaatatacatggactctatctgttttgttatattacattaataactccatatttaataaaatgaattcaaatagtatcttgaactagctcgatcaatatgtgttgttgcatatatatttgaaattattttgtttaaatttcagattagggctattttttatccattttataaaatatatttgatctaaaatgtaatttaacaaagtatatggtccgaaaaataatcatgcaatatacactgaggtcataatgatatacaataatcacatgcatgtacaacttagctagccaaaagcctagaatgtataagtgccatttctaataaaacatatggggatttatacgtatatagtagacagattcccaaatacgtacttggtaacaaaataaattaaaatatgtaaaattgattcttgtgagagaattctatgtatcaataacattttgcaatatatagtaaaagaaaaacatattaatttgtaatgattcgtctaattttgtctcccttcaactttcagaaatgcatactcaactaagtaaaaagacaattactacattgttgtgattaattgtcgtattaattatgtattataagaaggagaaatgctaaagggcaccagtaatgcctagtatccttttatgtgtcgatatcgatattcaattaagtatcgggtcccacatagtttaatataatagcttttaaagagtatcgctagtcaatcgcaacatgacatgtcgagaaagtactaggcaccgctagtgtctaatagcaatgctctataagaagagtagtgctaattcaagttttttaaattttaaaaatgtaaatagccataccattaatttttgcattcatcaaagttaggaagataattaattaaatatgtatatatttttttaaagaaagaccatataattatatttacaatatatgaattaaatatatatcatattt

SEQ ID NO: 5647 - DNA, 814 bp, Cannabis sativa
agtaccttgggacgtgaagagctcagtgtagaagtgggcgaaagtggtggtaatgtcgttgagggaagttacttgagaattgtcatccagagttaaaaatttaatgaagttggtgcgtttgcgcgcagaggcccggttatggaaatatttagtgttcttgtcccccgcttttaaccaattaactctggagcgttgcttccaaaagatttcttctttgactaaaagggcatcgagacttttctgaagatcattagctttattagcgtcgtaatgggatatagtaggacccaccatgagacgctctatgtccagttggattgatttgatacgatctgtgaactgatttttatttttaccccaagaggacaaagaagctgaacaattattctgtttggacagaaaagtgacaatggggttgttggtagcagaaggacttaagtccgtacaccaactttctcttaagagcttaggaaagtctggttcaagtaaccagtgattgtcaaaacgaaaagtggaattgcgggcaaatataacagggttgccatcgagcatcactttaatcgctctatgatcagagccaaaaaaaccaagatgttggagagaggccgtgggatagaggtcagcccatttctgattaataatggcccaatccaatcgttccagggtggtgccgtgcttccaagtaaaacggcttccagagaaaggaagcgggaaaagagagtatttaccaacaaagttttgaaaagaatgcattgcatgtgagggaggtaaaccgcgggtgttgcgatcgttaaaaccaagataatcgttaaaa

SEQ ID NO: 5648 - DNA, 1087 bp, Cannabis sativa
ttttgtaaggagttaattaattaatatgagatttaggattacctaaatatatttaatttaattaattataaaatataaataaataaacttaggattttccatctaaactaaacatagttctacacttacataatatactaatttaatatttcaattaattaattaatattaatattaatattaatatatagctgttgttttttacccaaaaatggattttttttgaacgattgaacgaacgagagttcagctatatatatatacatattatatatataaacacacagactatatatataaatcaaacccagaaaggagaagagagagaaagaggtatagagagagatgggaatggcgagagatgataaagaggaagaagaagaagaaggagtagcaatggcgaccgactttttctggtcttacactgatgaaccccatgcttctagacgccgtcagattctctccaaataccctcaaatcaaagacctttttggtcctgatccctttgctttactcaaggtatatatacattgtagatctgtgattaaagtttgaatttttaacatctgaatcgttctgcattgtggtttttggtggtgggtagatcttactttttcatggggtttgggttttgattttgatttgattgaattgagatgtgtttttctacttggcttgagttttactctttaggaatgaaattgattgtttttgttagaataataatgattagtgttggtaatgtgcttttccaaattatggttatccaaacatctgttaaaattatagatatattttaacttgctaaagagaatattgttaaagggccaacacttgaagtttgtgtgtaatttaatatcgggtcctatcagaacccctaaccatttgtaaagcgctacctatcagaacccctaaccatttgtaaagcgctaccttgggattctattggtaatttttgcaaaataacttcaagactaggtgtctagtacgatgttagtgtgtgttatgatagtttggttattttgggatgtaatgtgagaaaaaaaatagatttgtaaaagcttttgcaatttcatatcgggtccta

SEQ ID NO: 5649 - DNA, 1607 bp, Cannabis sativa
ttcggttgattaactaggcctctgagctgtttcaacaggcccaacttgtcgcagtagctgaaatgaataaaaacctcattatcagtcatttataactacttttatattgtttcaataaaagagaagaattaatatagacctggaaataaggttcaattcgtcctcgtaatttctcatgctcttttttaactttttggagggtcgtcttcatcctagaacatccaataaaaaataatattagaacttatgtttctttttagatcaaaaaatataaaaaatattattgatgtggcgacacgtggatcaatcagataaaagacattcctaaacataaatgaatattgtatttcatccaaaaaaaaaaaaaaaaagaaaaaaaagaaagaatgaatgaatgaatgaatattgtagttagatggatggatgtttgtttctaataaaaatgtataaattattttattcgtatacttcagtaaattgagtgaaagcaaaataatatatatttatataaccttagaaaatatataattattttaagttatcatcatgatgtagcttcctgatgttgttttctaatgaatcagggtgatttgtttttggatccataataataataataaaatgaacaataataattgtcaatataaaacagcaacctttcaatgtcatgttctcgtgtgcattttctcatattatcgacttcaatgcttacttggtttgcgccaacgctgtacatgtatatatagaaattattataataaattataattttttcagtatcataagatattggacactaagactattggtactaataacaatactcataatattaaagatagtgctcaacttctttaattttatggttctacatttctcctcataaaagagaatatttcaagttcaaatttccctgagtataaaaataaaagagagggaataactaaagaattctaatattgcttaatagaattttatatattttaatttaataattattacagtaacttctcataaattttaacttatgtggtaaatgacaaataagtaaataacaatttcatatagcatttttatattagaaatgaatgttaaataaataaacatttttcatgccgttgctagaaaatattatcatttttttataaaagaaaatattatcttttaaagtgttgcaaaactataatttaatatgaaacttcactattataattaacaataatgagtttactttagtatatatttatatatttatagggaatctctctaatatctactttaattttgacatagtgttgttagagcctctaatcaaaaagagatatccaaattcaaataaaatatacattatttttttctattaaaatgttatctattattggaacaatataatattctacttatcaaattaatctcaaaaaaattataagagataattggcaaaaaaaaaaaaatgactataatcgtttattttagtaccttgcgctacttcctgcgagctgatagagttgtttttccatgacaatgaaatcatggtggggtttctctttctccctgtgtttatatagccacagaattaatgacaatcatatatatatattatatat

SEQ ID NO: 5650 - DNA, 2695 bp, Cannabis sativa
aataaacacattgatttcaataaagctttgcattccttatgttctgcatgttgcctagggaaaattcacaagcttccctttcccaaattttccaacactgaatattcagcacccttgcagctggtagtctctgacttgtggggaccatcctttactccatccacaaatggatacaagtattacatccattttatggatgtgtactctcgttttacctggctctatctgttaaaaagtaaatctgaagcattgaaaatgtttcaaattttcaaagctgaagctgaacttcagcttggtaccaaacttaaatccctacaaactgattggggaggagagtacaggtctttcacaccttttctcaatcaattaggagtcattcataggcatccttgtcctaccacacatgagcaaaatggtctagctgaaagaaagcatagacatatagttgaaaatggcttgacacttcttgctcatgcatctatgcctctcaaattctgggatgaggcttttcgaactgctgtttacattcacaacaggttacctacccctgttcttgacaataaatctcccatagaggttttgtttaacaaaaaaccagactatctcagtctcaaaacctttggttgcacctgttttcccaatattcgaccttacaacagacacaaattggagtttcgatctactccttgtacctttgttggttacagtctaaaccacaaaggctacaagtgtcttgatgcctctgggagattatatatttccagggatgttgtgtttgatgaacacagctttcctcatgctcatcaatctgtttctagcacaccaatccttaactcagatacatgtttgacatctggtcacatacctcataacacttcatctcacactacacatcaccctcctcccatacctgttcttactgtcccacagtcacctcctaattccatgacagaacaggccactgcagacttacctgaatcccctggtgtctcaactgagactttatctcagtctgaacctcatgtgcctagtctatcaccagagattctttctgaatctcaatccattgcaccaaccagtgatcctaccccatctgatacttgtcctaataatacacatcccatgaaaaccagatctaaatctggtatttccaaaccaaaaacctacatggtgtgcagagagcctcttaccttgaaagaagctttgcaaaataagcattggaacaatgctatgggtacagaaatagttgctttaaaaagaaatggtacatataccttggttccattacctgcagggagaacaccagtggggtgcaaatgggtgtacagaattaaggaaaatgcagatggttctgttaataaactcaaagccaggttggttgccaaaggattccatcaacaacctggtttcgattttacagaaacgttcagtcctgtagtgaagcctgtaacaattcgagttgttctctctttggctcttgctcaagattggactgtgaggcaattggatgtggataatgcatttctaaatggggatttacaagaggaggtctacatgattcaaccacctgggtttgaagatgaaactgccccacacttggtttgcaagcttcacaaagctctgtatggactgaaacaggctcctagagcctggttcgagaaacttcaacactgtcttgttgctcttggatttacttcttcaaaagctgatcactctttgtttattcagcataccccaacatctacaacactaattctagtgtatgtagatgatattatcattactggcagtaaccaagaacatatctctcacatcattgctaatctcaacaagcaattctctctgaaagacttaggcaagctaagttactttcttggaattgaagtttctcacactgataatggaatgcacttgtgtcaaaccaagtatgccaaagacttactgtgcaaggccaagatgcagggagcaaagtccatttccacaccaatgacaagtggcctcaaactttctgcctatggtagtgatcctgttgaggatcccaagctatatagatctgtggttggtgccctgcaatatctcacaattaccagacctgaaatagcatacagtgtaaacaaagtatgccaatttatgcaaaatccttcacaagctcattgggctgctgtcaaacgaatactgaggtatattggaggcactctggattatggattgcatcttactaagtcattgaactttgagctcactggcttttgtgatgctgactgggcatcggatcctgatgacagaagatccacttctggttttgctctgttcttaggcaacaatctcatcacatggcaatccaagaagcagcatactgtctccaggtctagcactgaagcagagtatcgaagccttgccattatcactgctgaaatagcctggctgcgttctctcttctctgaattgcatattcatctgtctaaacctcctgtggtctggtgtgataacctcagcaccattatgcttacacttaatccggtcttacatgccaggaccaagcacatcgagttggatctgtactttgtgagagaaaaggtccaacagaagcaactggaagttaaacatgtgcctgcttttgatcaagtggctgatggcttaacaaaagctatctcaagctccaggtttgacttctttcgaaacaaacttaccattg

SEQ ID NO: 5651 - DNA, 1367 bp, Cannabis sativa
tgggtagggtttatatgtggaaataaataccttaaatgagaagttactgaaggaataattgatattcgagcctaaatcgaattcagcaagagttgcacattcatcctcctgctataatagtaaaatttcaaagatcaaaatgagaacagtttttgaaattttcaaaactttgagaccccaatatgaaaaaggcctcggactcgcactaatgggagaaaataatgtgagataaaataaagaaaaaatattgacaaaaagtgaattgttttttgtaattttgttttctaaaaactgtcttcaaaaaataaagccaaacgtgcctaattgttctaaaaaacagttttttaattatgatgccaaacataagtaaatgtcctttcaatttttcaatttatatgaaaataaagattaaaaaaaaaacagtttgtgagaagcaagtgattataattaccacttcatcattgccgaggctcatgccactgttgctgccacttaaactatcatcatcgctagaatcttcaagttcgcttggtggataaccatggtcatctgaagtattccatgaatatcgactagtgaaataactggtatctagtgcactctccgacgagggaacaaatgcagcctgcacaaataatgagtcgagttaatgtataggaagcgcaaccatgcccttgattcaccaaagaagcgtttttctgaccttctgcctagcaagtgtatcccagttgatatccttgaaaaatacatgttgcttcacctgaataaggcggattcagtacttgactaaatagaaaaataaataattgctacgaaccgaacaaactaagaattgtgttagtttcacctccgatgctcctgctgctccaagcctctggttaggatcttcagtcaataaactgtaaattacttgtatcagcatcttttttgttacttgccaaacaaacattatgatacagtgtttatatatttctttgagtttgagttataacagtctgagatatttgcttaccgatcaattaaatccgctgcttctggactcatttcatcaggcactcgaggccaaggtattttacgattaagaatattatcgaatattgtctgaaaaaagaaaaccgaagtgttaagagtagccatgagtcataatccaacaaacatgatgatcaattataaaatcttgtagaagcaataggtttacctgaggatgctctgcattgaagggtggaattccaacaatcagttcaaacaaaatcacaccaactgaccaccaatcggcagttgtacctaaacgggatggtaaaacacaggattagtaacccttgaatcttagtaactgatcaccaaacacaagaaccacaagcacaata

SEQ ID NO: 5652 - DNA, 531 bp, Cannabis sativa
tttgaaggcaataatgatgtaagagacggccgagatacagaggtccctgctgttatagctttgaacctaactctactattgtactaaatacctaggcaaccaacacataaaaaaagaccttgtagagaagatcgccaaacacctagtactagtagtagtcatctagatggaattagtaatgctaaaggaactactaatgctagagatcctagtgatgctagaagaaccagtgatgatgctagagggaccactaatggtagagatcctagtgatgttagaaggaccaataattcttgatttagtgatccatattcttcttcgacaatttacggtaaattcaatgagaaaatatttacgattgaagacatcaaggataatagtcattatacatctacgggtgacaaccaagtggggagttacatctagtaaagtttttcagagacaaaaagtatttgaagatggttgttggcttgtaagcaatgaagaaagggttcggctacttcgttaagaagtctggtactgctgtttggt

SEQ ID NO: 5653 - DNA, 1603 bp, Cannabis sativa
atcctgatgatcgacgatccacttcgggtttttcgatcttttttggttctaatctagtggcatggcagtgtaagaaacaacataccgtgtctaggtccagtaccgaagctgaatatcggagtcttccacaggttgtttctgagatcacctggatgcattcgttatttactgagctcaaaattcagctgcctcgtactcctgttatatggtgtgataacttgagtactattcttttaacagcaaatccagttcttcatgcccgaacgaagcacattgaactcgatttgtactttgtccgcgagaagcttactcaaaaactggttcgtattcaacatgttcctgcaattgatcaaattgcagatggctttacaaaggccacttccactgctcgttttggtctcttcaggaacaagcttggcattggcccctgtaccaattccaaacttgagggggagtgtcaaggcagttagttataactgtatctgtttgtaacaactttcagttgttggttatttctgttggcctttatcttgttatgtatataaatcagttgtaagcttctttctcataataacaatctttacttcttcttcatcaatctttctctgtcttttgctctgttctttcctttctatctttctgttatttctttcatcttctttgtgtgctacatcaatggctagaaggatttctaaccataacatggtatcagagccgtggccacctttggtggcaaacatggctaacattggaaccaccaactcaagctcaacgaatcctggtgtgccccctggtttctcagctgctgatcgaaacagagcaagaagtgaggattcgtcaacagttcacttcaatcatagcttgtctatcagattgaatgatcataacttcctattatggaagcaacaggtgcttgctgccattcgaggaaacagactcttgaagttcattgaagacaattcaccaccgcctcaatatctcagtgattcagatcgaacagctcaggttcagaacccagaatttgtggagtgggaggttcaagatcagttgcttgtttcttggcttctctcctccatgactgagagtctgctgacacgaatggtaggatgtaatactgcaagacaaatttggcatgccttggagaaacatttcactctgcaagtttcatcaaagatcttggagtttaggacaaagctgcaaaatctcaagaaaggatcacagtctctcaatgactacttgcttaaagtcaagcaacatgtggatcttctagcttcagtgggagaaaggctctcagctcgtgatcacatagctgcaattttcaagggattaccaagtgattatgacactttcatcatctcctcaaataccagaattgaggagtattctgtagcagaaattgaggcacttcttcttgcatctgagtcaaggatcgagaaaacagatcaagaagttgatctaaatgtgaatcttgcagctaccactggagatctggaaactcaactctcctacgaagcctttcttgcacattataatcgaaatttcagaggctcaaatccatctcgaggtcagtttccttataatgcttccccttactcaccattca

SEQ ID NO: 5654 - DNA, 994 bp, Cannabis sativa
tatctacttttatctgccaataataattggtcgagaatcttcatgggtccaattcttagctggatttttataagaatcccctcagccaaaatatatagagccaacgtttcaaataatctttacataggcacatcattttaatttattttataccagaaaaataaaaagaaacagtaatttttttttttttagaaaacaacaagtttgttgaactaaatatggggaattataaaggaattccctctctttgaaacaaacggtcatttggttagaggttctaacacattttgctagtccatctgcaaaggaatttagacaacacttaataggaaacgataatttgcaatctgattagtttaaaatcagagaaaaagataagtaaaacccaattaaggggatatttctgttgtaccaaagcactgactacaccataaaattaagataaaatgtggactttactccaagaattctgaagagtctacgaaagagcacaatggattgcacgagtttctacctccaaagccgattcagccttggtgaaactcctaggaatacatgatttcctacttaaaattctatattactacgctttggatctttataacttttttgcttgctttgggaaataagtattcaagccttgatcttttctattacactacgggtcctttgatctgactctggacctacatactatatttccctagtttcatcctaatggatcggaaaatagtatttctcaccatacaataactcttggggagttatccctattatacttgaaaattgttgttataggagaattctaccaatggcgaacacttactccatgaacatttaaatttcatcatacaagcttgtaacgtatctttcatgttatccgtattttggctagggatacaaggactccaggttagtatctgaagtccatcaatgggtccaaagaagatattttgggtcaagcccaagttagactagaccttccaagaaggta

SEQ ID NO: 5655 - DNA, 733 bp, Cannabis sativa
ccccgccccgtttcccatttagacaggaaattcctgctccattaggagtgggtcccgtgggaccccatcccaatagagaaaatatgcatccctaattgtatgggtaacaaagttaataatagtaattgattctcatgttagacttgtttgtagacatagtataataattatggactacatgttaatagtgtattttgttcaattcgattattgtaataatataatttatttattaaaatgtaaaatatatattataatatgtttatatttttttgtgtataaaatatattttatgtataaaagttatctcaaatttaaaatatttttcaagaaataagttgagttgggttatatagagtgtgtccaacccataataattatatagtgtatcacttttcagctcaatgaactatgatctactctttaacacaattttttgctacaaaaaatagtatttagcccatattttgtgcacccttagtcataattctaatgagaactcatgaggtatacgatatgggtgccatcacttttctttacaagagttaattacaacaaacaaaacataccataattagggtggattttttttttaattagattttgacattatctatcactcaatccaattacaattaactacctaatttaaaatcaaatctaatccaattataattagatatctttggtcaccctaaaattttattagtaactgcatattagaaaattgata

SEQ ID NO: 5656 - DNA, 1090 bp, Cannabis sativa
caagataagattaaatgggcccttttggtaataccacagtccattaagttgaatagctgttgaacctattatctccctatttttagagatatacttactaagcccataagacttaagccccatttcctctttattttcagcaaaggcccggctcatcacaacccttccaaatttaattttatctattgaatcataagaaagacacgtgttcaaaaaattagaagggtttctattcacacgtggctcacttagactattcaataaacggctaaagacatgctgaagaggaatcgactctcttccacaacttgaatttttatggggacactcaatcggcatactcctgggctggctatcaatctcggaagatgcacacccataattaatcattaattccttctctggctgctgtaccgatgcctggccgcccgtctcagtcatggacggaaaatctgcagattccgactgcccctcatccgcctgggtcaccatcgccgactatagcacagaatctgacgacaagctctggtcgcctccctctctattggtctcgtcaccgccaaccacctctgcgacaatctcggacgacacacttgtcgtctgaatccccccagccaactcgcctccttctcctccttttaccgaatccgcctctcccttgttcatcatcttctgttctttttctttttaatatacctcagaatcttgatgccaaatagtgttgaaaaagccactgaatctatatccctaatcgtttaatttgaataatttcagtgatatttccaagccttcgttatgaaacgagatgagtgttggtacaaaaccatgctcattcccttccaatttaagtctcagatgatgcaggaaactcttttctgcagtatccttttcaatatctagcagccctccacacaacgctccaattctccacatggttttcatgttccacagatgtaatggcagcccttcgatgcctatccatgaccttctacattcaactttctcatctttgttttgtttttccatataacatctaatgaaagagacaatggtgccccttgttccaggtattaccatcttgtttaacttc

SEQ ID NO: 5657 - DNA, 1621 bp, Cannabis sativa
aattttattttattttaaatagatcagtaaaaaaataacatgtagataataacttgacacttaatagtcagatacctataaattttttagaaatatagcttagatattattaccgttaaaaattaaacttaactatttatctacaatcgaaagttaaattataatatttacactgcaaaactcacaatttatctattttttttttaaatcaaacacaaccttatcatgtcatcaagaaacaaaataccaaaaacaccaaatgcaaaacaagatttcaagaccttggaaaaaaagaaagagaaatttcattttagtcacatcaacaataaacatacaagtaattcacattaagttttttttttttttttcttttttcttgaatcaatgactaaaacacatttattaaaccccccaaaaaaagaaagaaactctttactttccagggacaaagttggtggcatatgaccaagcattgttgttgactgggtcagcaaggtgatcagccaagttttccaaaggacctttaccagtaacaatggcttgaacaaagaatccaaacatggaaaacatagccaacctaccattcttgagttcttttactttaagctcagcaaaagcttctgggtcatcagcaaggcccaatgggtcaaaactaccacctgggtagattgggtcagtgacctcaccaagaggcccaccagcaatacggtaaccctcaacagctcccattaagatcacttgagtggcccaaatagccaagatgctctgagcatggaccaaacttgggttacccaaatagtcaagcccaccttcactgaagatttgtgagccagccttgaaccaaacagcctcaccaaacttaacaccatttcttgacaatagctctgggaaaacacagcccaaagctccaagcatggcccatctactgtggatcacttcaagctcacggttcttggcaaaagtttctgggtcagctgaaagcccagcagtgtcccaaccatagtcaccaggaaattcaccagttaagtaacttggtggctcacctgaaaatgggcccaagtacttaactctgtctgggccgtaccatgggcttcctgaggaaacttgctttgaggcagttttcctcatgttgactcgtccgccgttcgacattttgttggcggcgggcgccagctcgacggccttaccggcgaaagccggggaggaaagagccatggtggaagaggcagacatggttggttgagaatttgaaaaagagaggaaaaaaatttaagagtttcaccaaatgtgttttttttagggggttggatatgtgagaaaaatgttggaatgagaaactttggttaagttttgtcacatattaatagtaattttactcttatcttatggtatctatatcttcaatctcattggatatcaagatttttggttttgttttttgatgcctatatggctttctctcgtccaccaacttgttgggcccacttaatagattacaaccaattaatgctctccacgtgtatttctttaggattacactcatctcatatttatctctttattttacattttttcttttaaaaataagatttttctttcttgcctagcttttatgtaacaa

SEQ ID NO: 5658 - DNA, 2360 bp, Cannabis sativa
cagggttatagcctatgcctcccagcagttgaaggaatatgaatagcgtatctaacacatgatttaaaacttgttgtcgttgtattcgctctaaaaatatggcgacattacctatatggagaaaatgcgagatctataaacaccacaagggcctcaagtatttcttcacatagaaggatttgaatataaggcagagatggtggctagaattagtcaaggattatgattgtgagattctgtatcatctcgggaaagcaaatgtagtggcagatgctttgagcagaaaaggtcccggaagagtctttagtatcgtaatgatagcacctcagttggattttgatatggttaaggctggaattgagtttgtggttggaaaattacatgacttgacactctagtcagattttttggaaataattagaaagacacaatcggaagatgttgagctaattaagattcgggatgatgtattagcaggtcggcctaaatatttctcgatgtcaaataatagaatgttgctttacaaagcgcacgtttgcgttccaaacagtgatgagctcagaaaagagatatttgattaggctcatactacagcttattcattgcactcgggaaccactaaaatgtatcaggacctaaaaccctattattggtgttgtggaatgaagaaggatgtagtggaatacatgtctaaatgtttaacatgtcaacaaatcaaagcagaatatcagaggtcgacagggttattacaaccactaacacttcttgaatggaaatggaaggatataacaatggatttcgtgtggttgtttgcctagaaccaccaaatggatctatgactcagtatgggtcatagtcgaccgtttcacgaagttaacacatttttttccgtgaaaataacttatatagtagatcagtatgcagagttgtatgtgaaagagataattcgtctccatggagctccaaaatctattgtttcagatagggatccaaaatttacattgaaatgctaggtaagccttcagagagttatgggtacaaagctaaagttcagtatagcttttcattctcagactgatgggcaatcagtgagaacaatacaaatactagaagacttattgcgagctcgtgtcatggactttgaggtttcatagagtaagtacttacctttgataaaattttcctacaataacagctatcaaagtataatagagatggctccctatgaaatgttgtatggtagaaaatgttaatcccaaattcattgggacaaaataggggaaaggaagtatttgggtcctaagttgtttagaggaccaatgaagtgatagaaaagatcaaggctcggatgcttgctttgcaaagtagacagaagaattatgctgatctgaagcgtagagatattgcatttcaggcaggagaacatattttcctacgagtttcaccaatgagatgtatcaggctcataggaaagagcggaaaactaagcccaaggtttatagggccatttgagatactcaagaaggtcaggcaggtagcatattggctagccttaccatcaacgttatcaaatgttcataatgtatttcatatttcaatgctgaagaaatatgtttcagacccgactcatgtcttgagttatgaagccctaaaactacagtctgacttatcctataaggaacagccagttcaaaacctcgataggaaagaaaaagttcttcaaaacaaagccatagctttgttcaaggtactctagaagaacagtaaggtggaagaaactacctgggaattagagtctagtgtgagggtttcgagagttatttaggttagattttgaggacaaaatccttttaacaaaggtataattgtaatgaccgcatgttagattatggattagtaaaggcgataagcattaattattggtattttatacgtatatatatatatgattttatatttgttgtgggctcatttttagaaataagcattagagttataacttcttaattctggagattttattaaactctaagagtattatttatgctaaatatgaattatgcaatttttgtgatttttgcttggcgacgattgaaaatgtgatggatggctattagagtcacatgggtaagtttagaaccttattcttagtggtacaaacataagagataagaatgttggctttaggcagggtgatagttctggatcattttacccctacgcctataggttacttaaagtgtaagtaaggccattttgggtattttagctagagggaggtggctggtttttagcttgacagctggcaacttattatttcagcctaagtttgttggtttttggaattaaccaattaagaa

SEQ ID NO: 5659 - DNA, 564 bp, Cannabis sativa
agtgttaatctctgatctcttcattgatagggacaaacaaataatccttaacatcccttgaagatcactcaaaacaatgatcagttattctggtgtaaagaaactcagacatttattcagttaagagtgcatactcgacacttcaaaaattaaagggcagatggtttgaagatgaagcatcccagttctggcgtaaactttagagtctgaaactccccccaatagtctcaaatctggtttggagagttggtgcgaactgtcttccaactcttactcagcttcgggtcaagagggtatatgtttccagtatttgtccaatttgtggtgagcacgaagagaccattctccattgtttagttacttgtagcagaattaaatcatgctgggaccgtgtgagaataggcacctaaactacccctggagactcattttttgactggtgcagcaaggtgtttcaagtggcctgcaatgacctgaagtgcctactggcagtcacttgttaggcaatttggggggcacggaataattttgtttggaattggaaagaggtacgacctgataata

SEQ ID NO: 5660 - DNA, 603 bp, Cannabis sativa
gcctgaaggacagctttccacatagccgattcatcaccatttctctctagattgagaaactcccttccttttaagtattttgcattcactactttgctccatacacttgagttatctgtgagagctttccaggcccatttggtcatgaaggctttgtttataatactaacacttctgaatcctaatcctcctctcattttggattgacatattgcgttccaagccaatagatggagttttcgtctctcctcagtatctccccaccagaagtctcttagacatttgtccactttatgcgcaatattgagaggtattggatcagaggcagcgacgtatgttgctaccgacgatcctaccgactgaattaagcaagctctaccagctttcgaaagaagtctggttttccaacttttaactcgctgcagcgccctatctaccaagaatcggagatctctcgacctatttaaggatctgaagagaggaagtcccaagtatgtagcatcttctttcattctcttcatattaagcatacttgtgatatcccttgcattggttgccgaaacacctttagtgaaaaatacagtggacttttggtaatttaca

SEQ ID NO: 5661 - DNA, 858 bp, Cannabis sativa
cctggtaaaataatttctaatagacactaacactcattctctagttatgtgttctagagcaggtaagtattggaagaactcttccttttctcagttttattttaccaataaacattgtgacattcaggaattcatgcttcgtggttttgaacattttgacaaggaaaagtctgcatattttctgggtttgttatgggcaatatggaaaagatgaaataaagccattttcaaccctactcatcatcttgatttcagtttggaagtttctgtcagtaattacttgcaggaatacaaggatgctcaattactagtcagctctcagtcccctcccattcaatcagtcacctctaatttgtaggccccaaacaataagtttcagctcagtgtggatgtagccctttctcctagctccaccaaacatggatatggcgctgtagtcactgattgtcagggtcaaattgttgctggtttttcggtgccatccacatcaggcctcccaccaatctttgctgaagctgaagccctcaaccgtgctttgctctggtgtcaagccgttcgctttcctctatggtctattgtctctgattgcatgaccttggttcgtcgacttcagaagaattcaattgatcgatcagctctctcgggttacatcactgctattgcttcctctttgtcatcttttctaggtgcctccatcggttttatcccaagaactgagaacaccatcgcccacaatctcgcaagagtagctcttggaacggacgaagagatggtctcgaacaatcttagttcctaatcgtgaagatcatttgtaactgttgttctttgtctatctttggttacttatctttgtatttc

SEQ ID NO: 5662 - DNA, 2334 bp, Cannabis sativa
tttacataattgggttttcatttttcttagcctaccataattctctccttattagtatttttttttatctatttatttaagggaccttttcatttataacccattaccattacaaaattacgcatatacgataacacaggcattttaaactttatacggcctaacctatttgtattacaaaaatatgttcttcatgaatctagttttcctcttcaatatatcacacacaacctacgagaaacaaacccaggtgctcagaatcaccatctaagccaataattcaatccttaaaatagccaaaaggaagatcaacaattgcaaataaaaaagaattattaagttaaatgattcaaaacagaatcaataaaaaacaaaaaatcaatccatagaattatttaaaaattctttaaaatattgataatatttggatattctatctaaaattttgtgttttataattaccaatttattgattaatttaattagttgtggaataataaaattggtactcattgaccttatttttagccaactgcgtgcattcagtaaaacgataatataagtgtttttttttacaacaataatataaatgtttgaataataaaagtaatcaaaaagctataaacgacagaagatatttttagaggttcggctcttttttttttttttggaagaacaacaacttgttcattagataagatagctgggaagcacaacaggggttccctccctatggtattaaccattcaagagactattacctctagcctttttggctatagcatcagcagcttgattgttcaaacgagaaataaaatacaaattacaaacattaaaacttggcagtaactgtaaaatctccaagcagtaggtcttgtttcccaataaggagggcaaatccttttttccaaagcttgcacaatgacctttacatcagaagcaatggcgattgatcccgtcttggccgccatccccaactgcaaagcccacctgattgcttgcaattcaccctccgcaaccgaacttgctttactctgcttcgcataccacatccatctacccgtccttctctcccaccatcctacagccaaaccatccactcctttccaggaagcatctgttaggcacacgatctctgtgatgctagggattttggtagtcacggtcgattgtcccaaagataatccttcccccaatctcttatcggtgtgactcaagctggaggtcatctgcaattggttcagctcttggaaacgcatgagaatgtgtcttctagtgttgtgaataccagttgcctttcctttgaacaaccgtttgtttctcgcttgccaaattccatcaaacaagcatccaatgaactccaaaaattaccactttatctcaattggcatgcacgaaaacaagcccaatatgatatctttgcaggtggcatcctcgctaacattgctccgaattgggaaaggacaactaaaccacagtgccttcgcgaaaaggcatgcccagaaaatgtgtcttattgtttcacacagaaggcagttcttgtcacgaatgaaagggagtttattgcgggttggaatacaatcagcagctaccctccatatcataattgaggacttgatatggatattctggttccatattatcttccacaaaggagacttttctgcttccctattcccacaatacatctggtacgctctcttgacagtgaaagccccatcagtagactctttccacaccaaagtatcttcctccgaggtaggtagtctaggaatcgagccaattctggtacctaaatctctcccaaatacttactgaaggagatccaagttccagcacttatcttgtattgtaaggtcagccatcgtcttcaaatgcgggttaccacttttgatcctttgcagaaggtcatagaactcattatattttagccatgggatccaaggttgattccatagatcaatagaatctcccctccccggaatggccaaccctcccagttgaattattcctctagcctccaaaatacccttcaataatggggagtcaactcctctccctttcacctcccaaaaggacttgtttttgcagtatttagccataagacattcaacccacggtttgttcgccccaattgccatctgccatgcaagttttgctaatagagctttgtttgtatcttctaatcttctgaagcctagccctccctgacatttaggaaggcaaaggctatctcaactccttatggcattgaatctatctttggttatccctcctgtccaccagaattttttgataagcgcatcaatttctctacatgtcgacaccgggatt

SEQ ID NO: 5663 - DNA, 1179 bp, Cannabis sativa
aagacctccttaacgggtatactaggaagaatatttcagtaaggtgcatcatgaaaattgaccttagcaaggcgtatgatatggttggttggcagtttgcggaggatttgctcaagttactttattttccttctcgttttatcatgtggatcatgacttgtctgaagggaaccaactacagcctgcttataaatggaagaattcaaggcaaattcaaagggaaaaaggtctccgtcaatgtgatccaatgtcctcgttactctttgtcttgattatggagtatctcactaggctcctcagttactatgctgggaaaaaaaggatttggtttccatcctctatgcaaacacctacgcttaactaatttgtgtattggagatgacttagttatattctgcaaaggcaacatcaactcggtgaaacttgttaatgaagccttcatgttattctgcaaagccacagagttgtctgctaacacttcaaaagtctcaaatatactttagaggtgttagtgaagagaacaagttaaagattcttgacttagttaaaattgaagaaggctgttttcctcttaaatacttgggagtcaacctgcgtcctaccaaatggaaagcttcagattgtggagtgattttggacaagcttaacaagaatctcaactgttgggctagtaggaatctttccttagttggtcgtgtgcaattaatttactcgggtttgcttagaattagaattttttggatgagtatattcactataccctcaaaaatatcggctgccatagataagagttgtcgtgatttcctttggagaattaaccggaatagaagtaagcttcaccgagcctcttggaaaaaagtttgccttcccaaaaagcttggtggagttaggttccgagaaggtaaaaagtggaacaaggctctaatggcgaagttcctgcggacccttgttaacaaacaaggttgcttgtgggtcaaatggatcaattccatttatttgaagaaccgagatatttggagctaccataaaagctggatgttagctggtttttcaagaaattgttgtgccttcgtgataacatggataaaaccagattgaatcttgttgtgacaggtggaaaatttcatgaaaaaaagttttataccttgcaggtggaggagacaaaagcagagtatgcag

SEQ ID NO: 5664 - DNA, 707 bp, Cannabis sativa
aaaatttcaatgttagtgtctttcgatctgaatcactaaaacatatgaagtgtcactaaaaaataaattccatattttatacatatatttttttaaaaaaatatatatttgcatatagtcatgacacgcaattggataaacatatacccacatatctagtgcgtcactatatcttaaatttatatttaaatttaaaacaataaaaaagagcatgttactcaagaaaatttaataattaatttaatttttttcagtttaataaaatatgtaaaaaaaaaatcatttgtaataaaataattaattgataaagtaaagtaaaatatatttttttaacacattgagaatataaaaataccaaaaccctagcatcacagttgtataccctcatctctctttctctatctgtaaaatatcttcctaattttaaaaaaaaaaaaaaagcttttgatgagatctctctttgcttcccaatcaacagacgatggcctcccactgtgcacaacgacgacgatgacagccgcctccctctgcgcacgacgacgatgacagtcgcctcccactgcgcacgaggatgatgaacgaaggtctcctcccttcgattccctcatctctctttctctatctgtcttcgatttgtgcacgtagatggactccaacgtcgtctaccacgaacctctcgcccgagtgaagaacatcagtctgtttat

SEQ ID NO: 5665 - DNA, 1081 bp, Cannabis sativa
ctgggctctctttgaatgtggatttagttttgaatacattatcaaaatatagacttgtgtagattgatgtccatgatattgaatatacttgattttacttaattgggcagagaaagaagtcattctccttgaaggagtgtgcaatttcggtagctttggcgtttggattagttacaggagttcctgcattggatgtttttaacaatgcttatgctgttaaccaaccggtgcctgatatggctgtgttgatctctggaccaccaataaaggatccaggagcattgttaagatatgctctgcctattaacaataaagcaatcagggaagtgcagaaaccacttgaagatatcacagagagtcttaaggttgctggggtcaaagcacttgattctgttgagagggtaatgcattgttgtgatgataaggtttcaatatcttattgttgaaaagtcattgtaagtatatgtaataacagtgacttttaacttttcatgtagaatttgaagcaggcttctagatccctcaagcaagggaagactttgattatatcaggtttagctgaatcaaagaaggaacatggagttgaacttttaggtaagttagaagctggaatggatgagcttcagcagattgtggagagcaggactagggatgcagttgcacctaaacagaaagagctacttcaatatgttggagggtgagtatattaattaacatttcagattatggcatactgaagaattgcattttaagtttaaactgcaaaaatatgatcacttttgacagaagtccaatgaactggaactggtgtaaaagtattgcaccctttctatatgtagctgtgtttacgagtgcagctatctagttgatttgagcccaaaaaaacgcctgtcatttttcatggtggatgtaatttttgacagaaactagtgatgatagaagttagggtgctggtctctagtacctgtagtgtttcaagctgtcttttcgagcacagctgtctaaatgcgttgaattcaggaaaatgagtcataagataaacacctgagacttttgatgattgttagggtgcttgtctcaa

SEQ ID NO: 5666 - DNA, 1044 bp, Cannabis sativa
agaaagagaggtttttgttttttggtgttttgttttgatcagataactgaaaattgtggggtgtttctttttgtttggaaaacaagaaaatgaataggaaaagaaaaatggtaagttagtttaaagtgagaaagagaaaggggtttgatgagtttatgttgttatgtgtggttttgaacgtggcagatttgcgttttataataaaggcatagtgaaagatggcttacacctatgttatgtgttttttgtcttctaatatttaaataaatatactttttttgaaagcaataaccaaaagtatatttaggaattttgtactctgtattattgtgcaaattgaactattcaacttgttaaaaatggtcttttaattattcagataaattagttattttgtcaaattttatcatacgtatcaaataaaatgataatatgactgcttaattagttgttatgtatcagtaacatgtcaacgtcaaatgtataattaatttgatttttttaaatgcataacttttatttttattaatattaagttatacatgtgacacaattggctaagtagtcatgttattattttgtttgttacatgtgacaaaacttgatagaatgactaattaacaatagtgtgaatagttcaagaaccatttgtaatggcttaagaagttcatgggacataataatggatacgttataatttgggagcaaaaatcataaatagccacactaaaatcatttataactaaataatatcacacatactaaaggattatacattttaaagaataaaataatagctagtagtcatctagttaattgagttgtttatccatacgaagaacatgcacatttaatccatgtgtaaccacattcgccgactgatgtacatggatcagagagactcttgaaaattagaataacatacttattacatcatctaacaacggttctagatcactgaaaaataatatctcttatcaatagcgtacacaattgttaaaaggtcagaattaactatgttatacaacaaattttgaagaaaaa

SEQ ID NO: 5667 - DNA, 579 bp, Cannabis sativa
atctctattaaggattttaattcttatctccgcttatttcataagccaacaaatagcctaatgagagtggagacgggatgaagaatctcctaataaaaaaaataaaatttataataaattttttaatatataaaaatattaaactacgtaaaaattaaaatattatatattaattaccattcaataaattaattattatctgaaacacaacttaaaattcataacaaaagatactaatatactaaaaaaaatataaacataaattataaattatcaaatattactataaatataaaataaaatactaggcgagtcctgttggggcgaagagtgtaattctcgttccgccccatttaatatattcgggaacaaaaattaatttccatccctactttgttcccatttagacggagaatccttacccattagaggtgggtctctgcgggcccattccatgaagaaaatgtgcattctaaaagtccttttgtgtaaaataaataataataagaaaactaggactgttctattggagtggaggccctaagaatataagctgcccaactaatgtccagagcccac

SEQ ID NO: 5668 - DNA, 833 bp, Cannabis sativa
cctattaaatatatattaaaacaacgaactaaggtggtctaaataaatattttcataaataattactgtaatttaaaaacaaacaaacaagaaaattaaatgaaaaaggtttaatgcaactatacgtagacttccatatagccggcgtttggaactaatggtgcaaactttatgtagtatatcttacttatcattatcatctgttgtgaattgattaattagcattggtgtatgttccactacgataacctatatagtggcatgcaaacatagaggatattctagcttattatcattatatattattattcacgtaagagagaatatgggatataataatattgcctacctaataaggaaccctttcttgctttattaaatattttcattgtgtcagggatggtgcatcgtataaataaagcttactaaacagctgaaataatcatagtgggaaagccactacagtgagaattagaaaccttatttgcaactatatgtctctacattttgtaattaattagctcaataaaacgaaaccacaagttctgacggtgattaataagtaataacactgcatatatgcgccacttaagcagccatgttggacattaattatatagctttctgcgttcacgttctatcgctttccactaataaccaactatggtcataaactaattatgtagaattatacacaaatttgataattgatgtggcaaaaattttcaacaaaccatctttattcaaaaagtacttggcatatttgtgttcacatattattatcttatatatttctatatataccttttagaaaatattcaattgctaatttc

SEQ ID NO: 5669 - DNA, 822 bp, Cannabis sativa
acgcacacctgccactgtcaactgtctcttcgtgtaaggatgacgactatctccaaattgggtctcactctaatagcctatattatattgtatttatcccataagtagactttcttacacaaaacagaaccctaatgagaacgtgtccacgccgacccaccaacacattacttatatatatggcattaatccttcatacaaagagtgaggaattttagtgttcaaagaaccataaatgcattgtaaacttcatagccaaagaatttagcagcagtgtctcgtggactaaggcttattaatgcccaaatcacgtaaaaattagtgtctcattttcttctcaaacaaactttctttagcttagtatctatttaattcgatttctaaaaatcttggtattttaaatagtagtgatggattttttaataatacattttgggtatctaaatagttatacatatttttgtaattataactatttaagatgtaatttttaaaaattgaactaatttagtattaaactaataaacaatttatttaatggacatataaaataataaaaaatagaatatttaaattttatttttagtacgttaaattattatttttttttaaaaaaaaacttagagtattcccgtcaactctattccatttgtttaaatatctcatcaaaaccttacattttctttatgacgatacattaacttttttatatttttctctaaattatttaaatattatatctttatataaaataaataaaataaaaaataaaagatcgaaagattttttttttttatgaaatatgtttatttctccactatt

SEQ ID NO: 5670 - DNA, 684 bp, Cannabis sativa
gattttcatttgtaccaaattacatggtgtgcagtttgagggttcaatcaaactttttaaatttttatttttttttattttttttatttatattggaggagggggatttgaattcggaatctcttctttgtaagaaaaaatgtgaaattactaggctataatatgcctatgactatacactactacaaaattgagctttgaaaaagttttttttgaccctatgacgtcagttttgaagaaatttgtgaccgtcgctattccagggatcactaaagggggtgtgagataaccgtaaccataggattcctatgactatggttattatgaaaaaaatgtaaccatagggatccgataacaacggtttttatgtaataactgtaaccatagggatctcccatgacttgcatataactttagcatttcgtgtaatatctagtttttttaatttttatttaaaatatgattttattttcaaatatgttttttattaatatatattaattaagtataaattatatataataagcataagtaaaaattaaattgacaaattaaaaaaatatacatttacattactctaagtaaatgaattacactatgttcaaaaaaaagtaaataaattacactaatattctaaattactctaagtctttaaaagttatctaagaaaaaaaaaaaaaaaaa

SEQ ID NO: 5671 - DNA, 879 bp, Cannabis sativa
caaacgcaccctgtatttcttattcaaatatagcacgattagaatgatatgtatggctgtcacagagctatgttaaaacaaaagtgtattaatcaaatgtattgcccggctctatagtttcattacaattgtcaattacatattgaatttcttacctttattttagattaattttctcttttatatatatatatatataggaaattaggaacacctaatttgttcttatagtataagaacattttatagaccattgattaagttgaattttgaagatttatactaattattgtagagttgcgtgtatattattttaactagaaaaagtactctatattgtcagaacttttttaaaaagattgaagtcatctttacattttgtactattttctataaatataattataataaatattggactatttttttttttttttctaaaaagacaatattagttgaataataataatatgaatttagatcaagaaaataataaaatgaaaatttgagtttatatatattagttgtccaattaaaacatatcccaattatattgcaattttttcaaaaaaaaatatactaatatttattttgataccaaaataaaaaactctactgaatctttcctcaaactcttctcttttctcttttcaacttttaacctaaaatttctacctcttctagccgagggtagccaaggtgcatctctgacctccgacgtcggtcgccatgaagcccatcccgattcgacgacacagcagctcatgtcgtctccgagacggcaccatctccgacgaagaaagcatctaactcacctgaactgaagcttctagcgccgtttgtgttgaagatagctgaaaccgttacatggttgttagc

SEQ ID NO: 5672 - DNA, 953 bp, Cannabis sativa
aaactctaactaatactcctaacagatgggtataaatacatataaatatatacgttactctaccgccggaatcactaggagatttcctcaccgccaccacttctcttttcgttgaaggtgattaagaaaattggggtgaggagctggttttgagattaaaaattttattttaaaatggataataatttagggtaggagggagattaagagatgaaagagagttgatttttgggtttggagatgatttttggtggttataggcggagaagggaggtgaaaaatcaatgctaagaaaaaaagattaggttgaatgaatggggattgaatgaatggggaagaaggagatttcttatttaaaactcatgcaaagtggacacgacactcaatttcgtgctaattgaatcaaatggcacgacatggcagagaaatggggccaactttggtcgtgccaaattttcaacctgggaaaattcccgcccaactccaataatgcaattttgaaaaattaaaaacaaaattggtaccactttttagtgcctaaaacagtcatattgtgcctaacttacattttaatttaaaaaagaaaaataaaaaaaaatgtgtggcacgactttatatgtgccggccctaaatctttaatttctagacacgccaatatttcggcccaaagtgcatagtgcctatatctattatttcttgtagtaaagggcactagtggtgcttagaaccctcctatgtgttaatatcattatttgtccaattaagtatcaggtcctatataatttaatataataatttttaagaagtatcgttagtcaatcgcaacgtgacatgtcgagaaagtgctacgaaccactggtgtctaataacaatgttgtaaatttatttagtatggtcttcaaatagtttgctacggattagtgaatcacaaattgccaatggcatgaagagac

SEQ ID NO: 5673 - DNA, 519 bp, Cannabis sativa
acatataaatattattagttttatcaatagtgccctgatgggtctgttgccgttatgctccaactatattttccttttcatctgatcaatttcaactgctgttttcactgaattttttgaaattctgcctctgtaactactcccgcccaccatcccttatcgattccttccacaataaccactcctcacggcgttctcctcccactcccccctttccctaccttctccgtcaccatggatcctctcccaactgattttaattccacactttcactcactgagaaagaaagttccattgttaacctgcctgatttcccttctcatcaacctacatcacgatcccctcatgttctccttgctcgttttctaactggaaaaaccatctacaagcctcatttctatgaacaaatgtctggccattggaaaggaagattccctgccattataacagactacaactctgatatttttcacatctccttcggctgtgaaggtgacaaacgcagggtactcaataaa

SEQ ID NO: 5674 - DNA, 1193 bp, Cannabis sativa
ggtggtatatattgctagcttagtgtttaagctaatatatatgtaccaaatggattttgtcccattttatgttatcatgtactactagttttgctagcttggtttgatgtaatttaacttgtaatgattaaatatggttcaattaatttaataaaatacttaaacaggataaaatagctccttatataataatattacaaaaatctataatatactctcaaaatataaatgttacggtatattcttatctattttagtatatagaagttttttatcagaaaatttctatatcatatacgttatttaagactacttgtaaattttcaaaatattatttactaagtataagaaaacttaatcacaataaatatttgaactatacaactacaaaataaaatatttgaattttatttttaatattagaagctattcagaattttttaaaaatttgtaagtaattttacataattaaaatatacgcgattatgaataaaataagattaaaaaactttcttgaatgctacaatatatttataataaagtgatattttataaatgtccaaattgtacaattttgtaaattgtaataatggggtatgaaatgtgaatattcttaccccaagttgttattgatgtataagaatctcatgccatatcattatccaataaggtgaaaatgaaatgaagctaactttcttgacttatctaaattagtttctaattcaaatatgacatatttttgtttcttgaacacgaaaggtctatacacctatcttacatagagagattaataaaataatatgatggaaggaatagaataaaccgtccacatcacaccacataaaaaaattaatttgaaattctttacagtacagttataatttgcattttagcaaaattatacaatttgatatatattttacaatttacaatttaataattacagttcaaaccacaccgaaaaacacactgatcaaagtcttgtccaactgccctcattctccatttcagaaaaataaaaaacacagcatatgataattgacacaaactcttattttctttttattatttttagaaaaagaataataatattaacactcaaaatatcaaatatatatggtgatacctattgtttgtggaagttggtattagcaatacaaagaataagctagtgccatttatgtaagaaaatt

SEQ ID NO: 5675 - DNA, 1228 bp, Cannabis sativa
cacctcagctcacaccatgaagttagcagggcagattgggcagcgaccggtaacagtcctaattgacagcggggcaacccacaatttcgtgtctatggaaattgtgaatattgttggacttcccatcacagcaaccacttgttatggagtgttgttgggaacgggcggaaaggtgagaacggaaggggtctgtactcaggtggaacttgacttgggagcaattcgggttgtgactgattttctacccttagaacttggcggggcagacgtgattttgggaattaagtggctagagacccttggtaatatgcaagtcaattggcgcacaatggttatgaaatttgaagtggctggatcttgggtgacgctacagggagatcccagcctatgtaagtcaccgatttcgttgaaagcaatggtgttagccgtggaaaagggagccgaaggatattgggtccaattgggagaaatgaatgctactgaaaccgtcaatacgcagccgttacccacacgggtttctcaattgctcgaacaatatgaagatgtctttgagatgccctcaggacttcctcccgtccgtactcgggaacattcgattactttgaaaccggggacgggacccatctcggttcgcccatatcggtacgcccacattcaaaaggatgcgattgaacagatggtccgtgacatgtatcgagcgggtatcattcagcctagtacaagtcctttttcgagtcctgtattgttggtcaagaagaaagatggtagctggcgcttctgtgtcgactatcgggccctcaatcgagaaacagtggcggataagtttcccattcctgtgatcgaggaattgttagatgaactccatggtgccaaatacttctccaagctagatttaaagtcaggataccatcagattcgcatgtcagcccgagatgttgaaaaaacggcctttcgcactcatgacgggcattacgaattcttggtgatgccgttcggtctcacaaatgcaccggccacttttcaagctcttatgaatgaagtattcaaagatttttcacgggattgcgtgctggttttttttgatgatattcttatttacagtccttccttggacactcacatcgctcatttgggtttagttttgcagcgcctccgggatcacaagctatatgccaaccggaagaaatgtatatttgcccaaccacaagtggagtatctgagacatgtg

SEQ ID NO: 5676 - DNA, 1586 bp, Cannabis sativa
tgtagtcaagaatttgggatatgggataaggagtgacattcttgttttcttgctgcacagtagaaaaattagagttagcaagataacagtggtaatcatgcaaataagatggtttatttttggctctaataggtctggtatgaaactgatcaggcatttggttttgttgattattatcatcattatgtgcgtcactggtttgaggtaaaggatcgatgtcaggtgtttgttgctgattattagtgtattgagcatcctgttccaaatgatgttcttgctgcatacaattattaggaccagtaacatgatcacgagcatggttattagcagaaaaatctgtcacaccagtaggtgtaccagtaaaagtaacaccaggattagaaaattctatcacaccagtaggtaaaccagaaaaaaaaactgtagtattcataaagtatagagttattgttataaaaaggaaaaatagtttcatggaattcaacatctctagaacaaaaaatttatgagaattaagatttaataggttgtaagctttcgttccatgagggtatcccaaaaacacacaagggtgagctctaggagagaatttggttcttgatatagagggtgtggatgcataagcaagacatccaaaggctttcaaatgctcatactttggtggtttagattttagaatctcaaagggggaagcatttttcaaattgggtgtaggtgttctattaattaagtaggcagcagtagccacacactcatcccaatagtttagaggcacatgagattgaaaaagaagggccctagcaacattcaacaagtgttgatgttttctctcaacaagagagttttgttggggtctatggacacaagaatggtagtggataattccaagagaactaaataaattgggaaattgtaattccttggcattatccgatctcacacccttgatggttttgttgtattgggtcttgattaattggatgaaattgggaatggcaatttgagcttcagccttggttttaataaaatgaacccatgtatatctagagtgatcatcaacaatagtaataaaatatttatgcccccaaatggtaagattgttatatggtccccatatatcaatatgaatcaaatcaaaacattctttagcaatattgtgattagaaacaaaaggtagtttcctttacttagcataatggcaaatagaataatgaaaatgaggagaaggaacattttgaaattgcaaacttttattcaataaatgaattttaatacaagatggatgaccaagtatataatgccatatagtatcattagaaatcttagaatcagtagctaaagaaaaacaaaggggttggttttgtgtttaggggaattcagatggaagagtttgccaattcttttagccgtcccaatcagctgggtcttcatagtgtcctgaataacacaatgattagggtaaaaagtgaacacacatgaacctgagtcaagaagggaactaacagacagcaaatttaattgaaattctggtacatacaaaacatctccaagcacaagaatgagagacaatataacagtaccaaggc

SEQ ID NO: 5677 - DNA, 989 bp, Cannabis sativa
ttgtaatttttcaggaaacgaattttagtctctaccccatgacagcattaccgctttggccatccaatgatatgttttacattttacaaaacgacatgtcatttgttgcatcaaaacggctctctcatgtcctgtcgtttctttattgcattttttgtcgtttgatattaaaacctactgtcgtcctaacgacgaatggctttgtcataaaatttagacaaaaagcacaagttcgttcaaataataaatacacccttaatccttggtaattagttgctacattttgttatagtagtaatattttgaaaacattagtttctatatgcatgaatgctacgcaaatatgtaaagatgttgtaattaatcagtatcttgttcttgttcatgtacgtcaacacactggtatatctctcttcgtttatgctcgttaagtggtaggctctttctgcacagttccaattccataagctgtgtaagttaaacaagtagctttgacattgacataaatttattgaaaagtaaaaaccagtaattatcacctttgttgttgtattttggagtaatcaatctcaccaaccacaacagtctcttgatcccctgatgttgcaattatctcacccgactgccatgttaccaccaataaagccattttaatatatcttttcgttaaaatagtattctggttgcttttcccatatatgactaaaatacagaaccataatagttctaaatgaagggaaagaaacgcagaagtttgtgacagtaccggtccaacaagtgtagaatggccccatatcatataagaacaacttgaagcccgggctggtgactgaaatcacaaagaaaaaaattataatgttttcaactcttttctaggctaatcatcaattcaatttagatgatttattatgtagtgaatgcagtttttttatacacctgattatcagctgccctgaaaattggaaaagatcaaatcagtgcctgtgaac

SEQ ID NO: 5678 - DNA, 1533 bp, Cannabis sativa
ttattattattttatatataaaaaaaagtgatgtatgatataatataaaaattttatgtaaaataaaaaactaaaaattttgtgatatattttaaagattagagtagaaaaattaaaatatattttttaaattttaaatatcttaatattttacaacaaaatttttaaataacaaggtatcaaattttaataaagcaagttgctactacttgtgtctttttttttttttttggagaaaatataaattaaataggtaaattatttataataacaaagtatataggtgaaggtatattctccaatcaaaagcaagtttcatctaattctagagtaaatttagctaaattgtgagcaaccatattagttatactcttgatatgatgaataatattatctttagaaaataatgatagaagactagaaatatctataatttaatacttaaaagaagaaattatagacaaatgagttctcaaagcattagcaaacagcaaggcaacggtctcaacctgtgtatgagatctgcatatgaagggcccaattcaagttataaaatattactttcgcctccatcttatgagatgcaaatttcctactattagctttgagagagcagcaactacttgtccaacagcatcacagatcacaacaccaactctaataatatttcgatgagcatctaacgctgcacatgcatccacattcactttgggatcacctatagccgatggtgtccatggttctcgtacacaagggctagcagagagagccttggagtggcactttaggcaggatagtatttattttttttttatgaagaagaaaagaacttcattaatcgacataacaacaaattagtacaaaccaaaccccacgaagctccaaataaggcagctacacaaccaatccaaaactacttacatttgtaatctcaacaaataatcattctcatgctgagtcatgtttctattatttacattttataacctatactttattgtgttttttatatcattaacaatagaagaaatttttctagaatagccatcaaagatacatctattcctattaagccataagttgtacacaattgctgtaaggattgcaatgttaatgttctgcacctggttagaacttttcaaagaaatccaactaatccagccagtaaagcctaggggcaaactctaaagcccgactacgaaaaagccaaatctaaaactctacgagataaaccacaatcaaagaaaatgtgctcgtgagtctctaaatcatcaccacaaactggacataacaaagaatccagctcaatatgaaactgagccattttgtccccgtaacagctgagaattcaccacttgccaaagaacaaaacgatatttgagcagatttaaggatctccaaatagctttgtaatagttgacctagttttggcctaacaaactcttatataagcagttagttttgaatctttcagaagctctagctttcatgatctcaaagctcaaaattttttgtctcaatcgacacacttta

SEQ ID NO: 5679 - DNA, 1380 bp, Cannabis sativa
ctcttctgatattttcagtactaatgccttgattttaatttttcttgtatctcagaatctggtcaatttgtggcattgttggaagcctgctatccaatactaaagactgaatgggaagcatttgaaaaattgggcgatggctctttaaaagaggtatgaaagaatatcaatttttttattgtatagcatgttgtagaatgttcagaacttgtttaaagcaagcaaaactagtaaattttgatgaagtatattgcttgacttgtctgtttattgcagttcaagatagagatgctaaattgggattgcagaaaattcatagatcagctctctggtttcaaattcaaagcattgaatccaattattataatttgttccttttggaggttactagaggcctttaaatcatctgtgcatggagaagtcttacaggttggtgataccatttcccacttcctggtttcttcgttttgaaaggttttcctttgtaaatacttgactgtaattagtcacatgtttaacttcttagaataattgggtatatgtttctaatggttgcaggatgataacaaaaagtggctccaggacctgtttgtgtttttttcagcctctcagtttaatcatgttttcaaggatcatcgtctctacctcgtcacaaagttcaatgcttctcctctccaatttttgtgcaggcttttcacagaacaaggtgcttactgcgatttctgtttcaagtgtcatttatactgtcgtccaatgtcattttattttaatgtttattgcaaaggaaagtgcctgagttattttggtttagtgattttacatttgtcctctatactgatttgattttattagatcaatctgcattggatcctgtgtagctttaaaatcttctcaatagatttctctcttatgctgatgtacgattttgtattgcagatgttcctgttgcagctcaagttgagagtctccactgtttcacatatctttgttgtcagccagaaggaagattgcagttttgtggtcaacttcttgctgaatttccctcaattcttgttccactgtctagttttaaccaggtatctgtttgatctcttgtttctgtcggtcagtactgcctttgttttaatgttgtggaattaaaaagggttttttgttttaatcttcttttgtatgcatttaagctattatatatttttcattaactacaagtatcatatctggcgttggcacatatttttaaacctgaggtatcagatgtggtaaaggacatatgctactaatttaataagtgtgcccccatgtagttttttttataaaatttgtagaattttggtttttaacgtttgcccataactatataattatttgagtcttgtttaa

SEQ ID NO: 5680 - DNA, 644 bp, Cannabis sativa
atatatatatccgattgaagggtttcataaggcgcatgatcgatgctgagacaagtgatacaatatgcatcgtactttttgacaaattccatccaaaccactacacaatggtctctctttttacagcattgtataatacttgtaactaaactctcacccacctctcttcccgcatgtaattaaactaaccacaactaatccccttgcaacatgcaataagagtaacttcaaattgaccattttaccctcgaggttcacccaacgttggcatagattgtgggggcacaacgagaatcatatataaaaaaaaagttgcaaataaggaattggagattgagagaagagtgagcacatggatgaacatgagtgatgagatcatatgaccatgatatctttactcatcatagacgatcgtttttcacctccaacttgcaatgtcttctaccctaaccctcatagaatttttggaataagatgaatagagatctatctcaaaattaattgacaataaaagatattaggaaatttgtgattgtacaaatttgtggattttgaaaattggcacacaatggaggttaaaggagagagcagaagtattttttttagacgggcaacatgtgttgatactatgttaggatttttgg

SEQ ID NO: 5681 - DNA, 695 bp, Cannabis sativa
aggtcctgattgattctccaattaattcttccaggataattgggatctcattgggcaagacatcttttaagcggttacttcctttttacaatctgacaaatccttaaagagatttaacactactattttgacacttatccccaaaattaagtgtcctaatacggttagtgattttcggcccattgcttcctgtaatgtgatttacaaaatagctactaaattaagttgttcaagactcaaacttatccttccatacttagtagctcagaattaaggggaatttattaaaggcaggtttattgcccacaatattctgatttgccaggatcttattcgacattgtgggaggaaatcaacaaaagcaaggtgcataataaagttcgacttgcaaaaaacttatgagacaattaagtgggattttctagaagaaatgatgagggccattaaattttctgaaaagtttgtactgttggttatgaactgtgttaggaaacctagattctcactaatgtttaatcgttctttgcatggttatttcaaagaaaaaagaaggctccaacaagaggatcctatgtccccacttttttttattctaggaatggaatatttatcaagtatcatgcaacagacaggtactagatcagatttcaagttccatgaaaggtgtactgagatgaaattaaatcatctaagct

SEQ ID NO: 5682 - DNA, 1352 bp, Cannabis sativa
ttttttttttaagaaaaaattacaatagtgtttagtacactattatacgttgtatttgcatggtataattaatattatatttttatataggacgtactacataatattaacttgtattagtaattctctcaaaaaaaaaaacttgtattagtaaatattattttagatttgtgttttgtaaaagttattaattggattttttattttgttaaatgataaaatgaaccctatattttctaaaatggtacaaataggatattgagctcaattttcaacaattttattttttaatataactaattttaagacaatttctaacacgaacagatagagaaaatatcatcagttttgtcataacatctctaaatcagattattattattaagttttattttgacgaaaaatcaattcatggtcttatttgtaaaattttagaaaatatatgatctattttgtcatttaacaaaataaaaagtctaattaataatttttacaaaacacaaaatctaaaataatatttattctctaatatatacaagcataatttaatataatatgatataatacaatactatatcaaaaacaattactatgtgttatattaaaaaaattactatctaaaatcttcattacaaattgtaattaaggcaatgatgaaaaaaaaaagtcttagtcattatgtacattttcaatatattataggaagaaaagaattgtggcataagaacctaacattttgtgtttgtaaccaacataaatctaatctaatgatatttttagcggtagtataattgtaattttagtttagttttgtcaaaatagtctatgttaatattttaaacataacacaatatataaaatccaaattttaattagtcattgaatttgaataaaaacatgtagtataaattacttataaattttctttcaacaaatttaaagactaattttatatcgataaaaattataattttactaatatttgtatttatgaaaaaaattattaaatttatgttaattataaattcaaaattttaaatatttatttggcaaatatcctgtttattacaaattagtatatgtgatactttatatttacaaatataagtaaaaaaaatgttagccattaccttaggaatattatatatgtatatgtacacgtatttatatatcaaatatatgtggttgtcctcgttgaaaacaaaactttgcaactttttgaaggagctttcaagtgcacaaaatattttggtgatgataattcataaaaatattcagaatccttatcatccacgtacgtccggtgtgccatgtatttatctatgtggattcctttattaattttattttat

SEQ ID NO: 5683 - DNA, 800 bp, Cannabis sativa
cgagctttgatgtccatgtatatacatagattattactaattttcaaatcactatttattggtaaattatgaatttaccagacatcacttgtattttctcgaagtgacatattagtatgcaataaataaaaaatagcagcacaaaaaaatatattaaacctcaatgaatctatatagacttataattttcgtattaacaatttacaatcaaatgaattcttttattaaccaaccaatcacttcctttgatagttatatatgttgtcgcctttagtcattatataaaattaaaattacttgtttttttgtataactatatatatataaagatttattatcgaagcctgtccataaatttgttcacaaacgataataactttactcattcaataatttcattatgtaaatatataaatatatatatatttatatatagatttaccatccaaatttgccgttgcatgtcaaaatggtactttcaagagatatttagaagaggtcgaatgaacgaaactcaatgaccggtgaacaaatttatcagtatcttctaaatatcccttgaaaataccatattgaaatttttttcggttaatattcttctgtaaaaaaaagccaaaaataaatcgaaacaaaaattatgaaataataacacaaaaagccaacctccaattttaataaatgatggcaataagtctatgtttcttaaaaatgatgaatctgaaccatcattatcaaattgttcatgacctacaatttacatttggtaacgttgatttacaactcgttctctttcgtttgga

SEQ ID NO: 5684 - DNA, 897 bp, Cannabis sativa
cattgctaatcatcatgaaaattttgtgtgtgatttaatgatatttagcgatgtattttacactgttaagagctgacagttgtacttttctgttatgttagttacacaactaactaactttctgttagttagttgttagttttcggttatggcattgtcatgctttgttactgtaattcttgtatgaatattatacaactgtaatcaataatagatgagctctttcatgatatctttcatctttttcattcttctcttttctctattttctctcttttctctgttattagttttctttactgttcgttcattcttaagcttcaatgtccaggagattcaactctcctcacatggtatcagagccattgcctttgttggtggcaaatattgcgaactccagtcttggaacagctgcaaatggtggatcagctgctaatactgtcaatggtggaaatcaaatcggaagttgaaatagagaaccagatgagaactcacctgtgtattttaattactcgatttcaataaagcttaatgatcacaactttcttctttggaaacaacaggtcttagctgccattcgtggaaatcgattgctgaaattcattcaaaatgttgctcctcctccacaatttctcaacgatgcagatcaaaccaatggagagtaaaatcctacctttgtcaaatgggatgttcaagatcagttacttgtttcgtggcttctatcatcaatgacagaaagcttgttgaaaagaatggtagggtgtaacacagccaggcagatctggaattccctagaaaaatacttcactcgtcgtccaagattctggagtttcccaccaaactccaaaatcttcgaaaaggatctatgtctttgaatgaatatttgttgaaggttaa

SEQ ID NO: 5685 - DNA, 1020 bp, Cannabis sativa
tactgttaatgcgacaacggcgacaatgagtccgatttttgccacttcccaaacaaaggggctatgaagctgtaattgatgaagtgagctaggattgatgccacctttgatatgttttacaattttaactccatttttatcagcttttgctacatatacaattaaagtggataatataactgataacaatggtgcaatagccggcaaccaaaatagtttcttgttctttttaccctgcacaatttcacaaacacgtttattactatttgtgaattaatcagtacaatataaatcaattaaataattttaaataacatcattaaccaacaattgcaacaagttgtcacctttatgtgttattgatgtcctcattaattaagtaatcacccaattatatattaaatttatgtgctttaattagctatataattaggtaattctgtaaaatgctacacttgttcattaaaataataattaaacgagcattgttatttaatattttagattacttaactccgtgacatgtcattttttaattgcttagcaattctcgtattaataatttttttttttgaatgatcgtattaataattaaatccaagtagaattcaataataaaatgcaccatatcaattgcgaaacatatgatcccaattaatgttattaattacttaccagaaatctagtgaaaaagataaaacccaggaatgaaataccaatgatgaaattatatggactccactgcaataaaagaagcagaaaagcattaacaaatatataaataaagcattaaaatataaaaggaatatgaatttaaataaattattagaagaagggtacgaacacatacaggatggtgaattgaattccaaacagctttagtgacagagataatatctgttttgttggtaaagtgagtgagtccaagtaatcctttcagttgttgaagcccaataatgatggcggcaccagccataaatcccactattgcagcatgggaaagaaaatccaccagaaatc

SEQ ID NO: 5686 - DNA, 1525 bp, Cannabis sativa
ggtcatgcaggggaaacaacgactccaggggctatagtgagccacttcccacctatcacaccagtagtagtctctgaaggcattatccagcttacgacagcatagtacacaacaatggaagaacaaatgcgagctctacaggctaaatttgatggaagagagcgagttaggaccccatgtccaccccgggttccaaacccacgttcaggcaaccctcaagtaaccactacagctagatctcgtactgagcatcctaacaatactcatactcatagggaacgtgtgactgaataaggaggcttcaatataaatcagcttacacacgactctacgtgaaatagagagctagttgcccttgacaccagctgccaaactgaaagaagagaggagagactgtgagaagaagaccttgaatgatggaacccacattgttatccgtattttcacaaatatgacacgtggattttgatcaaggtaggctgaagagttattagctgaccaattttctcaatttatgctccaggaagataaaggcaccaactttgcaggaagaattttccatgatagggagttcccttactaatagcagcacggggggtatttgttactcaaagtctccctccattccaggaaccaaagccatctgctcccgagaaaaatatggattttcccagagaggccaaggcattttaagacacgttaaactgggctacgcctttagcccatggaagcctcgcctatacgtgtcagactacagacctggtgacttgatcttttttaagtacgacgtcagaggttgtctcccacgatatgctatcatacagagcatgcatgtccttgtgtaccggaccaaatgatccaatagctagggataagggaaattaaaaaaggagaagccctgggatgacacgcgtctaaagcccaggtcgtacgatctaacacccttaaatgccataggggaaacatgccgcctattgatccatatggtcaaatttcaccccaacgataatccatccaaggcagcacatgtaaggaagttggcctataaatacccctaaaaaagcacaagagaggaggaccctttttttcaaattgaagactcattcttcaccatcctaaacaagtacatttttgtaaccctacaatcaacttcagaatattcctactaagcttcctctttttcaagaaaaacacggtggaaaggagttatagtccattgtatacctatttgtataaacagttaccaaccgatgagtctaataaaatggactcgtggactaaggatagttaacgcctcaaccatgtaaaaacctcttatttcttatcttgttatttcttctattataacttttataagatttaaaaatatttagttgccaaaaaactcagtaaataactctcattactcttctactaatagttgctctcgtagtatttataccaggtcaagatctgtcgaaacttgataaggagggggttcccacgtggataggggggatttttccaataatcttaatgagatttt

SEQ ID NO: 5687 - DNA, 854 bp, Cannabis sativa
ttagactaaaatgctctttcttccttgtactactactccatacttgttttgttaattatattttaagatacttaccccaagagcatagtaggatccgttgtaccacactcggttttctttccttccttcaagaaatttcaaaacaatctggttgacacagaaaattggaaggcattaattagcattgagaagattgttccaataccaacatgtgtgaattttacaacaaaagacacaaatatacaaattctgtttacctgccccatcctatcccaatatccacgacaagttgctatgaatatttgacttgtaaacacttcatgcaaattggatatagactcaacaagctgtgaattcagcaacagcattctttcacgaacctcggcctccccatcttcttcctttgtttcctctaaaatccttttaagtcgtgtgtttcgattctcttgcatctgaaacaatcatgtttgtttacttctttgaaagataaccaaccacctatgatatttagttgttacgatgttaaaacaagcaacataaacgggaaagcaaagcttacattgtttataagcttccctactgttgcctgcaagtaatttttatattttgttctaagtagaactgtaactgcattcatttgctctccgaaattagactttttatctcccatgcttggcagaacagatgcccatgcctttaggatgtcctcaactttgcaatgaagaacatcaagaattctcttcacagtgttcaaaaatgttcccagctgataaaaatagtatactggttagttagtgaattgcatatctttatatgaatactattcttcagtgttcaactttatatgaatactg

SEQ ID NO: 5688 - DNA, 1784 bp, Cannabis sativa
cccaagtctatatgcaaatttttagctttcacacaaagatgaaattataatttattttttattaaaacaataatacacattgtaattatttataacatgtcatcgttagtatttatatgactgaataagattttagatacttttgaacatgtgttaaatttatattagtacacataatattattattttaaaaatataaaagttattttaaaatttataatttttattaaatattttattttttatttttttttataattttgtttaattttaaaatgaatttgaaaaataatttttaaatgataatattaggtgtactaatataagtatgtcacgtgtaataagcaactcataatgatagttaatcaaataatactttaaatttgttactagtttagtattttgaagagttttaccgttaaaatttaaacttagaaagttaaatataagtgaacaacagttaaagaaggtttagctgaaaaaaacttatatatatataaatatatataatcatgaaaacgaattaatttatattgaaagtgaatagtttatataataagaaggaataataatgtatatagaatttaggttagtggagaaagtggtcattttctagccaccaaagaaccacgtgtggcaaataagtaaagggacccaaaccaacccaacccaacccaacccaacttaggcctagcccataacataattttgtgtgttttgatagtcaacttgtattttgtcacatgacaaggaatcatcatcaccatcatcatcatcatcatcatcatcatcatataatataaatatatatagagagagaaaaagaaagagaagaaagagagataatgtgatatgtgttcataagttatgccacgactttcccaattatctattctctacatttcaccacacaaaaaggaaaagaaaaaaaacacaatacaaaacaaaaccaaaataaaataaaagctttgctttgacacacattttgtcgttttcctaattcctttttggctatgggaccaacccaaatgtgaccaatgttgttggggggccttttgtagagttggttgttggacatggacagctcaaaagtgctgccctctcttttgtcgtttaccacctcatttatgtcgttttgacaactccttattatgtatccaaaaagcaaaaggaagatatgggttggatatcatttttttttcttaaaaaaaaaaactattactaccaaaaacaaacaaatatgacccaatttatatcaccaaataaggaggggtcttttgtgtaatatattctttatgtccttaaaacatgcaaatcatttcacttgtgctatatataaatttagtcttaaaatgtgtcctactatcaatttcttcatacctaaaaagataagtctaaaacaacaacaacaagaacatgtattgtttaagttagcagtagaatattatgatgtaaaattaatcccacaaaaatggaagattaagacatttattattgatgttattattattatgaaaaaaacaaataaataaaaaaatttgtatcatcatcacatggattggggacaagacaagaagaaagttaatagagaataataaataataaaatgatagtagacagagaaggatttagtgagttgtgtttttgtcgagttttactgaattgttgacatgtcaattggctgcttccatggctgaatagccacatgtcatcttatacatcacaatcaacacccatgcgtgccaaactttcacacgtgttctaattcaattggaataaaaaaa

SEQ ID NO: 5689 - DNA, 572 bp, Cannabis sativa
aatatttacactcgtacaaaatatatatacatgagtgcagctgactatttaaattatagtttcagcaatataaattatttagattcttttattacgagcaagatgtctactgtaagtgttggatattttggttaaatataataaaaggaaaatcacaataatagcgctttatgcctatgatagtttttgtattatgagtacgtaaactttaatatagtgtaaaacataactattaattatgttttggggcttaaaaagatcttatagagtgtataaggttacccaagttaaaattatttggagatattgaagaggatatttacacagatattgtgtgtccaggcgacatatcgccttgaccaggcgacatgtctcttggaacacattgtatggggcatgcaaaaacgtaacgtggagtctgtaaagtgctccatgcaacatgtcgctaactagtgggcaacatgtcgcctgggagttcagataggattactaaaaaatgaaaaataaatcattgttaaatattccacgcgacatgtcacctggtagaaggtgacatgtcacctggtagtagg

SEQ ID NO: 5690 - DNA, 1413 bp, Cannabis sativa
ccccgtgtcagccaccacatcctctgcatccatatttgctaggtctcatgaacctgtcacagcaaaggcagaaactgcagaaggattgaaacccaatgttgggtttaacacacagaacaatagtattggtgggatcaggccaagacctccatttccaattcatcaaggccctacgattcaccctggtatgaatggatataacggctttaatcttgccgctcagatgggaaaactaatgggaccacactccggaccaccaggttttaacatccaatcgtctcaaatgatcgatacaagctctagaaatactaataaagctaatcccgcaactgggagcagcttaactaccgaagaaactaataaattgtcagaaaatcgaactacaataaattctagcaatccactgccaaaccctgggagtgaggcaacaacaccgtcgatgtcagggtttcatccaaggccatcttggcaaggtttctcgccacagctaagacctgattctggattgtcaacgcaacagaagtcagattcagttccaccagatcttaatgtcagatttcagtcaccagggtctcctagttctagcagagttgattcaacacaaccagatttagcattgcagctttgagaataattgagggttttttttatatttcttttttcctttttctttttcttgtttgtcattctctttaatttagttaaccatagaccggtgggttcatgatttgttgctccaagtgacttgaggccaatagaaaatggtctgtgtcagaagccgagttgaaccacacctaacattattgtattagattaggttgatcatgtacagattaatgtattctaattttaggtccacaagtaaagaagttctcatttgtaccattataaactatgatcataagaatttgttgactaatgagctaagataagatgtttttttaagttagaaattctattttgtttactttaaaagaaatataattttgattttttattaaggtatttcttcttatgccattcctttggagctaaatatggtggcaaaaagaaaaagaaaatgttaattctaagtattctctcataaaacatatatttttaaaaatattctttttatataatattatgacttaaagtttttattttaaaaatatacttttaaagttttaaaattataaaaatacactttacttagcaaaaagtaagaaaataactaaaaaacaactaaaaaccaacctcaccaaaactataaataaactataaaataattagaaaaataactttaagagacagaaagagaggttggggtacctaggttttaggggttggggaggtgggaaatggccttcgtttaggcggtggatgatcgaagttggtccctccggctctggtaggagcagggagccgcaaggt

SEQ ID NO: 5691 - DNA, 1141 bp, Cannabis sativa
aaaaaaaatccttcaaactcggatttaaacttagttatgcatgtcaaaaagatccatttagttggaatgggttgagctctgatccgaaacattcgaatacttattgaatctcgaatcggatctgctttgccccacctatttttttttttccaaattagaactgatccgatccgatgtcaatatattaaaaaaaaagtattcaagactcagactctcgactcggaccggacccgtccggaatctaaacccaaacctaggacttaggcccagacttgggacccgaacttgagacaatacccaaacccggacctggacccgaacttgggacccaaacccgaacttagggcccgaacctgagacccgaacctggacccgaacccaaactcgggacctggacccgggactcgagacccagacccagacctaaacctagaccatagacccaaaccttgacccggacccagacctagaacccgaacctagacccgagacccagatccagacccgagacccaaacttgaatccaaactcagagcaagacctggatatgagacctcagacctgaacccagaccccgactcgagacctgagacccaaacttgaactagacccaaacttgggacccggacacgaaccttgaccaagacccgaacctagacccaaactcgggaaccaagacccagacctggtcttggacccaaacctatacccaaacccgggacccaaactcagacctgaaccctggacccaaacctgaaattgaacctaaaattgaacccaaacctgtagttggtgttggggacccaaacccgacctgcagttggtgttagggactcgaaccagacctgaaacccgagactcagacccaaaccctaactcggacctagacccagacccggacctagacctggatccaaaccagacacggatctggaccggacctagatccggacccgacccgacctgtagttggtgttggggacccagacctaacccgtagttggtgttgaggattcgaacttgacctgtagttggtgtaggggacccaaaccggacccagacccaggacccggacttagacctagacctggaccctacccgtagttgggttggagtcgagtttattgaaaatatattataa

SEQ ID NO: 5692 - DNA, 1997 bp, Cannabis sativa
cttgctacacaaccctaagccttttatgacttaatgactttccctttggcttctttattcttgagaaaccaacaatccttcttgtagtgccctttcctaccatagttttgacacttaaaattcttcttacttctagatcttgatctactcctagtttgactcccattagagccatgttccgttgatctatcccttgtcatcaataaagcttcaagttcatgcgaccttctcagtctgtcctccttggtcttgcaccgacattcttattcaagaattgtaggtgcaacatcatcaaagactagaacttatatattattagttaagttgatgatgagttgatcatacgaatcaggtagactttgaagtagaattttggtacgttcactcgcctctatagtatgcctcatagttgtgagctgtgaaaacatagtgttaagggtgttgaacttgattccatcatccaaagggtgtaaagtttccacttcaagaagattttgttgtgtagtgatttttcctcttacaattttgtgagagtgtcccaaattcttttgctattcttttctctgctacgcttgacaaaactctgtcaacaagtgctaagtgcagattgacaatagcattgccatccatctcgttccaattatagtcgtcagcgatctccgtaggtctttctccaatttccaccaagcagttgtcttttctcaacactactttaattctcattttccacaatgagaaattattcttgttgaacttttctacctcgtactttgtctccattattgctaatgcttcttttccactaactgaatcttactacagcacgaaaaatcagctgtaatatcctagaaaagttaatcatgattatttgagcatattttatgagatatgaaatataatatgtattaaaatgattaacgagtaagattatagtcttactaaaattagtaagagaattaagcctattttagaaaatgggtaaattaaacgtaatttattaattacgaagatttattagattacatgggtaatatatatgctatatgtgaaataaattattttgagtccaaatctagtgcagaatcaaaatataaggctatggcaatatttttgtgtaagataatgtggatgtataagcttttgactgaagtaggatttaagacttcagtacaagtaaaattatcgtgcaataatcaagctgctctttatattgcctcaaaccccgtgttccatgagcaaactaagcacattgagattgattgttattttatttgtgagaagattcaacaaagcttgatctctatgtgaaaactggagaacaaataggagacatttttacaaaggctttgaatagggtgcgagttgattacctttgtaacaacttgggcatgattagcatttatgctctaactttagggagagtgttaaaatattagctataaattagctaaaaaataaggtcaattgtaattatttcttttcttattttctctgtataaatatgtgccatttacatgaataatgcatacaattaatttaccattttctataattatttagctaggtataaataatatttcttgttactgttataactaaccctatcgagagcatattaaatcttacatcgaatatctttttcttcttctttgtttgttctttgtatctggattatcttgcaggaactccattagatatgacttttggttctatacaagattgaagctaagatgaaattactaaagagagttcagctcgtgtcttaattgctcatatttaaaaggagttcagatcaagagattgttgaaaggatttcaacaataacacaaatggatcttgtgttgaattaagggatttaggtttagggtaatttttcactgcttttctataaaggaatgtgattttgcaatttgtaatatagattagtgattgtaaaataaattttttgatttagtatagttattatcttagttttgggaaacttaaggagtagatgg

SEQ ID NO: 5693 - DNA, 1740 bp, Cannabis sativa
ggcctttcaaaataagaaaaaagagttgaataaacttgaagagtttaattttgaagctgcttggaagaacttctaaagagtggagagagagaaattgatgttttagattttaaagataaaaaatattgggcctcaaggtccaaattgtccatgcttaaggttggggatcgcaatacctcttacttttataattctgcttctgctcgtaaaaaaaagaactctattgagggtatttgggatggaaagaggtgttgaacaagattttattaattattttgataatctcttcacttctgattctctatctcatagtgaccttcaaagggtcttgatcttgttcatgttaaagtttccactgctatatttgattatctcttgcaaccttttgtgaaagatgatgtgaagcatgctctttttcaaatgaatccttataagagttcatgtattaatgatttttatcagaaattttaggacttggttggggtagatgtgttgcggtcatggggttcttaatgggtgaggggtctttggcctgtattaaaatggtactactatttgcttaattcctaaagttaataaatctttatggattatggattatggatttttggctcattagtttgcgtaatgtggtctacaaaattattactaaaatgatgactaaccgactttgtggtgtgttgagtgatttaattttgaaagaacaaagtgcttttatcctgggtaggctcatcactgataatgctaagattggctttgagtatctaaactttaccaaacatcacaagaaggggatgaaaggtttcttggcactcaaagcggatatagctaaagcctatgatagagtagagtggacttttcttgtgggaatcatgtgtcggttgggcttcctcgagctatgggtttcccttgtgtttcattgtatttcttttgttcgctactacattaatgttaatggtcaaaaattgggggatatcacttctataagaggtattcgtcaaagagatcatttgtctccttttttgtttcttatttgggcggaagggctttcatcagtgtttaaacatgagagtatagttaggggtattcaaggcttaccttgtgggagaagagtgtgtattgtgcctcaccttttatttgtcgatgataacttcttcttttaattagaagtgtctcgggatatatatgtgctcgtttttgtgagattatggattggtatgaatcgacttctgaacagtttgtgaatttatctaagtcttctttttgtttctctcttggaattaataggggcttggaagatgatttggctactttgttgggtatccagagagttttgtgctatgagaatatttagggctttcttgttttatgggttgaagtatatccaacttgttttagtctattagagacaagaattggaaaaaattatttggttggaaatcaaagaattttttagctgtgggtcgggtggtgctccttaaatcatttgttcaggctatacagacctatgctatgaacttgtttcttcttcttgtgaaattaatcgaagaactacattatctttgcgcccatttctggtggggtgggaatgataataatagaaatatgcattggtgtatttgggagagattgtattggcgtaagtctgatggtggtatgggttttcgaggtatttttgtgtttaataaagctttattggataaaaaaagcttgtcatctttattctgttcttgattcatt

SEQ ID NO: 5694 - DNA, 1018 bp, Cannabis sativa
tgggatattttgtatctaccaaaccactgaaacagacttttcaagtgagttagctcataaaaaagtaagtctgtatcagaaatttttgttcgaatctcaaattatatattgtataatatataaaccctaaattaaaaaaccaaacgagtaaaacaaataaaaatcattccatcggtaacctttgcagtaatagtgtgaaaaaactcgagcatttcatcttgattttaacaaaggcccaaatccaaaccaccttaggtgtaacaacaaagcaaatccaatacaacaaaagaagaaactatagtccaaaaatcgctattaattattagccgtatcatcataacaaaagaaggtaattacaggcataaagtttctataaataactttttatttattaatttattatataattccaacaataaatatataaatataaatgatcaaatgtggggcccatacagcgtggcaattcaaggttggcttacttgtaccaactatccagctagatcaccaagtttttgtttcaaataacagttatcttcttcacttcaactataatatcccaaccaactctctctctctctctcttcaatttactctttctttctttgctttggaatttattgaaatttttattcttcttattattattatcaatcactacctttttattttatttatttatttttgataagttcaaaggactttcttttcttccatttttctctattagctttttctaagacacgttatggcagaggaagagcccaagaagattgaatcagaatctccgtcgcagcctccaccagctacggttccgcctccggctccggctccagtaccggaagagaaggccaccactgaagaagctcccaaagatgaaacccaggagaaagctgtgattccaccaccttcttctgaggacaagcctgatgattccaaagctcttgttgttgttgacagtatagagactagtaattcttctaacttcaactcttactttcttatatgtttgttgtct

SEQ ID NO: 5695 - DNA, 827 bp, Cannabis sativa
caatgcacttaaaattagattttttattcttttacatttttaccaattatgtattttacaagtttttcacttattttctgttttagaaaaaaaaattaaaaacaacgtgaaaataatttttttttcttaaaataagattccctacttttgtaaaaagataaaaattaaaatccgtaataatgttaaaaaattggagatccttaaaaatatagaagttgtttggctgtgttttttagattttagtttttagaattttattttcaaaagtaaaagcaaaaaataatattttatcattttaaaaatttaatggtgtttgactcaagttttttaaaactatttttagatttttctttacaggaaaaaataatattctacaccatactatgacataaacccatctaatcccaaacaaaatcttgaaactaaacttgaacccagaccccgacctgaatccggaccacgaccaagacctcgatgatattttattcaagatttataatattaaaaaaaagtttacttgaaatagttatcattcttcgggtcttggtctgggtcaggttgggatccggggtcagggcccagtgtcggggctctaggtccaggtcaagtctgggtctagggtctagggtccgagtgtccaagtctgggtctaagccggggttcgaggtccaagatctgagctcggttcaggtcagggttcgagtccgagtcgggtctaagttcaggtttggggttcggggtccgaaactggagtccaagtttgggtttggagtccagggtttgggtccaagtcggggtcggggtccaaatccgagtccgggtctagt

SEQ ID NO: 5696 - DNA, 608 bp, Cannabis sativa
  modified_base (283)..(292): a, c, t, g, unknown or other
atttacatctcaaaaatttttaaatgcacactttaataatttttattttatataaaatttacatctttaattgtactaattttttttttaacttttttcttcccattcatattcttaaaaaatatacttatcaaataaattatattttaaaaattatgacaaaaaatatatatacatgagttagaaaaaattatgaaatggaaatcaaaataagtactgaaattaacataaaataatgtgagaaaaaaattaaaaaaaatatattaagagtaatttttaaaannnnnnnnnntttatattttttttaataatagggtatatttataattttatagagtgagaatagaattctccttaaaaataaaaagatttactcggtgtgagatattacatcgtgagaaaccttagatgttgtcggattaaaggatcatcaataagggtgttttagtgcgttatagattcttatccaagacttgtatcatttaacgatgttatatgaatcgctagaaacatgtataatgtatagctaacctaataacaaaatttctataaaaaaaccagaaaatgctacctcgagataaaaaaaattcagccattacaattcaaat

SEQ ID NO: 5697 - DNA, 687 bp, Cannabis sativa
accaagactcgagccctggaactgggattgggccttaagactcgaccctagaccgagacttggacctaggacctgcattgggaacctggacccaaactggaaccagaccaggacccgagactgggatccaaatctagacttggggctggggccaaactcatagacgatgtcaagatccaggacccaggcccaaacttgaacccaaacctggaaccagactgggatctagacacggactcggactaagactcaaaccccaacctgaacacagacttgaactcagatccagaattcgaatcaaaatcgacacgagacaatgaccgagagcaggacctggacatgggacaagaactggacataaaccttgaatgggacctgggccaagacatgggaccttggaactgaacttggccgggacccaaaacaggaccgggacctagacccagactgagaaccagacctagacactgaccgagactcgagacgtaggacccagaaagggaagcagatcttgacccggacccagacttggaaccgaacgcagacaccgaatcaaaacttggacctagatcgggacaaaacctatacccataactgaaccaaaaatgggaccccaactcgggacctgaactcgaacccaaacctggacctgcacccaaatcgggatctgaacccagaaccagtacc

SEQ ID NO: 5698 - DNA, 2185 bp, Cannabis sativa
agggcataaaacccaacagttgagccaccacctttggcattgtaattgctatttattgaactagtaacaaatcttgaagaactggctgagagattggctaagggcttagatgtgtgatcgccaatagtcaagtgtctctccaaactactttcatgagtgagaagtagagactgtatggattcaaatgaaagatcgtcaacaagactagtaacatgaacaaccactgggtcgtattctgatcctagaccattgagtaggtgcatgatgagatcactctcgtctatgggatggccatctatgattaaagaatcactaagaaccttggccttgtcgaagtaatcagcaatcgacaggttgcttttctgaatcgccgagagttgggatttgatctgaagtaactgagctttagattgagaagagaatctctgatctagagctctccagattgtataagacaaaagatgattcacaagcgatccaagaatcgattcaatcattgatgatcgaagccaactaagaaatagctaatcctttcatttccaggttgtgaactctggataagtagcaccattgactagtctttctgggggagcaactccggtgaacaaaagatcatcaaggtcatgcccaatgacgctgggaacaacttgagatttctaggccaggaagttagagcgatcgagcttcactgttagtaaagaattgagagaattctgaaatggattccaggtctgttgaggaggagcatagccagagctttgcccctgagttttgagtagccgaacgaggtggatttttgagaatttgaggatccttatgagacttgcgtcaatggcttcctaataccatgtatgaacctatcgataaaacactatctagaaataattgaagcgaaggtctctaaggcttgtaaaggttaagaccttagaggagaaagcctttatttatggagagtgagtacagaaaattgtaacaaactaacagagagaagcaacaagaattacaacaaaattagtttgacagagttagttacaaaacagtgataactaacataactaattaagctgtaaaagttagttggttgtcaaataagcacaaatatgaatatatcacttaataacggaagaaagaaccattaactaatattaactcatgaaacaatatcagacaatatccatcaaatctataaattgagaatttaactcataatctctaaacacaaatctatgattaaactagacacaattaaatttataagaaaacaagggaagaataggaaactagttggaaactatcacaaatcatccacactcgttctaagtttctttttcttgtatttctaggattctattatgtctatctcctctcaaaattgcgacccaccttttattagaagagagttttatacaaattataattaatacaattaaaacaatatacaataatttaaaaactaaaaaggcgtttggttcgaggtgttcaaaatatttgattataggacatattgtgaaagagaatatgattgtagggaaacgtgtaaactgtgtttagctgtatagggtaatatctaatcatattctcactaattgaattacattgtttgattgagtacataaattttatatattattttaaataaattaataaattaaaataaattaaaataattttttttatttttttatttaatgttaattatacataaacacataaaataataattcattaatgaaatatattaattaattagtagatattaaatttctttatatttttatgaattcaaatgaacattttcatatattctattactatgttatttatgattgtttagtatgccatttatatacaacatcataaaatttaaagcagacatatgtcattgccaataatataaaaataactagtttcaaaagaaaaaaaataatctcacagaataagtatacaatgaaaggaaataattcaagtgcacttttttttaaggtgtgaacattatcctcgtaaggatagttatattactagggcctgtttggtacacatgactggattgaattagatagactaatttgtttagtctagtgtttaggcatgctggatgtctggataactaatccagctaatcccatctgtctagaattatttaggtcatctaacagggtaggattaataatcccatacatgtgag

SEQ ID NO: 5699 - DNA, 524 bp, Cannabis sativa
aaaaaatcgattaaataagaaaaataatgttgaaaataaattaagggcatctatgcaaaattagaaagtgaactaacattgtcctctaacaaggattataattcgtcataaaactatgatcctaaagaatgcaaagaccaaagtgaaacaattagattctaaaaaattgataccacttgaattactacgaaactccctataaaaatatcatagtatttttatatattaaaagtggctatttaactgttttattagtttaataaaatattttaagaatattccgttaaatataacagatgttgttaataggattaattttttataaatatatataaataatatattatttgtttttggtttcctttcaattcgatctgaagcagccgtggtgtgcggctgggttgaacgactttggtcaagcgtgatttcctaacaccattgttatttgatacattgtaacaacaatcttctcttagatttctaacaatggcctaatttctaagttttttaatgataatatggac

SEQ ID NO: 5700 - DNA, 1719 bp, Cannabis sativa
ggacccgagaccgaaccgggacctgggacccggaccgggacctgggacccgggaccggaccaggacccgagaccagatcgggacccgagattggactgaactggggctgggacccagaaccggacccgagacatcaaaaagagtgcattatataataatatactaatgatgtcattttttttagaaatactaatgatgtatttaataaattatataatgatattttaatgtcgtttaaattagttaataaaaatattaaacttaacaagtttataatatgatatatatataattattataataatattattttatatgtattgagatttctcaaacattattatttaaaatttattaaatattatatttataaatattatatatttatgtttttttagaaagttttcactattattataaatatttatttacaacaatagcaaaaatatgaaaggggatttcacctaatcaacaaaagtcttaatccaactctaaagtatgttttgacaaaccatgagcaacatagttagcattcctcctaacatgaaaaataataacttagggaaaaggaataaaaaacaacaaatatctaaaattaaattcaaaaagcaagataaatccttagatgtagaattcaaagaatcagagactcgtaccgcatttgtttcgatatggatgatatgtaattgttcttgcagtgcccaattaaggctatagaaaagggctttagcttctatttcatctaaacaaaaacatccttgtactaactttgaaaggacagtgattacatggccatggtgatctcgaacaatcgcacccatagccaattttttgatgcagagtccaggaccgcatcaatattaagctttagccctacgtcgtttggtggctttcatggaatacctttagttgggttactggttgttgtcatagtctgaataggaacatgatcactcgcaatactcccatgttttgaatgtcaatgagatgagtaatatttctccatatagtttagagcaaaagcagtggtgtgtgctccttctgttttagttttaccatgtaaattttatttctctctatccatattgatcgcctacatggtacacataataaactcaaaattagtttgagaatgtaaagaagaaagggggattagataatcaccattatacatctgttgagctaaacaatggtgaaacttgtacgtttccaaactaatctagcatgtggacattggaagagagcatgcccaattgattcctatacatttgtgcacatcgagaaagcagcagagtcgataactcttttgccagtggagactaccataacataacaagagggaaccttcaccttgaaaattttctcagtatcctcaatacattaaaaaaataatttggaacaactaaaaacaaccgttaaaaaatataaaaaataagtatataatactaaacaccgaatatcacatacagaataacaaaatatatatttaacaaaatcaagaagtgatgaacaaaattccaaattgatatttgagactacacatgcacaaataaaaaaaaataaaaactgaaaaagaagcttaagaaactgaatttttatttgaagatgaaatgagaagagcaagaactaatggcaaccacatttgaaaaaaaaaaacgtgaatcaatctttaaaacaaatgaagagaaaaattggaaaaaaaaaaaaggagcttaagaa

SEQ ID NO: 5701 - DNA, 958 bp, Cannabis sativa
tcagctaccccgtcttctcgttggcgggccagagtttgagcattagcaacaaaacaattcggaactggatcatcatctcttaaccacactccgtatttgggaacctgaccgcctgtgatactaacctccattgccactgccttatcacaccccaattgctcatgtccccaatgaccacactgaaagcagagaagtggtagtttatcaaatttgagttgtacccaccgtttaccaccatccaccggaatgtatcgcccaacaaaaagtgcgctcgtaattggaaagccaatcttcacacgaacataaccattcaagaagatttgttgaggattattccaaatgatatcttcaacatcccctgccatacaacctaatctcttaacattgttaactgtaaaagtcttaaggggaaatcccctcatcttaacccataaagaaatcttatccaacctcgcatctctccaatgtccactctctggccattcttcaagtaccaacactcccctattaaaaatccaaggttgcttctcaagtattcttttggcatcacttctactattaaaagagactccaaagtaaagatacttgttatcttcatccataattttcactttccattcccccactgatttccacatcctggtaaaaatagttcggaacaaccccaaactcatactctgtttcgaaacaattctaccaatcaaagacttttccccaaactcagacacttgttcttcattcacctcccagtcatcttcttgctccatgcctagcttatcagtcaagttcacaatctcatcaacagtactatccgccatcatcgtagccatgaacacacacatcacataaaaatcaaacatagtatagagtcacaaggaccattaactgtcatacggggtcacagagaccattttccattatcctataactttcattcctaatatttcaaattgatgta

SEQ ID NO: 5702 - DNA, 628 bp, Cannabis sativa
ccaaatgtttgatgattgaggtcttactattctcttagagacaattcaattatgtaggaaggtgcaccccacctatatttattatttaatcaaaacacaccatatattaattattcccatttcgatcagccacccaaaatcatttaataattatttaattaataataacacactggtattacatcattcaccttctattgattgggagatcaaaagggaagaatctagattcttgtttctatatggtaattaataatactatacacgaatatataattatataacaattattattaatacacatcatcataaaatatcttcaaattcatatcatacacataatttttcgatatgtcatatatagttacttactttcgattcattttcaaccacaacaatgggattagatagagagggaacataaaatagtgggagtattttaattatatatcttgtaagcctttttgtgttaaatcatggataccttttatttttatagctaggaaatcatatgaatatactatttatctttttctaactttaatatttgaagacgagaggagatgataagataataataactttatgttggataatgagctgagttgccggttcattgtgaacaaca

SEQ ID NO: 5703 - DNA, 2854 bp, Cannabis sativa
ggatcaatatggtgtgcttaagatgtgtggaatgcctataatgagtattgaaaattgaatttcttagaattattgaatttcttgcttgataaatgtgtctctaagatgatccctaatagttgtaccattttggtgtattttgtgtgaagaggacaaggaacctagacccaattttggacttagacacaggatccggactccggacttggatctagatccggactcgagaatcggacccaaacccagacctggacctcggaccctggatttgaatcgaactcgaattctgacctaggactcgggacttggacccaaactcgggacccgaactagtacctggacctatgacctggggcgccgaacttggacccgaacctagtactcaaaacccaaataaaattaaaattctgggtcagatcagatgtgatccgaataagtcgagtcagatctgatccgattcgagtatttgataaagtggagcggggcgtagcggatcattgcatgatttggatcaggtcaattcatagccggatcagatccaatccgatctaaatacattcctaattattatggaatattactaacgatttataaagcgttacctctaagtggtactaccaactgccacctcatagcaatggcttttacaaacatataaaaaattaggggtgttcattaaatagtcgttccaatccaatccgcacgatctaatccaatctaatctacaaagtgcaaatatccgcacttgtgcgtattggattggattggattgaaaaattcaaaatctgcacttgtgcatattggatgttaattgacatataaaagtaatcgatccaatccagtctacatatatttattacaaaaatttaaaaattatatatacaattaacattttaatgtaaaaaaataatattttaaaagtctaatacatataataaaattatattttaaaacttaatagatcaaatgtatattctgttcttatatataattttttttgttctacatacaatttaaaacaaaatttaatatttctttatacatacaatttttttcttcctttaaatttgttatttgttattttatttattttaatttgttgttggagacataaataacaataatttattttattttattgctacttatgtgaaaaaaaaattgtttttcataaataatatataatttagtttaaaaagtaaccaatctaaaagaactgatccaatccacactttggcggattgaattaaatttgagctattgtgcggattggattgaatccaaaatataaaatctgtacttgggtggtgtttggtttggtggaatggaatgataattgtaatggtaatagtaatgtaatggaataagaattgtaattcgaattgattgttatgtttggtttgttgttggaattaatatttgaatagataataaattgacaaaattatttctactttagtaagaaaaaatataaagtaagagtaagatagtcattttaagtaactgtaacgtggattcatgaggtataggagtgtaattacttttcatacaagtgatataatagtgattacaatggaatgtcattacaagagtttaaaggcaaaccaaatattagaatcgtaatcatgattctattacaatgttgattacaaacagtgatgtgatactgcaaatcgaatacactatgagcaaaataatataaatttgattgaatgaacacccctatataaatgtttgatttaagaaaatgggattacctatatcagtctagatacttaactcaatgagcttatctatcttactaataggtaaagcaccttaatgattaatgaatttttaacaatcaagataattaggactttgaaggagttatgttttaaatatagataattatatatcacacatcatttcaaataaagattgacatttcaaataaaccaacaacggatcaattttctcaatttattgtgttgatttttgattaaattctgtgatctcttccagagggagcgattatggtcagatatacccctacacacacataaggtacaatcctgatcattcaagatgatgtattacagtaaaatatttaatcattaataaacggtcaaaatctttaaagttcgtatgagaatgtatctttataaaactctggttgatatattggcccaacagagacaaaaaattacacaaagcatctcaatataaatgatcaccagaaacgccccaaatgaaataatggttaaaaggcaataaataatggttttgagagactatttaatggtatttgaaaatcataaatttgaacgcaccaaatgaaaaatcagactcgaggcacaaaaatcagcatgatgcctcataatacagatcatattcaatgatgaagagtataaaaatcattatgaaaggacataaacctctttatctttgcctcctaaatcatcccaaacaagagcaatgtaaactatttcatttgtgttgccgcatattaaacagccagaataagctttctattataaacttttcatttaaataataattgtactttatttaaaagaaaaaaaaatcaaaatgaaaacaacacacgggatatcagcaagtagcaactatgaacattagttttaatggtcttaagacacgttagtataactaacagagaaatgaaaattgccataactgcaaaatcacatatttgatattcttttttatcctttcctattggcttagctcatttcggaaacatagtaaaaaaaaaacattacatctttatggaaaacgtccacaaccaaaacaacaatcaaaaacccaacaatttttttaacagtcagagctgtacagtttttttttttttttt

SEQ ID NO: 5704 - DNA, 607 bp, Cannabis sativa
attgaagagttgtaaataaaacatacttattattttaaactattttggtgtagattttttttcagttctccaatcgcagaagtagttgctctactggtaggtttgtgttgggttccagacgtgagactaccagttgaatgggtcttcttagattcactatcttatttggtcttagctttggagggtcagacagtgtatatggacgaattgagagttatttttttttttttttttatattaaaattttactatctagatattttagggcatctctctcatatcagtcgcaattttaatgttgaagcatacccttaagatagactataaattttcttgaatggaagaaacctccatctttgtgtcttttatttaaaaaaagaaaactaatataatctcaataatattacactcgaatccaatacaatatattatccatactaaaacttcatagggttcatcatcatgtggctaatatggtatacataacatacttgacctatacaattacctttcttaattaaattaaccacacatgttcaattgtaacaaaaaaccaataaatgaaaaagaagatcgtataaagtactagaataataataataataat

SEQ ID NO: 5705 - DNA, 1092 bp, Cannabis sativa
atattaataatatgaaatttgcaccattaatatttatgtaatttgatttgttacatttcagtacctatgagaaaaaacttagttgcgataatgcctaactctacaaatttaatacaaccacgagtctttggttgttaagtttaaccaaaaacgtacatggctgcacttaatttgtctaattatttttaattttaaattattaaaaatataattaatttagaataataataagaaataaattagaaattataataagaaataaattattttcaattgatttaggagggtggtgtggatggagtgtgtgattttatacttgatacgagtgggtggaatgttcctcttatttataatcttttcaatgataaggaagtttcttccattttgtctattctgtcttccaacttcgatagaaaggatagactaatttgaaatttttctaacaatggttggtttacagtaataaattgttattggagcttggtagcttgacttcggtggattcaaaactcgtcatcttctaggccttctaagtggtgaaaatttctttagaacctctctcttccttcaaagatgaagaaaattgtatggaaagctagcctaaattgtatcctaacttatgctaatccgactatacatgaaatgagcgcttctaaagtatgtttaatttgtttatagaataataaactaacttttcatgccttgcagttttgtccttcccttaaatatattcagtatgtgtagggtttgaggggcttggatagtttgaagatgacgccaatttttaagaacttttgattgggtatcttgtctaatgataataagttgatttctaatgatatggttagtagctagacttttagctatctttagcgattctaaaattcccaacactactctgatcagccggtcattgtgagtttcccacgatcttcttcttgtcatatagtgggggtgggtcctgagttaaatttgagggagtttactttgtttgtggatgttggtatttgctctaaaaggaaacgttttatcatgggagcgattgtgtctcgttccaatagtgatgtacttttgttctgctgctacgccagc

SEQ ID NO: 5706 - DNA, 965 bp, Cannabis sativa
ttcttcgaaactaaacgtcgtcgagtttaaaggacggagttcttagtcaaataagaaagagccatcaatgtctagataattttaggcaatttcgggtttttcttttttttttttttttgtggggagcaatgaattttcaaagttgcacttacatgtaagtttttcatccaaaattctcttataatatcaatataattttatcttgttttaattatataatttttctagtattattgcaactctttggagttgttttacccaaaatccaaattcaatgattgtttaaatatgtactacttttacacactaaaattttactgtaatttagccaataaccatttacatagtaaagccaaacttaaaaaaataaaaataaaaaataattaagagaaaaccataaaaaaagagtaagacaacaattactaatttatgaaatcaatatctaattaagcagtaatttaagcaagaatgcctcttgcctcctgtccctcacagcctaaaattatttcttgaaattgttggatagttattctcaggaggttatggaatggttggtgaatttatcgaaccaacttctcactggtccttttagagaagttggaaataaaatgcaccacaagttgtttaaaatatttcttgcttgcacaattatgttaaaattgtttaggtgtgccacaggatcggtcatcctatcatactgtgagacgtgcgggttcttgaatccctgagggaattgggaattcactatattaggatggagaggctctgtcttttcatctgaattgtatcctgataatttctcatattttctatcttggtatcacctgaacttgtcatctaattatattacccttaactgaatcagatgctcgacttgtttttggcgacatacattctggtttaatcaatcatgaagatctggaacgtttcaattcaagtgttcatgcaggtctggttgtctacgg

SEQ ID NO: 5707 - DNA, 514 bp, Cannabis sativa
atggctttgggaaatttacataaagtattatttttggtaaatttttttatatttttatagtattatatataaacaatatactaaaataataacaaaattgtataaaatttacaaaaaaataacatcaatataacgtaaaatataatatacaaaaaataaaaaattaacaacaaaacaatattataatataaagatacattaaaaaatttgtattttctttaaataaaattttaaaaattataaaaatatttaaaattcggtacattataatttttttactaatatttttttttacacaattcctattattataatttatatgtttagtgcgatttatattattgttattatcattattatttgttgttatttcaaagcagttatgattatgggtttttgtttggtggtgtagtactcttgtattattgtatatatatatggaccataatggccaagcacacaacaaagggataggcttctaattcgtcactaatcactatataaatttatatat

SEQ ID NO: 5708 - DNA, 824 bp, Cannabis sativa
ttcgggaaagatttctaaggcccctgcaaggtgaggtgttgccatggagactttggtttattttcgccccacgtaaaacctttcagcagtttgaacagatgctcccttgacaggcatggccgcttttgtgaggggtctttgttcatatccatagaaataagagcaaactctttgaaacaatgaacgaatgagaagacgagtttttcacacacacaatctcgctatacgacccaagttcagtcctagccctagcctaaataagaacctttcttttcctaaatgaaaaatgctaagaaactcagatagggggctagtgcacttacttgacaaatcgaaggggatagtcaataactctagaaagttcacctgaaaacttcagagccatttgatgcactagtcgcagttgacctaaaagtcaaatgttccctctgaggaaggattttgctggttcagttgaaggggagcaacgtttgggaagagttttgatgaatgacgagtacacactgcatcagatcctccaattcctcttgcatgcaaaagacggcaagaaaagggaaaaacaagttatagagaaaatatgaagttttgtctgaaatagaataaaaaaagataccgccacagatggtttttatttcaaaaaggagatagggctctgcgagctcaatgactcaaagaggttacataaaattcaacgactagggaaacgaggggccccatatgatagccctagggcccataaaaatctcaaggtcctcttttcgacgtcacttagtcgccagtagcactcctcctttcttgctaggcatgcctagccatatacaaag

SEQ ID NO: 5709 - DNA, 959 bp, Cannabis sativa
  modified_base (604)..(620): a, c, t, g, unknown or other
tatatatatatagttttgatgttattagtcaaaaactgtggtaaaagatattagattattcgataattaaaagatattacattaattaattgtggtttttgttataaacaaacactaattataagtttgattttatttatttaggtttcaaattatgattgattattgtcatcttattattaatctaatcaataatcaaatggacgtggattgaatataattcacaaaataaatttgaaaatatatagaaaaattattgaattaatgaacaaataatgtcgaaaggcaattcatcttcaaacgagacaacatatttttatatggactactaatcataaacataataaatccaaggaattatgaataattatactcaacaaagattttcatctttttgtacaagacaaaatcaaaaccctatctgatctatgtacatatgaagtcaatatagaaaaacaaaagtcataattaattagtacactacaaaaaattttacttttagtcacaacaaaatttataattaaaagtaaacaaattgtgactaattatacatcattcttatattatgattaaaaagtctgtggctaaaaatattagtcacaannnnnnnnnnnnnnnnngactaaatgtatttttagtcacgatagtcacaatacttgttgtgactaaaattaaattagagacaacttgtaattaaacactatgttttagtcacaaataacactttgttgtgattgaaagttacatgtaatcacaaaaaaattatgttatgactaaaaagttgtcactaaaagtagctatttttttgtagtggtacttagagaaatggtcaagggtatcagtggtatgttccagcaatgtcacaatgtgtcatccattattattcatgtaattgaatatgagtttttacatatttgaatttaataattctataaaaaaaattgctaattaattagaag

SEQ ID NO: 5710 - DNA, 1028 bp, Cannabis sativa
tccataactagacatctaactcccactgtcaaaaccgattgattggttttacagcacctgtaaaaccggtcaaccggtttctcagctggtagaaacggatttcctagtttttgccccaaaaaccacacaaaactcctccatacctgttcaaacttcccaaagcaatataataccataaaatcaattcatcccacatatcaattaacaatactccaaagaatttcatgaaacaccaagttaaaaccaaagcttgagttcaaaactcaatatttccaaattcaacccaataactaataaatcatacttaatttaatccaactagactttcagactcattcaacaattcaacaattactccagacctgaattcaaacaatttctaacttaatattacacccaaaactcatggaaattcaataaataggtaggaaaacttacccctacacttagacaatcccaaagcttgatcaaatcttccaaaaacttgaaggagaagctaaagaaaatccttgcttgtggctggtttctagggttcgaacaagagggaagggagaagaagataggtgatgtttgacttagtcttctctaggcttttatcttcttaattaattttctttttctttttttttttaaaacataaataccacccataataatcagcccaccacttatcaaaagacaataaaacaattacccttgaaaagactaaaatacccctcacccataaattaaattaaacatactctagggatgaattggtaatcttaactaatcccgccaaaacaacgacctaatcctctaaactagtccggtatacacttaaaataatccatccaataatgtcatgacatttctgaccacctcgtcaagtttccactattgtcgggcccggaaaaatatttttatttcaaaaatagtatctacgatacccacatatcttaatataatctccgtaatttataaattacactttatataatcatttaatagattctcactaactgatctaagtaagatcataatcttac

SEQ ID NO: 5711 - DNA, 1285 bp, Cannabis sativa
aagaatatgaaaataggccttgcaaatgaaatgcttgattttagggggcatcctaagagactgaatgaccttccaccaagatttattataattaagattagaggaaaagggggggaaagatgaagattttgctagatggtggactgagtttacagtaaaggaccccgaggagtgatgtccctaaatgagacaatcctcagtcaaattatcataaggaacctaaataatgacattgaaaatattagtacaaaaatatttggaaagtgtagccacatcctaacccccatttggatcaaaagagtaaaatattgtattatcaagaggaccactatcactgttatatgaaagttaaatgtaggaatgcaagacaactcaatagtagaaattgattcaccattacccaccttcaagattaggcctttgttaagaaaatctctccaccatagtatgcttctccaagtaaaaaagagtaatgacctttagatgcttggagaaaaaagttatgtttgaaatacttagttttaagcaatttgaaaagcaaagaacctggattagtcaaaattctccaaacttgtttggcaagcatgacctaattatagtgaacagaatatctaagaccaaatcccccataaaatttgaaacacaaagactcaaccacttgttccagtaaaccttattattactccctgaaaatccccaccaaaacttagccataagagtaccaaagttcttatataaggaaatatgaagcctaaaacaggacataacataagagggaataacttggatgactgacttaagaagcacctttttgccagtcttagaaaataacttcccattccaagtattgggtttagagctaatattctggaggagataatggaaagaatactttttggatctaccaatgtactgaggaacaccaagatacttactaatgaaaggcttaatatccaaaccaagattactactaaaaaacttctgaacttaagggggagtattaggagaaaaaagaatagaaaacttagataaattaactaactgactcgtagccctattatgaagacttaagacatcccttacaacattacaggaattatgggagacattagtaaaaatgatactatcatcaataaaaagcaaatgggaaatcttaggagcatttcgacaaatagaaaaactactaaactgattagcctagtccttactttattagcagccgaaattcttttagccgccaagaggaaaaggtaaggagataaaacatgcccttgcctaatacccc

SEQ ID NO: 5712 - DNA, 917 bp, Cannabis sativa
tttccatttatgcatttctcaaaagcaaaaagaatatatataatatcttcacatccaaacagtactcatttatatatatatgcatattaacaatctctctcatctttctctcccatttaaaagattcccttaaacctaaattaaccaatatatatatatatatatatatatagttttatacatattatcatatatggctaactcatcatcatcaaactcttcctccttaagaattatagttgagaataacccatctgaagccaagctttctgagttgaatatcaagtgttggcccaagtaagcctctaatttctcatctctctctatatatatacatatattattttttatttaaattttaaaattttttatttttttttttgtgaagatggggttgttctcctggaaaataccaattgaaatttgatgctgaagaaacatgttatttggtaagagggaaagtgaaggcatatctaaaagggtcaaaatgatcagaatcagaatcagaatttttggttgaatttggagctggagaccttgttgtaataccaaaaggattaagttgcacttgggatgtttctgttgcagttgataaatattacaaatttgaatcttcttcttcttcttcatcttcatcttcatagtatacatactattaattattataaattatcaaatataaattttaatatttgtttttatttttgtggatattattatgttttgtgtgtgtagctagaagatagtgataccttatgcggtagcatttttattttagtagtcaaagagagagaaaaagcattagtagtcaatatatctatgtctccattcaaactaaccttcccaacgtctttatgtccttagttattaatgtttcttttgactagtcaactatatcctttattattattattatt

SEQ ID NO: 5713 - DNA, 1881 bp, Cannabis sativa
atgaaaagaatagtaaattcatcaactatatttcactaataacatgaattgcctttagtgtaaacttcattatgagttatatgagcagagaaactattaatctattaagctgtttttaagtgatatagaatggacaacatgttattatccataatataaaaagtattgataaatttatatagaagggtctcttatagcacttaataaggcattagagaagtgatataataaggttgttcaccaagggagaagactattaatactgttcattgatgccaatggatactgaattttcctttgtttaagtctctaaatcatttcaaattttaatacatattaaatatataatattaatatatacttttatgtttatataaaaaaaaattatacaaactcaaaatagttaataaaatatatttagagcaatgaataatattttataaatgtacaacataaatagtagattttaaagaaattttaaaataaaggaatttagagcaccccaattattgaggtaaagttcactgtataaagtgagtcaaaaaaaatttaaatagttttttttttcttatttaatattttggactcagaccccaacttagaccttgacactcgaactcggaccccaaaatgtataatattttggactcgaaccctgacctaacccaaaccccaaccctggagccgaaccttgacctcgaccccagacccgaatcctgacccgaactcaaaccctagacttgaccctaggcttggctccagacccagaccttggactagactccagatccgaataaggactctgactccagccctagacccgaacccttacctcagcccagaccctgaaccttaactgttataatgactttttcaatgatagttgttttttgttagaaatcttattaagtttatttatagtattttttgagacatctttttaactttgtagcacaaattttatgcccatatatataaactaacttatttatttctatatacatatatattttacaaatagcctaataaaattcccctatactattatacattttcgtaagcaaatataaacaaacaaagacaccatggcattgcattttatgtgatattgatctcacatcaaattgatttatgataaattaaatgatattgacttagaataaatataactgtaagtttataatattttttatactatcaatatcgacaaagtttaatgtaaacatcatacattcgatacaagtcaactttactaatgtcttgaaaaggatattctacttgcttaagtgtaggtacaccacataaccgattattacgtcaatgtaaatctggtgtactgataaatcttgggactaagtaagttcgaagcatataatcacaattattttctactataatgacatcactataattgtgagtaactttatgtttaaaatttaatagaatttaagtattaaacaaataatcacgtaaaacaaaatgaaattctgtttttatgattaccgaattaattattcaaattaattactgtacttttacagagatgtttaaaccaaaaaaaaaaatatttgaacaaaaataaaatatgtttaaacagataactaacataaagtaaaaatgaacataaagtaaaaaacacacgaaattatacgttgtatcaacaatcttcttagattgctattagtccatggggtcacacccagaaaatgaaatttattagaagaatctcaaaattattataaaactaaattgacttatacaaataaagactctctttttaaatttatctcaactgttgtaatctaagctcttcatcaagtttctgaagtgctaaatcttgaactctcttcaaatggtaactgattaatatacgaaaataca

SEQ ID NO: 5714 - DNA, 1178 bp, Cannabis sativa
gccttaattatccgaagcaattatgctgaaattgctttcattccatggaaaaatactgaaagtacttttgcagttgaatatcataaaaggctcttaattaaataaaagtatcccaaactttatttattatttttttttaattttgattgagcatcgtttctttttctggtttcttccacatattatttactttatatataattaagcactcatgaaacattaatcctagagtttcttctcaaaattttagtaattttattaattccactggaagtacctatttgaaaagataaatatataagtagaaaggaacatagatataatataagtatgaaccaacaaaagttatattgaaaagagtaggaaaagaaaatctcattaatactgcaaagtccactgtacacagccaggattttcatacattaattaaaaataaaatcaaaattgtattaacatagcctcgatcttcacaatcataaccatcatcatcatcatcatatgagatactccagcatcagctcatcgacggctgggagtgaaaacggaagcaacagagtgagccaatccgaccactatccccatcttcacttggcctctctttgggatcggacggctaggatttcttggtgacatgtttccaccgttgatcatgctcgaattccttgtgtagctttccatctcttcttctagttctagaaatactagttgtgagaccgagacttgaaaaatataagacttgattttggggagtgttttctgaacttcaaatggtggtttggcttctcagttggtgtgtttggcttggtacataacacaatagccaagttttcttatatagacttcaggtttacgaaaatgcccttctattttggccataattaaaagatatatatatgtgactatataattgcttgaccattttaccttattccagatgcaagacatgacacataataaagccaccaattaaatattttagtctaaagttaattaggtaaagacattacagatcattttgatattaatatattaaatatgtgagaagatataatgtgatgggaaaggaatggggtctgcataatgtagtgagtgattataatttatgttgaaaattatttttttaatgtttcaaattgcatttggctcacgtgggtttttaaccattataaaaggttaaa

SEQ ID NO: 5715 - DNA, 2123 bp, Cannabis sativa
aaaaaaaaaaaaaaaaaactggagtaggggctattcttcgagatcatgatggtatggttattgctgctctttccaaaattgtgcaaggaagctttcgatcagatgaaatggaagcaaagtctcttttccatgctctcaattgggcatcacaattacaactttctataatgcatattgaaacggatgcattaattctacttcagctgatttatcttgcttctctaatcttatatttgatgttcgttgtctcttactctttttccctggtgttttagtatcccatattaaaagaattgctaatcaaatagctcatgggttagctaaatttgctttagggttggatgaagacatgtgttggataggagaaattacctattctattttctctgttgttataaatgatttcaatttataatagtagtgattttctaaaaaaaaaaatatacgaatttctatataatttgacataataattattataaaatatcactaatgatcgcaatgcaccacctctaaaagtactaacatcacaagtgccttataaaactattttcttacagaattttaataactttcttattagtctaatgaatgaatcagatacaaaagacattataatatttacactatcaaaatttgttggaagatattttttaccatgcagatgaaaaagtccttctaaccctcttaatattaatccttacaaaaaaaaaaatgtatattttaaactttgacctaaattatacaatatagtataatagaaataccttagaaaataaaatggaatggataattcaactttaccaactttggttaacaataaaaaaaaaattaaaaaggtaatatgttaattattaataataggctgatcagactaaaagaaatatttattttgttataaaaattttatttttattgtagcctagtgtattataaatacattttgttataaaaatataattatagaatatatatttaataatgtaatttattaaaaaaaaattaaattattatttctacttctaaaaaaaaaaaatttagcaatgcgcttattgtctagtaaacttacaaaataataatatctaaaattgttagtaaaaaaaaaaatataatagcagtttttttatttttatattttaaaataattttttttggtatttttataaaaatttatatagaatctctcatatagcaactagcaactataacaactaacggaacaacttaaatagtaaaaatatatataaaaaaagattaatttgaaatgtaaaattaaaaaacactcttattttttttttttagagtgaaagggagttattgttattattttcttgtttgtagagtggaatgactcgttacttcatgaaaattaaattttaataatgatttcaattttttttagcaacacaataatatgattttattttataaaatttctgaaaaaaaatatatttttcaaaaaaaagttattttttcttgtggatatttatgcttctcacgcgttaaagaaaatttgctactaaaaaataaaaatatatttatattaggattaggaaattttaaatgatgatttttattttatcttaaggaaaagtaataattttattattattatattttgagataaaaaaggttatctttttctgttatgacataatatttttaaaaaattatcctaaatacactaaaattaggaaaatttgaatagtgattttcattttatttttaaggaaaagtaatgattttattattattattatttaagaaaaaaatgttaaatctttttctgttatgacataatattttaagaaattttatcctaaatacaataatgatttttattttattttttaggaaaagtaatgattttattactattattttttttttaaaaaaaaaagttaaatctttttctgttatgactcaatattttaagaaattttatcctaaatacagtaggattaggaaattttaaataatattattttaagaaaataaaatatattaggattaggaaattttaaattttaaagtaaaaaaagagccgttcagatgtctcaacagaatctaatcttgactgttcatttaaggctggacttgttataaatagttgtccagcctct

SEQ ID NO: 5716 - DNA, 1947 bp, Cannabis sativa
  modified_base (580)..(584): a, c, t, g, unknown or other
gtgttatgaatgccctggttgactgctgaactgctattcccagtctcttgcacatcatgtgcgatttcatccacaggagtcgtcccaccatgacccgcgttggatggttgtttaggattaacagctggcggaacccttgtgtttcccgggttctaaaatgcaggatccaccgcctttggatttgccggatcaaccacgcccctacgagtctgtaccaccatcgtactttgtgattaaatttagaatcaagagcgattcttgattctgctctcaatgagagcaccaaaatattgacctcgcttttacccaacgataataagtctattttagtaagcgacaagtagcttataacgattgaaatatagtaagcaatgtaaagacacaggaattttatagaggttcagccctgagcagttcggtaatagcctaatcctcgttatttgtattaactcaagaacgaggaaaaatgatcattttcttatagctcttacaacagtatctctgaatatcaattcttagacaatatctctcaagaaaaaattttgcaaccctttgtccagtgaatatgcatcactatttnnnnngctatgagcttggagagaaagtatttcccttctggttacaatggctataagcagaaagattgcatagtaaatacagaatacactaattgtgggttttggacagcttgccatatctctgtaatctgatccccaagttatatggattctcttgatgactcacgatgcgaaagctaagtgtttgtcgtcctgtgtgggttgctgattgcttcttctcgagcatgcatatgaggtatcgtgttcggactgtatcttgcaagcaaatatctggagttgattccatgtgtcaccatcgtgtcatgccacgtcagagtgcagaaattaggataacatatataaatataaataataaatgtacatttttatgtctttttttataatataatctttctctctcttgcaaaaaaattaagagttcttctcctgttgttttctatcttttaaatgattaaaaaagtagtctattttttttggatgtagtttattcatagttatttttgaatgattttcatattttaataattatagttgtcttttcattattttatagtttttttttttatgaatcagataactttttgttactccaaaaatatctttacaaacaaatatcgcctccaagcaaagacctatagaaatagttagtatacagtttttttttaacaaaactttccaattacaacttagaaaatcagtttgtatctataacacttactttcctaggccccaaacaattaattctgccttcgacatcatttttaatcttatatttgcaatcaaagagtccatggcgttactcgagttccacatgcctcatttctagctagcacgccaaatttgataaaccagcgatgccattgcagtggcgaatgcatgcttaaaaaacttgctacatttggctttaccaattcgtcgaatagttgtttttatattgttgttcaggtgttatatagttatagtatatgaatttctgttgtttttctattttttttgtacaggtcttgttcaatttatgtctattttttatcgtttatatattcaatttattttagacaatatttttgttttacgtatgtgtatttattttattatttttatgttgtttttcaatttatacttattttttaactatcactaactcgaaagggaaaagagaaaaaaaagttaaaagaataaagttgtacaacaaattcaataaaaaaaataaagtattagtgtaaaaagataaattaagttgtcaaaactaagtaaaaaaaaaatcgtaattgaaaaacatagtaagaagttcatattattctttttcattgcaattaggacaatcgtttgtcattttttgttgtttatttgtagttatatttttgttgtt

SEQ ID NO: 5717 - DNA, 1706 bp, Cannabis sativa
agttttttagtctaattatttttttctttatgatagtgtatgttgtagctatttagaactacatataaatttttaaaaattttcgagtagtttaaacaactacttactacacatataaaatatagatacgtgtgtaacaaaatatttaaactttattttctgtattgaaaactatttaaagaaatttaaaattgtttacaagtagtcttaaataattataacgtacttaattattaaaaaacataaattaatgaaaaagttctcttcgatgccgcaataaataggaagtatactcaaatatcatttagaggctgtaatatgtatttatcctaagaatatattttctttgaaaaatcaacattgatccattatttcaataattttttattcaatttttttttaaatatttttatttatttttatatcaaaataaatatattttataaacagttttccttaatattttattattggtagtttctatatatatttttttgaaattagaaaaataaaattttaataaaaaaaaaaaataaccacaaaactaaacaaacaacaacaacaaacttacaaagactttacatttggcttaaaatctcaattcttacatccctaggactcaaagtatcacttttatggcacatttactataaactgtaaatggaatcagaataatcaatgtgaattatgaattaatttaaattaaaaaataatcggaaacaatattttatcatactttttactaacctgtccggaacaaaaaccaaaatcatattattttgtttacataactagaaaaagtaatcgaaatgctttaatttgaaaaaattacaattattagagcatgtaattattttttatttatagatttttaaaagacatatttgtcttttttattttaattaataaaattaaaattaaaagaatataagtgacgaaaggaaaaggaattccctatcaaaatggggggagaacctttctctttattctctccctaatttgtgtgggctcactactttctatctttccaaaatttagtaaacaattgtatggaaattaatatcataccattgattccaatccctttaagtaaacatgccttttcttatcaaagctctagctttaacatctctctgaatcttcttatttacaaattaaactaaattacgtctgatatccgaatttttatccgcttgacgtgggatgtccacataagcaaaatagaggtcgtgtgaaatacaacatgtcaatagatgatcaaagtcaccatgcacaatatgtcaattaacaagacttccaaataatcagacaaggccaaattgaagtctatgtgccaacgaggccttagtaaaagggtaggccgactagcacaagtagagagcatcaagggggagtctaattgaatggtggggtccacaaatatctttctagacacagttcacaacttggtttcagttaatagacaactccaacaacccacaaagttaagaattcaacctcaaattatctacctatctttcatggatattattgagttatttttgtaagttaaatatataataaaagagttgttttccttattttgaagggatatttacttatttgaatattaatcttttgtaagccctaaaattatacaaagggtcttaagcatttagaaaagggggacttgaattatgatctcttaagctctatagctctcactc

SEQ ID NO: 5718 - DNA, 1915 bp, Cannabis sativa
ataaagaaactcgacgtcaactttggttttcatcttcaccatatgatactcctgtggttgaggtaattggtactattatatattatcaattttagaaaatacttttatcaaaattaacggctcctcatcactttattttatttacatgtattgtattctaatttccctaaaagattatttttttcaaaattacttgcttagtccatataatgtatataaatcttttctagctagtagaagtatttgagcaagtgatatcttcatatgggttgcaagttgcaggaatgtaatgagattagtaaagcacatacttcagaataatatcaataatcttcacctcatcatccactttcaacattagttctcccttaactaataatcagtgatttataattttctttatgcaggctggagaagtagtcaatattaagagtatcactagtgagcctgaactaattgctattggtatcgttcgtagcaaacattcatctaaaaaagttggaggggaagaacttggatcttttttgtgtgaagttactattacagttctcataaagcctaatgaattattgtttaaactatatggaccttttaaaacaattcgtgaagctgttggaaaatccattgcatggccaatggcatttgtggtaagttcaacatgagttatcactttagaataatattctattcattaaatattattttaaatgtgtgttaattatttggtgacaagaaaatggctatcagtaacaaagatttcgacatgacaaaattatgaatttaggctcattacaacatgccaaaacaatatacacaacataggtctactaataagagtcctctaatctctatcaatgtggaatttggtcatgcctgttggtatgtgattttgtctctcttctatagagtgttttgatttcttgagattgttgagtgtttagagagttttgattattttcctgccatccatggcttcttcgagtggtgtcaataaagatctggagcagaaatggaagaatattgcttggatgatgaggaagaaaacgaagttgtctaccaggaggaggatgtggaagaaatagagttcgatgatcgatggtgtctcgttggaagattgttgacagggaaggtttccgacttcatgatttttcagaatataatggcagatttatggaaactggagaaatgaatgtatgtcaaaataatcgaacaaaatcgatttcttttccaattttttcatgaaattgatattcaaagagtccttacgggaagtccttggacatatgatcggaaataattgattcttgaaaggctaaagaagggagataatccaagaacaattgcgctaaacaaactcgacttatgggtgcaaattcatgatctccaaaccggattcaagaaggaacgggcggtctgacaagcggggaattatatcggtacgtttcttgaaatcgatccaaacaactttcaaggcgtttggagggaatatttacgtgctagagtccgacttaatgttgaagttcctctcaagaggcgaatgaaatttcgtaaaatcggtggcgatgctttttatgcaaattttaaatatgaaaaactgcccacattttgtttcatttgtggaatcatgggccattcggaacacttttgtgctaagctttatgatacaccgattgaagatattgtgaaaccgtatggattagagatgaaagcatcatcaagaaggcaaagctttctgactgcctccccatggctacgaacccgacaacccaacgccacttcaccaggcatcaccacaccaggcgcaggtgttgcttctccaatcgaaccaccatcagcaacaaaaccagcagccaattccgccttcactgccgctgctccagtcacggtatcttcagccaatggtgcggccacagcc

SEQ ID NO: 5719 - DNA, 1308 bp, Cannabis sativa
tcaacaatgttgtgttattttatctggtgttttaataggagaagcaaaataggcaatgcttcgttgaatagttagatgacttgtttagaaaagttttaaattaaaatggacaatgcttcattgaatagctaccaaataatagcctgtttagagaagttgtgaacaattatggtttactcattgttgttagtatttgacatgtttctgtcaaaattaatagaatttttcaaaatattctgttaagccacaagaagataagctatataatttggttcactgtttttgttcttcaagtttctcataggataattgtaaactcggtcattgtacgaattatactctacttagcccttcatcagtaactccatttatgttttttagtaccttggtgttttgaaattagttaaaaacttatgcatgtaggaggaagaacttgtcttgacattgaattatttgattttaatgttgcctttctactgtaggagttgattctcatcactccagaagtttggacaaccatcaatgtgaagacgaatatatatttgatgaaaaagatgagtctcgacttttcaaagtctatgtattgttggaatcagacgattctctagcagaaaaaggtgggggggaagacaattctattggttggtacttggttattcttccagtactcctatggatcttaataaaggaatgagcattgccaaagatatgggtgatgccgataatgaggatacagttatggcaccttcaagtgacattgatcttaatactgaagacttttgtagttctatgaatcaagatctattttttccatacaaaaatttgaagccgagagacatgtctgagtgtggaagctccactggcccattggaagaaaatgattcacgcaaacagtgggaaaagatgaaacaaaatggttatctttcttcatctcatggaggcataccggttccaaagcaacgaggaagaaaaagtaaaggtgaaaacaactataagaaaaagatggagattgcaaagaaggagcaggttgacagatttaccaagattgctgctccgagtggactgctcaacgaattgaaccctgggattataaaccatgtgaggaatagaaaacaagtccatgacataataaaggcacttgtaagatccgagaaacatgaaaacaaccatttgggaaacaaacaaggttgtcataccaaaaacggaactaaagaaatttgttaccgaaaggacgactctgccatacaggatggtggcttgtctctagaagatagaccatcaagcgatttctcttgggaaaggcaaaca

SEQ ID NO: 5720 - DNA, 1013 bp, Cannabis sativa
ttccttagttgatttcagaagagtttttctcgcgggagatagcgccggcggtaacattgctcaccacgtggcactccgagcgggttttgagggaattaatctgagagggattgttttaattcatccgtatttttgggggaaggaaccgatcggagatgaaggcaaggacggagggagtagcggagatgaagcttatccgggtatgttgtggaagtttgttaacccgtcgtcgaagaatgggtcggatgatccgttgataaacccgagtaaggatccgaatgtggggaagttgggttgtggaagagtgttggtttgtgtggcggagaaagatgggttgaaagatcgtgggtggttttataaggaagtgttgaagaagagtgggtgggatggttgtgttgaggtggtggagaccaaaggagaaggtcatgtcttccatttgttcaatccaaattctgctaatgctgttgagtttatggctcaaatctctagctttatcaatcaatgaaaaaaaggtacaaactacaaaccatgacaaattacagcataagtaattatgttttagtattgttttatgcaatattaactaatataagaaatgactaagagtaagtcatgaccaatatgctaagtatctcttatgagtaatgagtattaattttgctgaaagctcctagataattagtatttgattattctaagaagtattttataatttgaatttgttaaatataaattagagattaatctaatacaataataaaaaagtaataatgttttagattaaaatattattataaaaatactaaaaaatgttaaagtatttgtagtgctcagcaaattttatccgttaatatttttattcgtctaattaagtattgtatcttatataatttaatgtaatattttttttgagaatattattagttaatcataagacaattcatctaaaaagtgatacacactactgattctcaatagtaatgttcttgtatttgtagaggtctatatcaatt

SEQ ID NO: 5721 - DNA, 504 bp, Cannabis sativa
aaaaaaaaaaaaaaagaaaccagaaaaatacagaaaacttgaagaacaatcatttccacacaaaaaatagcataaaaagcaacaactaatagatcgaccataaaaataatattataaactaaatataataaccaacaacaagattaaacaaagaaaaatcattacccattgaatttgtgtatgatgtcccgtccaaaaaaaaccaaccaccaaagcaccgagcttatagtgtagtttgtatcaaaaatttgtattatttggtaatgaaataagtgaagagaatgaggtttgtgagtgtgtaagattcagagaagagagaactgaaaacagagaaaagatgagtgaagagaaggaaagagagatgaaatgttgttttttgggttgtaagagtgtatggggattagttttaatattgtcctagtctcttaatattgcacaatataagtttagggacatgattttcccctaatgatgcataaaaagtcaaatttttcattgcaaaag

SEQ ID NO: 5722 - DNA, 583 bp, Cannabis sativa
tcaaaaaaatatgctcccttcaactattatcgatattaaatattgccattaattcaactttaaatgtaataattaataattcatatctaaactataaccactatatcatattttatttatcaaagggtacctaaaatatatgcacggggtcacaaatatttttatttttaatttttttaattagaaaattgtaataaaaaatttatttaatgccccctcaaattttattttattttttgcattttgccctctctctcatatatactttctaccttcgttccttataatcataattgttggagtaaaattactaattactcagaacttaaaggaaatctaacataaatctcataaattaacattcccaatagtaattcaaaaggtacaatcctattagtgatcaaatttttgggcaaaataccctatttatttcaaatattaatacaacttatttcttctaacaatttttttaattatcgattttctttttcctttgcactttgaattagctatagcctagtcccctaaactctataaatatatataaaaataaaatagataaaatattctaattaatgaatgc

SEQ ID NO: 5723 - DNA, 1734 bp, Cannabis sativa
tttattattcgatttgattttctaaattaattatcaaaacattttgctaattaatgtgtcacatatgctcaaaaaatatcttacctttatatataggatacttgttcccaaatttactattcattatgtgaaaatagtgaaattcatctaagatagtgaaaaagagtatggaagcccaaataccctcactaactatattttcttttcttttgtaaatttgaaactcgtgtgggatcaaagctcaaaaaaattaaagactagaggtacttcgatctcttttgttaaatgcgtatatattcaatttttcgtattattctacttttcaaatcgatcatatatgtttcattttacatataataatttcttacatttttaagtttttgagtacttttacactttaaaattcgaatagcaaacaagaccaataatatataagaagttattatttgttatgatcactaaataatataggatgcgtttggtaacaattttttaatcagttttttatttttaaaattcattctataaaactgtttttacttttcaaatttttaaattaagaatctaaattttaaaaaaaaatcacttttaaaattttttcaattaatattttggactccaacggccaacttagaacttggaaacaaaacttgaacctggccccaaatttggactcgcccccagtccccacctcaaacctaacttaaataaaattaacaaataaaaataaaaataaaatttacagaacacatttttattttttgtttttaaaattaaaaaataaaaattgttatagaacatattttttttttcaaaaataaaattttaaacaaaaattttacttttatttttataattaaaaaatctaaatataaaaatattacaaatgtaacctttgttatcttttgttttattgaaaataaatatgtattcataagtgtgatcacaccaaaatagtttttaccatgcacttgtttgtttttatatgtaataaacaatttgttgtctctaataactacaaatatatacatatttataaaattaatatatctatacataacttatctctaaataaaaatttatggtgttgctaaaagtaataatattatttataataatttttggatatatatttacttacttgcaaacaaattccatcttctgcaatccatatataatcatcaattctaggaatatgtttcttaaaatattctccatttggatcttcatcccaacaagcaagcatcattaaaacctgcatatgttttcataaatttaattagtacggatatgagtaattataaaagattctacaatgcatttttaaatttatgtactctttatctgtttagtttaatttttttatagttgtctacattatagttatttaaaacatcttataaaattttaaaagaataaaaaaaattaataaaaatgctgaaaatagagtccaaacactctgttacacacaagactcttttattttatacgcatatgaaatagactgtctgaaccccatgttcaacgagctacatttttctgaatttcttaaaattctgttaaatgtcctataaataacaacaacgtaaacaaccataaaaaaattgaaccaaaaaattcttttaaatactgaaatagatatcgtatgtgcttgtaaaatttttcaataatatatatgtaaaattgatataacaaaaggatgagcagtaattagtaccttttcaactgagccaa

SEQ ID NO: 5724 - DNA, 828 bp, Cannabis sativa
aaatggcactggacttaacatagacaacattgtaactcctctctaatctctccacttatctctcaaactctatctatcaacaatttgcttcatgttcctttgactaccaaaaacttgttaagtgtctctcaatttgccttaaataataatgtcttctttaagttttactcttttaattatttggtcaaagcacctgataccaagaagatcttattggctgagaagcttgataatggactatataaattctctcccacataactcactcatctctctaccagtgctacctctaagctaaacaattaatttggttcttactgcctgagtcatcaattatcttcatcaaattctaattttcatttatggaacagtaggcttggccaccctactaataaaaatataaaactggctctcagctattgcaatataccagtttcaaataaaacaaattctaatttttgcccaacttgttgtcttagtaaacatcacaagttacctttctaattttccacaactacttttcatgagccattacaacatttgcttttttatttatggggctttgcacccatcaaatctacaaatagatatagatattatataagttttgtgaatgcctattctaggtacacttgaatttacatgctaagaactaaggatgaagtattgcctactttcacaaaatttaaaactcaaatagagttacagttagggttcaaaattaatagcttgaaatttaattggagaattagagcctttactaatttacttgaacagtgtggtatagttcacaaattggcttgtccacatacacatgagtaaaatggg

SEQ ID NO: 5725 - DNA, 740 bp, Cannabis sativa
tttctctgttttttccggcaacgagaaaaaaaaaataaactttataataataatgataatctcacaaaagagagagaaaaccgaggcagcgaaaatgccggtacccttttgaaaaccctaatccgatcagcctgaaattcactttcttttctccgactcggtgattatctcttcttaggtacgtattatcttttctcctcttggatttcagctattcctttctcgattctaattgttagggttttttcggttcttgtgttttgttttagggtttttgaaatttgactatttgatttttggggttttgttttatttttctagatccaggttatatttcatattggtttatgttttgtgagatacgagaaagtcttaaattttatctttcatcttttgtaattcagaacatggttgttgagttcagatgtggtgggtttaatattataccacagtttagaatttggcttaatcgctagttactttcctcgatctgaaactacgtatctcggtgtatcttccgatgactccttgaaatcttaaccttcttataccctacgaaatcctaagatttttctaactctgtttctttcgtagatcggaattttactattctgtgcaccggccgacgagaactaggatttcaatggaggaggaagacgagatccagtcacatcaatctccggggagtgcatctccggcgtctccgaggcccgtcggaaggataacggtgactgtggcgg

SEQ ID NO: 5726 - DNA, 969 bp, Cannabis sativa
agtttaaaaccgttgggaaacccatattagcctattatgccggttttacgacgtcgtataggcgacggttatagaaaccgacaggaatactttaaacgactattgaaaaacgtcggaaaacccatttttgtagtagtgttccatgagagaactaaacaaattaagattgattgtcacttgataagagagaaggttcaagaaaaaattatcaaaacagcatatgtctcaactaaagataagattacagacattctcactaagcttttgtttcctaaccagctgcaaactttcaaaaacaatataggattgaaagatattttttagtccatcttgatgggggagtataaggattatagtttggttagttggttaagaagttagacaactagttaggatgttagttagttgagctgttaagttgttgtagttatttgtaacaattttcattaattaaataattttttttgtttctactctatttctctcttttttttcttttattgtttctgcactaatacaaaataataattaaaaaaaaacttcatataagttagtttaagtaaataaaaaaaaaaatagtaaaaatgaaaagaataaggataaatagtatacatataaaaaatttcttacaacaatataaatttaaagtttgaaaaaaaatatgatatatttcacgtcaatttttcaattagttaatacccactataagtaattaaagtctaagatactacgtttagaatcctataatttaacttaaaatcaattcacaattattgatgtgattcgtattgtttacgaaaagggtttactattttgctatattttatatttgagacatcctcatggaaaactaatgtgtggttttcattatttatttatttagacagagaagatttagcttagtactatttcacaatacaaaagcagatcaagagttcaatcaacaatataattaaaaaaataaacatc

SEQ ID NO: 5727 - DNA, 636 bp, Cannabis sativa
  modified_base (349)..(355): a, c, t, g, unknown or other
gcgttgagaaggtctgttaaagacccaaataatgttttggagagttgggatccaaccttggtggatccttgtacttggttccatgtcacttgtgatactgataaccgggttacccgactgtaattcttctcttcatatctctcttttttctttttcttttaatcctttttgcttcttatgttttaatttcaattctctcataatctttgtcttcccttacttgcctatcttacgtttgtgtggctgtattttttcttttttaatgcatactatatgatattacataatttaaaagctaggatgatcaatacatattatacatgatatatttttgtttaatatatatatnnnnnnntgtgtgtgtgtgtgtgcagagaccttggaaatgcaaatctttcaggtagtttggtgggagagttggggaagcttgagcgtcttcagtatctgtaagtaaaattaatatcagagcagaatatttgtattaattctgttcgttcaaacttggatttttactatggctagctatacatatataaaacagggcatcattacattatatagctagctacttatttggcaactagctactgagatacataaacatttagtaatattttatattacagacacatacac

SEQ ID NO: 5728 - DNA, 1339 bp, Cannabis sativa
cacatttatatgtatatatatgtggtccaatgaaagattgttaaaatttatttatttggggccacaattgtatatatgtataaatgtgtgttgggtcatcatataaatgagtcaaatttatgtggtctattttagaataaagtttatgacttaagcacttgttatgattttaatatgtggataccataaagataattttttatttgatgatgggctaaattagaaatagtaaataaaaattagttgttgttttgccagttattaataataagtaacggtccccaatattcatcgtatcttttcacttttgtatctccatcactaaaagactaaggttccaaagaaagttttgatgtaaaattagaagattatactattctaaagtcgattctatgaattcgcttctgctaatttttaattttattatttgattcttatgaattaattagggttaaatacaaattaaagttttccaacaatcttaaccaaactattttatgttccatttgtggaaaccctttattgctcttgaggtgtctattttatccccagataaagcaacaactacttctccttttgctcattcatcactgaatcctttgagactagaagaggtcactatagcttattttcatgctgagtcttctggagttggtttgagtagtgtattcaaaaaagttaggtctaagaaaagaagaatattgaataagtcgagaaagacacattcaataatgggaactcatcaaaatggtagtagtgtagcttattctgtgaaaactattggatcagaaaaggttagtgtgagcattgctgctgcaccagagaagaagaaagaaaccgaaaactagaaaaaaccgatattatactttcgcaggcgattaaagaaagaaaaaaaacatactttaggccacattggatcaagggattcattgtttgtgaaagggcattttcccttcttcatttctttgtagatgatcaaattttagtaccttgaacttgtaacaatataaattttttgtgcacctcatatataatgccttttaatttgttttgttttgaacattgtttaacttgaaagtatatagtctattacaatagtcatatgcatttatatattatatgaaaaaaaaaaactagcaaatgttttgagaattttggctagaaaaatgatgccttcaagttcaagtaagatgagttttttttttttttttttgagcttttttccatttactattatatagtatgataccatattcctttaagcattggtcttagactaatgaaacaccttaaaggtctcatcatattgtcttggaaaagtttgcagattcttctagta

SEQ ID NO: 5729 - DNA, 593 bp, Cannabis sativa
acttgacataaaggtcttggaccatttgagaaaaaagatcgattatatggcttggctgctggtgttgaagtagttttgtatgttgaccctcgagcaaagggaggtctgtaagggtcaggatgattggttcttgaagatcccattgtaagatttcttgccatcttagtggagaggtcaccaacactatgatggcgttcaagtctacactcatgaaccattaacaatgcttgcatttctgccaaggacttcgattcacgactggaagttatattggagacaactgaatcgtatttaggtccaaggccattagcagttgaagttcaagataatgatcactaacaacacgtcgagcaatagccaaattgtcactgagagatttaaattttgtcaaaaaattcagaaataaaaagatttcccttttgaatgtttcagagttgtcctttgagccgcagaagatgagtcttttgattagcttgagaatctttgttcgagagccttccacaacgaggatgaagaagtgtgcgaggcaagagaagaaaaaacaacttcgatcatcgaggatctcagccaagaaagtaacaactgatctttgc

SEQ ID NO: 5730 - DNA, 2003 bp, Cannabis sativa
aatgacaatgttaggacactttctttttgtaataagtgtcaacactattgagttgatttctttaagaatctaccatgacagaaggaacgagatgatagcatcacatatgtcatttcccataatatccatattatccttgaaaaagaagctattgtatccatttggtcttggggctttaaggaaaggaatataaaaaatgacattcttaagttcatctcgtgtgaattctaccaacaaaagatcagcttgttggttggtaacaaaaggaccttaatcaacaatagctggtaatacaactcttctctgctccatagtgctacctagaagtttcttataatatgataaaaggcctcaattaatcgagctggttcatgaaccctctctccttcataagtttttatggagtatattctacttttatttccttttctctaatactagcatgaaatagagttgagtatcatctccctcccttaatccaacttattttagctttttgttgcaagaaagagtagcacgatttatggatagcaacatacttactcgtaccttcaagttcctactgtattaaaatcgtattgagaggatcttactttaacttgtcttcacaatcaattaaagtattcatagactgcatatcaactattcatatttcatcgattctttgcttgtttatttccttcaacactgttttgaggcctttgagcttacaaaccatttgcgagccaagttgcgatccttcagtgccaacttcagggggtataggacaagaaggctcgagaagaactatttttgggtgggaaccagagaatttcacctggtgtactgaccggtgggttgctcttcaatttctgcagctaaggcctcgttttccatagcagggagctcattccctacctcaggagtctcatcagcctcaatcacaagttggtgcgaagattttctcttgttttccttggtcttggtccttttgggtcctttggcggcgtctgaggcatcatcagcttggataattctcttcttgaatatcttgtcggcagggggaggacttttgaaaaggtttcccaagtccacatccatatctataaaaaagaagagttaccattactacagtgagataaaaagaaaggtggaagaactcccgttaaggagagttaccatattcttcataagatggcgaggaaggattatattattcactaaacttgtactgctcggcaataccatagaatgactcattacaattaatttggatgtggaattaccaactatcgaacctatgggaaatgcaatctacgagaagggggttccaaaaaaaaaattataccgactatctcgaaaggagactaaggtattacgttcagccctaagcattgtgggcgaccacccacattgattacctcggggtcttccgtccacccgaggaggaactctctcgagataacgcgcgcgagccacacagtcgtcattttcctctcccttgggacaggaaccttttgccacgaagaatacttagatattttgtaatcacaagtatattcttctgaggcaagaaggcctacattctttaggtttttgctcgttcagcaagaaatctccaaatcgcaacccatatggcagactcagtagggtttggtgacgctcgcttatttttggggttggaatgggtctccgaggaactgctgcaaataaatcagaattcagcaaatgacattcataaactacaagttaatgcagataaattcacaaaaaaaggggatggacttacgtatagctcggaaggcagtgttgtttatcaaagataaacccgttgtttagaagaagtcgtctttaaggtctgtcttgggaagaccaactatgagtctccggtcgttagtgtaagccccgagataatagaatccccccacaacattctttcttccaggaatagctttgacagagtaaaaacaagcaatttccagggagtagggcgctcccagcctaatgttggatatattttacca

SEQ ID NO: 5731 - DNA, 648 bp, Cannabis sativa
tctaaatacgacttcttcaggaatcattatatatataaatttatgagagtcgttaaaagatattattaatgcaacttaagaaaatagcgttttttaaggaatattgctaactaatcatcagagacactacctataagaagtgttgagtaatactagtacccaatagtaatgttttgaatttatatatactaggttaatattatgtgcaaatgtaaatttagttatattattaatttttattttaatagtatatattttttagttgtataatttttgtgtgaggatattaaattattttttagttgtataatttttgtgtgaggatattatttaataaataacatcattattattaaaatatatttaatttgagtactatttagaaaaaaaaaatatatacatataataatattcaaaatttgttaattataattataattttgttaaccttgaaaattagcaagattaaccctcaaaattagttgactactaatcgggagattagtggggatacacgcaaagagttactctggatgcatagttgcatttgcttctctaagtgctcgaaagttatttggcatgcattgagaaatgtcacttgacatgcacagggaggagacttggccatgcatgctcaagtgcatgtca

SEQ ID NO: 5732 - DNA, 584 bp, Cannabis sativa
atatttgcaaggaattaaatttgacatttagtctaattttacttttgaattttttatttttctctttaatgattttctttgctcatttagcctcgattaattaacttcctattaataaattattcttttcatgcatttagttttccatgaaaggacattagttaatatataatattaaatgctttcaaaataatagataaaatattgaatattaaaaacatcaatattgttacaaaaaaaaaccattaatatttatttacagatcaccaatttttaacaaaatcatattgtcccataaattaaacaacttttttttgtaacgtcccataacttaaataatcaattttttttttctttcatgttaattcttaaatatcggaaacaatatctaggttaaagaacactccatatatattttaaactacataaattagtgtggtcactggccaccttaatagatttgtatgtactagatatatagtacatgttacacgtatcctacaatttaggtatacctaacaaaatgtcataattactatcatacatttaattttcttactagaaaggtgaagctaatggaaaat

SEQ ID NO: 5733 - DNA, 935 bp, Cannabis sativa
catatcatcttcttattacttacaatcttaattatacctttccttatgaatgtaggcaattcataaagaaaaaagggaggaataatgttaccttggacgaccttgtacatgtcattaccccgaaaggaagaggtgagacaattctctttcttatttttgttggctgctgtggtttgtgtttgcaagctcttactatgatagatgtcccataaggttcacttatgttagataactaactaagctaagttgttttacttagcgtagtcgtcgtaatagattgaatgttagttgattgtttgttatgtttgttagaagcagtagttagttagaaagggtttcaaaaataagtggttttgggtcggaataatcacttttagactcatgggagattggctatctcgaattagcttctgttgctcttcgtaatgtgttgatcttagtctctagttgaggctaaggtttgagaaataaaggcagagatttctggtttgcttgtgaatgttcttggcttgagatttgagatttctatgggattattttctttagaacattttagctgataccctgtgattttgagatcgaatccgcgataataaatcttaatacgaagttgtttgttcatcttgtccactaaaaatgctctcattgtttgttttctcatggataaggaaaaacttaatgaacaagttaacttagtaatcttttgaccaaccataccattaccaacttcttagtttttcccaattatgtacaaatgtttacattattcctacaaatatatatatgtgtgtgtattatagcttggtctaacaagtttagtggcatggtatgttttgttactatgcagcctccattcctgattctgtaaaagctgagcttttgcaaaaaattcgtacttttttggtgtcagcagctgtttgatgatgatgatgatg

SEQ ID NO: 5734 - DNA, 933 bp, Cannabis sativa
tatatatatatatattggtttgttttgtatttaaatggagatagaaagacataattgtgtagatggagatggaaatagatgattttggagattaagaaacaatagtttattttttaatgtttgttaaattttaattgtgctactgttgtgtttttctttttctttctttgttttttagcattttaatggaatataaaataatttatcattaaaaaaagtaacagatataaaataatcgatcaaatccgcacaattgtggattagattgtatttgatttaaactcttatgcagattgattggatccaaattataaaatttacacttactgcaaattgaatgttgtttgaccaaaaaaatacgaattggatgttgtttgacttaaaaaaatatggattggatcgaatcaacaacaaccctcccagtttctgttttctttgaataatttaaatcgttgtaaataggtttcaatctttgagtatcattacgagtataatgttctctccgaaatatatattggtaattaatttaatgaggttacttgtcatagtattattctcatttaagcacgcttaattgtggagttcaaattataaataatagattttatgccctaaataaaaatcatcttatataaccttatttatttatttaataaagaaaatagaaaatattttatgactttgtcaattgcttggcacacgttttgtttcacgtgattatatgtttattatttaaattttattaaattcagaaaatattcacaattttgtgatgtcatcatagtgaaaaataattatgactgcacaattctaatatttacgtcttgagatttatcagtgcacttaatttattctaatgtggtaatcagcgatgtagtagtgtatttacactacggcaaagtggtatattttttttcaagatatcggtaaaat

SEQ ID NO: 5735 - DNA, 522 bp, Cannabis sativa
tatttgattttagtattatatgtttcctctctttgtacaagggaagggtcgatttgttgtatcggaataagctttacttaattagtcggataaatgaggtgatttgccttatttgaagaaagttaaaagtgatgtcttgcctatgaacagtgcttatgtatctagcaaattgtgtgttattattcagtagctaaaattgagtagaattattatcatattaaaaaaaaatacttggaatttttttttttaaagaaacttcatcttcattagatgatatcattcaaaactaaagatgaaaaagcagtagagagtgaaattccactaaaaacagtcagtctctcctaaagcagcctgcaccaaagcaacaacttttattaacaggtcgtttaaaaaaataaaaacaaaacacaactcagaaactaaagccttacaatacaatcaaagataacatgaccataaggagaggacattttgtcaaagaattgagatcattaactaatataaggcagtcgaattcaacaa

SEQ ID NO: 5736 - DNA, 913 bp, Cannabis sativa
gtacaatacaatgttaaaaacactgtatcatagtatttttataaattttccctctaatttttttgaatgttcccttatttttatggtgttcaaatgttcgatattttacattattacatactacataagaaaatgataaaatagatttaagattggacaagtcaattataatataaggtccacgttgtattagttttcaaatcatgaaatagatttatatatattttatgatagcatcttgatactgtaggtttgtagcatactatgcctttaaaggggaggcattgcaaatcctactaattgttaagaaaattgattacttgctccttaatgttaatcccctattttagtgtttgttaatgactattttattatttttaagggttgtaagaattgtattatgtgtgtttcctttggctccaatattagggccacttgtgacattataattggtctttatattccctttgcagactataaatataaaatgtttagcctcagccttcttcagctgagaattatcaaaaccattttttgaatactttaacttggaatcagagcaagcagtaggcccgggccaatgtttgctcattctcagactccctaggaaacaactactactacagtaggtgctgctagatcacttgcatccattacacagtcaacttacacacaacccttcaacacactaaatcaacctttccctctgaaatttgattgaaagaactatgttctttcgaagacaatggtctccatggtcatcacgagacatcgtcttgatggatttgttaatggcaatcgaccatgctcagtaaagttcattccagcacaaccaatagaaggggaacctaggttcggtctcaccatcaatctagagaatgaaaactggatagtcagtgattagttgctaatg

SEQ ID NO: 5737 - DNA, 694 bp, Cannabis sativa
aacttttgagcatgtagtctctgccaagtcacttctagtcaaatacttaattgtagaataaatttcctaaataaatttaataaaatctttgcattaaaaaataaaagactaataatcttctagccaaagataaagcaggggagaagattaaaaaattgcaggaacaaatcattaatcttacccgcgacttgaatcacaagaaggaagaaaagaagaaagcttacgaccagactgtcaacaattatatttacattactctgaccaagttacctgattttgacttcgctatctttggtacaaaggtagtcgagatggccaacacatttcgtacaatgtctccaactgaaatccaaggcctgaccaatactctttttttctaaagacattgctcatgtagctaaagtagcagatgcactgagaaagttgcagagaatctcaataccttgctccttagaaaaatctcattcttttttgtttattccttttttaaaaacggtacaagagtacttgcactttgcacttacttttaagaaaatttggaattcacaatttttatgatttcgcagtttttgaacaatatatccttcgaaatatttattaaaatattttctagatattttaatgtgcggtttatacttttgatgcgattacaaatgcaacttagtgcatttattatttagcattttatatgatc

SEQ ID NO: 5738 - DNA, 2622 bp, Cannabis sativa
cgtctgtacgaggtggttcacaaagaccctatatgtcgtcttcaagacaacaatcattactacaaaacaaccttttaaaggctattttttccatcttttttataaaaaaagaaaagataaagggtgtaaaaatactcgtctattgaaaattgacatttagagacggttattttataaaaattgcagctataacattgattaaaaccatttagaggcagtttttaatctgagaaaaaaactactatatgacgtcgatttaaaaataaccaacgacataggtatcaacttttttttgacacgtgtgccctatgacgttggttatttatgtcattggttatttttaaataaccgatgccatatggttatgtaagaaaccatttcagcttcgtcttgcactttttcttcaacatgaaacccagcagcatcacagaacccacacccacgacgaaaaaccctcgccaactacctttagaaaagccccatatctctactatttttacattgttttactcttttttattcaaaatgttctattttcgatacataaatctatacacccaaaaaatttgcaatttgtaaaccctcgccaatttttttcttcaacatgttttcctataatcatattctccttcataatattatttataattaatttattttgaatacttcatacacaaatgcccctatacacgtattaatccccccctcccccccttttttatgtatttggaatatgttaatgctagcaagagaatgataatgtaaattattactttttttgttttgagggtgtacttttttttaattaacgtaggaatattatccccttactaatataactacccttgtaaagggtaatgttggctccttaaaaaattgtgagcttaaatattcccttcaattatattaatatgaataacatttttaaatttatatatcatttatattatgatttattataatatatatatatatatatattacgaattagctagataggatttttttttaaatttatttttagattattgtcaataatatatacacgttatatataaattttatgtgagtagtatgcataaatagtacaacgaacaaagataaatgatataatgaatgttcattatatacgaatgtttattttaattaataaaaaatacaatgaaattttaaatttactaattagtttatttataaaattagtttattttaattagtttattttgtccgagtaattagtttatttatatgtaaacttaaaatagacataataaaaatattttttttattttaattttttaattaatatataagatttatgtggttaactaaacaatgtaattaaattaacaaaaatatgattatttattaccctgcacaacaaacagaatttacatttttttacaatcatattctctttgataatattctctataatcaaattattttaaacaacttataattaagaaaaaaaaaagatagagagatattgcgcttgtaaactctacatcaattataaagaattaaagatcagttggcccacattaattgtacaaaataaagcatattctgttagagcaagcatacacaagtaatgtacataaaaaagacaacatagacatacttgatcactatcttgaccagattttcttcttgttatccctttcctttactcctggtacctgatctttggttacaaccctcttgtgagtaaagggtccttgagtggtggtggtggttgtagtagtagtagtagtggctggccttgctgttctcataaatcttgaaatcttgggtgggtcagatttcctaatctttctttcattcaaacctgttgacaccatcataatgttctcagtctctccacttttaaagtcccttttccttcttgtcccttgtgtggaatcattccctttcatggatccttgactcataggacgtattgagtttgaacttcttaaaatatatggctcaatatcatgcattaattcatctctcacacatgtttttacttcaacaggagtggccttgatcgaatcgacaaaatcatgagtacatcgtaactgttgctcttgctctctcaacttgtcctcaagttccttaatctggtgtaacaaataaaacattaccactttggagttgtcttctctaaaaggacctaccctacacacttaactgtaattataaaaaaaagtgggtaccttctgatgaagtaataaggagtctgagttttgttcttgctgctccttgagttttatttcaagttccttaatctaaaaaaacaaagagaatgtagagttaaatataatatagaccacttaattttccactagcaaagagatacacaaaatatcaattctattctagttcattagcaaccaccttctgttggaggatagcagcataacaatcagcttcttgcatttgatccttaagtttggtttcaagatctttaacctgattaaattaaaagtaagaagctatttcagccaaattttatgttgaggggaaagagcatgtgtaaatataggcacaaaccttttcttggaaagattcagactctgattgctgacgttctttaagcttcgtctccaactctttgatctgcattagtttataaaa

SEQ ID NO: 5739 - DNA, 1059 bp, Cannabis sativa
gggtggtggtgttactgattctgcggttacttcaacgttattagaaactgtaagcacactccatacctgataacattttttttattgttgtcttattattattaattttttgtaatcattcctttgtcatatgaatactacgagacatttcgctatttcacataacatggttgttacttgttgcaggttgaaagtggcgatctcatttcatatggcttaatacctgaatttgttgggcgatttcccgttcttgtcagtctgtcggcacttacagaaaatcaactcgtccaggtgagaactttctgctatttggagaaataattgtgcacccagggtaatttttatgtcctccagaacaatgagactaaatatttttattaatcaatatcaatatgtaattatgtatttaataagtttgggcttttttttgtttacatctgtatgcccacactaccaaatattcctgatttgtgggaatctgattcacaccatccatgcccttcttaattcttggatgcattattctaagcctaaccttgttgtacggaattctatgttttcctgtgtttcttagtagcaaatctgttttacaggttctaacagagcctaagaatgctttgggaaagcaatacaggaaaatgtttcggatgaatggtgtaagtaaaaacatcagatcaaagattgtctcatgcatttttaatcgtggcttcttgcatttcttattcttactaaagcactctcggtctgtatgcgtgatcttttcaggtcaaattgcatttcacagaaagagccttgagattaatttctaagaaagcaatatccaaaaacaccggtgctcgaggcctaaggtcaatactagagaatatattgatggacgccatgtatgaggtttgctaatttctttctcttctgtctaacttccattcataacctgagcttatttatcccagagaataaaaatcgaggaaaacttgtttatttgatattctactgtttatgaagacattagaaatcggctttgtcacggatgatcatgatcacaatcattaatgtttttgc

SEQ ID NO: 5740 - DNA, 780 bp, Cannabis sativa
tcgggtaaggtatttcgacagttctctatagtgtaatagaagttcgatatagtagttcaattgggttattttatcttggagacgataagactgatggtttgcttgcacaattatggatagtgccacaaacgtcttagagagcgatttaatctatgactcaactaagatttttactggatataattttgtttattttttaatattttgagaaactactgataacataaaaaatactgtcaaagtacagtgctcaaataaaaaaaaatcttattgttttgaactctattttgagtcttgttttgctaaatattctttttaatgataatagtttccaaaatgtttactttttacattgctctagacaaattaaaaatgagcttgcaaaagatgcaagactcagtcagggaacttgtatgtatatatggaagaaagattacacagttatagagagaaaaactaacagaagttagtagaaaatacaagatatcctaactaattgtttgttgaagacttgctttatcacatactttagctaaatatgtataacttaatgttgttaatactgtgtggtggccatgttattgtgaatgtattgtatagtactactttggtgaccgatttgagtttactcttgaaattttaattttaatgtagataatatttatatatatatatatactaggtgaggttagcacgtgcaaatgccaatctttattctatttatttaatttttattttctaaataattattgtaagaatttatataatttaattgttaca

SEQ ID NO: 5741 - DNA, 863 bp, Cannabis sativa
ttacgttagaattacgacacctcacgctcgtcgtttttacctttattagaagttcacgtacaaaatattctgttatttcatttacatgaaatgctaatgctttctttttttaattattggaaattaacgatatttaaagttagaaacacttcttttctttcatactctctggtttaactgaaaaaaattgactaagaattagagaagaatacctgcggaatatctttaaaggagaaaagaaatatacgaaataatataccttctttatcattactagtcaattcgatagattcggtactatcaaatacaaaataaccacttacaaaaacatacgaggaagagtaagattggcacggaaaatttcttgaattaacttgtaaattgtaatttaaattcattaaccaataacaagaacgctagcaaaaatccacaagacactaatacactgaagtctcatagcgaactgaattaggaaaccaaaaaagaagctttcaataaaaaggaaaccaaaaaagacttttaaggtaacatccaataactaaagcctcgaacttgaagatgctcaaggaaaaagaacaatgcatgttactttgttcaactgcgagcagctgctggggctcctcctgctgggcgttgtccagcctggcctggtgcaccaccgggcctagcagtgtcctcctgtacaaaacaaaatacaggcataaattatggatgtaatcataaaaacaccaaagaaaacaaacatacaacttcatcagtgcatgctgcaaaggtgcaacaaagttgaagtgtcgattaacttgagcaacaatttacatcttcacctacaatacctttatacaaaacaacagtctacccattac

SEQ ID NO: 5742 - DNA, 702 bp, Cannabis sativa
gctgaaagaagttattcaaagacttaaagaaaagaacattaccctggtggtggcgtctgaggtaaaagagaagttggttaaagaaggaaattatccaatctatggggctaggccattgagaagagcgatagtgagactcttagaagataccttggctgagaggagacattaaagaaggggatgcaattcttgttagtcttgacaacaagggaaatgtagtagtgacttaaattttgtcaagtgatgaattcatgaacttatttgaatccttaaagtaaatggctttcttttatgaatttccttctaaataaggttgatttgtgtttctttttatatgtgatatcatgacagtaaaagaaaacattgtgatttcccattaaaaaaattaaaatctgagtgactgaatacatagaagaaaaaacaaacaagttcatcaaccataaggcaagaactagttttgagacaggccacaaatgtaagggaaagcctgcaaatgtttgcggttgaacaaatacacaatttcactgagttaacaagtttttgatctacctaggcttgtataaaggcgagaccctccgccgaacaatatcctgaatctgctctgctgacaaaactgatacctcaaaatcaaagtcagcattttccatctgttgatgcaactgtagagaacataatagagaacttagatttaagtttggttta

SEQ ID NO: 5743 - DNA, 1591 bp, Cannabis sativa
tatcacagaataataacttctaattcccaatagcaatcataattgttgagtttacataagtacctcaaaaagaagaaccccaagtctgtaaatgtcagaagcacatgaacttgaagcaccagtagcctcttcaggactagtgtaccaattagtttccataagcaatacatgtttcattggaaatggttgttttttctcttctacttcagcactcctcctatctttgtttctattttcttcagtttccacaaccaatgattcacggggtgcataggttgagcttgactgcatgcaacttgtttctgagaaagcgttcgctgaagccttcattggctgaagatcttcactgcccgggtttcttttctgtgtacacaagtcatcatcaggcaaggatgtggatgaagtttttggttcaggagtggggctgttcgagccatcctcgagattatcagacccggaatcagaacaagatgcagactcaatgaaggagacaaggttgaaagaagacataacaaagcaagaaggtcgaacattattgacaacgattccttgagaatgagcaacattcacaatccccactatttgtctaaatatgtgtaagcattcaaagacatcaactgagcgttctggtttatctaaccattgcctcaagctgatatcaccccattcaatggcacgaacataagggtccactgctacctcatcctcacaaactccagataaaccaccctggttttgaacgtaatcattgtgagcaaacgaaaccctgttatcatctccctctctatggctagagtcattcaatacaacaccagataaaccagttccaccaccttgtggaagcctcaaatcgaggttagaaaccctggaagcgttcaattccctagaactgctagatttcatacgagtagactcagtggatccctccattgctatccatctataagaaggttcaaacctgaatactatttatttagagaaaatatcaaagagaaaaagaaaaaacctatcagaacttcagcaaactcttaactatcactgaatattacaaacaagattaaggtttatattaacttttaactaacatgacagactataacaagagtaacagatcttgtcattaataacaaactaaataaatcagctaatcagtcaattacatcaaaaatctagagttgcatgaaggccaaaacttactcatccaacaaatgaagaaccttttggacttgtctgtgtacacactccaagctccatcatcaccaaggaatcatcgaaaactcaattcaaaacaacgaaaaagagtcaaacaaaagcctctcgtcaagaacttggcttcccacctgcaatggcataattctactttcggtgacagaagtagacagcttatggaatttcagctcggttaccaaagcaagtaatccaccatgaacaaatccaagaaaaaaaaaaatatctctggtgtcaatttctcaaaaaccaagctaaatctccaaaaccccactaagaattcacattcagtttttcaaaacaataaacgattcccgaccacgtacagcccaaaaacaggatcatcaacaccaacaattaccca

SEQ ID NO: 5744 - DNA, 2069 bp, Cannabis sativa
gttcgccattgatatcgtcggaaggtttggtttcagatcagagattggaattgaaatttgagctgtgaagacaaactgtgcttgtttgggtttctgggaattgggcctggaatttgggcctggatttcattgtgtttgggcctactatttttttggacccatttttctaaaatgccatctggggctttaaacttgcgaacacaattgggcatttaaacttgaaaattttgaaatgggtcccaaactttggcccatttttcaaaagttgttttatggagatattgaaattttatggtttatagggcaaaaatttgtaaaattgtggatttttttaaaagagtaatttacggcataaacacttaattttaacttcttgttgcagataaatatttaaatttaatttttgatggtactagtacttaagttatatttttaaaatttatgtaagtacctgattgctaaatgtcaagtcattattcgcgtgttatttttttattggtatattttaattaatttttaaataaaattaaaattttaacgacttagatcaattagagactgtcatgtggcgattgacttgacagttaacggttagatacacagaagtataacttaagtattattattgtcaaaaattaaacttaggtatttatctgcaactaagagttaaatttaagtatttatgctgcaaatattaaaaaaaaaaatattgtaaaaggtaactgaagttaaaaaaatatgggaaatacaatataaggtaactagttaactaaaagaggtaatagtaattacctaaactattttctcaatgtattttaacttgttatttctttaagaaattttttgttttttttttttaaaaaaaaaaaaaagtctatgtatatgcacacattgtgtaacaactcataaaatgtgtcatttccacttgttttatcaatttttcttgtttttttcaagtataaatttattttatcaaattactttcttaaatttataactttcaaatgtgaataattatccctcccataaaaaaaaaaaataattatgcctcaaagtagaataactctaatcatgaagattgaattaggctattcttaggccaattatatgtaggaaatatgatctatacacacaaaatatgcattgtaatagaacacctattggactcttcttaaataaatattattgattaaacgattcatacagcttaacacttgggctaaacaagttaggcccatacttagggtccatttgatttaaaaacatttaggcccttttgttttttaattatattaaatttgtcttaaagccgatcttgaattcatatatatcataaatatttttgtttatattttgtgtgatagaaggtttgaaaaaacaaaaaatgggttagaatcccttgatggaaactacataggccatttttttttttttgtgattttgctcaaactataactttttctaaataaagataattatgtgaataaatcttttcattttttattttttgtgcttatttgaattatttccatattttagtgtttaagattttgtgtgaatgtgtttaatttcttatatgtttgttcatttcatccaatttttcaaaaggatatatatatatgcaattttcatgtagttttaataattaggggtcactcaacacctttgttataaattaggttgtcatcattaatatcaaatgttacactttaaaagtaatatggtgcattgaaaatcatatcaaaaccaacaccaaaaatagtaatgtgataccttaaattataactaccaataaagataaaaagaactaaaagaaaaatagtgattgtgacacataatttgcacacattatttatggaaattaattacacatgagtgtaatagactctttattttatttttaggttgtaactttttctttcgtttatagattttataattttgcgattgataatatggttaaatgagtttttgctcaaaacttaactagtataattatggaggtatcaacaatgtcaacgaacattacctgtaaggactaggaagtctaaatttatttattatctata

SEQ ID NO: 5745 - DNA, 708 bp, Cannabis sativa
attagtttcagagagctgagataagaagcaagtgaaaagaaccagggagtttacttacttgggtttcaaggtaagtactgaaagtcctgagaacaaggatgttttaagattgtacctgaaatatgagaaaacaaggggggtttaatgtacagtggttcaacacaaacagatacaaatgttgatttttaatataaaaatggtagtagttctatactcggattgatgcatttcgtgaagctgtttaagcccgtctaagcaataagcaagagtaggttttacgccaatctgtagatgcaactgtttcgaacccagctgattagaccctccttcaatcaattgcctagcatcgcgatgaattttcccgagagacaaagtaatgccatgaagctcttccctgaaattggaattggcattcgaatgttcactttcaataactcttcactaaacaatggagaacaaaatttatttaaaaagaaaaatgttcttacagtgtgtctttcatcaaaagaaaaagattctgtaatgaatccatttgcttattcaacacagcttcttgaatgccatcgatacaactcaaattaccataattcttgatatccttaagcacctttatttattcagcaataataattttaaaaaattaagtaaaaagtgattaaatttgaagagtaaaaaaattcggtgaacttacttccaatcggccgatga

SEQ ID NO: 5746 - DNA, 2069 bp, Cannabis sativa
agtgggataagccaaaaagatgcatacaatcttttcttgagcagaaaatgactgtgattgagacccctcttcaaattttaatggacttaattgttcatcctacacgtcttgtttgtctgtagtcttcaccacgatattgaattgaaattaaatcataaaacatgtgagacttttatccaacgataagattaactagaaataatggtatttcataatttcatttacttatgaaaaagatgaattggacagctcttttaagcgtggcacatgtgattggtttattttatcctaatatgttccaattggaattggaaaaccttagtagtaaaaagaattaaatcaaatatataatgtcacttcaatggattatttcactatcaagaattgggttgtctaattttcttcctcgagctttatttcatgccatatatatttagaaaatgcaaactagtttcctccttccttccgtttgctattttggaattatttcatttctttctttgaccttttccttttaaatatacaaaatataaataatttgcatgagctatgaagagcaggtcaagtagttcaggttgcaactaattgtaaacaataggtggaaaagtaaacattataattttatataggatgatgaaaatgtcactcttaagagataagtttattttaatgaacattctagtctagagttaactaatctttatattttttgtgatgatggattgttctttcagtagatgagataaaaagaagaaaacaaaaatggtttgaggtagccatgatcttggtatatcatcttcattatattttaatatatacatatattaattttgttagagatgattaggaccgtccagttcagctaaatgacctttttttggtttgaaagaaagctttcatctattatgagaggcataaatgtgaacagcaagaaatactagttgataaaagcaagcaatcaaatctcagtctaagatgccatgacaaatgagaaagttgacaacctttttctcttgataacaatcttttaactgttgaagtgtgtttcaaatcccatttgccctttgataacacacactcacacaagtcacaaatcccttcaataaagttttgaaggtatactattgattgtgcttgtcactttaagtgaaccccatttaccaaaaacactcaagtcaccaccaattttcatctaagaaaattgagtttgaggggtcaatgtctcattgcttgaaactcattttaatgcctaagacttacaaacaacatcaaagttggtaatttaggaaagttatatagtagaattagaaatattttcaaatgttggagttcctatggctataagtagcttttttatttgatttgatttatttattacattgttggttgattgacaatgtaccatttgccttttattctaaagccactattgttggctattagagaagaccttaacttcatgagagtcatactcatatgggcatatactatgagagtctctatttgtatctttaccaatttagggacatgggtttgaaactaagttcaaaaaagaatctgcccaattatatagtcaaatgcatcataattatgtctcaaaacgataccctaatttaatatatgaatcaaattttttttttcatcaattccttagtataacatatctgaacactagctttcctgctagtccaaaaccaaaatccaaaagtaactatctaattttatttttttaaagtatatattttatattattactagtaaaattgaggggggaaaagtgtaatagattgaagtatatattggttatcataatccaatcacaccacaatatgagaactactaaaactataataaggggaccaatagagaaatactaagagccaaagtgaaatttcaatcactacaatatgtgttatattattatcggtctattttaatattaaattttatataatttaaatattaaaaattactaaccaattaaaaagtaagacatgaatgtccttaacatatgatccaaccaatatgatcatcaagctcctaaggctaacttcttttttttttttttt

SEQ ID NO: 5747 - DNA, 800 bp, Cannabis sativa
cactcattggcttaaagccatggacactgagacacaagccttagaaaagaatcaaacttggatagtcaccaaattaccacctgggcaaaaagccataggttgtaaatgggtctacaaagtcaagtatgatcaatttggggctgtagaaaggttcaaagctcgccttgtagctaaaggctacaataaaagacaaggacttgactactctcaaacctttgctcccgttgcaaagttcaacactcttaaagttttccttgcacttgctgcaataaacaattggaatgttcaccaactagatattcacaatgccttcctctatggagaccttgaagaggaagtttacatgaaaatccctcctgggtacaatgctccacccgactctgtttgtctactaaaaaagagcatatatgggctcaaacaagcctctacacaatggtactcaaaattaagcaccacactcatcaatgatggcttctcacaatcggcctctgataattcacttttcaccaaaaaatctcaacacatgtttattgctgtcttaatatatgtagatgacatcttagttgctagcaacaatgattctaccatatctacctttaaactctctctcaacagcaagttcaagttaagagacattggttctctacgattttttttaggccttgaaataggccgcaccagcaaagggatctccatttctcaacgccccttcactttacagttgctaaaagacacgggcaaccttggttataaaccggcatcctctcccatggaatgcaatctcaaactcagcaaggata

SEQ ID NO: 5748 - DNA, 521 bp, Cannabis sativa
tgcttgtgatttcatgagaatgtccttttgcttagtttcctgatgttagactcggatacttgaatgttttcttagctaaattaattctgaatttccattttgattctttgaactttttcctagtcaatatattctttccaaaagagaataatattgtaaagaaagtcggacaagttagctttcatccaaattcaacattgcttttcttctaaactttctgtgcataaatttagtttcaaaatttcaaaagttcagcttaccaaacttatctccagaatattttctacagcttcaactctacctttaattaactccacttcggataatcaactgaatagtcgtaacaatctagtattacttttttcaaacttttaactttgctttgtattatttcattaaattcctttcaaagtgcattacagataattattagacgatgtaaaactgttttcaatacaatttttactagagtaatattaaaaacctccatttattacgaagactgtaaaattcttatttga

SEQ ID NO: 5749 - DNA, 548 bp, Cannabis sativa
aagaagtgcttgcttttatgagtataagtatactctcaaactccatctgctatgttctgatgaaattttttatgagatctaagaattgattcctaaaaaggagagcaaaacacaattacatttgcatcatatcaatcatttttttttctcttaacatggttttatctgaaatgacgtgtctgttatgaaattctggctcaatcctagacactctaaagacactctaagatcctttttcaaacttgctcccatttcgtgtaaaaggatagataaatagacacatttcattgcactgatcgaggcatttgtagttacttagcccacttttctattggctatatattcacttatgcattttttgatcaacaatatctcgacccttagttatcagagcattgtaaacaatattctatataatagtctattttaacttttcattcaaattagtttcaagtgaactctttcttattctagttttgtttttctacagtatttttatgtgttctttctaaattcaaggaccaacctatagtctcctattttttcag

SEQ ID NO: 5750 - DNA, 762 bp, Cannabis sativa
aaatgataaggttcacgatccagggctcgtgtcttgtctccttcacaaccgaaagtgaacattaacatgttagaagcttctgaaattttgacgggaaatctcccatcccaatgttcagccatttgattctgcaaagttgagagccagactttcttcttggtaagaattcttgcatataggacagtgtctacactagcttgtggggaaaaagcttctgtgtcatgaaattcaaatacagactcttcatcctcggtgagattaatctttgctttcattttgtgtattagaggatccataaagaaattatgaaacaaaaagaccaagatacagataggtagatatcagagtggaaaaaccagaccgaaaaaggaaggaaaagaggaagttaactgcaataaaaccagaaagaaactgaaaatatctggacaaaagtttgaagaaaacggttaaccccaaaggggacataaaactgcctcagagcaaaaacgtgggcagactatcttttctccttttgtaaagttatttacagttgcaactacttgaaagaatggttataagttaatgttggtattaaataaaaaaaatattatgcaaaatttaaaaattaaaaaaaaatgagagatcaaagaatagagaaagaaggtcattggtgctgccacgtcacctaccttaacaaaaaaaattatatagatatatagatatttacagttacaatgcaaaagggcataatcattgaccatttactaaaaaatagaattaatc

SEQ ID NO: 5751 - DNA, 2887 bp, Cannabis sativa
gggggggggggggaggtgaggggtcttttgttattttggaaagaggatatcaatgttaatattttaaatttctctcttaaccatatagactacattataaagtttaatatgaatgttacttgtcgtgtttcttacttttacggttccccttacttgtatgaaaagtgtcatacttggactttaactaataggctttttgataatgcgcctttacttccttggcttattattggtaattttaatgattacctttcaatggatgatagaatgagcagtttgaatccccccaattatgctattactctatttcaaaattttgtttctaaatttgatcttcagccgattcattttgttggtaatcgttttacttggaagcatgtctcatctttcgagtctcttgattgggccatttctttcaaaaactggtttaatctctttcctaatgctacccttcagcatcagagtttttatggttttgaccatagagtgttgaatcttattcttaatgatgattgtatgaataataagcataaaaggagatttgtttttgagaatcactggcttaccgagccttctttttttcatactgttactaactcttagtctaatgccccggggagcaatgttgttaaccccttagataagcttatttccaaataaacttattgtatcagctctattaagacctaaaggcattcggtagataactttaattttagaagtaaacatattgatgatatcctcacctctctctactctaatctttccctttctaatgaggacctcactaatgctaggaatttgcaatcccaattagatagcttgatgtataagcagaaacttttttagaaacatagatctaaaattcactggcttcaagctggggacaagaatactaggttctttcatagcaaagcctctacgaggaaaaggaataaccatatcagatcactcactcttagtgatggtaaagtgatatcttcctgttcagatttgcagtctgagattaagtgctattatgcttacttattctgtacccaaactgttaaaatagacaatgttcataatattctttcggtagtggataggagggttagtgatagtcaatttttatttttgtttgagctttttacttcgaagaaggtcaaatctgctcttttcaatatctctagagataaggctcatggccttgatggcctcaatactagtttttaccaaaagaattagaatattgtaggggtagatttttgtaatgctgttcttagtatcctgaataatgatgcggacatagcttctattaacaacacccttgttgtccttattcccaaaaggtctaatgcatcccatatcaaagattttcgtcctattattttgtgctccactatttataaagttattgccaatgtcatctcaaaaattcttgtgaataaaataaggaattgtaaacaagatctatcttctcttgctgatttagtgaaaaatatttgtaataccttgtcaaaattccctaaagtctcggttaactttgttcctagaaataataatgttgatcctcattgtattgaatataaaaaaaaactttaaggcttgataagggactagtgtggaatggttctcttccacccatagtacttcatttttatcaatgaatgttacaattcttcaaaaaaaaaaaaataaataaataaataaacactccattcaagtttaaaaaaagttgtgtataatatgaaattttcagcaattcaattttaattattacaacttaattaagtacaacattatatcttatcagaatctaaacaccatacatctgaaaacttaaaaaaaaaatgaaaaacacattaacaaactaatattctcatacaaataattaaatgattaaaaagaacaaaaagtatgatttgtaattcgtaaaaaaaagatagtatgatttatattttttttgtaaataaaacctataaaaagcatataacatttttttgtcttttttttaagaaaagagtccctaaagtaaatgtacaacatatagcgtcgtgaacatgatttcttatacaaagggcaagcgaaaaatggaattgaatttgtagtttcgcattatgtaagtaaaggtatagtactattaagtctataaacatcgatgaggtcagtttttatttttataaaatgcaaccaaaaataaaaataaagttagggatttgaaactgaagcttgtgttacagtttaaggttaacatgaaacacctagtattgacagaatattttccttataatatagcaagtttttagagaggcaataatcacaatctagtatagtttagatgatcagctcataaaaagcatcaacccaacaaccatttcactagcactgtgcacaaataaatttctttttaagcctacaaagttgtcaatgatatgaagctttggagctttgatcacactatacaccgtatgaaggagcagaaccatattacatggataaacaaatgagtaaatgccagcactgaatatctatacagatacaaattcggagaaatacaacagcagataaataaactacaatatcaagctttctttttttctttcctttttaagggttcgatggaggaactttacgaaagaaaagaagaaaaatgcataccacactgcagcaaactagagagatatcacatccaaacatatctcccaattgcctcttatatttttcgtcatcatctagaaaagtcttacctgaaatgttggccccttctcttggggacgatgtcaaacatcttaattctcacttgatgtgctgcctctaatgagggatccacggcggtgacctcccacaatcacatcttttagtcgagaaatgggaccaaacactctgcttgccctctgcaaataag

SEQ ID NO: 5752 - DNA, 678 bp, Cannabis sativa
cattaggttttctcaacaagaaggaaacaactatagtatatataaatatatttaaacattcagcctttatataacataagtgaagttgtatgtatatttcatcaaaaaaaaagtgaagttgtatgccattatttttttggcatatgacctttagaaacttaagagagtgagtgatgtgtgatcttctccatctaatattttattttctctaattttttagtgttttaaaataaaaatatatttaacatttattaataataataattaattcgtgattttttatttttattttttataactattactattatttatctttttattttttataactatcaagattattattattattattattaaagtaatttacggttaaattctcaattcacttgtaaataatcctactatctacatatattaaaagtggctatctaacaacaattttttgtttagcagaatttgttggtttaatgttttctttttcttttaaacttggtttaattttttttttaacaaaagttaaggtctcgttacttagacgttagcttagaaaaaaaaaagataacaatcaaactaaccctccttgttcattggaaaaaaaaaaaacacctaactctcctttttggctctttatcgctgttttacttgttcatccacgatttcatcaatatttgg

SEQ ID NO: 5753 - DNA, 893 bp, Cannabis sativa
ctacccaacatctacccggaccttgccagggatccgagtcaagggtttagatcgagttcatagtaaaaataatataattttataagtcaataccaactatgtattgaataatacaatacaatgcaatgcaatacaatatacaacacaatgtaaaataactaatatattatataatattgtgcgggactgcagtagttaaatttaaagaatgcttacattacatttatcattatattattttaaaaataagagtgtaaaaaataatacaaaagaaaaaaatattatatttttaggtgacacaattacaaagtgccaccattgaaaaatgctctaaataataacttttacaaagtcacccttttaaatttgtatatatatcttgtaagtaaataaattttgtatacatattcttaaccaattattttcatatatatttttttttcaaatatattgaattttgagtacacgaagaacaaggtacatttgcttagaaaaacaaaatcataacttctgtaaaagaaaaaaggtttaaaactcatgcagtaaatacaaaatccagttcattggctattacatccataccctaattttcaaggacacttcacacacaaatgagtggagaaatccatcagaagaccttgttttgtgctgcagagtggagattttgatgaagaaatttactcataaggtttcattctgattacttatgaacgaaagagcaagagtcaagagagctgattttccattgacatgcttgagaacataggaaaacaagttatatgattcgtttgaattgtgttgcccaaacattataagccacttctttagctatagctaaacacaaaaagcagtttcaaattcaacactaagctaaatatattacagttcaattt

SEQ ID NO: 5754 - DNA, 1274 bp, Cannabis sativa
atatatgatttatgattattgatttaatgatattaaatttctagcaattaaatctaacaaatttttgtattaaaattattatataattatatgaaatgtatttgatatagagttttgacacaaacaaattaatgccccccctcccatatgaaaaatgtatttttctgtgtgtatgcttgtgcatctctcaaagttaatgatttaaaaaacaaaaactctttattattagtgctatgaaacaagaaacagctagtgaagcacaataatatgaatagcaatcaatttaataatacccctcctatataattgtcttaaaaataacaaaaagtacccacgactagagacagcactctatataagtagccataaaactctcatatctttcatccaaaactagtaatatattacaaataaataatgaagttcagcattctcattttctttctactattttctatctcttctcgtatagggatcgtctcagcacattatccccgatgtggaaagattgctggtggtagactatgtccaaataatctctgttgtagctttttgggttattgtggtagctcttttgtgtattgttcaattggttgccaaagccaatgtagcccccgtcatcaccctccgagcccaccacctccacctagcccacctccgccaagcccacctccacctagcccaccacctccaagtccacctccaccaagcccaccacctccaagcccacctccacctagcccaccaccaccaagccccccacctccaagcccaccacctccaccacctgcaagtgtagaaagaccagatcacaaatgtgggccgagtggtgggaatagtccatgtgacccaggaaggtgttgtagtagacatgggtattgtggtggctcatctgctttttgccaaaaaccaaactgcatataccaatgttggcattaatagtgcgcattggggttaattactattcaatatcaattgattaatgctacatatttggtgaatcttttatcgtagttaattgtactagtactgcaactttcagctttttctttgttcaaacctgatgatgatcaggcaaacattacgtgtttattaattctcaataatattaaatgacgttgttttataaatttcctgtcacatttagttttttttttctttttaaacaagctatcacatttacttaaatgtatattttatgattaattacaaaattttctatttaacagaaatattaatcatatcaccatccttgactctccaaataaatatat

SEQ ID NO: 5755 - DNA, 700 bp, Cannabis sativa
aagtaagaaacgatacctgggttcagggtcaaggccacagcacatctcattaacgaaagctttcagtgaattagttgataccatggaggagcggatggggacaggggatccaaaccagagggcaacagcgaaggggcaatggacaaaaagatgtagaggggattccattgcatttgaacaaaagcaacacgtttgcaatgcaccaaatctgtcacccgtgggcagagcacctgctacagcacgccaaagaatcatcctcattcgcgggtgaatcttgtccttccaaatccatttccatagaggctcaatactcccaaaccgactcttttgatcaaataaataagcatctttgacagtaaagactcctctattggcttccttccaaattagcaggtcattgtttaaatcaagagcaatttggatcgtactaatccttctacccaaggcctcaccaaataagaaacaaaggtagttagtgttccatttcttttctctccgaaacatcaaatcagcaaccgaacggagactaggagccttacaccggatagattccatgagttctctaaactcatcatagcttagccaagggatccaaggttgaaaccgaagatcaattgactcccccgaagctataatcatacaagccttttggagaatgacatgtctcgcatcaaggatacccctccatacaaaggaatca

SEQ ID NO: 5756 - DNA, 1140 bp, Cannabis sativa
aagtatttttattttattttagaaaatattacatatttataatttcattagttgagagttaaaaatacttttgaagattcgtactctttagatacccaaacaagcagaaaggttatgattagtcttaaattaatcataaggtattccactcttttcctcaatttctcccaacatttgttttagatatttaaaccaaaaaatgaaaagatggctagggatgttcttaagtcttaacaataaaaaaatcaactcaaatctaaaggcaaagcaaactatatatctcaagtcaagtattcttcacttacaacttttgtcactacaactgaaaatttttgccaaatgcaaaccatgaatgaacaaatccatctctagaaaagaacagatcaaagatattctcacattgccagttgtaaaacaaggatatggggaaaaaatagctagcatttacaacaaaatatcaaacaaaaagtgatgaacacaatcatatcaacataacactataaccaacaacaacaaacccaaaaagaaaaaaatattcctaatgtcttagtaacaattttctgatccaataaccaaatttgtagatctccaaactcaaatatctcaattcttgcaccattaccgcgaatatttttagcacctaatttcgtatgaaccagctttcgtgatataacgaacccactcaactgtgttgtatccactcttctcccatacctacatcagaagtaaggttagtgactcaagttttaattatattaaaattgtattgagttctgatatgcaaactcaattaccttaagaaatcgtactcgaagaccagatgctgtaaacattggaacctgcataacaacataatataaggcacagaaaattgaagagaagacaacattatgacaaccatgagatttttgtcactttattctaaattctcactatgcataatgaccagagacaacagtgagtttcttttcaaaagaaggggactcgattttgactatagaaaacttcaggcacaagagggagggagggagaagggaagtactctattcaatatttatgcccgacttaactttaccatgtaaaatcgtgatgctgacagatattacattttgcttaataataaaatgaatagaaaaaaaa

SEQ ID NO: 5757 - DNA, 737 bp, Cannabis sativa
ccccctccctcttattctacatccgccaccaactctacatcctccttattctccatacttcctaacaaatatagcctaagttaccacgtggcagcctttgattggtccaagtcattaaattttattttttatttaaaaataaatttaaatatatcaatagaaaaaaataacacataaataatgacacttaacaaccaagtatctataaaagttttagaaatataacttaaatatatttatttgcaatggagtgttaaacttaagcatttccaccataaattactcgtgaagtatttcaattagtgaaaaagcctaaaccataatgtgagtgttgttcatttatgcacatgaagtcaccatcgtgttgttcatttcatttatttatctaacattctttgcaattatcgtgactgtattttgtctaaccgaaaatttccatttttctttgtgtaaacatattttaaaaaaataataattaagactgattatgattttcctgtttttctttcttttttattatttttattcttatgactaacttgctaagatacataaaagtgtttttaatcccttttatttagtctttttctaattccttttttatttcagttctaacattttcaagaaatcagttccaaatcaaaaataaattgaaaactactaatgtaaagcttacagaacttgatatagaattagcagctaaagttttgaatcttgctccaacaaagaagatttct

SEQ ID NO: 5758 - DNA, 1383 bp, Cannabis sativa
cttatatttgaaattataaattatttgattctttttttctttttgaaattgagaagtaatcttaaaactatgaagaaaatgaaactaatttattttaatatggaaataaaaaaatatataagaacgatcttagtggtgtaccagagattttatcattaacctgatttgttaacaatcttcacaaaaataattatgaagattcatagaaatatgcgtatttcatgcgcgtggctaaccctgaaaaaggaattatgtggctctctgtctattacttatttatttatttttggttcgtaactgttcaacacttgattgtcgagctttagaatattcaggctttttaatttgcaatccacatatagaggacgacgcaatggtcataaatggggcatttctgatcagaaccataaatactgcaatatatatatcatcacctctttctttatgcaaaacggtttgaaaggcttaaatacaatcaatacaatagtaaaaaataaaactggcggtgttctgaaattaaactgaagcttttatcagacaaacatcactacttctcacttttcatcagagataaacaactgtgtatatatatattataataatgattctaaaattcgtgcctggtctggtaactaataatgtgtggttgacatcaactttggattggtaaaaatgaaaccccatttttttttttgaagtttaaaaataaatttgaagaaaaactcaaaagctaataataataattttaaaaaaaactttcgttcagctaagtctgacattaccgcacgcttgaagataggttgggttgggccagagacaatgatcttatgagaggttcttgtggtttaaaaggggtggcctagtcaaaaagctctgccccccatataataacccccaaactcagtagtgaatcatcaacaatgaatagtgatgaatattccacaccatcattgataaattaccataactatatatattttttttatggagcaatgataacaaaactataatgtaaattattattgttataatacttattttttatatttcactatttggtaaagtacaaaagtaaattttgatgaagagtcatttatttatttatttttatatatttaaatccttgtttgtattgaaggtatagaatttttgttatggatcatgagtgaaagatcatagaggaaagatgtataaaaatggtaaagtagccctagagaactttatagtgacaaaaacatgggcattcattcaaatttttttgaggtgaaggagttgtgcaatcttcaatttggaattaaaaacatgaaagtacatatatattttttttactaagcatgaaagtaggaaataccctttggtttattttgagtgtgtattggttgc

SEQ ID NO: 5759 - DNA, 576 bp, Cannabis sativa
atgagcccaaatcataaactaaaggtcacaataatataagcaaccattttgggcttctctaactcaatattttgaattttgccaaaagcaaaaaacataagtttgaaattgattaagttccttataatatgaagagaacgttcttagaaattgtttaaaatttattatgaagcaaaaattgaaacaaataatattgagtcatgtaaatgtcctttgaaactatgtagaaattcaagctaaagtataacataaaaaatgccataaggctaagggtgcatctcataagatttatggtttattgtttttttcttttctttgtcaaaagaaaatcaaaacatattaaattgaacaaattatatacttttagtatataattgtaaaaagttaaaataaagtatttttaaaaaaataattaggcttttttcttaattaaaatattaaatatatagtatttaaaaaaaaacaaattgtctttttagaaatattgtatttttttaataaatagtagtaaaagtataaatatggcatttttcaaaacttgattgggagctcttttataagaggaaattacactta

SEQ ID NO: 5760 - DNA, 595 bp, Cannabis sativa
atctttttaatgactgtacactaactatatataaaatttaactattttattgtatacattaacagttttttttatagacatagtaaataattatttaaactttatttttaatatcataaattatttaaattttttttaaaattttatacataatctaaaacaagtatgaaaaaaaattaattgaaaatatgtttttaatagaagggagtttaagctttcgaaatattgaagtgtggagtaaaagtttggttgaaaagcatgtgcggtagtaaccatagataaagataatctttagataaaataataatgaattcattctatttagattgagaaaaatagaaaaatttaaaattatttatcgtgataatttgtatacaaaacaaataggttatttaagatttttatctttcgaattttgacatatattaaattatacttcttgaacttttaagatcgttaataatgtttgttcggttttgttttgttttttttttttttttttttacttttagaaggtgaatcattattcaattaatgaagttctttaagtttttccaagcaaaaaaaaatgtttaaggttgaagtgaaagataaa

SEQ ID NO: 5761 - DNA, 1304 bp, Cannabis sativa
gtggatgagcttcacaatatggtgtcagtgcttgtaggattcataattaattgtgataatctcacttcatgcattttcttgtcttcataagctcacaccttcttctgactgtttttatctttggcaatacatgcataacagaatttgaagctatcattttcttattcatagtccacccctttgatgtaggtgatcgttgtgaagtggacggagtttaggtacgtatatataattttgattaatatatatacatatgtacatacagtggaaattagttaatgattatgtatgtataatccataatattatcatatggtggttgaggaaatgaatatactaactatggtttttatgatgctatataatagggactgatatcactcataatttatacatgccattctttatctaagaaaaaaaatgaagcattatttggtgattctttgtgctggtccttttctttcattccaatttcaaaataaatactaatattcttttttgtttttctcatgcatgaattatatataatttgcaatggtatggttctactttttatttatttatttgcaatgtcactcacaaaagatatgtgatctttctaagggaccaaatattgaggtgaagttcagcaagctaacctcaatgttctttgtgcactctcaaagccattaagagcaatattgcaggataattcatactagtctcctcctcttgcaagttgcaaaatgttgaagtacgagaatacttttttttattattaatttcactacaaaagagatatttgtatgtatagataccattctattattgtttcaataatagaaattacctttttatgttatacaaagatatttctatgtaattataaaaaaatttgaataatgaaattataaaatttgcaagttctaaatatttttgctctgatgtagttatgtttgtatatgtattcataccaaaactaattttaatatttaaacataaaacgacattttaaatagtaaaatatattattaatatctttgtagctattatatcaacaaaattggtaatttttttaaattatataaataataatttaatgacatttttacaaatgaagtaatataatttagtaacatttttaaaatgtcactaaaatcattttaaatataatgagtaaatatataaaaatttattagtgacatttgaaatgttattaattattattttagtggcattttcaaatgtcattaagtgaactatttagtgacatttgactttacctcacattagcatatcttacatttcttacaaatgttacaaaa

SEQ ID NO: 5762 - DNA, 1520 bp, Cannabis sativa
ttttttttttaaaaaataatttttccaataaaaaaaatagtcatgcggccattgtctatattgatcaacacttcacataaaattactcctaaaacatagttgtaatatataaacacttgaataaaaaaaaaaattactcctaaaaattagatcacattgcatatgtggcaagaccactccaatggacaacccccattggagatgctcttatagattattgatattgggtaccattagtatctaacacattctagatgtatcgtcttgtgatttgttaacgatattccctaaaaattattacattaaactatatacaactcaatacttacttacactaatagcaatattaatacttatgagcatgttaggcaccactagtatctttaagcattaatttatcatctttatatggtaagaattttctttattaagctttctacattttgagaggttctttttcaagttgttctctttcaatttggactatggagttctaaagttggaataaaataggggtaaatactatttttgaattattttgtaaaagttattaattagacccttttgttaaatgacaaattacactatatatttttcaaaatagtatcccgagttgattttttttaaactaaaacttaataacaacctgatctataagtgttatgataaggctgtgtacaccttatgtatatgttcgtactagaaattatcttgaactttgttttcttaaaaaaaaaaaatcaaaaattaagttcaataaacagttttgtaccattatgaaaaatacaaagtttaatttatatattttttaacaaaatagatgatctattttataatttttataaaagacaaaatttaaaatggtattaattttcgttcgttcgttctacctaattaatgattatactgaaagaaaatgatctattttataacttttataaaagacataattctgccttttgtttcttaaattgatttaaacattgatactgcttctaaatttgatgctttacaattatttctccagttcttactgacttaagtatggttttttaaatacactagtaaagacctcattctttactttgttgttattatagggagcttttaagaaatttaagcacagccattagttttgatggtagtgctagattagtctcttatactaaggttttttattcattttattaagtttgattttttaactttaattttgacttattcatatgttccactttttttactaaattaggagttttattagataattttactagtttgttttctaatttttcttattaagaattcttatagttagtatacttgatgttacaacataagttaataatatatatatataaatgaatgagttctgtagatttgcagtcatataatttaagcataaacataacaaaaaaaaaacaaaaagagtagtttgatggaactgctagattagtgacttatattgaggcttcttattcattttattgagtttgattatttaattttaatcttaactt

SEQ ID NO: 5763 - DNA, 3172 bp, Cannabis sativa
aattacataaacaaacaaaaacaatgcaaaaagagaagagaaagaaaaggaaaggctgtctaaagagggagaagaaaccaatgagagttatgactcttattattattattattatgagttggtaagacaaagagagagagagagagtctgtgtcacattgtcgtgcagggctgtaatactactccccctctactcctactatatagtaatttacatatattatatataacaaatattaattatgttgatagatatctatagagttaaagataaacattgatgatgattagtaattagggctggatttttttgacacgcatgaaaaaaaatatatgagttttgatacaatgttataaattgacacacaaaaaaatataaattttacaataagctcaaaaaggtttagttgtacttaagtaacaatagtcttatcagaaagtaccataggttaatttgatgataaataaagttaattatgatttttgtgcctaaatattgatatgtattaaattatgttttttgaattttttagaccgttaaaaattctcttgaactattaagatttggatttaaagatttttgtctaatttttctaatgaaattttgacgtaaataaaattcaaaggacatgatttggtacatgttaaaaattgagggacaaaatttaatagatatcaaagttcgagggacacgtgattagtaaatggacaatcgttgtattagtaaaatttaacgaaattggacagaagtctctaaatctaacaatcttaaattttcaatagttcgcgggaagaatttttaaaggtttaaaaagttcgagaacatgatttagtatatataaaaattgagcaaaaaaattcttaattagcttaataataataataatttgagtatttattaacaaatatacaaattttaataatattatatgattatttctgcaaactattattaaaaaattatttgaaaataattatcactataaaaattaaaaaaatacatacagtttgttaattattttatttatataaatataaaatatgaaaaaatatagcacgaatttaagcacaaataaaaaacagccgggtcttaacaacacaatacgaattcgaacacaacacgatccattgattgattatgattaatattattaggggatcagatcaaagaaaaatagcatattatagactataataaaagatatagaagtttaaactttgatgaagagaaaaaataaataaagaaggcttatatattagccgaccattttggtgggaccttataatagacaaaattgcgtgatgccatttcaagaactctctttcacattacccatctcatctcttctctcaaagctagctaacctctttttctccctttcttttatttcttcttcttctttatcatcaccttccattaattaaagttaaaaaatccttcttggttttggggaatagattattaccaataccaacttaaacctttttcttatatatatattgtaagatttactcttttacttactctctcttctctttggcctctttcataaatattaattagcaaaggttggtataaaagaaataaatacaaaaataaagttgttatattctctatcttctaaggcatttttagagctgtgattgatatgtacatactcttaattacgtagactcatacgtgtatatatatatataaattatatatagacaaatacatttttatataatatatgacaaagcaaaacagaatatatggtcccatgcattgcatatatatagataccatatgtcccattcgtccaaagaactagaggttgaagaattatatatacatatagaagatagactaattaattacataaataaaataaaacttctttgagaatttctatatataccttagaatattttttttttcaataaaaaactaaatatatgatatataatttatacacatcaatcttacgtacgtaactcttaatttaacaatgtagctatagtacgtgttattccaattcttaatttagcaaagtaataataaaacttgataaaacatatataactaattaattaattggttgattaattattattattattgatgaaaggctctttcccaaccattcacaatatataggaaggctttttggaaattttgtagttatattcaataatgatcaaaggaatttgttgtattggtagttgattattttcagatcactcgtttaaatttggcttaatatatatttatatataattgatattgatggtttgtttaagcatatttttcccctttgacatagtcatggatggaatttgaactagacattttttatagttatatatatatacacaaatacaaatatatataattttttttttgtaaacacaagaaatagggagagctcaaccaacaacctggcaattaggtcaaggcaccaatattgtgatcttttctctattttctaagataagggaaaaacaaatactaagagtgaacatagctatattataatttgaataatataatcttcaacatcaagaaattttcaataattaaataactaattaacattattccacgtaaatataattcactacctaatatttttttattttattattaaattataaaaaatacattaaatatatttatttatatattcgcaactcaaacactcaaaaactttaatatttcattaattggtattaagtaataataataatattacgtaagtagcatgaagatagctgatgcttcaattttattagagcatctccaacttatatatgcattaaatttaatatcacactattattaaatttaatgtgtaaaacttttttcactctaaccaaaatataaaaatttacacaaaaaaaaatatattttattattatataaataaaatataatatattttaacatgaaataatatatacacaaatcaactataaaatattaataaaaatatatcatgatggtcggagtaatatttgtactgcagaaacctcaaatttgaagtcttattaataaatataaccatattatagagttatatatataataaaaattaataaaaattagagaatcactttatatatatatattttaatttttactgtttgaattatataatttctatgtgaattgttatttaaatttttataaa

SEQ ID NO: 5764 - DNA, 850 bp, Cannabis sativa
caacctatataatgagagtaagagactgaagtgagaggatcttcttttggatatacttgatggctacgtactaagtacatcatatcccttactttatctttttacttgattccaccatactttgtcgacaccaagacctcaaacaccattaacatacatccctttttctacttttatttgtttattattctcgagaaccttacaaccactatatttatcagatttgggaagagtctcccatgagccttgtgttcataagtctcggaacgaattttacctagaaatccattgttatattattgtccacacactcttgagaacataattttagtgtgtcagatcaaattaataaaaacaaaagtagacgttaccatcgtgagatggggggtaaactactataaattccttgtgtccattttatttgatacgattttatttagtcaaattaattcatctcagtcctctttatttttatgatcttcttagattagttaatgaaaaacttcatcaatagtttggtgctttcattgagagtgttgcagtaaaaatttgtctgttttccctttgggaaactcatttatttacttttctcacaacaatggtgttgagtactaggaggactaattttgaggaggatgctgaagtcccaatggggaagataatcaaccccaaagtgaaggaacctttttccctccacacccacatggagaaagaacatccaggaactgagaaaagcgtcccatgctacctatgccagaagatgaggggtagctccaagactatgaaagtttctcatctccatctagggactgcccaccagttagatccatacctttgcatgaagtgttct

SEQ ID NO: 5765 - DNA, 894 bp, Cannabis sativa
atactgttttgtaatcctcacccatttatcaaaggttatgccattcaatacatgtattactattatgtaatgctcaatggaacttagagctcttaaaagtccatctccaatcaataaaaatgacatttattacatgaagtttatattcatttcatgttcctccattgactagtagtaaatttcatattcaattatacttactgagtcattttattgataaggttacaagtagacagttttaacttaacagcaaaaggcaaatgtttgcttttagaggtaaggcaatatatactagtacaaaaatcattgtttcttggtgggaaatgaagccattttgttgatcccacaaagtccttcccgtttaccagtgttcctcttcattcttatgtaacccttttcaccccattttggtccccatgaattctttactatgatgttatctgttccatatcccacagcagtaaccccatgatttagcatagttgtacagtgcccgttaaacactccctgtaaaagctcaagtgtcaagaaaaatattcacacatcatatatatatatacatacatacacttgtgtttgacaggcttaccccactatagaactggaaatttctgtcagaagcatcaatagctacactaacaggttggtgagccaatgccttgataagactttgttcatcatttgatggcacatcttgataaccagttatggtcactacctccatctcatcctgccacaaaaaaaaatgatgaaatggatgtttttggcttaaaagaaaaggtctatataatgttctttaccttcttctcttcacaggtaccttcctccataagataagggtaatcatcctccttgtgaagtccaccactggattttatgtattcaaatgcatgg

SEQ ID NO: 5766 - DNA, 973 bp, Cannabis sativa
ttctctcgaagcaaacatccacgttgagttatcatccaattggctcgtcgagaaaccaagaaactcaaaccttttttcgccaatagtaataccatctctcaaaacagaaagtattctgtcataaactcttgtgtgctttcctttatatccagactttgctcgagtagacaagtctttcgagcgcatcttctccaaatcctcatcaacgaaagagacgcgaagaaagttctcaacatcattcgggtagttcctcaacacgcgattagagagactcatttcggggccacaaaagtaaactttagagggtgttacctgaactctatgaacataaactaacccatcatctaaagcaatgttaggcattttaaaaagctgtcctgttttactatagttcatatattggctcgcgagccatctcagtggatcgtagcaacaatctttcaactgatagagtctgtcaagagcagactctatgtatccagcaggaataatattcctgcttggatcaactaacttataaaacttttcatcgagtatttcgccacgaagacacccgtgttgaaccaaggaatttatcttgaacaaaatcttgtaaggcaagtttattccttgaggtggttttacaataggaacaaggtaatctgaactcgaaaaagtggagaaaggttctcctttctccaccgaaaatgtggtttcgttttctttgtagtaaacgaatccttcccgcaaattgggaaggcgaaacctgcttggaatctccaagcatagagctgatgattggccaatgcagcatgatggagtgaaatcaacatctctgatccaatagcttctgttgggaacacccttgttgaggttgttgttcttaacagatagttctttcttgtaaatctttggggcaccaagtaactatagtataatatagaagagaaagtgttagtgtatttttccaacttccaagtaccaaactaattgt

SEQ ID NO: 5767 - DNA, 741 bp, Cannabis sativa
aattatctagcaagaatattatttataacttaatacctaaactatttctaaataatgtatgacttctagtttgtaattgtatgtgtggtttgattttcaaacaaaattaaaatgtgttagaaaattaaaaaaagaaaattgtaagataacacctgtattttcttttttatatattggttggctgattatatttactttattttgtttaagatcgatggacgacattatgtatttggttgtttattttctatttttcttttctttgccctgagtagcttacaaatcgtagaagaagaccagggacacaaattcaaagaagtaccacaagaatattataccagcattgcaatagtttatttgatttcctaagaaaataaatatttgggatgtattatttatttatttaattatttacttaaccaaactcacgattagctttgctgttcttgaattttgtacggatatgatttctaaatttgtgaaaatgtgagaggacttcacaaaagtagaattttttttattaataattattattaaaaaaaaaagtgttcctagtataattgagctctcaaattaggaaaaatttggtcaacaaattaatattgtacaccttttgtcttacctcagcatgactactaagccatatcaataatcaagccaaagaatagttcaaattcaaagacctaaaaacacgtgagaaataatgaattagatatagggatggttcaaaaaatatcactc

SEQ ID NO: 5768 - DNA, 1065 bp, Cannabis sativa
caatagatctcccctataaatactccatttttaggccttaaaggtgggggggagagagagagagagagagtacgagctatagtaaaagggtggtagttatgctatattatatatagggtttaatattagggtcgagatatatgggttgggatgtttatttgtttttatatttttagcatcggtttataatagcattaatgcttagcgtctgttataaattgaccctaatgagtgcttattagcaacaattttacactcaatttcaatagcatcagttctcgtaaaaaattaacattttgatcgatgagaatattttttttgtaattgtgagtggtggttaagcgaataaaatgaattggggatcaattggagaaaatcgaataatatttaggattaacaccatattttgtgtttgtaaaaattattagttggagcatctgtttttgtaaaataataaattagacttcatattttacaaaatggtatcatgagcttaattttttataatttttttttaatataaccaacttaaagacaatttttagtacgaataaataagaatattatataccttattttgttataacaactctagatcggattattatcaatttttattttgacaaaaaaatcagtttagagtattattttgtataattttagaaaatataagatcaaatttgttatttaataaaacagagagcacaatcaataacttttgcaaacatattgtccaaaattgtatttgtcctaaatattacataaaaaagctgatatcatctcatcattacaaaaaaattatttttagtaacaacataattttttcgtcactaatttaatatgacttagttaaaataaaaaaaaaattatttgtgtctaaaatatagtatttaaaactaaaaacaattaacaaaagttaagttccttctatcaaattgatgatcaataatttttcaaaatataaaatctaaattattattttaccaaagtacataataaacgaaagtgatattttcccttacaaatatcatcataccataatgatataattgtagagaaacatta

SEQ ID NO: 5769 - DNA, 888 bp, Cannabis sativa
ataaggaaactctaatactaaattatactattatagtataacaccttgtggtggcgtgccctttagcattagaccatctcatacagtgttaataacagatctaacaaaacataagttgagtaactcagtttagtcaaagtattttcaagtaaaaaaaaagttgcttcaggtcacaaacctataatgaaaatacgcaaatttacatgtaataacctgagccatgcaatgcaatccacgtacgtccaaacaaacttgcctagaacagatcttgtcacattgcacactctcactccgaccatgaacacatttagttgttgagaatggcaaactggaaggcttccaaaagcactagaactgtgggcatggttggaaaaatatgatacaccatcctacaagtgttctttcgctctcatttacatctgggacacggtccagtgtcggaacagtgtcttgaatgcaacactcaataacttatactccacatgatgcagtctgtcttctaaaagagtgtgtgggccaatatagcacctgtctacagcctcatcttgaaagaagggaactggagcatgtgaagctgaaagtgagaacaatggtgcagcagccttctgaggtcgaacttccaatttgggggttccccacttttctccacaaaagtggatggaataccagggaagcctctgcggttggaaatacatggagctattccattacctgactgttctgttcaaatattcttcaagaccactgcttattctgaatgttcaccgaaattacaaagttcatatccatggcgtccaaccttcatacatgttgcagaggttgtctatgctagtggcttgcttaagtagataatccacctgctctgagatactaatgtctctgaaattt

SEQ ID NO: 5770 - DNA, 1358 bp, Cannabis sativa
acttcattacataacctggatgtatgcatccattttagtcgttcaaacttcaaactttgagaatggttttttattttattacatatatctcttagcttccatggactacatttcatacaacttggattacagatcaagactcaggaggttctcaagctaaagaaaaacaaatccaataaagaataattgaaacatgtaacacagctgctgatatattaatccatcaaaaacaagagtcaactgtcataattcgatagaaaaaagctacgctttaactaccatgtcagtcaaccgttacaatttttgtttaggaagaagaaaatctatttatccaaaaaaaaatatattattacactataaattggtgtgaaattgtatttgtttgacaaagtattcttcgaagcaaggcaaaaatttagcaatagcagcaaaaatatagatttcaggaatgaaggagaactaaaatatcagatcttcagcattccgatgggagaaccgactggtctccatcttatctttagaaaggtctgtgtgaagaccaagaatcgtatagaaagtagattgctaagagcaaaggagagtcattatccttgatgagcggtagctttaggtatgccctgcaagaacagagcccttgcagcagagtcggtggagtatcgacccagcacagcgattgtagctgtactacttccaaacttctctatccctcttgatatcatacaagtgtggttagcctccacaacgacaatcacatcgcctcctaaaaacgaggacactgtctctgctatctgtcgagtgagcctttcttgtacttgcagcttgaaaccgtaaaaatgaactactgactgtaaaagggatttcccgacgggattgagaccttcagaacacatgtatccgatatgcacaacaccgtgaaagggaagcaagtgatgctcgcattgagaccaaaatggcaagttcagttcgcactgcatttgtttctcctccttgcagccgacttttccattaggatttggacaatctgtcttaccgaaaaccaagctatttagcttcatctccaacttagtgttctgaaagttcattaaccatttcacaaaacgagcaggagttcctaaaagttccttccttgaaggatcttcacctaatgacctaagaatcgaggctacagcagtgaccattgcctgattgactggctctaacttggaagtagcagactgagacgggcaccaagattcaacactagagcgcctcatggatgtttcatcaacacttattcctctgaatttcagaaggctgaaaaaatcaccccaagcttctgcactttcgtcttcaaaaactcctgaccctgagcggactgg

SEQ ID NO: 5771 - DNA, 934 bp, Cannabis sativa
atcaaagtcgtttgcgaaataagagggacaaacaatcaggccactgcaattgcggccatgaaaatggagaagggaagctcagcttctctgttaagactcagttttgtaatttgtgggaaaatgtgttggtatttttagaaatatattgggttctttttgtttttgttttatttttgggttctattttcagttaccaaacggccttttttgtcatctatattactcctttaacggatggttgaccgtcaataaaggcgcgattatgtattgtcgaaattgccggctttcgcatactcccttttttctcttgatcaggggtactttcgtcatttcgtactacttatctgttacattagaatatacgaatgcgtgtgtttttgtttggtccggaaatttttaaaatgtaagaatttttttcactaatgtgttgtatgcgttacgttaagaatattgtccatgccctttaaaaaaaattgatattgtccataaatgttataatgatctcttaaagaatattatattgatttattttgaaatatgttatatacattaaaaatgtaactataacaagttactaatagtaaaatttttattattagaatcaaaataattataattacttatttacttaattaattttttaattcaaatatttaataagatgttttttataattaatatttataaatattttttatttttatttataaggaaattaataaaaccaaattagtatcaagtgatttattaattatttttatttaatttttaaattaatcataactatttaatgatgattcaacaactaaaataaatgtgactaccataattatatatttaatataactattaaaacctccttcatacatacatagatattatccttattttaatttgttttaatgtaattgttttgttataaaaaaaaaaaaaa

SEQ ID NO: 5772 - DNA, 799 bp, Cannabis sativa
tatatatatcctaaattatttatcttaacttcataattcaatttaccacttatatttctttcttcttttctcttttcttgaatgttcttttcttactaagttaaatatgatacaatcttttatttatgtattatttgatctaatctacatttattgatattttttatttactctcattatttttttttttttaggttttcgagatttttctaattgcatgatactatctcacaatttaaattaattttacttattacatcctcatttatctatagtacctccattatctctattcaagatcatcattttttttatagatttttatttttatatttatttttcaatagggtgatgattacaagtaaaatacggcaatataatgattttaaaattgatgagttttaaataaatagtgacaagtgagatacaataatagtagcattttaaaattgatgagttttaaataaatctatcaattgttgtattttaaaacccaaaatatttaataacctacatcttagtcgctccaatcatatattacttttcatagtaatatataatattactaagataaataggaactttgattattggtaagattacattagtatgatcacgtaattaattgggacttttttaattttattttttcttttcttttttctaacacatttatttatttattcttttaatataatatattcacataaaatcttatattcttttaaaaaatataaagtttcaaatgagaaaaatccttatcatttgaataaactaaattcaataattattatttata

SEQ ID NO: 5773 - DNA, 582 bp, Cannabis sativa
ctaaatatggtttccgaaaaaaaaccctaattgaaaaacccaaattcggaataaatcctaattttgaattttgaattcccaatcctacagtcagctctgataccatgtaaaatatggtgattaaattgtgtattatattccatagaatagtatatatttatatataaagttagaagactaaagaagaaactattaaatacaatttattctaatttttacaaatatacaggtaatattctaacaagttttttattgaactgtttattttgtaatttgcattttcaattcataacaaatgaggtatatcatttttttttcatgtcaaggggtgcacaattcaaaaccttggtattcaaatcaggatatatgaaatgaatgaaaaaacatctttagatttttatgaaatgggagccccttatgtttatcgtgagttgctatttgtgagttcatttattaactttgcatggcatcagtttactagaaggggttataagaggcattttatgctcttgtgtatttgctatgattctttagtttgagaatgagaaaataaatgtttcaggtgaacaagattgtacgggg

SEQ ID NO: 5774 - DNA, 1606 bp, Cannabis sativa
ctgctcaaaggaaaggttaaatgaggtctttatcaacttggtgatgcctccaactcctctattcagtgtcacctactaacttcatctagtaactcaaatgtgtcatgtagttgcacatttaaatgtcatttgaatttgatcaacaatacttgtaatgttgaagatattaataaaagtcatttatgttcttcctctaactcctctagtcaagtacttattgtatctaaattcaatgacataaataattggcatttgtatattgggtcaccctgaacataacactctagctcaaatattgcctcccatttctcactctggctctcttaaaaacctataattttgcaaggcccaccaccaaggcaagagttacaaactaccctttcatatctctaacagcagggccacttaaccccttgctcttatccacactaacctctagggtccctcccatgtcacagaggggtttaaatattatgtgcatttcctaaatgatttcagtaggtattgttagatttttccacttactatcataaaccaagcatttgatatcttcattgaattcaaaagccaagtggaaaatcaatttgacttacctataaaaagttttcaagctgattagagaggggagtatagaccatttgcttgattcctcactaaccaaggcattcattttcaacatacattcccaagaacaagtgaacaaagtggtcgtgctgaacgcaaatacagacacatcatagaaataggatttactcttttggctcaggctggattggctatggaatattggtggcatgctatgtccactgatgtgttcaccattagcaggcttccaacactacttattggtaacataaaacccttatgagtgcttgtttaacaagatgccagattataagctacttaaacctcttggttgtagctattttcctcacctcagaccttataatgctcaaaaacttgagctttaatatcatcaatgtctattcttgggatactcatcccatcacagagggtacttatgtgaccatcctgatggtctaattattatctcaaggcatgtggcttttaatgaggatcacttccctgcaaatacctctgttggtcatacaaaacagtttcctatttctcacctatttccctcatctagttttaaaactaattcttttggaacctactaactcagctgttttacatgggaacatatcaccctcacaaatgccacatgagctgaccccaatatttttcaatcaacaccttcccaaatgccacaaaataatcttatccctccaacaataaccttaaatgtccaacctctggtacatgaacagacaagaaaccccctaccaaattcctattctcttattcccacaagtgattctcttctaattatttcatcacctccagtaaacaatcaaccaccccctccatgaatgaacaacctgcaacaccttttgtcccttcacaatctacaagagacttgatgctccaactcgaactcacataataaggacaagatctcttagtggaataaccaaatgaaaagttcccttggccacaaaataccctttactagaagctttcattccatctgagcctaggaaca

SEQ ID NO: 5775 - DNA, 1481 bp, Cannabis sativa
taaatccatcttctgacagatgctttaaagcctctattgccttcaatgcatcttctcctaaggcgcttgtcatatctaccataacaaactgctcctgcccatatttcttagtcatttcctaatatgatcagcaagaagtgaaaaccatgtcaaacaattggaaatgaaacagaaaaaagacagcctttgagagtgttacataagataaattaccaaatcaaggttgtctgaattaaaagcaataatgtctgcaagagatctcacaggagaatctattagctcctcgaggtattttttatctctagcttgaactcagttactagtgcaaatgcttcgccacttttgaaaggatccagaatgatatccttattcgctacttctaaatgatcaattatggttgcacctccatgccttgaaattccatatcagatagctcatggtaagatagagatgaagtttattagcttaaacataattagttctttcttccccataccttaaagtgctaaggtgagtctcaaaaattgaaatagcagaagatccattataaaaggctaaaaatgcattccttacaactcccaatctctttccttttagcccatcattttttaagaactgtttgtaaccacctttgggaatgaacttagctgcagcttctattgcattatggtctctcgaatcatagcccacaattgcatcaaagacatagaccgcatcagatattgtcctgcccattggcctgcaatatcccggggacagactattatatgccaatgcaaattgcttgaaacagaattggcatgaaaatgaaaaaaggccaatagcagcatggactgaagtttgttacccaattgagtcctgacgtggggagattgggacaacaccgacgcgactagtgaggccaacggtgggtttgatttcgacgactgagttatgatcagcaaggcagattagggaaccatatgtctcggttccaagggacactgctaccatgtttgatgcaacggatatggcaggtccactgcttgatccacatgggtctcccgactcattgtatgggttctgtttacgatttctaaaataattaattaggccataatttattgcaagttttcttaggatgaacttgattatacttatatgcattcatgtaaaaagttttttgacaaattgcttgagcgcagctgcatccaaatgaaaagttacgttttcagtaaatgattgtgatcttttatggggtgtttcaaaataatttcgtgaagaaacttattttttttaataataatagtaataataacaataattttttttttttttaaaaaaaaaagaacaaataatacctatttgaaaacacatgtagaatatgttaagaaaatagcaagttttttttacagagatcaacttggactattcccgaaaatgttttgtgattccctacttcgtttctttgttcccagtgattggtctgccagagggggaca

SEQ ID NO: 5776 - DNA, 831 bp, Cannabis sativa
  modified_base (295)..(309): a, c, t, g, unknown or other
tctctctctctctctctcatattggcgagcccgagaaacccaatctgagccaatcctccctccatctcctccctcctctctcgccactgatttcctcccatctgagcgctccaccaccacactctctcttcctccctcctctcttataggtccactcactacaaaaaattttactttttagtcacaacaaaacttgtgactaaaaatgaaaaaattgtgactaattataaatcacaattcttatgttgtgactaaaagatctgtggctaaatgtattagtcacaaaaattacaannnnnnnnnnnnnnntgtatttttagtcacaatacttattgtgactaaagcaaaattagtggcaacttgtaattaaatattatgttttagtcataagtaacattttattgtgactaaaagtcacacttagtcacaaaaaaaaattatgttgtgactaaaaatttgtcactaaataagtaacaattttttgtagtaagtgcctccgctggccacactgccactgcctcccctcccctttaggtaatataaatagatatttttgtattgagtaatttgttggagataatttatgtgtgcacatattttactttgtaaataatgcatctaagaaattatgtatttaagagtgtataagagatctcttttccccaaatttttggtattcatttggacttatagtttttgtcatttggacttggagttggtatataattttcattgccaatttaatactcttgacaaaagtatcatatatattgagaactgacaagtactttgagattaacatatataaattgaatgcatttctccttccat

SEQ ID NO: 5777 - DNA, 566 bp, Cannabis sativa
taataagtcaatagtttttccacaaatataatggtatgtttactcaaaagacaatttgaatcaattttatttatataaattttataatgagaaaaattagtgggatgtacataaattaggaagaagagaaagttatctctcccattttataacaaatgtcattctcaaccctaacttattttattttatttttatttttatttattaaaaataaaaaaatacaaatatgttcttcaaaaaataaacaaaataattacattttctaacaataataatttgatcaaactaaaacatttaattgtattttctagttatataaataaaataaattatgattttcatttcggttagtttatagtaaataacataattaaatattatttttaattattttatattttaacacatttattctttcataaattattttgattccaatcccagtaaatattgttattagatatttcatgagtagttatcaattttcctatattacttactacattaaaattagattctaatattaaattacactaattatattatcacaactatttgtaaacaca

SEQ ID NO: 5778 - DNA, 543 bp, Cannabis sativa
gaaaccgatccagatgaactcgaactactactagtagtagtcgcagtagtattagtagtagtagaactagaaaccctaactcgagtcctcaatggcgaaacaggtgaacctagatcgagttctctgaaatcaggcttgttattagcttcgcaactgagtgaagagtcagcaaatcgttcgttcagtgagtcaataagccctaactcggaacaattagacttgccagaatgcgacattttccaaaaataaaaatccgatctttactctctatatttctaaattaggttttttatttttacagcaacaatgtcaagaagatgaaaaattagtagttccaccattactactgttagtgttacagtgagagaaactcaaaaccagagagagattactctccgaagaagaagaagaagacattaaagaacaaaaaaaaaacccaataaaaaggggaaaagggaaagagatgaggatctcgtgatgttaaaaggaagaagcaaagaatgaatgtgagtctcagaaagatgacttagagagagagagaga

SEQ ID NO: 5779 - DNA, 921 bp, Cannabis sativa
aaataaataaataaattaaatatgataaataaaacagctttgtagtaggtgtccctataaatagggaaaagtaatatagaaccgccaagcagttgtttacccaaaatcaaagcaataaattaagggaaagcaagaaaagcaaaggtcagatcaggtctttccacaaaacaactgaaaatggagagcttcaacaagacgataatggctattctccttcttctactgatcacgctcagtatggccgacgctcagatgccttcttgcgccagcaagctggtgccctgtgccaactacctgaactccaccaagccaggcgacgactgttgtacctcgatcaagcaagccgtagctaccgagctcccttgcttgtgtaacctctacaacagccctggtgtgcttcagagctttggtgttacagtcgctcaggctcttcgtctcactcaaagctgtggcgttccagtcaagctcgaccaatgcaaatgtaaaattttatgaatgaaaaaaaacccttctcttcttcaatcttgatccagattaaaatttttagttttttcgtttcaaaaatatgatgatttctctaaattcatacttacatctggccaattttctttatttatgatcaactcaccaaaactggtctttgattcaattgattatcatttgttttttcttttttaatttttaatttcatttttctactatgagtttatataaattgattcaaataattgtgctgatttttgttctatgtaattttcttcagcttcagctccttctccccagacccagcctcccccaggtgaatttacttgtctcttctcaattctcattgataaaataaaaattattacttttgactaaagaataatataaacccttaaaaattatggtttattaaaatttttgtgatatcgtactttg

SEQ ID NO: 5780 - DNA, 738 bp, Cannabis sativa
gattgcagattgcatgacaaaggggctgtctcactgaagatttcagtatctcatctccaacctcggtgtgaaatcatcaccctctcgtttgaggggtggtgttaagaatgatactctgttttagtcttcttttatttattgtaattaatagtgattaatgtgtgctaatcattgtttagttatatctgtgtgtgatgtattatgttatcgtggcctcctttattctaacattagggccacctgcccttctttattgatgcttgtattattgattagagtatatgtagaaaatgctcccctcagcctccattgagctgagttttcatttttacattttgtgtaaagtttaactatggagaagtattaagtaagtttgtactgctgactcaaccatagaagttgagtaagagcatctacaaggatattaaaaatttacacattatataaaaatataatattttattttatttctcttccatattatttttagcactcttacttttaaaatactctaatgtataacattatttaaaactactataattatgttttcacttattattatttaatatatatcttaatttttaactataataacattttagttttaacaacaatgctataatatagtatagcaaattttttctccaatggtataatacctcaccaagaattatctaaaattttaccattccaaatgctctaagtagttgcaagaagcagctaatgtacaaatcg

SEQ ID NO: 5781 - DNA, 833 bp, Cannabis sativa
ccaagtctgccataattttggtgcctctttgaagaagaaaatttgcgtccagctatatgacaataaagacagcgctattgggaggcaacctaattaattatttactctttttaatttttaaagacatttgcaagtgctttgttagcattttagtttgtttcattgtattttgtaagaattatacaatatttgttgtaataagagacgtaaaaatcgtgaaaaaaagtgcggagaagtggacctacagcagtggtcgcggcgaggactatccctcgtcgcgatgggacttgacagaaaaaaaatagaagagaaatttttttggagcagtagtcgcgacgggaataagcctccgtcgcgacaggagttggccaggaaaagtaacattttttttcgcatctctttgctgcagcgagggccattgctcgccacggagaaggcctagtcatccacaataaaggcccatctcgcaaataacatcccgcaaccctaaaatttcaatacctctgaatttcttctcttttctcagccagtaaacatcaatcctacccccaaaaactcaaatttcttctttattcatcaaatcttccatctacttcactcacaaatataatttttctcatcgatttcctttttccctcaaaaatcaacccaaaaattaccacttttctcccaaatccaaaaataccactattcatcatcttcaactttaagcttttcaagattactcaacaatggaggtggattgaagcattctcacttagtaagtctcattcttttcaagatttttattaattaagtgagtttcccgcaagtttgaataatttgcaattata

SEQ ID NO: 5782 - DNA, 1402 bp, Cannabis sativa
atttatttattattttttttaattcattataaacagaacaaccctttgaagacttgatgatccatgttatcattttgaaacttttttttagtgataacaattgcaaagttgaatttttttcccaagatctttcattcccaagatattgtataatgaacatgttttttgttcaagtaccaagtttactgactcagaattctggtggaacactctgtgctgtaaatttataaagatagatcatcttatggcagaaatacaagacactgtttcactagatgttaaactaacaaaattaagccatgttagaatggtatggactatggaccacaaagggttattcaaacaagattattcaataactctaagaaactgtcccaattctgacatttctcttatctcttttgtttcttctttgagaaaaaaacacatggtcatcatcttcattcttgtgaaaataaaacagaaataaaaaaaaaaagaaagaaagaagaaagacagtgctttcactgagtctcatcactttgtttaattttcttttttagtgctttgaaaaaacaatgcacactagtggtggttacacagcacaagtgacatgcttatctcctaatgcaactgagaaggatgtttatgatttcttctctcactgtggtacaattgagcatgttgaaatcatcaggtagagtccattatccataatcttaattactcataaacaattattgtcattatagctcactacactctttgttttgtttttgttcagaagctatttcatatgaaatcaatcttgttttacttagtctttactacaagttcaaaatcttgcaacttatgtcatgattaattttttagctaatgatgtaaatgaagttactttgtttttttgttctgaatttggactataattaatctggttttgataagcataatgaccccacttgtaagctaaatggtctgtcaggatgcatttgatgactaaacatgttttgattttgaactagtaataactgccttcatatttattgctaaacattcaattaaaagttagtgccaatatctgagctccaaatattgagtttttctggtgtgaaactcttcaagggtatcattgcataatgtaaaagttacattttcttttgtttttcttggtttgatttcattaagagttgttttcattggtgcaaacagatctggtgaaaatgcttgtactgcatatgttacattcatagatgcttatgctcttgaaacggctgtattgctcagtgtaagtaactgttaataattacactatagattgttccagtctcttcctttttcattcctcaaaaatgctacattgatcaatgattgttgttcacttttgatgttctgttccatcaaccattataaggcattggcttat

SEQ ID NO: 5783 - DNA, 1010 bp, Cannabis sativa
aaatgtataatcttttgtcctaatattgagttaattattcgaagctgcatacactaaaatagtttaattattacaacaacccaataatgtcataaatataactgaaaaatttatagctaaaatacttgaaaagaaaaaaaaatacaaaaaattgatataattaattttgagagaatttacattcaaaaaaaatatactcatttagaattctaaaaaaaaagtttagcacatagtgtaatactgatactttgttttgaaactataaatatttggtactgcaaaattaaatttaattaataaaattttatcaaatagttctcaattatataaaatcatataattaaatttcaatttaaaatttatataattaaaaatagtttgattgtattaataaatatgtacgatttcaatatataagtattattaaaaatattgaacactttaaatttgtatgtatgtaaaatttaaggtatcaaatgagtatattttgttatttttattttgtttattttttctctaaattatactcatttgttttcttcttcatcgtcctcacaatctaagaaaaagaatatataaagtcaaaagtattttaaaatattatgaaaaaattaaatataaaaaatataaaattttcttaagagtaaaaaattaaataattatacattatttaaaattttaataaagaaattattaacacaaaagaatataaacaagaaattaaccgaacttttttttttttaccagaatagtaaatgtcgctaagatataagtatggctgtactttagttattaactaattagttttatttattgtgttggtgttaggtttaaaatagggttgttaatacaatttataatttgtagttccaaattttaactaattcggatcaaatcttaattaatttgaactaaattatttgagattgtaccaaaaaattccggtctcaatggttggtcaattcgaaccctttatcggttacgactttaaaattctcaatagtggttta

SEQ ID NO: 5784 - DNA, 1146 bp, Cannabis sativa
catttctctgttatggatgctcaagtaattatattataatttctaatgccagtaaagaatttgagtttttgattgtaaatttcaagacccatataagcatttctaattaatatgttattctatctctttgtgatctccattcttattcaataattaactttgtctctagctactgtacacttatagaccttattcacttgtaactatttcataattcccttagaagagagaaggcaagtactgcctatgactataagaaaatccctaaaatgctgaagtttatataagtatgaatcttaaaacaaattgcagaaagtagtagttgaaatggggaagaaatttactctgcacgatcttcgctcttttggtcactattctttttgagcacgttcattttcaggccagaatagacaagtaatgttttgatcaaggcaaatcaatgctaattgctatgctaactgatacatctccttgttggttttgctggatttccatattatacattgttagtgaaatgccttcttcgcgacaaggccaatctcccaaagcacactcaaatgccaacttcattcatcttttctatttgtgtaatagtattacatatttatactaactaggcaatactaacaattgctaattagtccctataacttttcatgtaacatacatctcgtttattcccacaaggtctgaggttcgagtccctcgcggtccccaaatattgtagggttaggcggggatcctagttttaaaaaaagaggtcaatgctgcattgtatcacaacaagctagatttggtttggattatgcatttgatttgtattaaaaaatagatctacttttgtttgataattcccatcaatgtatagactttagtatcaacttcaaagatggttataaggatatgtgaaccgaaaaagagaaaaacaacaaaggcctagcattctttttccctttacaggacattgttttgctgtcatctgtgctattaatcttcaactgatatttggaaaattattcttgaggtgtttgaaaaggttttgatttaggtgatttgtttatttatctttaataccaatcaatatggccttcgtatgttatgtgaccgtgccatgtaataatagaaccatatggtcaatataatgat

SEQ ID NO: 5785 - DNA, 866 bp, Cannabis sativa
gacttctcttttgcctcaggtcgagtggggagatcaatatagtataaaaggaaaaatctctattacactccctacaaaatgttttggcagatccttatttatttcgtgatatgtgacttttaattatttaagaccacctataaattttcaaaaacttataaataatttacaactccaaaaaaaaaaattataaaaaaacaataacatatgttaaaaaaaaatatttgaacacactgtaaattatttgaaattttttaaataaaaaagttagactaaatttttttcttaacagataagagtattgaaacatcttttagaaaaatttactataaaggaatttatgaaacactctcctttcctaaaagatattccggtagactctcatatttgtttcaacattcacaaaagtttttttcataagggcattcacaaaaatttattagtttaatttttttttctttataattacgtattttataactatttaaggtaatttgtaaattttaaaattttttaaatagtatagataaatagtatatagtgtcaaaaaaattcaaacggctatacgcaacaaaatatttaaactttagtataaatatgataaataattttaaattatggacttacctttgagtatttgtctttatgtaatatgcattttcatgttgctaagaaatagagtgaaaaaataataataataagagtaatttatagtataaatatttaaatttaatttgtaaataaatattcaaatttaatttttgacagtaataataagataaattaaaattaactagtgtacttaacaataacagcaagttacctaacatatttttatagtaaattactcaataataataataata

SEQ ID NO: 5786 - DNA, 724 bp, Cannabis sativa
aagcttgtggactgcacttgaagaactttatggagcccattctagggctaacatggatgaactacgcaccaagttgcagacagttcgaaagggttctcaatcaatgacagattatttgaagcaaaaaaggatgtgggctgatacttttgcattagctggtgaaccatatccagacaacctgcttcgaggtaatgttttatctggtcttagtgctaagtatttaaccattgttgttcctcttgaagctcgcacaacaatgacatggcaggaactatcaagcactctcttaagctttgacagcaagttggaaagactcaccactttctcctcaaataccaaacctcttgatagccccactgctaatatggctcaaaagccatactctcccagcaacaactcaaatcagcatggaagatctggaagttatccatctcagggatgtggaaataaccaatattctggccaactgagaggaagaggaggcaatcgaggcagaggaagaggtggcaggtataataactctaaaccaacctgtcaagtttgtggaaaatatgggcactctgcagcgctctgttacaatcggtatgatgagaactacaatggccagcctccaaactctgactctcaaagtgacaaacagcagcagtttgctcttgttgcaacaccaaacacgctcaatgatgaggggtggtatgcggacagcggtgcgagtaatcatatcacc

SEQ ID NO: 5787 - DNA, 995 bp, Cannabis sativa
tcaataactaacaaagaaaagatcagtaatcaagccaccccacatattttagtgagcaaaagaagtagcttctttcaatcccaactttcacttcaccaatgttcggcaaatgatcatcgttctccgagcgacacgagcttgaattcgaatgccaacagtctcaagaggagcttgaacagtttcattacctcctcttttctctcaaaaccaaaaaattctcagttaaacgaactcattcttaggaatgtttcttccgcaaagaaaacatattcgaattccaaggtggaattgcagagtggtttaagttctgtatcaatatcttaggcaaagtatgtatgtcaatccttcttagtgcaatgtgcatcagtaccatgctgcgtgcaatgatgatatcccacactatgaagaaattctctaatctcttttgcagttgtattactggcttgcaacaaccgctcatcctcctcataaataagatatggggcttcacttccctttcttgatagtagcttggatgctcctttaagaacgtgatactcccaaccttgaacatcaatcttgagtagaagcacgggttctgactctgggattacttcatcaagagggacagacctaacttgaagtgctatctcttcgtttgacttgaaagccaatttcgcaccagtcgccgatacagcactattgtcaagccggccaaccagctggcatcaaatggaggataatttcacattagcacatgaacaaatgaacagaataattgagtcttggggcacaacatattatgcaaatcagatagtcctaaacaaactggcttgtaaattgttgactcagcttgtagatcatgacaatattgactcagcttgtagatcatgataatcacagaaaacttatgtagttacttcaggaagatgtcagtcaatgcttaagcttttaaaccacctttcacaatttcagtatcacatgattcaaacagagaaccacaatatagaaaacat

SEQ ID NO: 5788 - DNA, 2677 bp, Cannabis sativa
ggagaaacatatattatcatcattgtaataagagactcagattagttattgataatctaaaatttggattcagaatcaaaactgatacagcatgtttgtatctaaaaggtatttatataaacaaaaacatgtaacattattatatcatcttaaattttttctctcaagtgagagtgttggagtttccaacttgacttgaatgtctatcctaaacagtattgtcttttcattcctgtctcctcaatcccttatcttttgggtaggtctagttctttcgtgtatcagtccatttatttcataaaaagttttgctttgttcttattttttaaagttttgcctactcttgtcctgttctaaaggttgtcgcctttttgcaatattccattcttgcactattccattacagagtcttttgtctcttctcaataaaggcatgggagatagtggtggtttgtctcgtgaccccattattgaggaagtaattgttaatgctggggcccctgaaggtatggttgtggaaggtccttcccacctacctcaatcctttgaagtaaatatggatggagctcttaatgacacagcagaggagttggtggattccactacaaataataatgtcaatgagccaagaggagatattgaagtcttgcgcagcaatttcttggagtcaatgtcactagaacttgaacctgactttgaactcactgctgaagtggtaaacactggtgtattggtgagctttttgggtggtaatgatgtatccaggtctagattgagagatattctcaatcagatttggaagctaaaagggttttggaaactcaaatcaatgaaaccaggggtgtggggtattttctttgataaacaagaggattgtaaagccattctcagaaatagaccatggataatcaatggaaagcttctgatcattagagaatggcctgaggatggggattggtacaacatggatatggggaagtctgttttttgggtcatggcctctggtttacccactccgtatctcaatgccgttaatactagaacgattgcttctaaagcaggggtctttataggaagtgatttggcaaatcaaaggaccattacaaggaggggatttctaaagtttcaagtagagattaatacctctttccaactcatatctggtttttttcttgacataaagagaggtaggaaagaatggatacaatttcgttatttcaaattaccaaagatgtgctataattgtggctaccttggtcacgataagaaatcttgttttcgcacaactgcttatgcataccctcctcaaggtgaagcggttccagcttatggaccttggatgaaggccgaatcggcgttttttagctgcttcaacacacggaaccaacttgatttctacagagaagatggaggtcggacggtttctccggtgaggacacctactgtggctggcccgcagtccaaaaatgaaggaaaaagacccatcaatggcagtggtgggaaccagaacctgcagcaaacagcttgcaaaccaaagaagaaggtaatcagggttaatgaaagtggcctgtttttggcaaaaatttgaaagtagtggagagttcaagtgtcaaaccataaggtaaaggcaaggaaattttgtttagtggtgctcaaggacatggaaatcctggaaaggaaagaaaagcaagatcagtttctcctagaccattgcgaagacattctcaaggtaataaaggtactttatttgatgaggacatattaaaaaagtattcttctaggcctcctcctaatccagctgatagtggcatacttacaactattatggctgatcaaatggtggacaaggcccatgttgagctttgtcaatctaggcagccccataaacaccctgagcccacccactttccttggcccatctatgtcgaagaaattggattggctgaagaattaatgggcccagctcctgttgataagatggaaccaatacctacaatctttcatgatccagttgatgtttcggacttagtacaccattgccctcaaccacgaaaaagaaaggccagcttaaccttgatcccgtatgtccaacatacagaagaaaacaccatcgagtttacaactgaagtacctgatctccctaaattctctccggcccctaacaccccttttaagatgggctctggtgcttcatcctcatctctgaaaaacgacaagcgtagaaggaaaggatcccgatcaaagaagtcaatggcaatggatactagcactcgtggtacacattccacctctgaagccgttcctgctcttcttgctcgggttggttctccaaaaaatctcattgacacccttaatttggttgaagttcatgttgaaagctctcaaaattttcttacgggcgaggaggcggcccttatcaagcccccccaagccccatgaagtgcctctcgtggaattgtcggggcctcgctagagacccgactccccaagctatttcggcttgggtaagtaggtacaaggtagactgtgtttttcttatggaaacaaaagttagcgaaaataatatggaagagttatcaaggaagttggggttctcaagaattccatattttcctctactaattgagtgagaaaagcactttggttttcattgatctttctttcattctctagacta

SEQ ID NO: 5789 - DNA, 690 bp, Cannabis sativa
ataataaattgcagttactggaggaaccatcctcagatgatctggggtttattgggatggtggggaactctaggcaacgccttcggagttccaagcgtgccaggagtgggagccaacgccaacttgaaagacgccttatcaaacactcgaaccgacggtttcggtgagctatacaggcaaggaacagccgccttcctcaactcgatgatcgaccacaacttcgcctactctaacaagcaagtaagagagagcttcgtcaccgcccttggctccaacaaggccgccgcggcccaagcccgtcttttcaagatggccaacgagaaaaaacactaaaaatcaaaacagaacagagtcactatatatactactagctaagcatgcaccacatgcagataatcagtgtgttaattgaattatattatattaattaattgctgttttattttaagaaattagctctacctacgtacgaaagactttattaatttctttgtttattattattatattatgtattgttttaattaagtactctcttattataaattacatcttgaattaatgttcttaattaattaagttatagttttattccggccagcaattaaaaactgcattgtcatagaattataatatgatcattatcaaggattttattatatatattgttgattcttcatttcgattaat

SEQ ID NO: 5790 - DNA, 1078 bp, Cannabis sativa
caaagtgttgtcatcgacaaagagtaagtaagaaaaaaaggagcatttttacaaatcacaaggccaaagaagtgtctattctgctccttaacacggatggcagttgagagcccttcagccaccaacagaaacaaataaggggataaggggccaccttgcctaatcccttaataaaaacaaaactattatagaggtgacctttaattaagattttgaaagtgactaaagagatgcacctaatcactagagaaacaaacctaaggggaaaaccaacatgtttgagaacatccttgacaaagctccactcaactttgtcaagagcattctccatatcgagcttaagcgcggcccaacccaccttgtctttcctcctgcaggtaatggcattaataatttcatttgcaatgaagatattataagtcttctgatagaaaagcactccggttacgaaaaatgaaggtcgatatacgaccatactagggggcatactcccactaagcgacttctggaaagatatatggaggatatccaccaacaacatgaaggagttccttgatagagccaacgactttatcaaacttgaagaagccatacgacaggcccaggtggggcatgtcaataacaggcagtcacgaggcacccaacaaaattatgacccacgaggtgcacaggtagacaacaacaactcctcctagacttctagtggtaaaaacactagaaacaagcgtggaaccaatagctctgggaggaacaatggcaaaaaggggaagtttagcacttctcccatgccatagaagaacaaggaggagaagtacacttacttcaccctcctaatagagaagcttgaggccatcttcatggccattctgggaacagtcccatactgaaatccctttcatattagaagggagatgggtaagaagaacatgtcaaagttctaccgctattacaacgacttcgaccacgacaccaatgagtgtcaaaatctaaagaaggagattgagtacctgataaggcgcaacaatgcccacctatatacttacgtgcaagatggccaaactcaggcacaaggtgccca

SEQ ID NO: 5791 - DNA, 1480 bp, Cannabis sativa
ccctaacaatatgtaaaactcacagaaaacttaaatcttagaaatcaatattttccttttcatatttttaatttaaattaaataatcacaggagtaaaaaaaaacccagactcaaattcatcatcggacatcacataaaaaaatacaaattttacctgtgaagcatatctctattcgcaacagtcaaattgccaccagccgttcgctacccaaacaaatgccaagacggaatctttaggctctcgaaaccccaaaacctcaagacttgagaccctcccgttcccttcctttctatctcttgtttctctcaaatttgtcgttgccttccatggcaaatctgttagaattaaatctaaaatatatatgaatcataaacttatgtcagattatcaagattactctagaaatcaataagatggagaacatacttgattccatgctattgaatattaataagaatatgagaatggttgaaggtctatagtctaccacaaactaatcttctatcaatgtgttctcacttaattaatgggaatagaggagaagagtggttaaagattagccttggggaccaaacctaaatattctttatatagcaaactaattagagccccataaattttaattaggtttattgttgggtattacacattacaaagcccatacataataatatatttattgggctcatttaatagattatttatttgctccaatttagaatattagctcaaataaattatcttaatttgtaatcccacatgttgaattattaaaaataatttaacaagatctaaccagcaagagcttctgtgtgaccaccaagtgcacgaagtagtcaaaaataatagggctctgatatttcatcacccagtttccaccatctctagcaagaatttgtttttcgtttagatttttttttttttttgaatgggcattcagagactctttgctcgctgcttttatttattaaatatttaaattgtaaatatcttttaaaaattttaacatttttttaattaagtgaatttatttttatatacttatttaacatatggtccaataataggttgccacgtgtctcctagttggaacgaaacaaacttagatggtatttaacaactaaaatggcacgacctcaataattttatttattaaatatttaaatttgtagatatcttttaagaattttaacattttttcaactacgtgaattatttttatatacttatttaacatgtggtccaataatatattgccacgtgtctcctaaaaggaacaaaacaaatttaaatgatatttaacaaccaaaatggtacgacctcaacaaaatagtaatggaagagactattgtgagccacttcttttttattagagtcatgtatgtaataattttaaatattaaggtcgttattacactaatctttatagcaaatgaaatggtaatatttataacaaatgaaagggctaagaattgcac

SEQ ID NO: 5792 - DNA, 972 bp, Cannabis sativa
gggtacacataattctcttcatatttcacatactacaggctacactaaaaggcaatccaagaaaaatgttccacagcaaagaaaacaaatattaaaagaagaagataaagggtaatagaatatttaataataaagaaaaacagaatgtacgacatggtgtgacgattatcttaaacccaaacccttgcaaattgagtagatttagtaaatgtagtctggtagttgaaggggaaactgtgctacatttaccctgaacatatcgccttttggctcttgcaacctgaaaaataagcaaaaaataaagtctgcaagattcgatattactaaacataatattagcacaaccttgtcattaaaaagcactagctaggtaacaagataggctctacatcaggttgaaaagtaaagagaggaggattgttataatagtatgcactatgcaaccaaaaaaccataaatttttaaataataataatgataataatctcatttttattttactttttttctccattgtggttggaaccaagctgaaattatttccgctaagtttcacacgaagctgtttgggaaagtctcttgaggtgaggatgctcatttagttactaatactggaccatttagatcaaacatggtagagtaggtttaccaaataagatcatgattaatggactactttttgttcaaactttgggtaaattttataaacaatgcaaagtaagcagcgtacctgccagggacaaaagtaaaatagccttcaacggaaccttcagaagatggtaaaggagtgcaactctcgtaaataaattccttcgcacctggacgcagtattgggaactgcaaaacacatgacaagtgaagagataagttatccaaagggagaatgcaaggatgtaccaaatatctacaagttcaatatagagattaagcaaatctattgagcaactggtacaaaagctaatgtatatgtca

SEQ ID NO: 5793 - DNA, 553 bp, Cannabis sativa
tgcaagggctggcgggaaaaacaaactcgaggatgagctaattaagttgcggttggttggttatcggctttgtgttgtgagtagggatttttgaggggttggtgggggttttggagattctttttctgcacattgcagttgtgcctaagtaagatagttttttcattctcattttcctttttcgcctttttttttattttctttttccaagggtaagtgagggtttttgtttttctttctttttaatcaatctttcccaagttagtgaattgctttctgtaatacgatatttgacagcgtgtaagataccgcatcaagtagtctagttgtaaaagtattgatttttttttttttgttaaattataaaactcctagtaaataaggtaggtaaaaataattgtttgaggggaaaaaaagctactaccatatatagacttataccattcatattcatgttttgaattaattattgcaatgtttggtttaataaactgatttggtgtaagaatataatggaataggaccgtgtgctcaaaatatccatgattcttta

SEQ ID NO: 5794 - DNA, 890 bp, Cannabis sativa
ttccaaccagtaaactcatttgacaacatccccttaatcttctcgttagataacttagtttctaataatgctaccaaaccaactttattcattctgcagagatccataatggaactttgtttggtccttttaataagtaccctaatgttctaacacatcacattgcaaaattgtattagtaataagcagagaatgtgtctttctattcaaagttaaaaaacaaaaatttatttatttatttgtgataaaagtacgaaaatattaagcaaactaaaatgtaaataataataataataatgctaacattttcatacatttacttaaaaaaaatgatttggtattcaaattgttagagtaaacaatttaatactttatttagtcataaatttaggctaattcaagttcatatttttcatttttcttataacaaacatattaaagaactcttgtaagaaacaagcaaaattaattcggaatttaaatgtagaaaagaaaaaagcatgagaacttttataaacatgcatttgtttcatggtagaggcactcaaagaatcccatcaagagagaaaaaaaaaataagaaagaaagaaaagagagagcaagttggatttggataaggtgtgaaagaactattttgtaagaaacccagataaacaatatccaagattgtcatgttagttatcccaattgtaagaagatgaaattgttcagatctagaggcaacatttaaactcccataaaagtaggctttagatgcagcaagccataaaatatgtggattcatcattcattgcccatatgtttttacatcaaagtgatagatagcaaagccccccattgagagaacctatgtctcgcagaaaatgattaataccaaaagcacagaataa

SEQ ID NO: 5795 - DNA, 729 bp, Cannabis sativa
gaaaaaaattgttctttccaagcactaaggagattccaaattttgtctgtaatacctccaaagagtttcttcttatccttaccagcaaaggagggaagccccaagtactgctcatgacatggttggataggcatacccaagagatttttaaaaaagtgttggtcgtgctgcctagtattatcagagaaagacaaaacacatttatctgggtttatttgttgccctgaagcaagactgtacagatccagagatctcttgatagatctagctgattgtggattagctctacagaaaagtacactatcgtccgcaaaaaataagtgtgaaaccgaaggggcagaccttgacacttttaaaccttgtagggagccagaattctcttcatgttggagcaaccgtgaaagaccttcagcacaaatgaggaaaagataaggcgataatggatcaccctgccttaaccctcgagtcggggtcacatgaccatcaacaacaccgtttagcaaaaaagaataagtgaccgattgtagacagcgaaggattagctctacaacagttggtccaaatcccattttcaacataacttgttcgataaagtgccattcaacacgatcgaatgctttgctcatatccaatttgatagcggcatatcctttggaacctcttttcctgcttttaagagagtgaagcaattcaaacgccactaagacattatccgtgatgagtcgttga

SEQ ID NO: 5796 - DNA, 770 bp, Cannabis sativa
ctcaccaccacacttatatagcacattttgagtggtcaacggtttgttatattatttattaaattaaaatgtatgagacttgatatttatttgcacaaataacaatatactaggatatttgtaattaaatattcagttcaatttaatttattaattagggtaaattgcggcataaatacttaatgttttagattttatacacttaaatactttatctttacttttggaggcaaaaataccaatgttataattctcttacacctattacactactacttctattaactaataataaatatggacacatagaggaccagatgcattgcatttatttattttattttaaaatttaatattcttaaaattaaatgctacttattttaaaaaaaataaataaaagagatgcaataccaaattaccataactgagtgaactactgcactatatgtaaaaattattataagaattgtttttttaaaacaagtagcatttagtttctgatattaagaattttaaattttaaaataataaaaaaaaaaatataatgcatctggaccctccacatgtctatatttataagttaacggaagtgatagtaacagaggtaaaaaaattgtaacattaagtatttttatctctaaaaataaacataagatatttaagtatataaaatctgaaacattagcagtattagttatttatgccgcaaattagcatgttaattataatgaaatagtatgactgattatttccaaggtataattctcttt

SEQ ID NO: 5797 - DNA, 1743 bp, Cannabis sativa
tatatatatatatatctgtggacaacccatataaattgattgatacagaaattcttgtgtatagtaagaaaatgatatatttaacattattattgctgatatttattagtttaataagcaattcaccacatactttaattcagaataagagataactgaaaagattaattagggtaaaattttatgacagaaattgatttttggaggtaattataagaaattagataaagaactttttctttttaacatattttcgtgcaacaacaatattataggtaggtctggcacgatctgcaagtatagtaatattgtgtcgtgtttggattcttgttgacgttcgggctggtccgtttttattttttaatagaccaacatattttttttatatgggctcaaatttatcttccatatttttgaatttttattataattaatgagctaaaattattaaaatatatgtgtattttataatttaaattatttttatatcttttttcaataataattacacacaatcataaaaaataattataattttttttgaatattactatcattttaagtaataaataaatattattgttattattattattaaattattgagctttataatgtatcgacgcgttgtacttttagcttgtcgtgctatgttgtgcctatgtccatattttttgtgttgtgtcctaagttgatatttttcgtgtcatgtcgtgtcgtgtcgtacctaaacacataatttttttgtgtcggatcgtgctcatgcctttcgagctcatatcaatttcgtaaaaccccgacaaatatttacaacattaattctttgctctattttttgtttctctaattacgttttactcttattatttttatacaacaaattaaatagttttccctccgttttttcactcatgaatattatgcataattgtagtcttttttgaaaactaaaataaatattcatttaattaaccacaatatttgtctttctcaatgttgatcttaacagtacaataataaagaaggttaaaacgctatggtagttttttcttaaaaggaggaagaggaggaggagggttaagcgtgtggggtagttcctatagtgttactagcaaataataagcccttgtaattagtatagcattgaaatgtggatcccacagtactatactatgtgggtcattcattttcaggtttacattttcaaataataatgtaatttatatatataaaacatgaaattctacaaccactcattacttgatcaatgaaattaataaataataatctatggagagaggcagctttctttacgtcccattcctacagcaaattattaacccttagtttgatgtgatatgatatatacacacgcattatgtgcacgaatagcctattcgatataaggcgaggccaaaaactatatatcccagctgcctcatttagtatataatatcataattatatgtatacatatagcaaaaggcggcttaattttcaacatatatatatatatatatattggcgactctgattttttatttttcattacaaaatttatacatgttattaagtaattttaagtcagtgcgcatgtgcatgcataataataaattagagaaaaaaaattatacttttaattgttatgtttacaaattatatatgcatgtctttcttcatttccttgctatcctatatccatataattttataatgtcatctccctccctctctctctctctc

SEQ ID NO: 5798 - DNA, 707 bp, Cannabis sativa
tctctctctctctcaattttctttctattttcatccatggtctaggaaatcacgaagagaagagaaggaggaagagtggtgaagtgtatggcaggtaggctaaggaggaggagtggtgaagagtatgacgggtaagctaaatcgttttttaaaaattctattttacagtttcacattcaataatcttttgctttgattttcatataaggatattctaaatttggtttctaatctgtaatatattttaatatttttatgcttcttaatatataataattgtttatagtaaggtgccttagtgatgagtttgttaattattgttgtcttgtaatgagacttatcattgggtacaaaaactgatcatatatgtattttgatgtaatgaaaaccgcattttgattttgaagcaaattcacaaaatgagttgatcaaagaagctggttagcgattgagagcttaatgatgccagaggcaaccaaatccaaatgggaagtagccatataaaggtgaacattacaatttccttgcctgtaatgtgagaaaaggtaccaattttgatgttccaaagtaaatataaaatggtatagagaagaatgaagtggtttattttattgggtatatcatatatacttgggtgaagctaaaagtgaatgaaaaacagagttttgacagtggtaaaggcgtagtaagagacttttttctatcat

SEQ ID NO: 5799 - DNA, 1216 bp, Cannabis sativa
atatcatatatttttttatctcatatatattacagttcttatgtgtaatctttttcactatttgcaatatcattgttaggtatctctatattgtagattgtgtaatgtcaatgtctatgctataacctatttaactttaattttaataattaattgaacaagagcacacacttctttttcgattacaattttcaataaaatacaaaataataaaaatattataaacatttttttattttattatttttttaaataaaaaataataatacaattttttttttttaaatatgtgtagtggtttaaatttaaattattaaaatataacactttctattatattattatatttaatataaaagaaatatgttttattaaatctatctaatcaaaatatttgaatatattactgtcaattttgagccacaacttgtaaaaaaactatacactagtaattaattatatgtataattttttttgagagaattatatgtataattgaatgttggataaattaataacttgaattagatattaaaaatatatgtgttaatgtatgtacttttatcaatatattaaaataattttttattggataagtgctatttttctagaagaaaattaaaaacaatattaaaaaaataaaaagtaagaagaaagtagggaccaaccaaaatatatagatgtacttttagttgggagatttaatttgattttaatggaaaacaaaagaccattttttacatgttagaaaagagttaaaccaaaggagaggaaaagtgtttggaagtccactgtaaatggtcccattaaaattaaatatatataaatatatatatatatatattaatatcataggaactaagaagtctaatcacataatttgtttagaccctactacatatttcaaggttaatttgtttattgggtttttttttttttaagagaaatataaaattttataaaacgacagcgcccgataatcagagaagtaacttaatatccaaccggtaaatccagtacactatagtattctcaagtgataaagccgaataagctaacttgtttattgggttatttgaggtaaaactatccaaattttatcacttttgtactattattattatttgaaaattttccaaactttaattttattttggtatttactattttattcaaaaatttagttaaaaccaacatgtagtattaatgtatatac

SEQ ID NO: 5800 - DNA, 1223 bp, Cannabis sativa
tactttatgcgctaacagattaaaatcccgactaacatgacaaacggttaagcccggactaaacgataataagttcttaatgctacaaattacatcatccaaaacattgttattccaattgcaagattgaagtttatctactattgatttacaatcagtcattaacacatccaccggtaaacgaagcaattgagcccattgaatagcctgatgaacagccttggcctcagcaacagcatgaggaacaagcccaaaaaaaggggtagagaactctgccttaacccggttgcaaccatccatgagaaccactccaatactatgtttccttctatgagaatcagtggctgcatctgtgaaatgtttaaagttacttgaaacagacagttgaactcgtgttggtgctgtagtactagctggataagttcttgccacctgaccttgctgcacatccaaatattgaaaaaaaatatgcaagactccaatcataaatttccttaggaggaattgagaattgtttatgaaagatattattcctttgattccataaagcccacaaaaaacaatataaaataccaagagtctctttatccaagcctgaaacaagacccataaaaaactcattcatatccaagtgtttattagtatcataataagaaacaaacctggaagatcgccaagcctttctggatctggagcaatctagcatagcatacttatcatgttcaggaacaagtttacataaaggacaaaggggagaatcaatcacttttctagtaaaaagagagaatgcaacagggagggcattagacaacattctccaaacaaacaacttgaccttaggagggataacaggagaccaaattcgggaccaaaactttttggaagaagagaaagaagaagtagaaggaagatcttgagaagacaaagccaaatgataagcagatttaacaaaaaaaaatacccgaactttccctctcccaaatcagagtatccttaccataacaccccgaaacaggtacttgaagaatatcagcaatcatagaatgaatcatcaaaataagaacccaatttagcaacatcccaagtacccgagtcagtaatgaaataagacaaaaaatgtgaaggaggatcaacattactaataaattatttatatttatgattaggaagccaatgatcagttatagtttgaatttcgttcccacttccaactttccaaatga

SEQ ID NO: 5801 - DNA, 661 bp, Cannabis sativa
taacggcggtggtggttgtggtccgagtcaaatgattcactgggttgactcaccgattccaagcccagtcactccactcgggtcagagtcattgttcgtacccagctcgtcgtccgggtcgccgtcgccgtcttcgcctgcaatttccgaggaggagaaagcgattgccgaaaagggtttttacttacatccttcgccgttgagtacgccgagattgtcagaaccgccggagctgttgaatctctttccgttgacttctccagtcaacgaccaaaggttatgaagaagaagaaaaaatatttatatataaataataaatatttatatatttaattatatatatatttctcattagttttgattttttatttaattgttaaatatttgttgcatggattttttttatttattttatgagatgtattaattatatatatatttatatgattagtgtaatgtttagtatttaatagatatttgtgacataattaattatatgagaatgagattttttttttaatttaattagatgttaaattataaaataatttaatatgtagctttttcatagcctttgcagggcaatattgtgtattatttgtgtagattttattttaatgtatatagtcaaattgttggataatgaattttcaaaaatata

SEQ ID NO: 5802 - DNA, 2597 bp, Cannabis sativa
gaatcatggtctaggtctggggtctaggttcagatcgaggtccggagtcagggtccaaagttggggtttggggtccaagtacgggtccggggttcggatttgatatccagttctgagtttgggtacgggtcgggggtttgtgtatgtgtctagggtccaagtccgggtctagcattagggttcgagtttggggtcgggactaggtccgagtacgatgcctgggttcgggtcttagtctggtttcaggtttgggtccgaggtcagagtttgagttcgggtctggatccaagatggggtcgagtctagggtttagggttcggggtcaggtccaagtttgggattagggtctgggttcggtccggggtctaaggtttgaggttcgggttcgagtttgggtccgagctccagttcggggtaggatgggttcatgtcatggtatattgtagaatactttttttttttttagttaaaaagttctaaaaatagttttaaaaaatctgagccaaacaccattaaaattttaaaataacaaaaaactactttctattctcaattttgaaaacaaaattctgaaaactaaaaactgaaaatatagccaaacaacctctaatattgtgtgttttttactattgagctcgcttttctttgatacgtattatagtatgatattgatcatatagtcttaagtttttacatattttattttcgactctacccaaaagtcttcatactaatagagatttttatttttataaaggtgaacattgatatgtgagtgataaacttattttagtgttggtgctaggaatgttcataaaatactcaataaatgaaattggatgataggggtgtttagtgtatagattggattttctatatataaaatcacatttatttttaaactataactttttaatgaagaaaatagattatttatgatttttacctctcaaactatgatatatgtattattgtgtcctttaaatttttcaacttgttaaaagattcctgaactattaacaatatggtaaagtgatccttctgttcatgtcatgtcatagcttaggtattacaagaaaatttcaaactcaaacccaatctgaaccaacccgatctatttattaattgtgtcaaaaattaaaattcaaactgtttataaaaaggttgacatgacctaacatgtttaattcgtttatataaaggatcgtggttaaatttagttaacttatcaatccgttaacatgagtcatttaacatgtttttgtcttatttaacttacttaatacaatttacattaaatataagagtgtatatttttaaatatatcattatcatattatttctggtttaggcgtgttaacttaaaaatggcccgtttcataaataagttagtcactcaaccaaaaaatgacttaaactcatttacaggtgaggagaacctattgcttggttcattttttatgtgggaatatggtagatcccacctatatttagcgggtaatatgaaacaatttctacatttgagtttcatatgcaaaatgaagcctacattcctatgcaaacctaaacttataacaaacgctcccttaagaaaacctaagcctgtttattttgtgtgggtttcaaatcatgttatcgtgtttgacatgttttgccattcttaaattttgtcacacgtggcaaataaaatgatgaagtggatatttatactattactacattaacaccacgtgtgtaatttaaaataaaaataaaaatcaagtattttttaaaaaattattaaattaaaattaattaataattaaaaaaattgaataaaatcaaatgaatagcttttaaattatttatttttaaattagttacacacatgttgctgatatgataattgtccaaacaaccacgtcatacattctatttgccacatgtgataaaatatgacaaaataatcattttacaatactatgaatagttcgagactatttttaagggattaaaaaattcaagaggcacaataatccatagatgtggaattgtacaacttactcaatattttctcttacatatcacgagactactgactatcacattcgcgtaacttgcttggccaataaaacaaaattatgaatcacttataggtaattaactaagtcatcatttttatacataagtaactaagtcatcatttttgctctctagttatgcaatgtgttttttttttattactattggaagttacaagagacatgaaaaagctaatgaccaagttttggtggaagacgactaataattctcataatgaaaattattggatgtcttgggatagattttgtcatcacaagacaaaaggtggaatggaattttgtaacctcaaagattttaatcttgctcttttgggcaagcaagggtggtgtttgcttacaagactttcatctttggtttcacgtgtctttaaggctcagtactatctacatggtaattatcttacaggctcaattggctccaattggagttttgtgtggcatagtgtgctgaaagcccaacaactagtactggctacgaggtgcggtggtatgttggtaatggtgagaatattgcaa

SEQ ID NO: 5803 - DNA, 1532 bp, Cannabis sativa
taaaaaggggatgtataagcgtgcattgtaatatttatgaacttatgttgtattgtggtgaagatcgaatcgaggtcggggctaggcctaggtctgaggccaaagccatggttggggccgggaaaggagttaaggctaagtctatggtctgaggtcagggttgggggttgaggtgagattttggatttggggtaagaggtcacgagtcgagtctaaggaccagagtctaggatcgagagtctagggttgaggatttgggttatgggctcgggggttaaggttggaggccgagtccagggtccatggttggggctttagccaaggctagggttcatgatccggggtaagaggctggagccgaggtcaagggtgaagtctggggtccagagtcgagggtttagatccagggttggcgttggggactgatctagggtcaaggtccagacttagggctagggctgaggttgaggcccgagtccgaggtttggagtcagggttcatgtacgaggccttggctagagtcgtaagtatcattacaaatgatataattgagcaaaaaaattaatacaaaatattacaatattatagttgtaggtaaaaataatgtgtaatatcctctttttgttgctttatagtttagttatgattgtcatgaggtcaatttttttcttaatttataattgttgtaagattaatttcttattgtttttctaaaaacatatttttgtaattttaaaactttaaaattatacttaaaaaaaatgtatagattgtaaaaatataaataaaaatacatatatatatatttatatgaagatatttatggaaaaaaaaaaaaaaaaagctctaccctcataataagaattcactagaaaaaagtagcctacaaattgtcaaaaatgttgaatacaaacatatatatattaaatcttgttaagaggctcaattccaagcaaatagaagcatttcttcatcactatagctgttgctttacaaagcaagagtctgctagtttcttctgcagatccaaccacctgaccatacatttatatatcaataatacaattagtatataggagatttcggtagatgaccgtttaaaaggttgtttcggtagattttttatctgtttcaggcattcagaagagtttttcagtaattttttttcatgatcgcatatgttgtaaccatttaagactacttgtaagtttttaaaaaattccgaataatttacataaaataaaatttacatagttacttaccatgtgtattaaaaaaatagtcgcacgtgtaacaaaatatgtaaattttatttcggagaattttctgaaaatttacaaatagtcttaaataactaacgtatacgatcatgaaaaaatagactaaaaagctctcttatatgccaaaataaataagggatctaccgaaacactattttaagaagtgcactatagacttaccctataacataatattatttgtttagattgatcagagaagtgaccataatatatatgtacctgacaattggt

SEQ ID NO: 5804 - DNA, 971 bp, Cannabis sativa
ttttaagccgttaaaactttttaccacactattgagattgttgaattaaaaaaatttctttcaaatttattcacgaacgcatgtcaccaatggatgttcggaggacataatttggtacttcttaaagtttggaggcacgatttggtacatattaaaatttgagagtacgatttagtatatagacaatcactgcgttagtgaaaatgaatggagttaaacaaaagtttttaaactaacaatcttaatagtttaagaaaaatttctaacagtctctggaaagtttagagaatacaattcaatatatgccaaataaaaaccctagcctaataattctacaattttttttcttttaatttctttctctctaattttattttcttcaccaccaaacatagtgttagtcatgtcacatcccatcatattcccattatttcatggtttttgtccaattcattaccttacaacatcacacacccttgttttgttgcatataacatattattaacaattaaaagcaccaaataaataaatgaaaactcacaactttacacttggggtcctaatatttgatcatttttggaaagggattttgaattatgaagtgaaaaaaggttgttgattctattgtgacctctttagtggggaccttgactcacttttaaaaactacaaaccaaaagaaaaagagtgatgaaatgaataatgtgagcaaaaagtccattccaattattaaaatcattagggtcatgtaagagttttacttgatagattttagttaagagggattaatattaaggacatctcaaactgaataatttttaaaaattgagattatccttaaaataaacttaaaaatgagacacacaaataacaaaaatatttactttttattatgatatacataaaaaaattataaattagtaaataaaatagttatgaaatacattaattagtgggaaaatagtaaataaa

SEQ ID NO: 5805 - DNA, 916 bp, Cannabis sativa
ttcgggacatgtatcttgttcttgttcttgttcctcaatacgtacgttgataaagtctgaagattagtcagctggcctattccacatggcatatactccaaatcaatacaatgaaaaatttcaagatgcctaagattgatgagtttctcaatgtctctaggcaattctctgagcattgggcaattactgaatttaagtgtttgcaaattcaccaaattagtaaatgaatctggaagtagctttatagttactcgtaaaatatgcaaatatctcaaatgtttcaatttacaaattgaatccaacgaatcgtcaaataaccatttcaaactcaaagcgcgtatcaacttgaaatgcaataccactgcatctagctcgcctttgaaacaacattcatcgagcaaaagaattgttcgcgccttacttgcttgaaccagaaaagttttacttacagagtgaacatggtgttcaaaggacaaatggtgagtattttcattgatgaagtttccttgacaatttgaaggaaaagtagcacattttgcaccagacacaagtattgcaagatcatgcatgagatcatgcatcttgcaacatgttataaaacattcatatcccacctcctccaaacattgatcttcaactgtattcaataagttaagaaatccttgtgccatccaaagcttaactaatgttcccaccttaattttatagtctttaggaaatagactacagtaggcaaaacaaagtctcaaatgagaaggtagatgatcatagctcaatctaagggtaggcataatatcctcttcacttgcttgaggtatttttgaaaattctttattcaaagatgaccactttgattctaaattttcattgtacaacaaatttcctgttgttcttatagctagtggaacccctttgc

SEQ ID NO: 5806 - DNA, 725 bp, Cannabis sativa
gattgtaaacatatatttttttttaaacagtattttctattgtctttgttaaatgatctgcgaacaaattagttaattttttaacttgtgctgcttgttctttttcagatcatcagttcagtgggaggttttgtctcgactaatcttcatgttattttgttacactactacaaaaagtactattctcgtcggccagaatatttttttagcgtttaaaatagatgtttatagttgagaatacccattggttttaaagagtcgttgagaatagccatcagtttaataataactataaaaattgaaacaatgtgtattctaattggaagatctccgacaatttagaaccaccatttaaagctctggaagccaccatataaaaatggcatttagaaccgtcggatgtatatttttttttttgaataataaccgtcggatattttaaaatgtaaggtatattaataattatcgagtatgtacactggcggatccagaatttcaatcaagcaagagcagaataaacattgaaacaatacaatatataaataactatatatatatatttatttaaaatgggcggaaacctaatttcttctacaaaattaatttttattttaatattttttatatattaagaaaagaaaaaaataagcataaataagggcctaattttcattgggtatgccattgggtgtgttgtatacccaattatttttgaaatcccattt

SEQ ID NO: 5807 - DNA, 1413 bp, Cannabis sativa
gggtgacaaattttgtattctcacttcaatatttctttggctatacatttattgtataatttattggacctagcttcaagtgggctagctcggtcaggattttaccatggaatttgcaattttttttttccttcaattggatgtttgataagatttgtaggactacttttttttttctttccaattttctttttatggcgagttcgttttaaataccaatttttgtataaaatagttctttgggtatattcgacaatgtgtcagaaacattattttgtgaagaatatattatactccgatttcattatttgtataactatggagacaacacatttatatataatatttcttttgaagaaataaaagaaattaaatttatttgttagtttgattattctaaaaacatcattttcacaagaaaatcatataaaattgggttgtcaatattataaagacaattcaaaaggtatcacaccactgtggcttttgaattttcaagatagagtaatgttttataatttatagtgtggaggacaacggtagttgtttgattacaagtttacaactatgctcttgggataattatagcccaataaccttatgtctataagattccctgtagataacagaagaaaaggctcaacaacaacaacaataataataataataatgaacaaaattgaaaagttagccattgtcactttctcacgttctaatatgtaatttatttttatttatttttttaggttcaattagataagataaccagaaaatgagcctttaatttaatatgattagttttacactactgcataacatgaattatcttatcgttatagccacaccaaacaccaaaaccgcagtaaaacaagggatcagaacttcgagaaagaattaactaaaaaaaataataaggttttgatgtaatcaaaataaataccgataaataaggcaatagcattatttaatattaatgaaccaacattttcttcaaattcaagtaaacttatgctccaaaatccaaataaatttgctgatgttcaatgttcatacatgatttttctcattattaatttcgagcagttttaattaagtgttaaaaatcaattaatgtttagaactcaaacacaataactatatgtgataaaaaatgttaaagtaccagtaatgtctagcaactgtgtcaatattattattggtaaatattgggtcacatataatttaatataatatttttttaaaaatattactagtcaattacaaaatgacatatctaacagtcctaggtactattaatattcaataacaatacttttatagctacatctttcaggttaaataaataaataaataacaagccaacaaaatcccagtcatcaacaagtttcattgaaaattctagccaccttacct

SEQ ID NO: 5808 - DNA, 2028 bp, Cannabis sativa
aatatttcatacataaattaatttcattatctttaccactactgaattatactttttgataaggcacgaatataaactttataaatcagtattataataaatccttataaattatataacacaaaaaatgtatattatagaataagtgaaaagataaattatcataaaaaccaaaatattaactatattttaagcttataaaataataataaattgtgaaaataaaataaaatagaatattcaataacactcttaatataagtacaagaaaaagtattatagaaataattaataaaaataatgaatgtttaactatactaaaatattaaactaatcctgaaacaactacaaaaaaatattatttttagtcacaacaaaatttataattaaaaatgaaaaagttgtgactaattataaattattcctatgttgtgactaaaaagtccgtgactaaaagtattagtcataaaaattacaattttttgtgactatgtttttagtcacaatacttgttgtaactaaaactaaattagcgacaactttgtatctaaataccatgttttagtcatgaaaaatttatattgtggttaaaagtttgtcactaaaaataattttcttgtagtatataataaattttttaataatattttaatataagtcaatgaaaagtgtaattataaattcaataaaatgtttcaaaaagtatggtaagtatttttttaatactttaagacattatatataataagtaatttttttttttcaattgagtgattaatatattacttaatctataaaaatatgtaacaaaacacacaaaataacaatttatttgacacattgttatgtaattggtacatcattttctatatttgatacaattaataagtacatcatataattactattgaatattgatatttaacatagatacaaaatgtgtatgcatgttatcagatcatgaaagaaataaagggtgataagaaagttgtgaataagttaatatcttttggagagactcgatggactcaattaattgatcgcacagaagatacaagtaatgattaacaaaatcttggagaggtattaagcaacagcctaactgatgaagacaaagaaatgttgaatgacccctttacatttggttcttcatcagaggacaagacttttgtagagcgacgataccagtttatcaagacagagatcaatgctccaatactcgatcatcaattgttttcaattgaaactatttataatatcaatgagttcccttctttcaactcagtcgatttttggaacttttattgggagcttcgatattataaacataaaagtggcatgaaattagatgacaagtacttgggacaaaaagttgttgatatcaatggttacaaggtaccaattacattggctcatatcttaaacactttacttcattactatacagaatcagatctttttggtgcaagggttgcgaattggacacctggaataaagagtgtctttgctacaatattttgtatagtttgtgatcaaatgtgtagaactaagatgaaagatgtcactaaagatgttcttcaagattggtttttctatctaaatgctattgctggaaaaagatataggaacaacattaggcttaagaaatttatagacaaaattattaagcgatttttctgttttgaggcgattagatatgaaaaagatatcaaggaaaaattgatgttgaggattgtagacttggaagatgaattgaagaaatgtaaagagaagcttcacatgttcaacactcatatgtcttggacttttgagaaaatcaagaatcccattaatgatgctttgagattggaggaaaaatatgtggatgaaataatctgtttcgatgaacttctaaattcggaatttgaggctattcattttccttgttttttaacaatgtaatacatacctatattctaccatattatttagtaaataataaatgtttgttattggcttgattattaacttaaggttaatttttaattt

SEQ ID NO: 5809 - DNA, 601 bp, Cannabis sativa
attttgagtttatttataatagtgtttgaataataccagtgagcaaggaaatgtttttttgtgaacagtaaaagatagaatgaagcaaagaagagtatatgagaactcattttatcttaatttatggttttgcaaaagtattctcacatttttattttttatttatttatgggtaatttactatatatatatacaaaaattttatttttatattgcagattaatattaaatttaattttttacggtaacaatattaaaattatatttttaaaatttttatcaagtgtaagtcaaaaatcatctggcattcttttattagttcagttcattaatttttattttttttaaaaaaaattaatttaaatatatcactaaaaaagtagtaggtaaataacgatttgacacttaaccacaattaaaaattaaatatgtcagtgtaatgacacaacacaagtcagtgtaatttcttagttaaacaaataaaaattacattcaattctaattacatagtaattttctaaacatcacttaatacaccaaaaaaaacctcttattttgtattttttgtcacaccaaaagaatatatacaaaattaatttta

SEQ ID NO: 5810 - DNA, 1333 bp, Cannabis sativa
gttattttaataaatagataagtgttttgttatcttatttattgttgattatataacagattttgttacttatatttgtgttatagtatactttactataacacattttttgcattatgtaaaaggtttgcataacaaattatttacttataaaaaattattatgtaataggtattataacacttttttttttctattatattaatctttagataaggctaaaatatttattatatattaatttatagtgcactaatttattttattgtaatttctcttttatttatttttattttctattcatataattcaaaacttgctttttaatgtatacttagtcttctcaattaaacttgattttcaaacaataaaaatagaaagcattcaatagtaaattaacaatctaccaattgtttaaaagcattcaacattgttgattaacaataaaatattcttaaaatattcatgtaaatcttcttaaatattcaacatattcaaaaatattgaaagtactctaactatcagagtaaaaaattcttccatactatagtttgccaacacaatgccgtcaaaattaagatgctcttttctatttcgcttgtcacatctgcaaaattaaaaaaaaaagtattaattattattttctagcatctcaaattactatatgaaaatgttatagaattattcccaagagaggataccactttacaaaaagataaattaacaactacaccaaaacacaataccaatgacataatactctaactgagtttacaattatatatgcgtgtatatatgtatttatatgtaaatgttaatatatatatgtatatatatgtatgttatatccaaaattcagtgagtacatcagaggaagacacgtgttgagctgggaagaacgaagaactcaaaaatgcaatcgtaagtacacttggcatggaacaactcgttagaaacataatttgcaaaatatatttctaactaggctggctgaatagtcttctacgagacaaaaatgtacgaactgctaacttatgtatcgacgagaaaccatgtgagtgtaagtgtgcatgacgaggcttcaacctcgtcgcatgaaagagaaacgataacgataaaaaaacttagcgtatattacatggtatacaaactaagtataaagtacagttttgtgaatcaagatgacagacagtgaggcgtctatctcgctggaagatggcatgcatgcaagaaagatcatctcgacacgagaagatgtagttataagaattaaagtactattaattttgggaagttgtatgatgagccacagctctgttgggttttatgccct

SEQ ID NO: 5811 - DNA, 1550 bp, Cannabis sativa
atggaacttttcctgcaaatagttagagtttagagtttattctcaagacttaaaacactagctaattgaattgttagtgaaagcattgaactaatttggtattttacgtacagagaaaaatgttgtgctatgtacaatccagaagaagagcacagtcatgagagccatgtaggttccaagaacaattccagtagtgaaaatctcctttagtttccatgaatcaggcataggagatggcttcaccttgtcctttgaaatggtcatgattgtcccatcattcaagatggcaatgatcaaaaccatgaatggtgagaaatcaaacttccaaatgagagccaccaacatgaaccccaacacgatacggattgtaatggaaactgcataaattgtgtaattcttcatcctttggaagattgctcggcttgtcaacacggcgctgataatgacactcagtcctggctctgtcaaaacaatgtcagatgcacttctagctgcatcagttgcatcagcaacagctataccaatatctgccttcttaagggccggagcatcattgacaccatctccagtcataccacagatatgcttcctttcttgtagcctcttaacaatctcatacttgtgttctgaaaaatatatcaaataagtcaatactagtaaatacaaaaatgccatgaattctcattatcaataatacaatatgattattaccagggaagacaccagcaaaaccatcagcattctcaataagctcatcaataggaatcccctcagtggattcatctctattctggccaagaagagaggatgaaggatacatattagttcccataccaagtctacgaccagtctcttttccaattgcaagttggtcaccagtgatcatcttcacattgacaccaagctcaagagctcggcgaatagtctcagcactgtcatgccttggaggatcaaagagaggcatgagacctacaaactcccatggttctccagcactctcctttgttttctctagaacagtctataatttgaaataataaacaatccaatcattatgtttcaattaagataaaagagtcaatcaataaagtaataacttgttcttgatttacctgtcgtgcaactgccaaggaacgaagaccgcgttcagcgtacttgtcaatgattgcatgtgcttttgcttttacttgggcagtgagattgcagagatcaataatcttgcatagaaaagaattggtatagttagtttccatcaaagcttggagaaaatcaaatggttgaacaagaggaggattttagcttacttgttcgggagcacccttgctgcatctatgccagtttccattgttgtcaatgtaagtaattgcagtgcgcttatccacaggattgaaaggtaggaaatgtacctcagtgattccttctcttgcctataacacacaccaacaagaaattaacaagagttagatgcttcaatttctatatgtttagggaaaagcctttaatattttacctctttggggtcacccaacatcccaacgattgaagcatca

SEQ ID NO: 5812 - DNA, 853 bp, Cannabis sativa
gtgagaggacctttcaaccacattgtttctttgtggaccaggaaatcaaatttgaacccgaaaaaaaaatggcatatccactaaaagatcttcgatcatcaaggcaacttcccaagtctgcttaatcctcatgagttcacaatgaagccggttgaataaagaacccatcatgagtagtaccattaagatggcgtaatatatataacattttgcaagccagccaatgtatgtcagtgggaacatgaatgaactgatattcaaggcaacatctggccatgcctagtaaaagtaagatacagtaatgcactaaagtgcttctacatagtttaatgtctaccgtaggttcaccatccttttaaacagagtttatgagcagcactagcatatatatatttggattagtgtaaaaaagttgtagtacgatatatttccactccaagaaatgggacaaggtccttgagtgcaaaatgttgatttagactatgaacttgttcatcagttggtgaatgccaagagggcatgtaacacgaaattcatctagacaagtagtataactagattttagcttgtggcatataatgtatttagcttacaaacaagatgaggcaagccttcggatcgtgacatatatacgatctcatttagttgaccattgagaatagcattacttcatcaaagctgtctaacattccatgtaaaagtgactaatagtcgaactgtaacttgttcctcgtggttctaatagtcaatccactcttggaaaactaccatgtgagtggtccaccataaaactggcttcaaaccttataccaatcaaactattttcttcttttccaaacggcaaagcaaagta

SEQ ID NO: 5813 - DNA, 672 bp, Cannabis sativa
gaagcctttgatcccgagggagtagcaaaaccggttggtaagtgaggttcatggcttcaagccatttacttgtgtcaaggagagaaatgttttcgggcagaggcacatggcaatatttggaactagtggaattggagttggtcgagttttgagaggtgatggcatggctggggctggaggcttgtgaagcttgggcactagtattgctcattgtggcattgaggagggcagtgtaggatggtgtgatggtatcaggtgggtgaggttttatgaggttggtttgagcatcggtatggatccattgcacagtatcttgggtgtaggatgaggggccagatttgaagagtcccacttgttgggtttggccggggggatacatttgtcttgtgggccgaaggtgggaaaaggtggcatagtctccagggggcaacacaaacagcacttgcaggattattagtcatgaatgtagcgaccgaaggattggcaaagttaagttgttcagggcacaacaaagcattagtagtaactttaactttgccagatatggttttgatatcataccttagctttggaggaaagggggcctcatcgcatgctttcatgtaatccatgcacccttagttgtaactatgccccatacgaccgcaacagaaacatatgtcggggagattc

SEQ ID NO: 5814 - DNA, 857 bp, Cannabis sativa
accaaaatcaggcatcaagcacctaaaacccccctttcccgctaaaatcatatggctagaacgttggttattaaatcaaatgacaatcctactttgttttagttcacaaattatctttagtccaacaaaatcaaagattctaatctggacatgagtaaagcatgcaatcctcttctcttgagaagcgcgtaatgcatttaaatggagagagaaacaaaggccaccatcataaattcaggagacattttgataaaatattgcagcattaccagaagagcgaggggttggaacaatgtaagctccgaaagctctgtcaccaccaactggaacatcagacttattaaacttcacagcaaactgaggtttggctttcaaaccaccactcttaattagccgcacaaaactcaaaaggctctcttcagggacattaagtgaccctacattcagctcaactgtgtcaaaacccatttgcttgcactcctgaaaaacaccagaaattcaacagaattaagctgcgaacagtttgcagtgatcaacacgatcattcttaacaaagcctcacctcaagatattgactgaaagctgatggacctttcctaagcaaatgttcagcccagtcaccagtactgacatatatatcatgttgatgggccatatcaatcacttctttcacgaaagactttggcattaagctgtgggaacctccactgaactttaaaccatccacaaactgccccatggactcgaatatatcctgaaagatccaccatttgttggccacatgccacatcgaatagattaataattcagaaagcacagaaattacaaaatttccaaccaagaatgcaaaattgaag

SEQ ID NO: 5815 - DNA, 829 bp, Cannabis sativa
gaaatgaaaaacttgattaaataatggataaaagaaagtgaatactttcccactaattttgtaaggaataccatcaaaggtaatgaattttatttatttttattttactttttaatattaaatatatatagtgacaattttgtcttttataatttgtcttacaaaataattatagtagttcaacttaaaagagtaatttagtcaatttaagtattccaattatattttctgataaagtataaatgataaattactattatttcatttctaaaaaacattagtaaataatatattacaagtattaatttgattatttcttatttattttgttacatttatctattaatttttttcaattctaaatactatatagtaaatgtccattaagtagaacgaatgaatatgaaattaacgtgaagaaattatattgtatatccattttattttatttgttttgatttttacttctatttttattttttttaagatatacccacttttatagattatatctcaattaaactctttatgttaatgtaaattatatgctagacttaagtagagagtaagggtatatcgggcaacctactcaaaagaaagggtatattttaataaaatataatataaagatatttttgattaatggatataaaaaagaggtatttttcaacataattgcaaggtgactgagtgagcgagctggggtttcgtttcgaccctcggaatcgggctgggccttatgtggcccgtgtaaaccatcccggcccggtttcctattaattaaaaaaaaaaaaaattagaattccctatctgactaacactcacccat

SEQ ID NO: 5816 - DNA, 746 bp, Cannabis sativa
cttattcacatcaggatgaaacttgagagctagtttccgataagcccttttgatatcgtcgctagatgcagatggggacacacctaaaacttcataaggagattctctacgactagcccttgtaatgcaccgttcccttctccgtctccttttgaaatcccagaaaccagatgtggaggacaaaccagctgacaaaaacacgttcaggccaccaattgagctgtatctgcaaatgggcaatgaagatttcgcaggattttgcaactgacacaaggaaaatcgatataacccgttaaagaaacagaggcttgtacggtcccgcgttagaggcaacggcgaagccaaaccacacatgtccatcaaggaatctacgataacactttataggatatcatagccctggtggtgaggcaaggcatatgggaaagactcaaatgtgagttggttccttcagctccactaccacgcactatgttaagcttttgttagcctcaagccttcgatagagtttttggatggtaacaactcgtggcgtaaacgaattacagcacactgaatctgactcggctaagaatttaggaatggaaatttgggcttttttcccgggccgggccggataccgacccgacagaacggtcttcggccagtgacaatcgggcttaattcgggtcactgacccgatccggcccgattaaatccctaaatgaaaaatctgaggaattcatatacagattttcatggtcttc

SEQ ID NO: 5817 - DNA, 2938 bp, Cannabis sativa
atttacattttttaaaaataaataaatagagtggagagagaaaaaaattaaaggattatcattatttaaacaaacattcttttttataatgtattttttttttttttatatatttcgattatttaaagttgttatcatcattgtatgtcccgttgttatcacctcatccatgctcgaccatgagtatagatgtgctaagcctgtacttagggcccacctaaccttggagccaaaaattttttgtcctcttttaaaagtacatatttttttttactaattttgaaaaatataatatttaattctaaataaggatccaaaaatattttttttcctatgtccactaaggaccgaccttgactttatcttacccattgtcatcagcatatctcaccgattgtcatcacaatatcttacatgttgtcatcaccgtatctcttatagtcaccactattatccttcacaaatctcaatattaatttcaaatttcatcctgaatttcaaataatgtgttatccgctatacacatctcaaatttaagatatataaaatttgatgaaatagtaacggtaaaaaaaatgaattgtaagttcatgaaatagtttttttatttttgagttttttttttaaaaaaagtaattttttcttaaaaatgaatcgttatttttttaggcatataaaaaacgtttttgctgttaagaaagaaagaaaaaaaaaagtaaagaagattgtttttgtaatgcaagaaaaaacttccggggtcaaactgaaaatatgtaataatttagagacaaattaataaattgtatataaagaaaaaatatccctttaactcccgaaacctgaaaaacgcgaaatatcttttgggccattggctttcaaaattgcgatatctgcctttaaagaaattgaaaaccctaatctttgctgcgttcgtgttcgagtttcagtgcgattcccaattttgtccggggtaagtgtttgtttcatcttcgaaccctagaaagttagaatccccattgttttgccatgtttggttgagaagaaaggttttagttttcgtttattttgtatcgactgggtgttgtatacttaccgaactagttcactattttccggtagtcaattttcgtttggggtcttaattatgtaagataccagattttatagttcgtttttcttttcttgcgcatatttttcgtagcgcgttgttccttttgttctgaaatggaaatctgtgatttacaattttattaattttctcagataaaatgagtagccgtgcgagcagaaccctttacgttgggaatctcccaggtgatattcgtgagagggaagtggaagatttgttttacaaggtaatatatatatttgtttttagttatacgtcgttgttagttaagacttacccaagtggatgggtctctgttagaatgtttactttaggggttcttcgttcttattggttgtgtggtgaagttcatttacagttagtttagatttacacattgttttgcgaatttccccttgcagtatggacgcatagcccacattgacttgaaggtccctccaaggcctcctggttatgcttttgttgaggtgtgttctgaaccagtcaaattatttctaaacacttttatttcattgttttaatttctttttatttgtttttgtattgctacagtttgaggatgccagagatgctgaagatgcaattcgtggtcgtgatggctatgattttgacgggcatcgcttgcgggttggcaaccttctaatgtttcagttaaaatatttttgtttttttgtctaatatgctttcactgtatatgtatggttgtgcctgtggaataagctttgttctcttgtaggttgaacttgcgcatggtggacgtggacattcatcatcaactgatcgctatagtggccacagtggtggtggtggtgggggtggaggccgagggggacgaggcgtatcaaggcgctctgagtatcgtggtttgtattatattatctcatacattgttacttagtttgatgtggttcacagttcttatgttattcatgctttgtctacagtgatggtatccggattaccttcttcggcttcatggcaagacctgaaggtgagacttatatgttttagtattcccttactctcagctcttattttcttgcacaggcagtttctctctctcttacacacacacatacacgcacttgcacccacccacctattttgtgcaactttatagtgttgatttatttgtgctgttttttctttttaatataaacaattgcgtgttacatattcttgttcaggatcacatgcgtcgtgcaggggatgtttgtttctctcaagtgtttcgtggtagtagtggtaagataaatgttgccaattttctcatttttgcagtttgttatctctaacatgtagaatgatgtgtacattttaaggagaatttgtgttatgtgtaatctcaagcaggtaggtagttggattatgagatacatacatatatacattaatgagcatgatgagttttaccatttgtttatcaggagctttggtgtgagaaactgtttttgtcttttcttgatttatttggtttctatataggcacaacaggaatcgtggactacactaactatgaagacatgaagtatgcagtgagtgactgctcccctactaaatttaagaattgatttttccatgaaattcatctgttcttggttttgattgatgttcccagtctaatatattgtatcggaaatttgtgatgtgaatctgttttgtgattacattttgctttaatattttatattctctgcagataaaaaagcttgatgattctgagttccggaatgcattttctcggtcatatgttcgtgtaaggatctattctcgtgcacccccacacccactctttatatggttttttct

SEQ ID NO: 5818 - DNA, 730 bp, Cannabis sativa
tctgttccaaagttcaaatcagaaaactctgaaatgccctttgttgcacttccccgaccggtttcattcacattctccatcatcacctccttgctgccagtaccccctttaatttttgaccttttaggaataacctttctccgtttagaagatccctcccccttatttaatgaggcaaagctattatcataacttatgggaatgtctataagtatcggcatatcctccatgttgttgttccttaaattctgttgagtgtgaggggtataattactttggtgttgtgtcaattccccaatcaattcagcacagctttcttccctccaagaaccatctctctttgaacttccctgtccagcattcatcttacccataaccaacccgacaccagagttcaaaatgtgattaggagcttccattgcagtaggagtcaacttcaagttatgttctttctcaatttctttccccttccccacttttccagcagctttatttagagaaataggagcactaacccgtggcatcattgtcgtagaggcattaaagtcgattgagggattaccactagcattcaaaacatgattcataggctgcattgtcgatgaagtaggccttttgtcagtaaatccagggggggccttgagttgtgtagtattaccacaaggatcttgaatgaatgaagtagagaattcttgtttgtcattcactttgagccaagaaccataaccct

SEQ ID NO: 5819 - DNA, 1517 bp, Cannabis sativa
  modified_base (552)..(555): a, c, t, g, unknown or other
tttttttttttttctgaaaaaataaataaagcttttttagtaggtgagcgcagccttcaaaattatttcctatatatataaagaaaatccagtcaacgaagtaattatttttggacccatatacatgaaggagcctgttattaaaaaccaactatttaccatttcttgttaattattatctggatttaaggtttttctttcttctttttttttttttttttcaaaatgaaattcgacatcttaagagttatgttttaatatggttaccaataaaaaagttatgttttaacaattgacatgatttccattgttttttttaggtaaatattattttaaatcctatattttataaaaattattaattgaaccataataaaacgataaaatcgactttatatttttttaaatggtaaaaatatgaccttgagtttaatattcaacaaattttttaatataactaacttttaagacaatttctaatacgagcagatatagaaaatataaccagttttgtcataacatctctcgatcagattattattaagttttatnnnnacaaaaaatcagttcagggtcttatttgtacaattttaaaaaatacatggtctattttattatttaacaaaataaagagtctaattaataacttttacaaaatacaagatacaaaatgatatttacttttttttttttcaaaaggtttccattgatttattcaactaatttggatagaatttagatgttattcaaaataataataataaaaattatccaaatatactcgataataatttaacacttttcattttttctcttaatattaacaactaggatgagagctattcaaccttaaatgttactttataaataattttccactattcatttttcttgttgatgttgattttttttcttttgataattaagttttttattgaaagcaaaaacctcaacgagcagtacaaggggaacggccttccttacaatcaaatttgagcacacattgttgatgcatgttgaattaaatttataatttttggtgtgtaaaacaataggctctatttttaggtttcatgtgtactataaattttcttgatattttagcaaagaaaaattgtgatatgagtacaagataaaagttattgtttatcaatttaccaagctaagaatatagacttatgtatgtcatttgagactatcatattttgttttatgtgcatgtgggagtgagtgagaccacaacaaaaaattatcattttcatttagtcatctttaggtgaaattttatcattcatcctataaccatattgagctatcattcatctttacgagaacacaaagctctcctataactagtgatcaatctcaatcaaattcatgcttcaaaatatcactttgaagttgtatatattaagttatttaatttttttaggggtgttcgtagtgggagtaatgtaaaatttttgctattttttaaaccaaactgtatatgtaatttttacaaatttttaaactgc

SEQ ID NO: 5820 - DNA, 918 bp, Cannabis sativa
ttgtagttagtaactaacaaataccacttcttgtaggtataattctctcaatttaatttggggggaagggaggaagaagatggagaattgaagaagatgatttctttctttctttctaattaataaatgagtgtgttttggtttcgttggcttaaaaggaaagagtggtatgtgaatgtgatgtggatatggttacttcgatgaaaggccattagagtgaccacgtctctggttgtactgtgtgatgtttgataactaaaatattatgagtttcgaattatagcaacctcaaaatctttttaacccacccactgagctcaatatcattgtgtgatccacactcacgtgattttatgtaaattcatttttcctttttttagtattttgctggaaaatggttcatgtttatactttctactatttacataaatatatttcttttcttaatgaaataaaatgagttgtttttggctaaactcttttaactatcaattaacttgcatttaatcttctaaacttacattttgactataaaatcctccaaattaatgaactattagcagctttcatcttttttccacatttaactgccaatatagacaacttatgtatacacttttatacatgtgtcacatttacttaaaaattataaaaattattttaaaatttataatatttttattttttaaatatttatttaatttcaaaataaattttaaaaataatgtttaaataataatattaggtatactaattaaatgtgtcatgcgtacaagagtgtatacataaacaatctataatgtcaattgatcaaagtagtttggaggattttgccgctaaaatttaagcttggaggattaaatacaagtgacacgatagttgggagcacagctaccaaaaattcaaataaaaaatagt

SEQ ID NO: 5821 - DNA, 1238 bp, Cannabis sativa
tataaggcctcaccctcactaaacagatttgttgtccaaaactcgaactacatgaaaaaaataattataaatacaataatttttttcaaggcactaccaaaactaagaaataaatgtaccaacatccataatagttcatgtctaccggtcctcaagtcgctctcgttctcgttattgccctttttttttgctttctccttgtgccaaactttttcatctttttcaccttgatgatgacctatgttgttcctcgaaactccctaatacaagtaaatttcttcaaatatgttattatatttgattcttgacaagcttagactgctactggttcacttactcggctagaaacatgagctttaacctgcccaagaagaactccattatagatgatataagatagtgtagcttattatatcatctaaactcctaagctgagcatctatgtatctaactgaattaacagactataacgacaattttgctcgacaatatgttttaatattgaatcagagtctcacctttgctgatttgaacaattcgtccaacacttcagacaaggttgggtgtgcgtgaacagcgagctttaagtcctgcaaggaataagacatttaatcagttaattatagtataaatacagagctagtaagcacgaaggttcgataatagaaagtaaggaaaaataagtaagctagcgtataatcaaataatacaaatagttatagttgttgttatatgattgatcatatagattttgggcagttaatacaaagttcgaatagtcacctgaatacgtgtccccaatgctattgcatttgaagcttcatgaataaggtccgcagcatgtaacccaaaaatatggactcctaggatctctccattgtcgggtctgtatattaactgtgaaccagaacgcatgcatggaagtcaaaacaaagtctcttttccaggcagaatcgtgtaaaggttttgaatagccagaattgtgtaaaggttatgaatacacaacaataagaagaaaaagaatgcatctacaaatgacatggagagaattaaagattatctgattttcagacattagattataccaagacaacagtgagaaggaaaaagtgaaacgttaaacagactaaaagtctgatgtttaaacctgctgtaataacaaactgtgtttaagagaacccataagaaaaagaaaagttacttgtcactctagtctctaacaaatatagaaaatgtac

SEQ ID NO: 5822 - DNA, 1382 bp, Cannabis sativa
tagagtaaaggattcaggaggaggaggcatctatcgagtaggacgatttgcaactgggtttgcaaggtccaattttaaatgaagacctccccgattatactttttaaactctaccagatagttataggttaaatttgaaataacatctaatctcgacttgttattgccaaatattatggtgaaatatttttatgaatataataattttcaatattattctggtttttatttttttaagcctttaaaaattagtgctatggaaatagcaatcttaaatcttttttaaaatgtgatttctaaacacttctgtcaattagaatacaaaaatacaattgataaaagatgataatcatttcatatttattgttcaaaattgagatccatatattgaacaaataatataattaatagcaaaaattctatcacgatgctaagatttggtgtgtagttaagactgtgataaaattttaataattggataatttttgtatttagtgtaattaaatttgtaaaaataaataatataatttaattaacaaaaatataattaaatattccaaaatacaatttataagttattataatattttaattgattaaattattttaaattcactcaagtcaagggtgagaagagaactctcccagcaagtggggataaaaagaagaagaagaagaagattcatatttatgatggatcagttgttaagcccattagaatgcaacccacaaatctgctatatattcactacgtagttggactcgcaactcgacccacctattctttttttaaaaaaataaaataaaatatataaatataaataaaattcaatctcacggttattatataaaaatatttttttggtattgatgacattttaaatatactagataagtcatttgcaaacatccacttagctcacctattaggttcaaaatgttaaatttgattttgttgagcttctttagttttggatttttgtaatttgtgacgtaaataattaagtttaatttttagttacagataaatatttaatatttttggaacttccataggtatctgacccttcagtgttaagtcattctccacgtgtcattgttttattgtatatttaaattaatttttatatcaaaaataaaagtttaatgacttagactaattagagactgtgacctggtaatttacttacacttaacggttaggtacctaccgaagttctagaattataacttaggtattattgtcatcaataactaaaattaagtagttatttataattgagagttaattttatatatttaggccgaaattaaaacttaaattaaatttgattttgttgagcttcttcagttttgggttttcaattatttaattttttttt

SEQ ID NO: 5823 - DNA, 964 bp, Cannabis sativa
aactgtgcagatcataccaatttccaagaagaaaaaagaaagccattgagttgaattgaattggaatagtttctggcttgccatttttagataggcatatcagagttggtttttttttttttggaggccgggaaagacatatcagaaattattacaacagatagatttcgttacagtactgttttaatgaaataacacatcaactgtaacaattatttggattttagttttttgtttttcttgatgattcacttacactccactcctacctagcttttttaatactatatatacttattgatctgcaacacgaaattaataattcaaatccactattcatttaattataagaactgcatatagagctgctaaattacaacaaattatattcacttttctttatataccaaataaaggcacaaccctattagtatcatttatataaattttgatcgtagtcttatgattcattgttataatcattttcaaacttatatatattttataatagtgtaggtttaaatataacatcaaacatattattactacccaattctccagttgacgatgcatgtcgttatcattttttgttagaggggtgcatgtttatatatgtcacagttattcttacacataaaaatttaactaataatacagtagaaggggttattaacaactttctgatatatataatggaaaaagagagagctaataagaattaattgttcgaagctagctagcgcaactaattaatatatatatatatatatatacgtggcatttatagatatatggtcattctagctgccaccatagggcacagaagttaaaacatatatggaataggagtttagattagatggtgtcccaaccaaaaagatcactaggtccacaaatcagctttgacttgattgaggtgaaatgtgtccataatattattcacacactatatatgctacgttaa

SEQ ID NO: 5824 - DNA, 877 bp, Cannabis sativa
gttgcaaaactcagtcgatcctttagatttttttttttttgacaattttggagaccacgtgtcagtaataagaaaattaatttaaacttactatgttatgccatatgatttttggtatatattcatgtatttttttaattatctttagggggaaaaaagctatactattttcagttaatttcaaaatacaataggttttggtatggtggtggttagagagtctgttgggtgtggtggcagctagtgtggtggtcggtgaatgtgtgttacacactctagaggtggcggaagcattggcgacgacggccttatacggctacaagcctacaacaaagtgcaactagaatttgattgtcaagggctcattaacaagatttagaaactatattgccctaaaaattctttcttcagtcttattttttaagttattgttgatatttttaatgagtattttgatgttaatttcacttattgatttaggcgagtaaatacagtagcttatactttagctaaatatgttcgacaaactattgctaaaaatatatcaagttttttgttgagattagatttaacaaaattattaagagtaagttaatgaaataaaaggaaagagtagataatcctagttattatggtctactcttcttatgacttggtctataataatccacatttttttttgcaattgggcatgtttctaaaaatatgaaattaatgaaggagacacaaaagaaaggtcagaactaatattattatttgatgttgatttttgattttgatcatctaatgacttttaaaaatacaattgaaggaaagtattttgaaaaatctttgtgaccgattgattaataaatgattcactatttgaggagaattc

SEQ ID NO: 5825 - DNA, 919 bp, Cannabis sativa
tcgcaattatataatagtatatatatgattccattcccatgttgatggtgatgtttgttttgaccaaaaagagaacgactccgctaaggaatcagctcttatgctagtaattggtgttaatcatttgatttgtggttataatgagtttgttacattggttttagcattgaattttccgttagtgttggtctcctctttaccaacattacgatcccttgatatttttttttattagagcttgtattcctctttgagaatataaataaaatatgttgtactcggcctccttaagctaagaaaatcattttatcaaaactgtgcaaagtttaacttggtatcagagtctagaaagcctgctcaatgtcgccccattctaaaactcctcaggccaccaccacaactgcaacagatgctacaagctcatcagtctctactcctcaatatacactcagccgtttaatacgctgaaccaatcatttcctccaaagcttgactgtaagaactatgttctctggagaacaatggtgtcaactgtgatacgaggacatcgtcttgatggctttgtaaatggaacttgaccctgtccaatagagttcatccttgccccaactactacagaaggagtacctaatttttgtgtcaccattaatctagagtttgagaattggattgtgagtgatcaactattaatgggttggttatatagctcaatgagtgaaggaattgccactgaagtaatgggttgtgaatctgcagcaccattatggaaagctcttgagaatctttatggagctcactcaaaatcaaggatggatgatactcatactctgattcagaccactcgcaagggctcaacctccatgaaagactacttgaaacagaagaagacctgggtagattctcttgctttggcagggga

SEQ ID NO: 5826 - DNA, 514 bp, Cannabis sativa
gtttcatcgtctgcattgtataaacaggcaaaacaaggccaatagatttgatcaacgtggcacgacctgctttagaaagtgatacaagcatttgttcatgagtcttttgttcccggtgttttttcctttatttgtataactgctgttggtttgagtggtttttattagtgtttttagtgtagtgagtttgtgagtgagttgagttttttttttttttttttggttcttttctctggttcttcttggttactccctctttttgaaacagttgaggttttttctttcttttctgtcagtgttcttttttgaaagcttggtccccaaccaatactattccactcaagcttgttcgatgcgggtatgggtacaagttcatattattccccatgaacacttttcaaaggataatggttctctaatgggtggaaaggcagggaaggttactcaggttgagttacaagaggataaccctgcctctcggagtaagcttctgaaagttttggttgagaaggat

SEQ ID NO: 5827 - DNA, 1184 bp, Cannabis sativa
aacttgggattgaattaccagaaagttgcatctgacgacaccaatactgttttttttttaaagagaatgtaaggtattcacattacaagactaagggtttgtttggtaggtattaaattgtattgtattatattgaattaagtatttatcatattttttatataatataatgttaatatttaatttatattaaaacattatatatttaggtgtccataaatattaatagcaacaatgtttaagtacacataatagaactaaagtcaatcacaagagttaaactaaccttaattgaaaactaggcaagaataaaatttagtttaagaatgaatgaatcgtgaatttttattgataagaatagttagtagaacataattgaatatgtctaataatacaacttaatacaatgaacaattagagagttgagacaaatattatttataggaaacaatatttatagatttataggtgttggtggagctttgtttatgctgtgtcaaagcaattgttatattttttctatttctattggtaagtatcaagatgaaattattgacttagcaaggattaagtgagtttaatcccaacaatttcacttgattagagttacttaatccttgaccctaatagaaatgagaggacattaactgtcctaaatgctcaacaaacttgtttctagttacattttttagtgaaaatgtctattgggttatcatgtgtgcttattttctttacttgcaattgcttggatgacacaatattccttataaagtgtaacttgatatctatcaatgtgctttggcttctcatgaaacattaaattttttatgagatgcaaaacactttgatcgccacagtaaattgtgatatactcagatttgaaacctagctcctatgttaaccccttaagccatataacctctttaatggtttttgtaggcacaaccatgtattcaacttctgttgatgacaaggctactactttctgtaggttagatttctagctaatgtagcccccgagagtagtcaacataaaacttgttaggttctgtctaggtttgctgtaaaatctgagtccacacaaccaattatttcttccttgaactagttctctttactaaacaccagttttcagagtaccttgcaggtatctcatagttcatttcaatgcttcctaatgttta

SEQ ID NO: 5828 - DNA, 755 bp, Cannabis sativa
catcttcatcttcatcttcatcttaactaatacactactttgcaaatgatgaggtttggttatatgaattctttgttttgttttgttatgatttgggatctcttagatgtagatcttatgttgtttttcatatgaatttcaattatgtgtgtttcaaaacagatatcagagagtaataagtccagattgtgttcctttgagtaatgggaatggaaccaagaagcccatcaacagagaacaagacacaatcaccagattcagatccccttcttcttcttcatcaacacaacaagaccttacttttcaacaatccattgaacaaccccatcatcatcatcatcatcatcatcatcatgatagcagttcaagtccaagtcctagccgagggagtggagatatgctgttgcaatggggtcaaaagaagaggtcaagggtctcaagaactgagatccataagaacctaaacatggaagactcttcttcttcactttctgctgtttctcttgttcaagttgtcaggcaaagaagactacctaatcactctggatcaactccaaagaagttgttaaattccaatattatgccaccacctcctactcctcctccgcttccttcttcttcctcatcatccaatggaaccagagctagaaaagaagtacttctttctcacaggtagactgccaaaatctccatctcatcttctttttctttaatgggtttttagtttctttcttcaattcttgttttgggttttg

SEQ ID NO: 5829 - DNA, 670 bp, Cannabis sativa
ttaattatacaggaaatccaccaaataacacaatggtggaaattgcaacaaaagttgtggttcttccatttaacactagtgtggagttggtgttacaagatacaaaaattattcattctgaaagacacccttttcatctccatggatataatttctttatagttggacaagggtttggaaattttaatccaaatgaagaccctaaaaacttcaatttatttgaccctgtgggaagaaacactgtgtgtgttccttctggtggatggattgctttaagatttgtaacagataatccaggtcagttaagtttataaattataaaaatttaccttttttcattttgtaaaatatataaaagaaatatatatatatataatttggttcaatttaatttaatgattaatatgttttgttggtaggtgtatggctcatgcattgtcacttggaggaccatgcaagttggggtatgatgatggcttgggtagtcttagatggaaagttgcctaatcaaaaattacttcctccaccaaatgatcttcccaaatgttaaattttactatttctaagaattttgtgatccactttaatttaatttttttttttaaaaaaaattcaacattgtttgatgggttttatttcaatagttgtttttcattcttgtagattgaga

SEQ ID NO: 5830 - DNA, 565 bp, Cannabis sativa
acaaaccttagacaaagacagaccctcatcctcagaagcctttggcgaaaacatcacctcgtccttagaggccttgaacttgttacttcccttattttttatttcagaattttgactggtacttggtgctgctgcagcaatactagattgacaagccttcgacgatggtaactcaccctcggaacaagcttccataacagcttcaactccaacatagctctttgaggcctcaactttatctggaaacaatgttgctaatatttccttcttggagctactcaaactcacacttatgtacgcagcatctggacatgacttgaacggacaacattccattaaattcacgatcaacataggattgtcgatcttcttaaaagcttcagcaatcaaattcaccttgatagttcgactgttgtttttccttactctcttaagggcagcacagaaagagggtggtagttgttcagttatgttgctcttcttcattacattgacgagtaaagaataagcttagccgagtctttaaattttccagctttttccagcagatccacgctgcgtaacg

SEQ ID NO: 5831 - DNA, 1096 bp, Cannabis sativa
aaattaatatggttgactacataaagtagaagtaaatattggtttggcgtgcagaaataacataaattgcacttttgcagagagagataactcaatatccctagaactagctagctatataggctcgccacccaatacaaagatcttctccaaccaaatcctcctacacgttaaaattagggctttgtccagtacaatttacaaaaccctagttaaaattaaaacccaccatcatggcttacgtactcatctacgtctaatcaaattcaaaagctaacgtggatggggatagaaataaaaaaagatctttgttttacaaggagggaaaagagggccgtacgataccctagctggtattttcttattaatactattattattagttatgaacacaacaataaaatgaatcttgaatcacactcagacacagtgaagaatctgtgtgtatctttttgagagagacctaaaccctagtgcctgatgaggtctcgcgtcattgttttgcatgtcgcttgtgatcataatttaacttggtttgtattgtaatgagaaggaaaagatcagatgaaaaggagaaaataataataataataataataataaaggctctgagatcgaaaaaagaaacaaaagcacgtgacaatagcaattattttccgccaactacttaactttgttactctctctcacacgaacgtacaaataaaacagaaaagaatatgatgaaattgagagagagagagagaggaggcgggaacgttcggggagtaatgacgtgtgtgtgtatcatatatttgggttttggacagctgatctagttacctattttctattcgatcgtctagttaccttttattctactgtttttcgttccattctcactagagacttaaccaagtactgtcttaattgtcggtgggtttcaatattttgtgtcagtttgtatcatacatatatactcgagtattgctcgcactgctagtgactatgactattaacagtaatattaggtagtgactattaacattcaattttattaaatcagttaaaactgatcaaataaaattagatatccactagataaattgtgaaaatt

SEQ ID NO: 5832 - DNA, 533 bp, Cannabis sativa
ttgaatcaacttgctctactactttactttggtttcacattccttttttcggaaatccaaagaattttttttattttctttcaataagcaattaagcttatgctttgtttttgtttatttaattgataaaaacaatagtaaaaatatatacttctataatttttaaaataaaattaatttatttttatgatcacacatattctagttatttttttaaaataaaaataaaaatatattgtataattatttaaaattacctgtatattttttaaaaaaatttgaataatttaacgtgtcaaaaataaaatttaaataattacttatataaaaaagagacatgtaacaaaatatttaaatattattttgatattataaattatttataacttttttaagataattttacatagtaaacaattataaaatagtgactaaaaaaataaatatcaaaaaacataaaaacataggtactaaaatgactattttagaagataaatattcaacaactgtaagaaaataaaatcttactccat

SEQ ID NO: 5833 - DNA, 1759 bp, Cannabis sativa
cttcttcttcttcttgtaatcaggaattaatagttggtagacccgaggccgtgtacttttatgaagttgatggccgtggtccttgttgggcttttgaaggagagaagagattccttgggtggtttcgtggataccttctgtgtgttatatcagatcaaagaaatggaaagaacacattcaacgtatatgacctaaaaaatcgattaattgcacacagccttgtggttaaagaagtttctcacatgctctgtgagtggggcaacataattctaattatgtctgataagtctgctttatgcattggggaaaaggacatggaaagcaagttagatatgctctttaaaaagaacctttatactgtagctatcaaccttgtacaaagtcagcaagctgatgctgctgcaactgcggaagttctaaggaaatatggggatcatctatacagcaaacaagattatgatgaggccatggctcagtatattcttactatcgggcaccttgagccttcttatgtgatacagaagttcttagatgcacaaagaatctacaaccttacaaattacctggaaaagttacacgagaagggactcgcttcgaaggatcacactacccttctactgaactgttataccaaattaaaagatgttgaaaagttaaatgtctttataaaaagtgaagatggtgttggagaacataagtttgatgtagaaactgccattagggtttgtcgtgctgccaattaccatgagcatgcaatgtatgttgctaagaaggcaggaaggcatgaattgtacttgaaaatcttgcttgaagaccttggtagatatgatgaagccttgcagtatatttcaagccttgaaccaagtcaagcaggggtaacaattaaagagtatggtaagattctcatagagcacaagcctgttgacacaattgagatactcatgagactctgcactgaagacagagaatcagccaagagagaaagctcaaattttgcatatttatctctgctgccttctcctgttgattttctgaacatcttcatccatcatccagagtcattaatggattttcttgaaaagtatactgacaaggtgaaagactcacctgctcaagtagaaattcacaacacactcttggagttgtacttgtccaatgatttgaactccccttcaattttgcaagctaagaatgatgttgacttaagtctcatggtaaaatcgggagcacatgttttgtcaagagcagagtccaatgggaaatcatttgatgataacaaaaacttaaccaaggaaaatgatcttttgaaaaggcagaaaaaggggctgcaattgctaagaaatgcatggccatcagagctagaacaacctctatatgatataaatcttgcaataattctctgtttaacaaattcatttaaagagggacttctgtatatatatgaaaagatgaaattatataaggaggtgattgcttgctacatgcaaactcatgaccatgagggactgatcgcttgctgcaaaagattgggggattcagggaagggaggggacccatctctttgggcggacctactgaaatattttggtgaacttggcgtagattgctccaaggaagtgaaagaagtcttaacctatatagaaagagatgatatcttacctcccattactgttcttcaaactttgtccagaaatccatgtcttacgatctctgtcattaaggattacattgctcgaaaacttgaacaagagtcaaagct

SEQ ID NO: 5834 - DNA, 652 bp, Cannabis sativa
ggggagatctagaaggactaaaaattaaaaatgtctttgtgaaaggtcactaccacaacttattagcttcatggaaagttgattcataagttaattaatattaagagataatacttacagctagagtacattcataatatgtacacaactacacatattacataactaacacatttgttgtacttagttttggattttagcacttttctaataaaaacaaaagccatttcactattcttgagataaaaaaacattaaattctttatacaaaaagaacataaaattcaattggccaattaattcaccataaacagagtatcattaattaagtgtgtttatcaaaatttttaaaaaccaattataaattaaattaagcatgaagaaacaaggatttttatataattgaagcgttgataagtcttagtccacatgttaaatactattgagctgaaaaacactttgaagtattcttacataagagtgctcttgctaaagttcaagaactctaatttttagcccttaatttgataaatgattttcccacactttgcatgaagagataatgttctatttataggtttgagtcgggaatgggaaacctggacccaagaatttaaaagtgttaaccatgcccacagatgagataaaatac

SEQ ID NO: 5835 - DNA, 1659 bp, Cannabis sativa
  modified_base (849)..(856): a, c, t, g, unknown or other
actataacaatatttaaaatgtttataaattcctaaacaattgtgcaagcctccttcaatttcttatttcatttaaatatacttatcaaattatgaaaaaaaaaatttaaaacaataattaatagagtgcccaaagattgtgaaaaagaagcatacatatacatccaaaacctcttcaaaattagaatgtatgaactactagattcaacgtatttacttatagaatggctataatattgcttgagaagatgcgaaaaaaaaatattgattattaattttcacttaattaaatgtagtcttagtttccaattactttgtatttcagaaagaaaaaaaaaattgtagaatagatcatttaatcgatccataaattgatgaagtgtgtatagcatgtgcaagacaaagaccgtaaattaaattacaaataagttaatgaccacttgaagcattgggcaaggagattggactttctttaaaattgtaatacacacaaatgaatgatgatatattataactcataagtacagccaaagttatgaattatatttgaatttataaaataatgcataagtggtgttgtgaatgtgatccaaggaaactctcaccatatcgtagctctctaattaaaaatagtttataatataatataaataatgagtttttgaccgttaaatttctttaattatcgtttcacttacacttaattctctaagttcaaattttagcggtgaaattttctaaactactaaattgttagcaaatttaaggtgtcattcggttaactgccactatatataaactatttatgtgtacacttttatatacatgacacgtttatattggtacacnnnnnnnnattatttcaaaatttattttaaaaataattttataaataaattttaaaaaataaaaatattataatttttaaataataatattaagtatatcaatataaacgtgtcacgtgtacaagattatacatataagcaattcaggttggtaattaactgtgaaaaatggatggtactttaaatttgctaataattatgtagtttggaaagttttaccattaaaatttaaacttaaattaagtacaaataaaataatagttaagagaatttaaccgcaaaaaaactatataaatatatgaaaaccatttcagtatcaaacccgatttaatggcactatataagtcatctaaagctcccctatattcgctccatgttccataaaacaaaatacaaaagtaaaattatgacataaatgtatatgtacccacatgttcgtacaaatatacacctaatatccaacctctaatgcatgatgtattttgtctcccaagatattaccatacaagctaggttggtagatgtggccaaagggcggcgcatgttagtgttcatggtaatgagagttgatgcctaatttatacggtaatgattttttgtaaataagtttaatattgcccgaattggaatcaagattagtactatttgagtctaagaatacaatggcacaattagatttgaaaaactaagaatcgatataggctcatgattatatgtctacaaaacaaaaatcatatgtgtacctaatagatagctaagcttagaatgctgtttgagaggggagatcctagtgtcaactatccgccacctc

SEQ ID NO: 5836 - DNA, 569 bp, Cannabis sativa
tgagtggagcagaccctgaaaaaaatcattgatgaagttaacaaaaaaggtttagtctttttccattgtcttcaagagtaggctgtccatcaatcgggttataatattttaaccgatataatgtaaatagagcattggtataagtgtcatcttataattagttagttatttctataatatttattaaagtaaaataagtgagatccgatattaagttacaccaatattgatattttaccttacaagaatactagacatcataaatacctttaaacatttctctatatagtctataccgtgatacaatatctaataattatggaaataaaaaaaattaaccctattcgtcaaaaccgattaattttagtcaaaacaagtattgtggctaaaaatatatttagtcacaacaaattgtaatttttataactaatacttttacccacaacgtaagaataataatttataattagttacaactttttcacttttagtcacagttttgttatgactaaaagtaagattttttgtagttaattaaaatgaaccaactataaaatctaaatttcaaa

SEQ ID NO: 5837 - DNA, 2252 bp, Cannabis sativa
ttttttttctttcaggctggttttttcttggtacaatatagttacttatggcaacaacatttggacaaactagttaatcttttctctatggggaagctgaaggtaatggtttttagttttcactttgttacatgtcaagttgactctatattattcaaatttctatccctggaacaagctgagctatagaactttaatcctcaatccttttcgttcttcgttcttgttgtaggttgttgttgatccgaaacaatttttgggagtcaactctgtggctgacgcagttgagtatctccactctggcaaaagtgttgggaaggtatttcttcataccattatcagtttatcactgttgaacttgtctgtacatatttgttttttcttttcctgataattttacacaatacaaaatttaacaggtagttgtttgcatcgatccaacctatggcaaccaaatggcgaaactataatgaggcagtctgtattcatagcctaaacaaataatttatgagcaggaagataggagatttaataatgcatgcagtttcttatccaaaatgacttggaaattatcaaagaatcaaaggagaatagaaagttgtgacattttctgggtatttatggctatgttctttggccatgaagaaagatgtagtcaaatattgtgtgttataatagagcttcattataggaacaagttcattgatttctcgattgatatgatcttgtatcaaggatgttaaatcggttgctttgtaaactttaaaaaaacattgttgtttagtctgaaaagaatgatattatggagatgatcaacatttctttagtaagactctttaaattattttctcggttctagctaaacatttaataatatatatattagtttaaataaaatgagatacgaatttatgtagttttaacaaattttgtttgcctactatttacacaatagtaaatagtcagtactgaagacaattacaaaaatcaagagtaaataatgtctacttttgtacaaagtgataaatttggcaacatatgaatatgataacctagattaggttttttttttttttagttatttggtaaataaattggatatgactgaaatcgaactagaaaatcctagaaaatcatttagtacaaatgggaatctgttacttaataataagcaatgctgctaacaacaaatggtttctaatctcattaaaatcagagtatgacatatctaattatccgacaatttaaataagtaacgtgatgattaaatgatataattgtataaaagttatgaatagaagaacttataattagtgaacgagcttaataaatttagaggcttatgaaagttatagtaaaagtgagtagtgtgtttaattaaaattatgttagaatttgaaataaggtgaatgggttctatctcaaaactaattatcaatgggaagagtagctcgtcatcttatatattctattatttttctacacattaataatgtgggactctttaacaaattattagagcaaaaaagtgttgcttatttattggttatgtgtaagaaagaaatgatgagatgggatggttctctataagaacttctacgtaaaagaggaacaattataggatgagagctaattttttaaagatattcttctaagcttctaagttaaagtctttctttttatagaaataaagtctttacgctaagtatataaacctatcccacataataaatctctatctccaaccaattcaactcgtcttatcttcttatcaagttgatggtcaacttgtatggttacattcctaagtaaagtgttcatcaaggatttttaacttttatctatcaataatttacagtgtaactagttatttctggtaataataatgtccttgaaagagctattgtatgtcattagttccatcatttgctttataataactatatataatccacaacttgtaaaatgaacccgttaattataaaataataccaaattttcagctacaaatatcaataagaaggataaagcattattattattattattatttatgatggacacagtattatcttactttaattggttgctgcataacatatccatcaaatatatgaattttaattaataaaaagatgaaaacaatagaaaataatgttagttagaggaagagaaaaccttaaatggtattataatttatgaaatgaattggatacatacacgttattacaatttcataaatgctactaaga

SEQ ID NO: 5838 - DNA, 1103 bp, Cannabis sativa
tcccatataggtttcatcaaacctattgtagcagtgagaagcagcacgactatatctgccacatatttgacatgtgggtttaggacctctggaccttccaccccttcctcgaccattggatcttcctctgttgtactgatttcctcttcctccacgatgtgctcctagactacctcctccttgtccactactcttgttagccaggttggccgaaggtgcaccaccactgttgagagatttgttagatcctgaaagtgtgctaagcctctcaactttgctatcgaaacacagtagaatgtcctgtagttgctgccaggaagttgaggttctagcttcaacttgaagtacgattggtagatagtcaagatccagcccagataacacattcgagacaagctgatcttcagggtagggagccccagcaagagccaacacatcagcccactgtcgtttttgcctaaggtagtctgtcatagaagtactcccttttcttactgtctatatctttgtcctgtattcatccatttttgctcgtgagtgggccccgtagagagcttccaaggcacgccatagatctgaagaagtagcacagcccataacctccgttgcaataccttctatcattgagccatacaaccagcccatgaggagttgatcgtggacaatgcacagttcgtactctgggttaacttcgactgtaaaaccaggttgaccatcaatcgatggtgaggagatgaactcaataggtctggttttggttccgtttaagtatccatctaagcgatgacccctaacgattatggataccatattcttccacaaggtgtagttgtttctatccaatttgagagcaaaaggttgattgagagtgcttccaaactgtggaacaaccagattcgatgcagaccctgcattttgagatgtggaagactggttagcgacgttgctaccagtttgagctggggtgacaggcggggttttatctccggtctgagatggctctgataccaacttaaaaaatagagaagaatgaaaatgaaataaaaccagctctttagagcaggcggccaaccctttttattacatacaaatctttacatacc

SEQ ID NO: 5839 - DNA, 764 bp, Cannabis sativa
acctcttgagctaattgacagagtggaggaataaagccttctagattaaacatgtatgtcccatctgcctgcaaaacttaataagtttgatctaaaatttgacttttaagtcaagtaggctataactgaatctcatatgcagataactttaaaattgtatggtaaagaacaacaaaggactgacctgactatttacaaagtcagcaagagtctgggatcctataattctcatttcgtcttgtcgtgattgatccagtagagcatgcatgacactgagtaagctactagccaacagaggcctaaaaaacacttggaagaatagaacaactctttaacttgcaaatataaagggtaaaaatcaaatgtaaatccaaccgaaaacacaaaggcaaaaaatggtctccaatggaacaacatgtcaacatctgagacaacctatggaacatgaataagatagcacaaggaatgagagatgaactaactcacatttgttccttgcaagatattaacaatttcctgtaaatatgcatgacaatttttgcagattgaaagttctcatttcttagttccttgtaacacctttgttcaagggtatttgcaatctgatcaacataattaaaactcagtgagaaagagtagaaacagttcttctgtagatattcatgacactataattttctcaattgaagtatcaatagtttctcagattttcatggccaaaatgttgctgacactatcaattgaaagcttctttctttttccat

SEQ ID NO: 5840 - DNA, 1298 bp, Cannabis sativa
aaatacaactactatttcacctagctcttgaaaaatgagacattttgatagattatatgccaaatatgaacgttgataaaaagttaggagctaaaatatatttcaagggcaagactcgtcttatttctttttctatattaatttatatcagataaaatgatacccaaaaaaaaaaaaaaaaatgaaagtgtcgaagtataaatatcttgaagttaagggttcaaaatgaaattagagcaataacctaattacataacctatatagccaactttcttgtcccaccaagtactccataaattttggaaaatacgctcactgctccaagcttggaagacaaactcttcttctccttccagaaaagtaacgttctcgaaccttaggcttttcaaaatcatattttagttttctaattctcttgtttctcttggtcaatcaaaaaaaccaatttatgttagtgcagttctctttcatgccatttaaattttgtctatctgaaactctatagatagtattacttcttctttcttagtattcatattcattattaataagatccgttgattttgaggcttgtttcaaataaacttggtgtcaagctatatcaaaatacatatcattttcaacttgtaagaatcaaataaagttaaaacttgtgagtttcatcattttcatttgttttacagaactttacgaagtgttttctctttgtatctgccactggtttatgagcataatgaagttatatgcttttgtttttttcttgtcgattattctttgaaaggaccgtgtttgttttgtaattgcaaatatatttatatacatatttggacttattagtttcctattgtgctttttggttacctataaaaaactctgatcatttttgcaatgttctgtactcttataggtgaaggtgcaaatcattatcaatagcttgaactaatctgatttaagttcgaaatataaggttggattgatcatggtatccagtcttgtttcaaaaactaaacctctgagcatggcattggctagaatgagtagaagtagcctaagaagatcagaaggtgcaattcaaaacatgttcaatgaggaacaacataaacaaaagtattccttacctttcattccaaatgccaccgcacaaggaaaattctcatacttttctagcattaaaagggaaaatcatatgagcttgtggagtaggggaataagggtcaccccatattaccaaaatcctacagcagagagaattgtagaggaatcagattcagagtatgaggcaacaacaacaacaaca

SEQ ID NO: 5841 - DNA, 1178 bp, Cannabis sativa
tagttagaatagagcaagagaaactaaagattttttgtactactaactacttcttggataatgctcatcattttgtactatacatttaatcatataaatattattatatatagggactgaatattacttataaatcagtagtattaaaaaattagagtttttatacttaaattttttttttatctaattataaaaatttcttatttttatattatataaactgaggatattttatcggcttaaaaaaaattaagcaaaaaaaaaaaattaaatttgatttaaatattttgtatataaatatatttttcatatagtgtaaaaatagatatttttttcataactttttttaattaagtagttaaattaaacatagaaaaaatcaaatttcttttttattatttattattaaattaaaatctaatagttcaaaattaatgtttataattaaatttatttaataattctatatataactatatatttatttaattttatagtactatatatatatatagtattattactaaccttattctttagcacaacctcattgacaatatggcctgactccataccttgtttagttatatatgaagatttcttctgcattttatacatatgtaaaaaattaaataatgagttcatgcgaaaaatagttattgataatttgtagtcacaatataagaatgatattttataattagttataattttttttacttttagttacgaattttattgtaactaaaagtaaatttttttacaatcacagctaacaaaatcattaaaaaaaatagtgtaatactatagatattattgaaaaaatttctattttaattatatataaaaagtagatgacactactaactaatctgattaattaatattgaacaaattaatttaaagaaagataaaactacaacaatatatatagagagaaagagacctcgaagttattatagcttatatataataataagaataataatataagcttgtttgatgagaagaatagagtgtaataaaggtctattatatagagaagcaaaaatggagtaataataatattatagtaatgagaggatgcaaccaaaacaagactagtcattttcaatactactttatttattgatctatatgatgattctcaattatattgtattgtatatataaaatat

SEQ ID NO: 5842 - DNA, 3944 bp, Cannabis sativa
cacacattaacaatgtgagactaaatcttaatatattagtactactattaatgaaatccctcttgtgctactatcgctcttgctcgtgatgaggtgaacttatatgttaatgttagtataaatgagaggctttgctctattttcttaggtgttgtcattttgagaaggggattgtgagatgttcttcgaccataactttgaaggcctccattaatgcctcgcatgtggttgaggcttctattatccttcaaggcatgttcctttgtattcaacttgttttccttaagcttcgtatcaatacggactgcctctgagtttgtcaaagtattcggagcaaggaatctactcaatttgaatttggaattgtgctagaagacattttccaaatctggattttttttcttttattttcattttcacattgtaataggtctaattactttttattgctttttctcttgtaaaacatgattttttttggaggattcaaaagtttggtggtttggacttcctatttgcttttggcattagaacttttttttttttgatgtattttgtatatcattctcacgtgtctttcaaaattttatgatattttttttaaaaaaaaaaatatgagatttatttaaaaattaatatcgtggaatgaaaaaataatacttaatataaaaacacttgattcataaattatcattaggtgacactatagggcgaatttgtaatagatgtgtgtattcattattaaatggaattatagttagtggcaactgagagaaatttcaagattatttatatgttacatatcaatattttattcatttgttatgggccaatttagcatagttgagctatagagaaaatcagatgtagctgtactattaaaattgtagaaaaaattgagctggatgtggtaaattataaattttaaaattatatgagttgttgaaattctattataataatgataatgttataatctagttcattataatcacaaatatataaaatgttatgtcatattaaatttttattttctatatatttttaattatttttctccatagtgtaaatttatatgcatttgacaaaaataatttataatatttttaaattatatttttataacttgtaaaaaaattgtagtttatataagaaactctaggttgatgtggtttcttaataataaaagagtatgtactattttggactcaatattttgtaaaagttaccgatttgaccttctcttttgttaaatgacaaaatagacactatatttttcaaaatggtacaaataagactctcaactgataataaaaatttgtaataacctaatctagaggtgttatgacaaaactggttatagtttttgtatatgttcgtgcgaagaattatcttcaagttggttatattgaaaaatattcgaaaattgagctcagggtctcattgttatcaatttaaaaaatacagggtccatattgggtcatttgacaaaatagaaggtccaatcggtaacttttgtaaaacacaggtcgaaaatgatattcgcctataataaaaatataaatataaatataaatttttgtaaaacaaaatttaaaaataagaaatataaatattattcattttaaatatttttctgtttcaaaaaaagattcttaatttttgtaatacatcataaataataaaataaaattttcttacataataatttattatatatagagttttttttaatgaaaatagatatttccaaaagtttggttgtacccattttagcttctccataaatcactcaataacctattttttaactacttatcaaacatatttttatcacaattatttttaaaaaaaacaacttttaacatttttaaaatatgtaccaaatagacccttttagaattgcaatattattagcctattttgataaatttcaaaatattgtgctaacttccggtggaagtgtgtggaagcttcttctacataaaggagtttaccattgtttcatttagtttgttcacaagactacagggtgctaagttccattttatcttcttttatcgagatatggctgatacaacacttaatgagttatttgaggagtctgttcaagttagtgtggaggacataacttgtgatcttcatcccggtgaagtggatcccccaaatgagccttgcaaggttattctgggaaaactcttttgtcacactagacttggcagaaaggcgatacagggttcactgaacaatgcttgggcttccatctctggatggagctggaaggaacgagaggatgggctactacaattctcattcagaacaagttttgatgctgaaaatgttcttctcaggagatcgtggttggtgtgtggctatttgttagtcctcatgccctggccttcatggctcactcccgaggaggttaagtttgatcatactccaatatggatccgattaaagagcattcctccattatattggaacaaaacgaatttacaagagatggcgggaaaagtttctacagtttatgagcttcctcggcatatcgaaaaaaactttgaaaggggttcttttggtatggggactttaagattccgagccacggttgagctatctaaaccaccattctctggtttctttctttggagaactgggattaaggacctatggctccaatatcaatatgagaaactacctagaatatgctacaagtgtggcctaatgacacatgaacacaaattttgcttcaagactccggttgtgattaaaaataccaaaggcgaattctttccaatgtttggaaactggatggctgaagatgctattgaacggtctcccttcactttacctctaccaaaatggttcagtgagtggattgtgaaccaaaaggcggcaaaggatgaaaagatgagacaattgttgaagaatcagagacttagcttacagatcgaatgggcggattcaagggagcttcgaacgcaatacccagggaagagaagacaagtggaaacggtggtggagaccagagttagctccggtgaactagtcattaaccggtacccagcggtcactttgctggggattggagaagttaccccatttgagaacacagcaaacctaattgttgaaaagatactcccagaccttcctcctttggaggtgataaggacaatgcaaaagaaaaaagatgtacccagctgcagtggtacgaaactcgtgtctgcaaaggttggaaccaggcacgcgataccacatttgccatctgatcatcaagtcgcagaggtgttgggtgatgctactggagaagagtcgactatagaagcccctaattttctagccgttggaatccaggtggcaaaggatggtaacgacaaactaaaagggtctaaagatgacatagcccaagtggaacaaaacaatactcgaaaagcccaaggaagttgggccctgatccaaaaagcctgtttggtacacaagcccatattatggaatatccatcaaaggaatgctgggatttggcttttaatcaattactgggagcccaaactgttgacaaattccaccgtgagcccactctctttaatccaatcttggatattgaagagattcgttgttatgaagctaatcaaggaccatgaaaaagaaaggcattaaatgggttttatatgcttcccaaaaaagatgatgagtcaagatttcagcaagaagatgatcagcgtgtgtcaccaagaaatgaagaaaatatggactccccattactgagttcacccagtggcttttcacctggatcaatggagaagggcgacagtcaacggaggagaggaagaccgaggaaaaattctgcctctgtgccgaagccactggagccaacaaggaaaagaggaagaccaacaaaggaggcgatgctaactatgaaaccgaaaagcttcaaaaaagagagtgat

SEQ ID NO: 5843 - DNA, 954 bp, Cannabis sativa
agctagctattttgttcatttgttaattttgtactgacacactactatttcttacgtactttttgaagcttaatattgatttataggcagaataagtatggagaattcatcaaattcttgtctacacatagcaatgtatccttggtttgcttttggtcacattaccccatacatccacctttccaacaagctagctgaaagaggtcacactatatctttcataatcccacccattaccaaatcgaaagtagagcatttaaatggcttcccaaatctcataactttctatccaatcaccttcccccacgtggaaggtcttccttctggggctgagaccactcgtgatattcctttttccttattgcctctcatcttcattgccatggataaaacagaaagtgaaatcgaatttcttctgcaaaaacttaaaccccacttcatcctttatgattttgcttattgggtttccaagttggctcactcattgggcataaaatcgatgcattactcggtggtgagtcctgctgcaacagctcacaatatgtcctctgctgctcgccactaccttagaggaaggaaaattactgagactgacttgatgaaacctcctccaggctatccagatccatcaattcacctccattttcatgaggctcgatggtatcttataatgagaagtgtcaagcctagtgacattggggccattaatatgtttgaccgcttgtatatgagcctcgcagagtgtgatgttataggtatcaagggttgtagagaaattgatggcatgtttgttgaatttcttgaaaaagattttaggaagcctgttttgcttacaggaccacttataccagactcaccaagtgaacctctagaaaagaaatgggttgactttctaggtcaattcaagcccaactctgtcatatactgtgtttttggaagtgaggtgatcttgac

SEQ ID NO: 5844 - DNA, 1501 bp, Cannabis sativa
ttgtgtgatcatttttatgattagggtgaaaatggggtgaaggtgatcaaggctgtgatagaggagccaaattataactcatctaagggaaataatattactagtaacaaattagaagtgttaccaaacttcttaaaagaaatagggaaaggaaaaaagaagaagataggtatggtgaacatggatgaagaagatgtcaatgagtggaacacaagacacaaaaacattggagaagctatacctattcatttcgatcatgtcaccgattttttcaagtgggaagatttgtttccagagtgggtggatgaagaggaagagagcgaggtaccatcttgtcccgagatacctatgcctgatttcgacaagtacaagaaaatggatgtgatattggctaagttgccatgtatggaggaacaagccggggcggggaggaatgtgtttaggctccaagttcatctagttgtggccaatttggctgtaaagaaatggaaaaggaaagaatggaataggggaaaaagtactaaagtggtgttttggagtaaatgtaggccaatgttggaattgtttaggtgtaatgatttggttaagagagaaggaaattggtggttttatgagcctgatatgaccaaattggatcaaaaagtttcattgcctattggctcttgcaaattggctatgcctatatggggacaaggtatgattcttcttcaatccatttcgaactctcggtctttttaattatatttgttggtctcgaactggaatcctatttcgttaaaattcgtttaaccacttgagttagtcacgaaataattttataaaatttgcataattttctctctaataagatccaaactaatgatgtaagttccacctactaagcttttatttaaatggattacaatctaaatgttcttaatattactcatcttattgttattattaaaattgtttcaccaaacatagaaaaatgaattaaattatttcaccaaacttagacaatgaaacttgatgatgttgtgttgaaaatttccaatcgtttggtgtacaattttttttaattggaaaatctttgcagctgtttaagaataaagtcataacaattaatattaaaaagagttttaacatatatataaaatgttaggattttattgtagtgttcagcacaataaattaaaaaataaaataaataatgtattgtagtggattttttgataggctgattttcaaatataattttcttttttttaataaaataaatattttttgcttgaaaaaatataaaaaattatttatttgtagatcaacaattcagtgtgtatgctaaaacttttattataaatctggttaggaattagacattctatccactgagaatattatatataaaatttcaattactttcttaatattatattttcttaattaatcacatcaaatcaaagaataaattaattttattcgtataaatatattgtttaggaaatagacgctccatcca

SEQ ID NO: 5845 - DNA, 1612 bp, Cannabis sativa
tgtctggaaggcccctaagttttatccagcaaaggacatcaaaaagtctcttgttaacaagcactagcctaagtcaaccaagcttagagcgagtatcactccagggacagtgttgatcattttgtctggaatgttcaaggggaagagagttgagctttcctctgggttgctcttggtcactggaccacccaagctcaatggagttcccatcaaacgtgtgaatcaatcttatgtgatcggaacttccaccaaggtcgatgcttctggtgtcattttggagaagtttgatgacaaatattttgcccaaggaaaaaacaagtctaagggtgcatttattgtttttaagatccaaactttgaatctatatattgaattattttagacggtttggtttttcacatctaaatgtattttttaatatttttaagtatataatattaagacatttattaaattatattttattttaaaagattatttaaatattcaaatacaaaacataattaatattttaatttaaatattggaaagtggagttacttttataccatttgtttcatttactcaatatgttagtgatatatcttaaacaaagggtgaaagatactttaacttctataaaagcaaatcgggcatgattaatatttatgtaccggcttgaggattagttatctctttgctttaaatactacatctattctctgtttcattactcaaaatatagaaattcggctatttagtcattctttcacataatcatcaatatataaaggagagttttggaagctgtgtacaaataataataataataggaaaaagtgagcatgtatgcccttaaagagctctgtggcagttagtcctttttttttctttttaactatattaactaccttatctttgatctttatctccaatattccctcctcgtttgaatatctgactattaactgtttccctattctcccttattttgaattgtaactgttccctcctccttatcctttgaatttctgcacttcttcttgctgtcttcatgcaaattcgctaacctcttcatggatcatcttttacacgatatgaaccatactttaattctcactgaatctgaacgagaagtgcttacacttcctgctgaattccacaatggaagcctccctgaatcgaaccatgtattgtatgctcgagttgtatcttcaagagacatcaataggaaaacttttcgaataaaaatgagtgggttctggaagggtcaataccctgcaacaattacagaccatcattctggtctttttcttgtttcttttgggtgcataggtgatcttaagaaggtattgttgctggaaccatggcattttcagaatcatctcattgtgttatcctcccctactgtccttcactcaccaacaccggaagctatgtcgctcactcctttttggattcaactacataggctgccttttctaagcaagaccaaagctatggccgaatgggctgggaaccttcttggtacttatgttgatgttcatgaagattccttaaatgagggatggggcccttttctgcgatttcgtgctattcttgacatctccaagccattacttagaggaaaaat

SEQ ID NO: 5846 - DNA, 828 bp, Cannabis sativa
catgaagtctggccctgttctttctcaaaagtcagtactctcattattttttcttctctactactttcagagttatctacttcgtaattttctgtgtttttcattcatttgtggtttcgaatataattttttttcttttggttattacaggagcgctaagtaccatgagccagaacattggaaatttggagaagaagggaataagtatttcaggcatgccactggtcaaatctatgccatatctaaagacctggcttcctatatctccatcaatctgtaagtaaataagcattcgattcaataataccaatgatatttttctcttgtaagaataacaccacgattttaatttttaaagaaagaaaaaatggaaaatctacacctacacacattatgcttaaaatcatttaacataaataaccaacattcaaagtttaattatccaacttcattatacctacttcataattttttttttttatttctataatgtatatattaatatactactactttccctactaaaatcttatgtaattacttttactgtcgtttggaacaagatacattttcttccataaataaatgtgttgttattttcaatttatattttggtattagatacgatttagtatactaagttcatttgaaattcaaagattgttagatggttgatagtagtttttgttttgatattggatacaaatttaacatctacttgtctgttttagtttgtatttggtattacataccaatttgtttatgataaatgttgtctttttttattgtgatacatttgatataatttgatacaatttagtattttaa

SEQ ID NO: 5847 - DNA, 1003 bp, Cannabis sativa
atattcttaaaaaataaatacaagtgaactgaaaaggcccgtgcatgataattatatcattaataaaataaaaataagtcattttatttaattttatataaaacagataaaacaaacattcaaaattttaggatgatattttcacaatatatatagctatctagatatttctttccttaaatttaattagtggataaactaactgaaaaaacctagatcgaccttctctttcaaatttttcacaatgaagaaatcatcatcaattattgtgttgactttatggttgaccatattgatgagcactacacatggatggccatggccttttaataagaacaacaaaatttgcatgaatcaattactgagtattcaaccgtgcgttggtgacttatatggcttcacttattggcatcatccaataacttcctcttgttgtgacacaatcttagatatcactccttccgccattggccgttgtccccatctattaccctattattcgaataattttgctttctttcaagctcgacaacattgcaccgttacaaacaacattccatcacaatcactaccaccaccatcaccgccgtcatcaccatcactatcaccaccaccgccatcaacaccatcacaaccattatcaccaccaacaacgacgacaggcctaggttatactaataacaaatattgtgtagaggaacctcgacttcatccatgctttttagagatatcgcggtaccaagacttgaaaaagccaatcccctcatcttgttgcaacactataatcgacgttacaaataaatgccctaaagatgttggatgggcccctgtaattttagaatgtctagattattgtcagggtcatcggtcttgatcttaaatgtgagttgttcttatatttcaattttttttaagttttctttataatgtttttttttcattaattagttaatttatcattgctgtaattttctctttaaatagtttataatatggttttttt

SEQ ID NO: 5848 - DNA, 1285 bp, Cannabis sativa
ttaacaaatatcaggcctggccttcttccgaactgaaatgcatccacgttggtgatccctaaagattctaatctcagaaaaatctctcaaatcttcaaggctaatatactgttgtttgaccattctcatggtgtcaccaccagtgtcattaatccaaacataagggtgacaagtctcgtcgtagtaatagagcaagctcttcatgccaccattgatattcccaccaggcataaaggctttataaatggtcttgcatttgagtctctttgatgagcctggtttgagagtgtgaaccttttttagaatggaacccactcttatttgaagctctacaggcttgtcactgaggttccatattctggtgcccaaccctcctgatgagccaccttgggtgtggtctctgcacccatcaaagcaacccccaactgggaataacatcatcatcttgggtaattttattggcattttctctgatagagattttagatgcttggtcacctttgatttcttcacaacatgcattttcttttctttttagtaaaagcatattgcagaggaattggggaactatatatttatatcaatcaggtatacataaagggaaattaccttttacccctccctagctatgtttgtatgatcatgtagtattgtgatttctttttattgtaaagatcattgctgtgtataatttcagctaagctccacaatatgagtcgtttgttatattttgcctaaattttataataatgtttcagtgcttatggtaaaatttacttattttttttatatagaaatatgttaaaaagttaacaaaactactaaatttttattgaaggtgtgtatataaattttattaaatataagagaaatgttaaaaagtattagtggtgtctaatatcctcctacgtattaatattgttgtttgtggaattaagtattaagtgtaataacttttataaaatatcgctaactaattgcaatgtgacaagtctataaacactactaatatttaatagtaatgctctaaatatataaataaaatgtaaatttaattacattaaaacaaaagagtaaataaaaagtgatatttattgcagtgaaaatttagtactctgttatattttgtgttaaatttggcataacttttagtatatgctaaatttggaccattttatacactgccttggagtttacttttatgaaaatgaactaaaatatgcatacactacacttttagcattctattagaaatgctcttagataatcgctaatgcaagatata

SEQ ID NO: 5849 - DNA, 1239 bp, Cannabis sativa
ccttatatacgcattgagttattactccatatacgttttatagacaacttcacatttggtaacaaagggggaaagaaggcaatacattaccatattagttgtatctctcttttccttctttctttcttttttattttgttttccttctttgctcatagttggttttcaggtattgaatttctttttttaggattttcactcagaagtttgcccgtttgggattgttattattaatagagaaaatttgaaatattaaatatatatatataaaaaaaggagaaactgaaaaatgggaaggggtagggttgagctgaagcgcatagagaacaagatcaacaggcaagttactttttccaaaagaagaaatggtttattgaagaaagcccatgagatctcagtcttatgtgatgctgaagttgctgttattgtcttctcccacaaaggaaagctctctgagtactccactgattcttggtactgcaatattttcaatattaatattattaaattctctctctatacatcatatataataaaatccatcttcttcttcttcttcttgtctttttttttaagaaaaaatccatgttcttctgcttctttctctttctcgtcttttaatattattattttcctatataatatatatacgtatatggttattttacttataatttttacccatatttttttttttaaaaaaaaaacatcttccttgtatttgtgcatttcatatatgaaatttttaacatcgatatataggctaatttatttgtagttttacttttattgaacatgaatatatacaaaataaactcatgaataagggtagatgaatgggggattggacttatcatagtggatataataataaaagtgtggtacttttaacctaacactcctctctgccactactccgtcttgtaatctgtggtagtaatttcagtaataacaaatgtttgatttagtagtactagggttatatgtgtatatatatatatatgagatgtagagtagtgtagtatactgtatagtagaagcagtagtagtactttgatcatcactagtcaaagacttgaatctatataaagagtatttttctgaatcagatgtactttgaactgagctaaacttgtgagttttctgatcaattcatctgtatcaaagccctgatcagagatactcacaaaggtcataccctcattctccgtgttctacggagtagtcttgtgtatatta

SEQ ID NO: 5850 - DNA, 501 bp, Cannabis sativa
ttcttcgccttaggaaggccttgaaattggtcagccctaccataaaattatttaggcaagatctgtccattatatggctgataggatcaccttatttgggacacagttggccctcctggccttgaggcctccccatgatcctttgggcattgagttccctttgggacatagtaacctattcctcaacaaagattccttacgagggaggtctttttaacttgagatctaactctctcattgaacaacctgatcaggtcactcgcctcccaattttggcaatttagctccaactgttgggcttggaggatcgcgacttatcattccatcctttcttggaatttgtgtctctactgggcaaaagcattacccatagcaacacgtgtttcttattggtcatagggcatgaggtttgtatgaccctgcactttccctacgaactctctcaccctggaaagttcaatatcatcccctagatccacatggggttcatcaatgctaggg

SEQ ID NO: 5851 - DNA, 1289 bp, Cannabis sativa
gagagagagagtgatgagattagcctaaaaaaactatttaataaataatgttaaaataatatataattttttgatagctaatattaaaataatttataattatttaccaacctcatcattcatactaattaataaacacactacctttttgtttaaccatttgatgcatcatcatgggctccaaaaacttcctcacgggtaagaattagttggtgtgggatgttattttgagttggttcaatatttgtagcttaattaataaaaataaataatatattattatgtccaataaaggagaagaccattcaaacatggcagccataaaaagattgaaacttaacgtttctcaaaagaggagaggaacaaaggaggaatattcattttggacatccattaattttattattgaaatttaaaaaagagagtagtcattcatgggttggtgagacttaggggtatgtatgtattagaatttataattgagaatttggaaagaaagaagtaataagtaatgatagtatgttatatgaatgatatgtgagttggtttagtctaaagtctaaacataatttgtttgcttaacattatcacgtgttgcaacaacgaaggtgggtgtgtttaggttaggtggtggaaattcatgtctttgaagggttgcttccttctttctttcatttatttatattttttttggggggttggtttgagtacattttgacctttttaacttcttaaaggacaactttgtttgtttatttatttataatataatcccacatttaaattaagttaaatatgtttgtatttcttctagtaaatgaggaattccatatgttatagtgtttttcatttttaatttttttaaaaacaatttaatctttcaaattcactcaaatttgaccataatggttatctatattctcttattttaaattgattgtcaaatcagatagtgttactaaatgatccatgatattaaaaattttcctaaactgtaatctaatgtcacaaacaagaccttttgagatagcagccttcaagctttgcctgatgtggcactttaatgtgacaatatgctaaatgtacaataattagccaatttttctccaaattttgaccatcgaaaaaactttaaaaaaatcatattaatattatatatgataattttaattaattatatattaaaaaatctaaaattataatcaacaaaaaaaccaccctatatattttactctttgttatgttataataattaaaacaatcttaaaaattagaggatgtttgattgt

SEQ ID NO: 5852 - DNA, 1079 bp, Cannabis sativa
ctagcccgcctatgcctagggcgagccctggtaaaagttgatgtaaaaatatcacaaaaccactttttattttaaatatagctcaatttttacaatctcctattggacacgatgtctaaggtattttggtgttaatatacaattgaaattgagataattacataatatactattttttataatttttttttatatttttacgttcaatttttttttttttacatttttacaattttttataaaacaacaacaaaataacaaaaaaaatacatcaaagtaacaaaaaaataatatcaaaacaacaacaaaaaataaaatacaaataacaataaattaacataaattaacaagagtacaacataaaaatatatcaaaagactgtattttttgtatgtgaaatcataaaaattcgtaaaaatatttaaaattttatataatcaaattttttattattttttattatttttatatatttgtgaaataaacccgaaattggaatgattacctaattcactattcttgcaattttgacaaaaatatttctttccaagcgaagagtgccccgaacgctttaagacttattacgaaaaaatacgttaaaaatacacgcaattttaacaaaaatttctccttccaatcgaagccaacccaaatagagtgaccggtacgcttttaaggcttattacaaaaacgtcgacgtatagagaaattggctaggccctgacttactccatttctcctcggctttctctgtctttttcatttcatttcattttaaacggcttttccctcctctcagtctcactctccgttgacaatggcgaacaagctcaaagtagaagaactacgtactgaactggccaaacgtggtctcagcaccaccggaattaagcccaccctggtttcactctttctttctttctttcgtactccatatatatttatatgcatgtatttctcggattctaagtttatgtcgtgccattgtaggttcgaaaacttgaagcggccattcgccaagagagcaagctgccattacaagacggaaatggtgattcaattggaaataagagggagag

SEQ ID NO: 5853 - DNA, 929 bp, Cannabis sativa
cctccactttctggattttcctaatgggttctcactttcctaatttaacaatctttaatgctttactactccaattaccataaactcgactgttctatcaaaacacaaaaacaccaaaataaataaataaaattgagattttctttcactacatttattcctaacaaaaatcatctcttattgtgtcgatgtaacataatttccttccgtagaaatgaaatatacatatcagaacaagtagaatcttcaaaaggacacgggaagtgcaattaaataaatataatggtaaatggaacttacagatcgaaggcgaagaagagttatttcaggtgttaggggattgaacagtcacaatttttaccattctgatctacaggttgtggaaatgattttctcataatgaaatcccaagttggttggtaagaagaagaagaagattagttcgaatactggagccactgaagaaaaggtcctcggtgttccttatttcccaaaatgctaaggccgagtcaccgagtccgaagtgagttctcactcgctgtttcattttgtagataaagccctaaattgtttttaggtttagtatcaaattatgcaacttaaatttttttttgaaacttttactaattttttttaaaattcctgagattatttgatttaataatttttatccaattttactaataaaagtttaagaaatacaatttgataaatgttaaagtttggagatatgattttgtagatattaaaattcgagaacatgttttaatacatggtcaattgtcgtgttagtatagtgaacgagattgaatagaagtctttaaatctaatcttaataatatctaataaaaacaaagggttgtgtagaaacaaaaaaattataacgtttttcgctccaagattctctctgctagggctctgtttgggct

SEQ ID NO: 5854 - DNA, 526 bp, Cannabis sativa
aaacaatttaaaagtttggtagctattaaataaaattactatgttggtatttattatgttataaaagtcttaatcaaagaaagaagaaaagaaaaacctaaaatgatttatgtatgttggattctgaaaacacatgcaataaataagtcattttcatacacacgtacacatgtgttgtaaatgttagatttatacctattttctttgccttttgcccaaaattgtcaaacaattatcattttcatttgaaactaattaagaaaagttcaaaccaacaaaatatattaggttgaaagttgggtagttgtaatatggataaggtcaccaaacatcaacttctttttgaatattcaccaaataaaataaaataaataataataataatataaaataaaatacatacgcacatcacatcatatgggcctttcaatattaattgggcttttagagttcaactcaaaatctccaactcatagctatagggctgtgctattgtacagtcaaaaagtaacaaagcccaccaatt

SEQ ID NO: 5855 - DNA, 821 bp, Cannabis sativa
gtcactgcacatgatacggttatccttttgaatttccttcacaacacaggggtattgatctaggctatcatgggtgtaagtttacctggcagaataacagattcacgggaggtcttacgcgtgagagactcgatcgggcagtggcctctggggattggatcactgagttccctggggccaaggtaacaaatgcgcctatctcggtctcggatcacggttttgtgcttttggatacagttgggggaaagtgtagtggtgttaaaccgttcaggttttttgaagcttgggatagggatcagacttgtgaggatgttattaataaggcatggaggttgagagttggtagagatccaattatatgtggtaggttggctcttccgatcttggctctgcagaaatggaagaaggagagttttggggactgcgactctttgattagagaagcagaagagcggttagtttggttacaaggtcaaccgatgatggcttcccttcttcaagaggaggctggccttcgtgatagaatctctgagctatggatcaggaaagaatctatgtggagacaacgctctagagaaatatggttgcaaatgggtgatcggaactcaaaatttttccatgcttctacggttataaggaggaggagaaatgaaattgcagcagtgaagaacaagtgtggaaagtgggaaaataatgggtacaaaatcgggaaagtgttcacggagttcttcaaggacctatacacggcctagagttcttatgttgatgaagagttttatgagctgatggctcctacagtcacgttagaagaaaacactatg

SEQ ID NO: 5856 - DNA, 575 bp, Cannabis sativa
aataattaaattaaaattagaactttatagtaattaattttgattgtatttaaatattaaaattcaactttataatttagaccatattaatattttatatatgcaaattatggttttatgccttacataaaacacaattttattagtgtaattttatttactatctgttattagcgtttttatgaagtatgacacgtggtatttaatgaggaagaccaatttaatccttccttaattgaagtcttttcgtacaactctgccatggaaaagcctcctggaactaagaattattcgagataaaaggatgcactgaagcctacttaatcttacctcagtttcccagacgcagaaggcaaatggtttctcttggaaccggaggggtctaacagggaagcttacaagatatgatatccatttaggtattcgaaaggtttaaagcggataccgaccatcatgaagtgtcgcggacgtcaaccttttatgcatgccaggttaccaaagtgatggttatgctttttctaacgaaaatcagatcttgtctcctacactcaagcatggtagtgcgcgtaccacca

SEQ ID NO: 5857 - DNA, 2570 bp, Cannabis sativa
gataatgagtaatattttctaatatgtttaatattcgttaatataaaccgaaaaaaaacaagaaaaggcaaaaaaggcaaaaaaaaattactaaaatatagtgggtcggccatttcaacaattatatagccacaaacaaataattacaaaaatactatctcctctaaaccttcagccgcatgaaatagaatgatcaccaacaaaaagcttcgatcattcaaaccagcaacacaactgaaatgaaatgagatcaggaagaagaccaccattaattttggcgagttcactagaaacgaagacacaaaacgattgaatctgaaattgataaaaataagagtagagaaactaggtcaaaattgaaattcaacattgtatttcagttttgttcgaacaaaacaactcctcctaatatcgaaaatcagactcatataatgtagatctctaacaaacagatctggagctccccatcaattcaaatcaggtataatacaaatacagggaaaaaaaagcatggataatagatctaaggtatatccaattgcattgtcgttgatttcagatttctaatattgaatatattaatttatacacaaaaaaagaaaagaaaattcgaatgaatctacagctacgtaagtagaagtatgctccatgattttttaggttgctttatagttgcattatcatttcataatggtgtttatcaatattgcaggtatttcatttgatagctaaaaagagatatcacttcaaaaatatttctacaacatggttagttttatgaaattattcaactagttgctaattagttgcatgttagttttacgatagttgcaaaacagttgtgatacaaacaaaaactaatgcaaaatatagggttcaaaattggcaagacatgagttgaatagaagaaagcagatagaagtaagtttcttttctacttcatacagataattttaatttttgttttttaagtttttaacaaaaatgttcagaatcatttataacaaaagcatttacaaatttaatatagtttcaaattagttgacttgcaataataataatttcataatctgaggaaaaatacgaaatttcatttctagtcttttgtaatggacagtttgatgatcgaatgaattttgcaaattattaagctagtgggcaatatatctcaacggattgtaaatatgatgaactaatatacaagctgaaagaagtcccagaatgcaaccaagaaaacactatcctacaactgaaataccaagtgaaagaaggataccaaccgttgacgataaaggatgatcaaattctaaatttctacatacaactaaaactgaaggaacttgacttcacagcatatccactatgtgtgaaggcgatcagcaatacaaaaacaaccatcaatccatgattcttggaaataacaactcattagttgaacaaacatatgcaatagaaacaatggaagacaatgcacaaccaacaaaagaatcaacaacttaacaacatacattggaaggcacaattttggaagatggtgaaaaaacgttcgacttcatggactatgaaaaaattgtggtagaggaaatagttgatcaactggaaaacaactaagacagagagacagaaatcacagattatgacaaactactaatcacagattcacaacatcctgaaatagaagaagcacaaatatacaaggacaaagaaacactacaaagtgtgcttagtttctatgcaattagaaacaacttccaatactaggtcaaaaagtcttgcgcaagaacatacaaaatttattgcttggatccaaaatgcaagtgagcactcacgacatctagaaacagaccaatcaagtctttcataatccataaatatgacagaaaggtgatccacacttgtgatcttttcataagatttgcagacaacatcatcttggcttgtgtagtagagatcaacatcatctatggtggtgttcccaccacgaacagtaggtttagtggtggtggttctagtggctactatcattgtagtacacaacgtcggtatcaaatctttcttcaactcttaataaaagtaccaaaatattcaccgagtttttcaaaaagtgattttaaatagaataaggctaaagaaatttagtaaaatataaagatcaagacgagaatatttatgtggttcgagtataaacaaactctagtccacgagtcagtattatttgactagaaaagccttcgagtattgttcttgtcttgtttatgaaccctagctcttgttttagcttataagaatttactaccgaaccctttgcatgaaggggttttattatatttataggttgttagggtttgaatgtgtaaacatggcccactaatgggaaaaatacaagtaatatattgacattgggctaagttggtgaggcccaacccatgaggtaataataatctgtgtacgcgtgttaacgtaaattttttttagctaaatttgagcctgaaagtgacaatctcacacagaaaaaataaaagctataaaataaaaagtatgaaagaaaatgattttttacgtggttttgc

SEQ ID NO: 5858 - DNA, 863 bp, Cannabis sativa
agagtaaacataaattgtattgcttaatgaataatcagatacagttatttatgtacacagaaactaatcaagatcaacaagcttagccgatcaaaccagaataacagctaagcaactatttctaactaattctaaccaacttctaactgatttgggaagagtcattttaactcctaacatcccgaacttaaacacagtgctaatatatatgtaagaacaaatacagttacaaatgggattgattcacataaaacaaaaaaatacatattaaaaaaaatgaaaaaattctgaaaatagatttgagaacaaaatctggaaccatacagattagaacaaacaaaatctcttatgattattaacacctttcaaatggtaagaatatgcacaatttctaaatcatagaagtaataaacaatattataaactaattatcacagacctaactattattaagaagatgaaaagacaattatttagattaatagactctgtaaagaacaacaacacccttattcacaagtaggactttcattttcatcagtttcttagaaatctacttgtacattctttacaaacaataattgattaatgatataagtgaagttattgcaataatgttctttacaaacaatatttgattagaagaaacaaagaatttaaataggccaaagtaatagtaattatcttaaagcattgctgctggtatgtagtcaacttacaagaaataacaagattagcagcaaacaaatacaaaaacttttttagcacacaccttgagtgctagatattttaatccaacatgatgtccaaaatccaaattttaaaatatttttttctctaagaatgatcaagagaaaattaat

SEQ ID NO: 5859 - DNA, 3319 bp, Cannabis sativa
ttctgttacagcacaataggaaaacgttgaaagtatacagtaagtatttataatcttcttttgtaggatctttaacagggccggcccggaattgaaatgggtctaaagaaaaatatattttttgagctcttatttataagaataaatggtattttaaaaaattattaaaaaatatattttattgggataactttaaaaaaattacaaaaatacagtttgttcagagattttaatatttttacagttttttagattttatttacataaaataagatttatttacataatatacggtcttttggtgtattattttattgttgattttttattatttgtataatttttttacattgttttgaggttacttttttattactttcatgtagttttttttattatttttttgtatttttataaaatattgtaaaaatataaaaaataaaatctaatcataaaaatataaaaaatttataaaaattagtgttatatgtaattattcattttttatttgggccttaaacgcggatctagtctgtcttaatctaaggtttaatcttgtagataaatctgctatttatttagaactaaaatataaatttgtttttttttttcagtttagggaataaaacttggtagagctgtgatctaaggggaacaatggatatgagtttgaaaagcaatattgaatgaaatcaaaattttctaattatgctaatcataatggattatatggagagatgacaaaggtatctcagaaatagatgatgtatgtaatgttatttgcaaagattatatatttctgagttgtttttgctttgcttgtaatcttatttgcagtagagaagccacagttgtaaccacagaagaaaaatgattaaaggaaaaaagagaaagaactggatatacagctgattctcattcatatcaatttgattaatgagaggtttgtttggaatgaaggaaggaatcattgttataagaagtttcttttatttgctctaaatgagtgttatttgcactaaaattggttttttttttcattataaaaaaaattggtatggtatggtctaatgcaactgatacttaatatttaattctatcaataaataaaagagcaatttgcagtgaaatttctttatgttttaatttttatacacttaattttctttcttttttatggcaaaattcccttaagtttatttttctttgcaaatttgacacgctagttaaacatcactgttaaatatcaactggatgaccactatttacacttgtgtatatgtaacagtaaaagttcgaagtcgatacagtagtaatccagttggtatttaatcgtaatatctaacagacaccttaaatttgtaaaaaaaaaaaaaataaggggattttgcctaaaaaaataagaattaagtgcataaaaattaaaatataataggagtttgtcgcaaatacctctaaataaaataataaaaataatcatttttctaagatttagcttttgaaaatgaatagaaaatgagaggatctttgaatgtaattggagattatgggaattgcttatgtttaaaaaatattatggcatctttgagtgtaactaagttttgtattactatggtaccaatatgagaaactaaaatagctcaaaatgataatgtagagaagttaaaatagctcacttggtggagaagctattcatcgtttttaagctattttaaaagtattgttattagttattaatgatatctagtattaccataaagtagtgttttgctaatggttagcgatatttcatcatagttattaaagtaaattatattatatgaaacttaataattaattttatcaatatcgatataacattttaaaaaatattagacatcactatcagatgaaaataggtgagttgtgagagatctatttatttaaaaattataaattagaaataaattgcataaaattaaagtattattgttaataatttatagtacaaaataaaataaacaattactagtatgctataaaatttttttacacaatatacttaaaaatagatttttttttataattttacaaattttttcttattatttacatttttacgaatttctatttttttaacattatactatatttttgcaacgtaaaataatagtctgtatcttcaaaattatgtaaaaaaaaaacgtaaattttttgtgtattttatttggtatttctaaaataataaaaaaaaatgcataagtaaaaaaacatgtataattactagaaaaataagatcataaaataaataaaaattaaatagaatctcatttagagaagagcattgttacacgacactaaagtgactagtactattatgaaaaatgagacccaatattaaattatattaataacgatactttacctcacaaatgtgttaattaatatttaatgaaaagttatcactatctctattttattcttaattatgagcaaccaatcattcatgcacttcaaaaaaaaaaaaaatcaaattagaactaggagtgttaattagaccacaattaatatttttagacatattcagatccgatcaaattatatattggatgttagattttactatctaatccaattaatttcaatcatccaatcgatccaacatccaataaatattaaattggatcgattttatctattggatatatttcatgtatacctattagtttaatttgagtttatacaatattttagacataatatttattagattagatcacatctatccaatattttagatattcaatatttaacagtaagttataattgaatcattcgaatgtcattgaatttgattgatttatgtcctacccaaaatctaggagtattcataaaaatcgaaaaatcgaaattgaccatcaaaccgaccaaactgtaatcgattttttggttccacatcatcaccgaatttgacagtcgatttcagttacggtttttttgatacagcagtcgatttcagttttcaaaataaaaaaattagttaaactaaaaaactaccaaaactgctaaaaactactataaacggaccaaaaccacataaacccgtccaaaaaccgtacggtcatttttatacgattataatttctaaagagtcaattattatttttgtaaaataaaaaccgtaactaactgattagttataaatttataagaactaaccataaccgacttattttcaccgcacccagaattaaaagaaattgagtaaatgtatcctagaatggttgagtaaatatgtcctataatggttgagtaaattcaatgatgacttttgaatttc

SEQ ID NO: 5860 - DNA, 1483 bp, Cannabis sativa
cgagactgcaactatggaaactgatcagcgccacgggaacatctttcttacactcgtcacttcaaagaaagaaaacaaataacactttaatcaacacagaaaaacaaatgatgaaaacccctaaaaacaattataataaaaccactcaaagacacattaaacaaccactacaacaagagaatggaagaacatgcatgcacaagagaatcaaggaaaataagtaccatcgagcgaaagcactgccatctttgcctcgaacaagagagggagcagcagcagtagtagtagactccgtcgaagcttcgactcgcttccttgcctttgtttggtacccacctcccatcttttttcccttgtctttgtttgtaagaaaaacagagtcgaatcgagtaaggtctgagttgccgaaagagatgagcagtgttgaagaactaaggagactgtgacaagtgagattgtataaataagaagataaattgaaaattgattttaattttcgtttggaagagaagtgggaaaattgaaatttatcagattttgggttaccgcgcttaccgaaataccgaacgtaataacccgcgcgttattcttctttgggaatttcggatcgatgacttgttatcatcattcaccgttgattatctttcattctgtgagagggacggtgtagattcagtgtctttctttcgattattcccgcgctaagcaacgtacaaaaggccaagaaacccaacttataagacgagcgagcccagacttcttctgtactgggaaacatctaatttcaacttaaaatgggctatgccatctaatttcttccaaacaaatcaagttgaagctcaagcccaatagctcgcttgaaatcaaatttgggcctttttactgcttttttttaaaaaaataataaaaaattatagtaaatgaccaaaaaaattatattatatacccactttatttaatatattttaatttttactttcatttttatattctttaaaatatacttacttttatagatgatgtatccatatttgagtgtcagggtcttcgtttgttcaggtgctgacttgaccttccttttatagagctgtactgccacgtggcactggttctgtccacgtaagcatgtcacgtagttttataaataataataatgatatgataaattattaaataaaccaatatccaactttaaaatttaaattgtaagttctctatcccataactttagggtttagttttgaccaataaaacttctgaattatgatacaactatttctacaaagtttatagttctttgaatatctaacactaactagaatcacctcaattggaattctacaattgtagatatgatcattttactaaaaaaatttctaaacttacgattttcttaaccttaattttataatatttttttatttaaaaccaccaataaaaatcaatagggccatcaaatagtttatagaaacctaatatactt

SEQ ID NO: 5861 - DNA, 529 bp, Cannabis sativa
aatctacacacacacacataaaaatacaagtctcaattcttttatattttctctcgctttacttttctatatttattattattaaaataataaaattatagattatataaaatattgggaccagtacacgtacacagctcccaagctcctaatactctctctctttaccttaattatatattttatttattattatatttacatatataaatataaatgtattattttctcttcttctaactctcaaaaaaccctagccgcctccaccatatcttcttccacttttcatttctttttcttttggttcatctcttctctctttagtttcactatatatcttttatacactcatttttttttgtatataacagctactagaagatgtcacacctcctcggtgcaaactctctctcaagtgacccgtggttgtggagcggacagttcgacaaaacactcggtggcggtggatgtacgacgaggcgatattatggcggtggatgtacatcgaggcgatattatggcggtggat

SEQ ID NO: 5862 - DNA, 1504 bp, Cannabis sativa
cattagttgcattgatagtgtgtaagaatttagtatcatatataggctaatattctcatcatcaatgattttgagataaaaccccatacatcataccgtgcacgttcactttatccaactttctcaaccacattctgacaatatataagcttgtgctgttgagagaaatagtaagtttgagtgaattccttgcctttaagacagcccattttgattaaattccctaacttacttttctttcctctaccgtttgtctttcattctaatatggttttacaatatatgtatgttatgttataatagttgatgcaaggctgctttcaagaaatgttaccagggccaaggattttgatggtatgtatagtagaatatatttttactcaatgtattgtgttatgtattccgttgatctgatttgtcaaacattaactcagtccctactttcttaattattagaatttgttaagaaggtgttagagagatgtggatcccagattttggaaaaagcagaagatgagttaggatggactcctcttcactatgctgcaaacttgggacattcaaccatggttaaactattcttgaaagctaaaagatcagttgcttatatcaaagataaacaaggcatgacagctcttcacatcgcggcaaggaaaggacatattgaattgatgaaggaattgatggaagaatgttcagatattggtgagattttggacaataaagaacgaactgcacttcatattgctgctgaacacaattgtcattctgtggtacgtactttagtgaatgagagaggtttcagttatcttataaatgagcaagacaatgaaggaaatacagctctacatgttgctgctattcatggtcattatgaaattatgaaacgtttggtgagtaataaaatgggcaacaagggaatgagcaataagatgggaatgactgcgtttgagattcttctcaaatcgacaacacctgcgggatctattgcaacggtatgtcctctacttaaatggactcgtctagctattgcataaattacaaaatatgaaaagaaaaataataataacgaggataaatattattttggactttgcattttgtaaaaaattttgattgaacattctgttttgttaaatgataaattggaccttattttgcctccgaattatgactcatgcattattgtgtccgagatcttttcaacccattatacataatctttgaattattctgtaaagttttatcatatcaaataaaatgatgatatggctatttagccagtttagatataagatataggttatattttgaggacaaaaatattaaataatggttgaataaataacataatattattttgataagttttagagttgtttaaaaaataagatacaagagagattaaatgaaatattatatttttaaatgacgctacaaatttttttagtcaaaaagtgacattagagattggaggtgctcttagcctttttttttttttttt

SEQ ID NO: 5863 - DNA, 579 bp, Cannabis sativa
ggggggaaatcaaaaaactcaaatattcgaagaactttcctcggaattttaattgttaaattcgtccgagcacactcagaagtctacaaacagcgagtaagttatattttcttctcttttatgcaattttcttaaaatacacgtgttatttttccaaattttttgccgtaaattctggcttcataaatctattcttgactgatcatagatttagaagacactagggcttttaacttttgactgatatacacactaatcttttaggtttctaatttctcaatatttttgctagaattatctaaaattttagttattggggtttcattatcagaatgaaattctttctttttcctttgaaatgacatggtcgacatataaaaaatgttttgcattccataccactgtccaactctcaccctttgtctcagttatcccaatttttgcccacttgacgtggcatgttcatgtcgccattatcaatgacacgtgagagtacactcgccaacaagaaagccaagttatctactcaacacttcaaccaacgagagttatgaatacttaggagggacgacaaaatga

SEQ ID NO: 5864 - DNA, 2845 bp, Cannabis sativa
gtaaaataattccaacacaatatccctaacgaaccacagtacgggccagaagaacatctggctagtaacactcaacaaatccaaggaaatcggctgtccaatccaaggtcacagagtcaaattgtgggccacacggtagatgagcaaatattacaagctcattatctcgggggaatagtcagtataacatctgtcctcagacggatataccaaaccagtcaactgctgataactaccgagcaaggagacctctaggtgaattagtctctagcacattgggccccatgcatgatttgagtaataatttgaattacagaaggggaaacgatagacaatacatctctcccaatgttcagacaatcaatgtggaaaattatgtgcttggtaatgctctaggggatccataagtgacacaagtcggtcaacaggtaagtcaagttgatcgagtggtgcaagcccaaatagattaagagccttttacaaagcctaactacccaaaactcatagactaagaatatgaccaaactaggggatcacctttttcaccaaaaattaattccctcaatctgacgccaaagttcaaaatgccaacatggaaaatgtacacgggcaaggaagattctctttcccacatcaagtactttgaaatggaaatggacttgcaggcagtgaagggtgatgtacggcgtagaacctttcttgctaccttggcggaggctgcccaacagtggtatttcaagttagctcttggaaagttgaattcatggaattctttcatggcatagttacacgcacatttctcctcttctacgcaactcccttctcacttagaagacctggtcgaagtaaaacaaataccaacataaccttcgagggactatattaacatatttatgactaaggccacaaaggtgaaagggctaacaaaagaagtgaggctagccaccatcataggaggaattgaacctttgggagaattatgaaaagacattaaaaggcttactataggataaatgggagagttcttagaccaagcatacagatttataaagctttaagaagcggttcggtgtgtagacacagtaggtcagaaaaagagccatccacacaccactgtcgtcaatacatccatccaacagaatcataattctcaaaataataacagtttgggtcaaagtggtaaaaggtcaaataatggaaaccagtctatggtgtcgtacaaaagaccttctcccatgaagaaagatatgagcaagagagataccaccaaatactgtcgtttccatgcagattacggtcatgatactaacgagtgcaataatctgaaatgagaaatcaaattcctcatcaagaaaaacaacttgcacttgcaaaagtgtgataccatgatacttaggcatgctacagtgattttctaattaatataataccgtgctaatcaaggatctttcttcaaaaattatgccaaattaaaattttgattggaattattaaacattataaacatatatatatttacataaccggaatcttaagtttaaacttttacaaacacagccaaaatatttttacaaacatgtcgtatagcgactacaaaatactatccaagatgtctcgagaccgaacactccaagtcgccctgtcctgacatgtacaatcaccaactaagctcagagctcactcctgttcagccttcaccttacctttacctacacatgaaagtagcaactgtgagtcaagaaactcagtaagaaaacatataacaaataatatattatcgacttgtatctaggcacccatacacctacccacaaggcttatcagataagtaagaatgttctttactaaggtacgaccactataccacatgcactacgtaccgctaccgtacgagtgttggtagggtttgtcctgtacctcgagtaccactgagtgttataccatatacactctgtacctacctgtactagtgtggtaaccccgtactatactctttacacatcgtacactataccaatgcattcagtaccgctaccgtactagtgttggtagtgtacgaatcacaataagcatccatatatatcacacatacacataatcgcatatataacatgttcgatgattttcttacctcgttttttgaagtcaaaagagtcggcagacctgaacggaaaaattcatgctggatggatgccccagtcacattacataaatgaataaacaacacaccaaaatcctaatccaggaaactcaaacttccaactaagggttctgctattggtaactaatataacaataccctaagtatcaaggaattaaccaaccaagactctaaaaataacacaaatcgacgaatcaaataattcgggaaacctgcccctgatccggttaaccgattttacaagacctgtcaaaccggttaaccaatttgcacaaggtttcccccaaactcaaatcttgctcaaaatgtgtccaaaccaagccaaactttccagaacacctatagcaacatccaataatagaatccagcaaaaacagtagccaaaaagcacaaaacctcagtatgccattgttgagccaagtttgagttcttagaactcaaacttgcttaacctaagaattaagtaccaaaaccctaatatctttctatcttcccaacacaactcttctcccacgccctttcttcttcacacacactctctcttcctttctccttcttctcaggcaagctgcagcctttctccgtcgttggccaatggagctctttcctcgtcaccggctgatggagctcttctctcgacatcaatagtcccaagctcaacattgtctctctctctctctctct

SEQ ID NO: 5865 - DNA, 1514 bp, Cannabis sativa
acgaaatttccaaaagataaatacgtaattgaaatcgtgatgcctaaaaagatgcttaaattaagcatacatgaaaattgattgatataaaatttaaaaagaaatattaatatattattatataaaaataaaaaaaaaaacatagaattaaaatttctcaaaataatatattgcgtattaaataaatttaactataaatattaattttaaaaatattaaactattagattttaatccgatgacaaataataaaaaaaatatttgaatttctatatttaatttataaatttcccttttatattttagggaatatattcatttagtaccctgtgttttaatgaaaaacatatttggtaccttatacttaattagtaccttatattttttattgtatatatttaccctaaagtaaaatttaattaatacaattttatcattttaaccaaacaattttcagttatgtgtaatcaaataattaaatttgaattcagaattcataaaattttagactgttaattgtattgataaaattttatcaaaaaaatttgaatttagtgtaccaagtaggtataattttaaaatacaggataccaaatacagggtaccaaacttgtatttagacaaaacaccggatattaaatgtgtacaccctatattttatttacataaaatacactcttttgatatatttttatgttgtactcttattttttttgttatttgtatattatttttttatgttatattttgatgttatttttttttgtatttttgtaaaatactgtaaaaatgtaaaaaaaatatatatatatatataaaaatgtaaaaagtttataaaaagtagtattttatgtaattagtgggtaaatctatttttagcatgacaaggttccctaaagaaaatcatgtatatagcccttctctctctcagaggaatttcgtttagggtttggggtgttggtgatcatagtgtatctgaaacttcactcacagtagaggtatgaattcgaaacgtctactccatctgtctttcgctgtagcattattcatttatatatttatttttttaaaaaaaaaaacattattcatctatgaatcagagatttcctttttgtttaaatttttgttgaatagtaatggtttggtttatcgttcgatcccaatgctatgatataaatgtaatattgcttcaggattatgcattggtttgtatactacatttcaaacacagcttttcctcttcttactctctctctctctctctctctctctgtctgattgattgggtttttgagatatataatattgtttcaggaatatgcttggggttgtattctcatcaattatatgatatttgtattctaaatttcagtgacagtgtttatatttaaattatattatatactccctgaccacccagctctgttttctgtacagatgttttctcgttctcacccctttagttactattatattgtcttgttcttcaaactcttgacatgtttaaaaaggtt

SEQ ID NO: 5866 - DNA, 618 bp, Cannabis sativa
ggggggggggggggagagcctgacgcccagggagcaggggactacgagcgcgtggggagctgctagtgggcagggagtgttggctttttgagctatctcgatccttttgttgtgggtactcatcacattgagggattgttggatgtttaagctttctcaaccttttttatgagttgtcattattttatttgagggagcttttttccacttggctttctcaatctcttctttggcgtaaccttttcgaggagggagtatagactcttagagcagtctcaacatcttttcggttacttatttgatgtgagggagcttttggctccttaggcaacactcaatcttttttaggatttaagattttattgggggagctttgacccgttaggcagcactcaactccttgcatggtataatatttaagtaggggagcttgtggcctcttaggcgctgctaatcccttctgctgcattcgtgatacttaaagggcatttttgaatattataggatttatacttcttttagagagacatctctctcatagtcgtacttttttccttttcccacatatatatattttggcttgttgtggtcatttaacatcgctagtcacttatgttt

SEQ ID NO: 5867 - DNA, 1263 bp, Cannabis sativa
gcactttgggtcaggtaggaggaaccactgacaacattgaggaaacttgtgcaacctttgcaactcgtgccttgggattaacaagcccattaaggactacacactagattgacaattgtacagaaggatggtaattcttatttaagttgttgtgatgtgatctgtttcttcttggatgctgttttaagatatttgatttaatttaagcccattagggacttacaccagattgataattttacggaataatggtataattcatattgaagttgctgtcatgtgatgtatttttcttggatggtgtatcaagataattgaaggtgtggaaataatgcctattttaattctcttgcagtgttgtgttagctaggaccaaagagtattgctcagtttttcatggaaaaatcagagtaagtgaatatggttttatttcttgcagtttttcccttgtagagagggcatacaacattaactcagtcagaagtgaccaatattgcaatgaatgcaatgcagaaataaaaagctcataattacatgttacaggtgtatatgggtacatagtcatttaagtaacttggaccatttgatctcaaggccaattgcttcataaggaatttgttttatgtgaatatcaggagaaaacggtcaagaagctttatctttctcttgctgctgctcctttaccaattggaataattactcactacatgcgtccaattaacatggcttcaagacttgtctcagaaggtaatcatatcttattgataatggatgattagaaactttcttttaattaggccttatttactgaacagcaaggatggatgttgtgtctccaatccttatcccttcgtgtgtttatttatctctttgggacactaagattgagaatgtggtcacataattagttaatgggttatcaataattgttgtcttcactcttcatcgataatagtgtatgatgagattgaaagctttgtctttattgtttgattatatgttatctatccaattcttgaatccctgaccataaactctaaaatataaggtcaagaaatatacaagagaaagaaagaagaaagggttgagagttttgagtggaagagtgttcagtccaatccaaacaccatggaagaagagaaagaggagaaagtgaggatctacgttgggggtttaggggagtcagtgacggcggacgaactcagtcggctcttttagttgactggcggagtggttgagtctgtcgacttcgtccgcaccaaa

SEQ ID NO: 5868 - DNA, 635 bp, Cannabis sativa
gatgctttggtcattctatcgaacaaatctaccgcatttggcaccgagtacttattctttaccgtgactttattcaaagctcgataatccacgcacatctgcattgacccatctaacttattttgaaataatgccaggacaccatatggagctttagagggcaccatgtatctagattccaccatctcgttcaattgcttccagagttctccctctccctctccctcgccctcccagaccaagtctagttgcctctccctctccctctccctctctctctccctcatatgagtatcggacaagtctacatgtgccttgatttcttcttcaacaaatttctacaataatctcaaattgaatcctacaaatttgaatccaaccaatctatccgagaataaaggagattcaacaaatcataactacgccctagaatatagagatatttatcctttaattagtccttttacggagccaagtgtaacaaccttccccttataaaaagtgaatgaattcacaaggggaaaggaccaagacctgaaatcatactcatgtatcttagagcattttgctgaaagacattctttgaaaacactttgagagctacagttagaattcaatctgtcttccttagtgat

SEQ ID NO: 5869 - DNA, 868 bp, Cannabis sativa
catataataattggatactgttttcgttcctgcctttatgggctgatatttattgtcgcaaaataaagatgatagaatgggaattaaaaggctagtagccttgatagtctttcttatgactaaaattatacatccatactacaatatgtgttcatttttttttcttccccatattctagggtgttgaatttattttcaattgtcatttgttattatgttaagtgctatagctgcattcataaatttgattgtgttttgcagatcttgaaggcaagacagatcttaagattcgagctctagaggtgatagaagaactcagaacccaacgagcagacaaacaggtactactttattgcttttattatttttttaatattgttttttatcttgttggcagtccaaagtggtttatatgttcttgctctcatactcaatttcttccagtccatgcttcttttggatgccttcaacaaagatagggcatctttacctcaacccttgccaaatcctccacctttagcacctttgcctgtagctgcgcttgatcctcgtacacaggaaatgattaatgaaaaactaaagaaggcagaagatcttggtaagccgttgagttactttgtttaaaaatattatcacttttctatttttcttttaaatggttatgaaagttatattagtttatttttatgaatatatatttatatatatatatatatatacatgtataaaaagttatgctataagttatgccattcttttattgaccttttgtaatgatagcgttctaaaactcgcatgtgatgtttatgttcaaagttaggcttatgagataatagtacgcaaataagcagcgtaatgcagttgattt

SEQ ID NO: 5870 - DNA, 775 bp, Cannabis sativa
aaaaagtacgaaaaaagtagagtaccaatttgagctcatataagaaaacgatccagttcgagtaaagcacgatctgacctgtagttattttacgggacgacatgacataacctatatttttttatagcacgacacaacacgatctatatttatagcacgacacatatttacattactatgcctttatgcacatgtaaaaataattgggctttcattaatctcatttttaaagttttaaaatttattttttaaatttaataaattcatagagtagaattttttcttttaaaatagttaggggtaaaatatttatttattttaagaaaatttacagcataaataccatatgttttaaatatataaaaacttaaatactatttttttaacggattaaatacagaaagttatatctagcccattctgttactacctgtatattagatgttaaaactattatttgtgtaatgctagaattaaatcccatgtctttttttcatatgaaattccatttaattaaattattttaaaaatccacaataatgatttagaaattctattgataataataaaaacgtattcctaatgtatataaattaattaaaaataaaaataaataagaactcaaattgttaacccaatcgacccccatttccaattgtacaacttcttcccttatgaattgcaaacccagaaaaccctccaaaaattacatgaagtcgcatccctctttacccgaactaactcgtacctgtgattctctcttcgacgcctctag

SEQ ID NO: 5871 - DNA, 781 bp, Cannabis sativa
acaagatatgaactctcaattggtgttgtctgagaaggaaagagttgtacattccttctctgatgcagatctcgcttctgaaaatcctgccccaaaattttttcttgttgcttgctgtctatcgaaggaaatcaatcccaaaaatttcattaagaaaatgggtgaattctggagtaacaaatgccgcttccctgttgaggtatcttaaatgcattctgatctttttttactaacaattggttgtgcaggggataaactcagaattcagaatggagaaccgtggcatttcctcaatcagcttatcttgctgcactcccctagtcagttgtagaatgtctcaaggaatgatttttctaaggttcaattctgggttcagattcatcgacttccttttcttagcaagtctcgggtattagctacaaaagttggtgagtggattggagaatacattgatgtctatgaggagtcccttcacgaaggttgggggtattttatccgaattagagttcggattgatatttcttttcctctcatgagaggcaaacttgttaatcttccgaaagtgcgtgatgaacattggttggaatttcggtatgagaaccttcccactttttgcttccattgtggtagaattggccatcctttcgataagtgcagtgggtttttggaaattgtggatgctggggttgaaccggatctccctttcgatccttttatgatgggagataaactcccgaactcggggtatgatcgctataggtatgatttctccaaggcaaat

SEQ ID NO: 5872 - DNA, 912 bp, Cannabis sativa
tatcccattgcaagggattacaatagcagctatggtatctccattgctattttcgaggactcctgcaaaccccgacttgtttgaactgacattaatggcaacatctgtattcagtttggggaggccaggggaaggggggatccaattttccacctcgagactgcttcctgggtgaggagagtccatccttgaatccaatgactttgcttctttaaattcttgaatcaaggagtggaaagaatctaatagattttggcggatgttggaaagccttttactgtgattgagttcctatcatgccaaattagccaagacaaacaaacaaacgactccacttcttccttaataaatagatttgatatatgaaaaacaataatgtcaaaagaatttatatgagtagaatctttaagaattgagtaaaattgcgtactccaatacatcctgacatcattgcaaaagaataaggcgtgacaagtgtgttcccagttaaatttggatttcgtcttctgtgaacacttccataagtgaggctttattaagagctcgctctggagatatcctcagaaagaagaagggtttgaggaagagaaaagattgttgaagtaattctctattttcttaaggatgtcttcttcagaggagagaatgtttccctcagcatccgtgagctccttgatctggtaaaagattttctttgagaaggaaacttatgaattttttttgtgttttgatctccctattttaaccagtttaccctcgatcgttgtttctaataaagctattcctgatggagcaatttgtctagatgatgctgaagtgttttggcttgatctttggtacggtcatcccattgagggttggaacgtatccgctcaagctcttttgaaatcccttcaatcgttcttttaaatt

SEQ ID NO: 5873 - DNA, 1494 bp, Cannabis sativa
aagctagtcttcctctgaaaaagagttttgaatggctagttattccatcttgaaagagaatcccaaataatcgactccagattctcccaaataatcgactccagctgtcactttcctatctgcaaagccttcctagaagcgttcgtctcatccaagtgcactataaaatctatgaaatccaaaactaaaagcacatgctcgaataagaaccagctgtcactttttctatccgcaaagacccttcaacatgtgcttcaattcataatcccgaaaatgttcgtttcatccaagtgctcaataaaagattgaaatctataaaatccaaaactaaaagcacatgctcgaataagagccctatgaaatccaagttgataagataaaactatttctatcatttccaattgttctaaatagaaaatcccaatgccaaacataaaagatatcttaaaggccatcaatataattaaaatattataaaatttgttggtaaaaatgtacactatacaaacagaatattatcaacgtcattggcaaaccaaaattcatttcccttttcaactcaatgatactagacttgttttttcaagagaaatcatctattggatattgaacattaacccccaaaaaactattctacaacaaataagattggtcatatgaacaaaaaaaattcatgttaatcatcatcagtagatactttttgcttcttccatttgtaagcagcttccaaaatcttgagattcgtggtctgagtttcctctgggaatatgtaatctatgtactcctcgtacctgaaatacatacgaaagggtaaaaaacaagttagcaaaacccattgttctgaaaacacccgaaaaaaattatgcatgctcttgtctgactgcagactcaaaataggaaggaatgacttgaaatgtgaattggtaacatacccagctggtccatcttcggtcatcatttgcttcctctttttgagtttcttcggtagcttagcctggacactgctaacatcaccaagatcaccgaaactagcctccatgtttagccacttctctagtaacatagccctttcttccttcaattcaggtgctgaagttctaaagtagttaatagctttctcgaaaacccctgtcacacaaataaataaaaagcaaatataacagtaagatttggttccttggtttgaaatgctaaaatattttaataactatgaagcatagacttttgggagtgcttacttcttgctcgttcaaggcatagtttcttttgttcacgaagaaaatcttccatatcctcctcctccaaatctgtattgctatcttcaatcgcagatgcctcaaattctgcaaaactgatccatacctttaggtgctttgtccggtctaatagtctctcataaagttctctggttctatcaaattcattctctgaaatctcgaagtctatgtaagcctgtaatcaaactcatgctcagtatcaataattcaagaagat

SEQ ID NO: 5874 - DNA, 1810 bp, Cannabis sativa
aatagactaatagtagttgcttccaatgatactattgatcagttttccaatagcagtaaatgaagatccaccttcctcaacagattttctggccatttcactcatctctttgaccttcttccttacctcactatcaccctccataagatgttttactgcagtttcaatctcttccgccgagacaatatgatcatctccacgatccttgtaatccaatcttaaatcaacagctaagccgaactccctcaccatcctaaacgcgttcagttgttgctctgcataaataggccatgttgcaactggtaccccataccacaagctctccagtatggaattccagccacagtgagacagaaagccgcccacagcactgtgagccaagattttcacctgaggcgcccactcgttgcatatcatccccttacttccaatctgttctaagaatccttctggcaagatttcgtctatggttgttggttgttgaactcgtacagaccacaagaatctatgtccactgcgttggagtccagatgctatctctctcaattgggaagcaccaaattttcccaaactcccaaaacagagaaacactacagaagagtgaggttgctcatcaagccatttcaagattttatcattctgaacttgatccatacttgggtgaggctgaccgttgaggtcgagtactggtccaaccatgtagattggaggtgtttctgccccatcattcatcgagctaaaactataagactccaattcctcaatcgaatttactataatcccttttgtctccctaaacctttgagcaagcttaacgtaagcagaataaccaccatctttgcaaaatgcagccgtgggaagaacgcttgaaggaacaggtgaaaaccctgcaatcttaacggagcatctgattcttccaactcagagctgatctggttatggcgagttgcaaggtagaacatgagactaagtaatcccaagttggaagtcatgaacatataagaagggaggccgagctcttggccacatccatcataggcatagagaagaaatcaagaaccaatacaacatcaccttgagagtaattggagttagatgacacaatatctgtgagtgcttttctgacatgaggaacaagactctccatgtatagatagataaagttttctatggacttgagtagctccatgggaggtgagtcaaccagagggagatgaaggagtttgattcggtgtacaagagaaagtgaggccacaatagaatcaatgtatgcatcgagatgggacttaaagggaaacttcatgtagaggactgtgatgaaaagtcgatgatcatagtggatcaagcgcttggcgaattcaagagttgaaaccaggtgtcctattcctggagctgggatgaacaccaattctacccttgccattgctgtttcttgaatcttgatgatgagttgtgttcttcttctccctctgccgttcctaatatgaacttaaaattgacctaatattttattattcttatatgcattgaacacactaaaaatagttggtgagcagagcacctcttattatccactcagatgtccgtttttttcaacacatgataaatataatattaaaaactaaaacttcccactgttcccattttggtcagatatccaataattgggcggggtgaatgtttgttgaatgtgctgagattcaaaatatctttaaatttaaaaatgggattttagaccacaaattaaaatttttaacttttttactttttactgtggagtaagttatttttttcaaaaacattacatatt

SEQ ID NO: 5875 - DNA, 1578 bp, Cannabis sativa
ttttctgtgtacaaattcatgtacgtctaaatttattaaaaagttaaaaatcacattgtctaagcattctttttctatgaagtttcaagctttcaactgggaaagttggagaaggcagtggtacttggatttggctcctaaagctgctgatttatcacagtctgggataacagcagtttggttacctcctccaacacaatcagtggctcctcaaggtctcacatatgcttcttttttcttccatcacttcctttttttttttttttgagggaaatgtaattgtgatgatctctattgactttatgaatgcgtaacggccatcttataattatttcccccaaaatgccatgaggttcaaatgtctttttagatctgttcttgttgagataggcttttggtctgataacattgaaattttctttccttttatgcaaatatttaaaagtaattttgtatataaatatttttatttcagactttagatattcattatctaatgacatgcaggttatatgccttcggatctttacaatttaaactcagcatatggttctgaggaggaacttaaacactgtattgaagaaatgcattctcatgaccttttggtatgtttgtggttttttctttttatatgaggttgagctttggataaaaaactgcttaatacatgtttggtttctaaacctggtgctattgtctgtatttctatgaatataggccttgggagatgttgttctgaatcatcggtgtgcacataagcaggttagatattgctataaaaattgttctttttactcttttttctcaaattaacctgatttcgagtatatttatcacttctaactctaagaagctaatggtgatttgtcatatggtaaataaactattatcaggaatttctttctatcatatccattgtcatgattcagtgataaaatagtgaatcatcaataattttaggttcaatttaagcattatttttgaggtccctattatagaatacatatactgctgttttcagagtccaaatggtgtttggaacatttttgggggcaagctttcttggggtcctgaggcaattgtttgtgatgatccaaattttcagggtcgtggaaatccttcaagcggtatctttttactcaattgtttattaatggtgtaatttcaagagcttgacacagaatttcttgctatagtatattgttaggccacaatatatgctcacacaacaagtcagttagagagttaatacagttaaattcctatagggctggttgtattgctagttagttagaaatcttttattcttttctgtgtctatataaaggctagtcctatcctacaagaggtatcagttagaattaatatgttaaaagaaagtgaaatactttctagggagatgccaaactatcttgaaaagtttggaacattctatgatatcaataaaatacttttgattagtgtatcatatatgcacatatggatgcatacatatgtatgtgtatatgtctaaatcacattatcagttttgaaaattaagttggcaatgaacatgccaaaatatgtcaaaaaagttat

SEQ ID NO: 5876 - DNA, 792 bp, Cannabis sativa
tttttttttttttttttggctagggctatattgactaaggaagtgtgtgtatatatttgaatagggaaatgatttgtggtatggaccagacagagtgaagtacttgggacccttttcagctcaaactccatcttacttgacaggagaattccctggtgattatggttgggacactgctggtttgtctgccgatcctgaggcctttgccaagaacagggctcttgaggtacttgtttatttaatatctacaaatcttctttctcttaacaatgtatttttcaaccactcaatctaaattgtccattaaaaaatacaacaaaataaaactatttaggtgatccacggtagatgggcaatgcttggagctttggggtgcataaccccagaagtattggagaaatgggtgaaagtggactttaaagagccagtttggttcaaggctggagcccaaatcttctcagaaggtggattagattacttgggcaaccccaacttggtccatgcccaaagtatcctagcagtgctgggattccaagtgatcctaatgggcctcgttgaagggttccgtattaatgggcttgatggagttggagagggcaatgacttgtacccaggtggacaatactttgacccattgggcctagctgatgacccagttacctttgctgagctcaaggttaaggagatcaagaatggtagacttgctatgttctccatgtttgggttctttgttcaagctattgttactggaaagggaccacttgagaacttacttgaccaccttgacaaccc

SEQ ID NO: 5877 - DNA, 1583 bp, Cannabis sativa
caaggctggttcttacatcaattagatgttaataatactttcctacatggggacttgcatgaagatgtgtttatgactctacctccagggtatagtcttaagggggagctaccacctattgttgtttgcaaattaaagaaatctctatatggtcttaagcaagcatctaggaaatggtttgcaaaatgttctacagccttgattgaagaaggatttcaacactcagcttcagatcactcattattcattcaacagaatggatccaccatcatcatactacttgtttatgtggatgatgtgatcttggatggtaacaacatagcagccctagaagaattaaaagttaatttgaataacagattcaaattaaaggatcttggtgagttgaagttgagttgaagtattttcttggtatcgaaatagctagaaccagcaaaggcatttttatatcccaaaggcattaggctctacaatttctagaagatttaggccaattggggtgtaaacccactaacacaccaatggaaattaatctgaaactcaaccaagatgcacaggaaaagcttgctgatcctaagttgtacagaaaaataattgggaagcttcaatacttaaccataactagacctgacttagcttacacattaaataaagtaagttagttcttagttacacctaaggcttcccacatgaatgctgctcaaagagctttacagtatattaagagttctcctggacaaggattattctatcctgctgatgcagaaatacaacttgaggcttacatagatgcagactggattgcttgtgttgatacaaggagatcaactacagggttctgtgtgtttcttggaagcacactcatatcctggaaaagtaagaaacagcacacggtttcaaggtcttcaacagaggcagaatatagagctatgtcgaatacaacttgtgagttggtttggcttctttctttgctgaaaaaattgaagattgaacatagaggtcctgtcattttgcactatgataacaaggttgtccaacaaattgttgcaaacccgatttttcacgaaagaaccaagcatatcgagagtgactgtcacctggttagagaaaaagtgcagcaagggacaataagaacagttcatacttcgagtaaggatcaaattgcagacatttgtacaaaaaagctcttcttcctaatcaatttcagactttaaaagagaaaatgggaatttgtaatgtttacactccaccataagggggagtattaaagtcagttagtaaggtggagtgtcagttaggaagtttttatgtctgttagtaatcagttagaggttgttacttgttagctagtcttttccttgctcaaagtgtatataagagaatactcagtattttcaagctataatgaataaaaacttagcatttttttctccttcttgttcgtatttcgattctctctctttctcaaaataatataaattaaacaaaatgtgagtacaccagcaagatcctcccctttaaaaataattaaatttcactaatacaatgatttaaaattactttctaaggaaaaaggaaaaaaa

SEQ ID NO: 5878 - DNA, 602 bp, Cannabis sativa
ccctatatattttttaaaattagaagtatcatttgttatcttaaaaatatgtattatgatggcaattttgtggcaaacattaaatgatggaattaacaaaaaaaaaattgtatttttttaaaagaaaaagaaaacaaatggaaaagataacaatttttaaatttagtaaattaagcttgtgagtcatgatgtattttttccatttaaaagaatttgtagacttttattttttcctacgaaaagaaacagttacaaaattaatttaattactttttatgaaattttttgtattttattttgtagtaccttgtccacaaaaatgaatatagaatgacaactataataaagattgcacttatttatttttgaaagttgaaaatgagagaaatgctagtgatagaatttttttatatataaattgtttagatgaaaggattaattttaataaattttgcaaataaaaatttataccttaaattataataattaaaaaaaaaaaaagtaatctatgatctaaaagactaagtttttccataatgaaatatttattagtctaacaattttgcctgttaattaagtaaaataaataattaaatgataag

SEQ ID NO: 5879 - DNA, 891 bp, Cannabis sativa
tgagctgtgggggaagtagggagagaaatagatgtggccaggggagaaacagcaggagctgtgttgacagtagcaggtgggatttctttaggtggttcaggtgtggggatatttggaggaacaataggagtggtgggaacagtaggtagaacctggtgagagatgacagttgggagagtggcattaggaaacatgttggtagtggtggatgtaggtgcttgtttggatgcagcaatggaaaatggaaagactttttcatcaaatagaatatatctagagatgtatagtctaccatctttggagacacatttgtaccccttatgagacaagctgtagccaaggaaaacacagggaatggatctgtattgtagtttgactctattgtaaggtcttaggtttagataacacagactttcaaagactctaagagatgtgtaatctcgcttagtttggtatagaacttttagaggagacttgtagtctaattttggtgttggcatcctatttattagaaaaacaccagctctataggcttcatcccaaaaattgagagggagagaggcttgagcaagaagagttaggccactctcaattatatgtctgtgtttgcgttcagcaacaccattttgttcataagtgtgtgggcgtgatactttgtgagttatgccacattgttgtaggaagttggtaaaagccttatactcacccccagtcagattgtatggttttgattttgtatctcaattgcaattcaacctggtttttgaaaggtaaggcttcacacttggttctcaacatatagatccaagtgtgtctagaataagcatctataaaactaatgtaatacttgtagccactagaggagttgattggggcagggccccacaagtc

SEQ ID NO: 5880 - DNA, 1148 bp, Cannabis sativa
ttaaaaaaaaaattgttttttttattactaatgggtattacccatttagaaatcatccatatatatatataaatgagaagtatgagacggtgacgtggtggtctgaaatcacttcaaatagcactatctcttctctccttaattctctcatttttttaattttttattaaatttataaatattaattgattaattaattaaataaaatattcctataaaattctaaaaaaaaaaacaaatatatttatcaattctaaaaattaaataataaatctaccgatatttatttttttttttttttgaaggaaaatcttattaaacaaagaaacaagactacatcaactgaggcaagtcagccttacaaaaattggctaaccaactaggaaaaaaatgagagaaaaattgagaagtttgagttgctaaacatctcttagccaacatattggcacattcattattctctctatgtacatgaacaatgttataatcctgaaagtctttcaatctagtcttgatcttgtgaaggagagtgctaattgcactagaatgagaaacctgtttgtgcagatcatccaccactttcttacagtcggtttggatttcgaattggccattaaccgtggctggaatgggcgttatagcttctaggatagcccaagcttcagccatttcagttgagcagctgcaggggagataaaccataccagcaatcatgatttccccttgccaattgcgccaaatgaagccgagaccaacgccatttgattcctggttcagtgcagcatcacagcttacacagtagctggcttgggagggtcttttccacagtttcagcttgggggggatgtcatatcaacctgaattgtagctttcctttgagtagtgtctctcgggtaagcagagaaaacccaatccaaaagctgaacaccattcatatttgggagtttattccatttcctattccgattttcccaaatagcccacataactttgattgcatcttcaaactcggtttgccccaaccgattatgtaagacagtaaggatatcaaacatagatccttcttccactaaatcacacttcgcataccaaggaataagtttccaaaccgctttagtttccgtacacttccacaaagcatgagttaa

SEQ ID NO: 5881 - DNA, 1255 bp, Cannabis sativa
aaaaaaaaaaaaagaaatattataataaaaaaaaaaattagattccctccaaaaaaatcaaaattcaaaaactcaaaaaccagtgtccaaaaatgagctacaatggagtgctctgattccaaagaagaacccaaaaatggcagatcatcgaattgggacgacgacgacgatgaccaacctttcaccttagaagacctcgaagccatcgatgcagttttccaatccgcctcatcaaaaaggcctcgactttccaccaaccaccatcgccgattgcccaactccattctcgctctccagcttcctaactcctctctctcgccctgtcaaggtttttgcatttcacccttttccgttttcttctatattttactgtttggatgccaagaaagtcaagaatttatgggttaatttgttgaaaccctaaaaatcagttttttatttattttttcattgaagtagcaaaggcgaagatgagatttagataccctgtgatgaagtttttgggtgcaattaaatatagtaggacgaatgttgatgtggagagagcttcaatggagattttgaaaattgttgaagcaaagaaaatggaagttggtaaagttgcaattgggtttgatattgagtggagagcctcatttgtaaaaggttagtttggtttttgtcttttcactttattggcttttgtttttcactattgtaatcttttggagatgggaaacttgtttataactacacttaatcacttaggtagaacttactttgaaaagaggctaagagaggagaggagagtgcccaagtaatgaccaaccttttcaacacttaattgaagtagaatcctaataatgcacccccctttagagccgatgtccataacggcctactcactctcggtttttccatatgttgctccttttgcgatgttgattccacttgagggtgtgtggctctgatgatgatattaaccgagtaataaccaaccaatcccactcttaattgaagtgaaatcctaacccgatgtccacagtggcccactcactctcgggttttccatttgttgctccttttgcgatgtcaattccactcgagagtggatgactctgatgctgatattaaccgagttataaccaaccaatcccatacttaattgaagtgaaatcctaacaatacacccccttagagccagcgtccttaatggcccactcactctgagattttttgcatgtcgccccttccataggttgatcctttggagaag

SEQ ID NO: 5882 - DNA, 1280 bp, Cannabis sativa
atgaaaacttcgaatataaggtaagatacaaagtaggcatagtaatacactccattaaagctttcaagaataagagtagcttagtaccttggattatagtagaggttgaaagcactcctcgtagacatagcactaactacatctttcatagagctataattcagttgttgactaagcatagttggaaaactaccgcaacctttgacctgagcagcccttcgaattcctaatctcagttctccgtcatcacccctattacatattgtacatgagaaccaacaaaggagagaataaaagttgcttccaagtgacaaaggttcagtacctaagaaagagcacagcatcaccggaaacaagcttcttcttgttaacaaaagcactccatcccgttgtgagcaagtgccttcgcggttgccctgcttcaagaaaaacacagatttgttataagttccacttagaatgaaagatctactaaaactgctattcccttgtagtataataaaaataaggtccatttggatataaatatgttcggtacaatctaaatataagacaagcacctctatagatatggcgaaacctccattccaggccatggagatcctttgcaactagctcttgtgaaggcctttgttgattataatcctacaacagaaattgacttaaaaatagaatgcaaaccaattcaaacacgaaaacgctatagatttgtgtatggtatccattgaaaaacaacccttaccagtggaggaaagcaatcctcagcagctcgacgaggaacagagaatcctccatgtgtactggtatctgaagccgtaagggtcttacagaacatgtggggcgttgtggacttaacgactgcttcaatatcttcctcatcgccatcagcatcaaattccccatctcgcagtttctgctcaaattgataataataaaaacaaaaaaaccaaattcagctcaatagtcatgaataatcacattgaaaaagccccgtgaacaagtgaaaagaaaccaattcgaaaagtcttatacatatgttatgaacaagtaagaaacaacaattttctcgttatcagctctgcctacacttaagaataaaactcacctcgctttcaggaaaaagagacacctgtgcgtagacctcatcagtgccttcctcggcctgacccaaaaaaaaaaaacgcaaaatcatcaaaacaggaaagaaaatcccaaacttcataacccgttttccatataaaaaattcccgggtaccaagaatgtaaaaccatgaaagaga

SEQ ID NO: 5883 - DNA, 760 bp, Cannabis sativa
aaacttaagttgaatgaattgtctacctccggttattgtttatgcaaatctccactaatatgatttttagatttgcaaaataaaaggagaaataaaaaagtgattatttcataaatacacaaaaaaaaattataaaattatagttgtacaaaattttaaatatttttgtacggtttttaaaattttatttacagaatatatagtcttttgatattttcatattatttttatgttgtacttttgttatttcgttgtttctttatattaattttatgtgttttttttttcgtgttatttttataaaaatactttaaaaataaactataaaaaaattactaaaaatagtattttgtgtaaattttttaagaaaaaattgtttactcattttattttcacattttagaaaggtaagatatccgcttctcaacatggcatataaaaagagcgcctcctacatgatagataaatatctttcaagcttttattaactcttttgatggtgatttgatagaatgaaagagtagcaaacttagggagaaatcacttatatatcataattaattattaaaatattttaacgattaaaattaaatacaatttagacaactaaattaaataaaattaataactaaataatagtttattttttaaaaaataacaatattgatgataattaaaatatcatactaaatattgactttaacaaaataaaataaaataaaataattaataattctaatattataataatattctacat

SEQ ID NO: 5884 - DNA, 2360 bp, Cannabis sativa
  modified_base (1797)..(1799): a, c, t, g, unknown or other
tagttcaagtatatattggttttagcttacctcaacattaataattacaacttaattaattagcaacaaagagggagaatttctttagcctcattaacaaataaaattaagagtctctgttgataagaaataatataatgcataaagaataacctttctttttttgccctgaaattaattaattaatccgcaatgctcaaccatcagaaagaagcaacttattattacatatcttatccacatattgagaaatcatacatcgtatcttattcatacaaatttaccatattacccccgtacatacataggctgaaaactaggagtccaagaaaatggtaagggcatttagagaataaaagtgatatgattgcgggacagtaccctaaaataacggtcaatgtaatgcacggaagggtacttgatttaacgactactctttttctcaccaaacacttgcaaaaataatgtaaatatataaatttcaaatcaaaatgataaccttcaagaatagtaataaataatatacaaactagctaatacatatattatacgtatatatacttaaaaaattatgagaggtaggcagacgagaaaaacgcgggcgcatgatagatgtcacttgtgggacccttgctaacaagcgcgcgtgggtgcttagtgcaccttctcctttctctattgcttatcatgtcgacttcacccaatctctctctctctctctacctatatgtttatagggctctctaaatttttggacttatttatttttttttcaaggttctccacccattgatggggttgtggcaaaattttgggtgttgtcatttggtacccatatgtgcaccccactaaggcaacctatttaaaaattcagtaattaatgtatatattgttatgaaaactcttggctcaaaattgatatgatgatgatttctaacacgggcgtcaacctattatccaatcacctaaatactagtactccacatatacctttcaaatttatcttccttaaaaaaaaatacacacacaagttgaacaactaattaataattattgtttcttaaaatatatgtatcacaagacatattgaattcaatttaactattgctatatattaataagatatatatgaaattatatagttaattgttttttaatgatatttaaactagatcttaatatatagtgtcattgctcaattcatagtgaatcaagtaattaatgagttcaattacaaagaagttcaatggagacacaataagttctacttctaacttgtccatatgaaaattatcatatatttattaaatatataatactaatccactttttttttttttctaattatcttttgcagatgtttattttggagtgggacccaagatggtttatattttttcatattaaaattttattgtttaaatttttaattttttttttatttatgttgtaattttaatgttgcgaactataatttaatttaacgtatctttaaaataaataatgatttttttaaatgaaaaaactcttccacctattgtacaacgttattatgatcattgttattttaacattagttactcatttaagagaattactacaaggttttattggtacctagtaccttcctcgatgtcatactgttattagtgtaattaaatattgaatcttatataatttaagaaaattgcttttggggaatatatcactaactaatcgtagtgtgacacttataaaatgtgctaagcaccactgacgtccaataataatgctccttaaataataataataataatnnnaataataataataataatgagtttgtaacatttggccaaaattgatcccaaaaacatatttatttcaatggaacactctagtccacacattttcatcactcatgaaaatatctcaatagatttattaattggttaatgaaaggatagtaaagtcaccatatgctaataaaatacactcttaatcacttttgtcatctctaattaaatattgatccacttttgattaggtaactacttaatcatatataatatataaatgcctttaattaactaatgtttaatcatttcataaaaggttgtcatctttggtgcaatgcatatataattgttgagtagtgtggtgcttgtgcatttgcttacgtacttgtaataaggttttaattaataatttgtcccactaattaatacaactatatatgcggataacaatgctcgtttatatatataaaatatataaatatatataatgtatctataaatttactttaaccaaacgtcatttgattttctgctcattttttattaagcgtgttcttaatcatcgtcatcgtttttcttgtt

SEQ ID NO: 5885 - DNA, 1931 bp, Cannabis sativa
ctgattttccatttgtttaatttttggtattttggattgtagtgtaatataggttgctgttatatttttcttgtatgagtatgggtaagagtatcataaattcataatatggttaacgagcgattatgggcttgtagcatttggttgggcaaaatcttatctgtatgttctggttaatttgagactttggaaccctagttcttatatctccaacatgattaagggcttattgtagcctttggttgggaaaaatgcaatgtgtatgtgttgattgattgggttgctttgcttttatgaaatttgttgtgtactaggtcttgcccccgaaattcctgaggatctgtatcatcttattaagaaggcagtctctattaggaagcatctcgagaggaacaggaaggacaaggattctaagttccgattgattttggttgagagcaggatacacagacttgcacgttactacaaaaagaccaagaagcttcccccagtgtggaaatagtaagtgcttctgtttctccatgtctaccagtttgtaacttgttttttactttctgagttgcttttctttatgtctattaattaggttattggaaatttgaactgtctctttacttgacatgtatgtattactgcttgctgttgctattaaccttcagatcaaagggttattgttttcggttttagatttatccttttattatacttgaagtattgcaactgttagataactaatattaggactgttagataactaatattaggagagtggaaaaggggttaagaagggtataatcttattgttaatgtaatgtgacatagtgttttctgatttgctaaatggaggtgaggaaagcctttttagctgatgtagaatctcccacttctttcttactgtttttagaagctgttctgtgaattttgctgcaattgttattctatatgctgaaccattttattgatttgcagcgagtcaacaaccgccagcacccttgttgcttaggttcgctacattaatagttgctgctgttttggtttagaatgaactataagaagatgaattaatttttgtttctgaatgtggagctttgtagttcttgactgtatttgtcttggagttgtgtatttggtttttggcactacttattcttagttgctacagctcttcttttttcggttctcaatgctcattatccttaatatcatcagttctcgggttatttaaaaataaaccaaaaaatatgatgcaactaaagttttgaagtgattggtttaggatttgaaaactgttttatgtttttaaaattaaaatggcagagttcacgtaacaattcttgattgctcgagttttttcaaaaacataatttgaatattatttagagttgtaggcataaaattgaaaatcctatttttatgttttcaaaccatggaatccaatgtttaaaaagaaagccatggaatccaaaaactcttcaaatattatttatccttttattttgagatttcaaatcagtctaatgttgaattttttaaaactcaaaaacattaaattatacaataacatataacgtttttggaaacaatttttcacatatatagtttttttcagaacacatttttctaaaaaccaatttttgaatgagatttcaaaattaacagtttaagattttgatgttccaaaaaaatatttatcctcatgtcaaaaaaccgcaaactaagagttacaatttttataagtacgaagtgaagttgattaatttaagaaactgaggcaagatagtatattatttttttttagaggcaagatagtatattatttatttttttttttatagaataattagcaatttttgtttcttgaatttttaacaatattgattttggcttttaaaatatgcggcttgttaatttttttttttttctaaattttt

SEQ ID NO: 5886 - DNA, 1626 bp, Cannabis sativa
taataaactcatgaaacattaattattagatccagttattactagattgattaattaattaatggagtgctttcttttttaataatagtttaagttaacattatgaggttgttccacaattattatattttttgtttttagctaaatatataaaacaaaaattattttttacaaaataaaagattgatctattatagtctcactattttgttttttaaaattaaaaaattaaaataaataatatgttgtcaacgtaaattttcataataataaatttttttcgtaataaatttgacacagaaaatgtaaagattaataaagtcttttgcagttaatacaatatacataactgatagtatttttctcacaaatttttcatctttttttatgtggaatctgtccctatttataggaatataggttaacaattattttacatttaaatttgaattacataaccgtatcatgaaacgtgggaattgatcacgtttcatttaaacacatgtggataacaatggataaccacataactgcttattattcttatccttaaatatggttgatgctgatttggataacagcatctcgctttgcctgtagatgggcaatgctgtctttggacaatcatatgccttccagcaatagcatgagcaccaatgtactgagcaaacttaagaactgctctttgatcataaggcctcgcagactggacaatcatgtcctacatatttctaagttgttacacttagttattgcaatgtataaaaaaaattgtgaaaattataatattatactttctaatatatataatatttcctgcttacaacttgaaaaaacttacttttgaggagaagaatccttcagtcaaatctcattcttgtgagtgaccaacaagaagggctaacccatccaagctatttacgaggaggatcatggttaacatgtttcaatcactcggtgtatttctcgaggaataatgaagttattcggtaaaaacatgatgaatatccagatcataaaataacagttatctatttaaagtgccaattataaattgttcccatcaattggtagatataagaaatgtgtgaaatgtccatgtttgataactgtattttagataagaacgagataattgctatcctaatcctataaatagcaaaactcatgttggagaaaggacgaacgaattcttgactgagagaaattttgccaagttgtattcagtaaacaaaaaactcaaaaataagaatgactcgtagagtatgaagattttaactacaaaaccacgtaaaaattccttgtctttgtttattattaatttatttatagtatttattacagattcattaattgttaaaagtctcatttatgtaaaaaaaatcgagttaacagtttggtgatttcattgagagtctttgataattaaactctaaaaaacacatctccctacccaaaaggaaaatattttttctatcatggaaaatgcttctcaagatattcctatcaaacaggaagaaatcgttcatcgccctggaaaagagcctcaagggactcaagttgttgatcaaaatattggaaaaggtcctcctgagtgggactttgaaataaataacaacgtgagaa

SEQ ID NO: 5887 - DNA, 539 bp, Cannabis sativa
gacttgtaacattttttaaacactttattgaaaaagagaaaaagaaattatccattgacaattagaaaatcacatggacttgtggctattggttaatgataagttctataagaaaattagttatccaattcatcaaattacaaattctccctaagggttaaaataaaaacaaagtgttctcactattgcaagaaaaagatataaacaattcacttgtaaaaaaaatgtttagattacctttacaaaattccttattagatcaaatactattttcttggctagattaaaaaaatcatagctttggtcaatttttaatacttttttgaaaaagagaaagtatttggtgacaactatgtatttatgaagcaaagcacatggagttgtgattattggctcatgtagcaaccaacaaacttgatcctacttctaagcccccatagacattgcctttaaaattttcaaaaatactgaaaaaagtttgacttttttttggcaggacttgtcttggtttactctaatccaacttgattacatgttta

SEQ ID NO: 5888 - DNA, 2085 bp, Cannabis sativa
cgaagaaaattgaaacatgtttatgtactcagaaacttgatcatttggtttattaaaattttacttattttttttatttattttaattcaatttttttttttctaaaaaatattaactataatatctgaaagataataaatataagaagtacacatgctaccgaacaattaatcctatataattcgctttcaaaaaaaagtcctatatataattcattattaaataatttaaatatacttaaatgtgaaattacattgaatttaatatataatcagaaattcagaatattgttcatgaatcataatcaatatttattaatataatgtacataaattgtagacgtacatcaacggcaattccatctaatttatttttcttaaaatttatttctgtatagctaactctttaattacttttgctttcttatgataaaagagtggatcgtattagtatttgagccttgtaaattttattttattttattttttgataaaatttgagccttgttattattagtacacatttagttttttaggtttgatgatccacactgcacatgatatatatttttttaaagatgtgaccttattatttttttaggtaactgataaaagtcatgtcacagtatttaagtcatgatggattcgttttcgtatctttttttgttgctctatatatacatgggtttatatgttcgtaagtttcatggatcatggtccatgcatcgtacgtgttatgtacatattgaactttttattatttcaataatttatttgatagtttttcaaaaaaaaaaatatttgatagaatacacataagtaattgggatatattcaatttgcatgcacacacattttacgcatagtaatataatttatttatttatttttttttttttacatgagtataatttataattagtctttaacattggcggaagaaaaaaaaaatataaaaaaaagtcttttaataagtttaattacctaaatattttgtatatataaatatatttttaatataatttataattaagaaaaatatttttttttctaattattaagcaaataaattaaacataattaaaaatttaatttttttttattatttattatgttaaatcatacaaaatgtatagtaatatattataaaacatatgttcacctttgatttgaatatatatcttcctataagtatacttaattaaatataaagtatgattgaatgatattcgattagctagcatgcaccgtcggtggagatagcattatctatagagttaattaatttttcatacagatgcactatatatgtattataatcatgaaattggtatattactactatatatatatttaaggaatattattattattattattttgagaaaaggaatatcattattcaaaatgaataacccaaaaagaaaagtagtagtggaaagaaagaaataaaggaaaattgttataaaaccttataattaattatatgtgtgatatttcgaagttattaggtgaagtacatgaattggaagattaattaatcattgactcttgccaattaattgggaagaacgattaaattactcgtgtatatatatatatatagataaagtttccttcttcttcatacatctcatgatcttttcctttttaagatcatgatatatatactgttttctcgtcatgcgttacatatatatatcctataccacaccaaatatttaatttacgttcctagctatttatatgtatatataccagaaaagatcattactgatgagatagatagagagggggccggccggggtgattacatatgtggatgtggttaataaagaaattaaatattaaagagagatagagagagagtagttaattaataattattaattaattagaagctagagaggaattgcatctgcctgaggagtggggttagggtttccataagtttctcacaagggtgattgtgaattccctcgtacgtggtcaccacaatgcttgtgtccttcgatagcctctgcacttgcttctttacattacatgtgtgatgcgtgcatcgatagtagctcctatatatatata

SEQ ID NO: 5889 - DNA, 886 bp, Cannabis sativa
aagtctggattttagtctatcaagtgaaccatctgcatttagtttgactctgtgtatccatttatttccaatgactgtcatgtgaggagaatatggaaccaaagtccaagtacctgccttcttgagagcatgaaactcttgattcatagcattgaaccatcttggatttttaagggcagctgctgtagtcttgggttcagagggaatgagagactcagggagagggaacttggtagcactataagcttttggtttccgaatcccacttaaggatctagtttgcatatggtgtattcttgtagcaggggctactgtgagatcttcattaagagaagaaggtgggtcggttgtatgctcatttgtgggaatgggacatgagggagcagttgcattcaaaggcacgggtaagggaattgtattgatgtcaagaggtgagtcatttgtagttggtggtacactgtttgatgtgatattacaaggtatggtaggtaatgtgtcaatgtttgtagtagtaatggtgtttgtctgttgtggtaaagtgtctaggggtgtagtgggtctaggattggtatgtgctgttatgataggaagggagtgggtactgttgtcgatatgtaaagtgggtaaagtggcagatggtatggtctcttgtgtgggtaaaatagtgggaagtgacatatcattggtctggttttgtggagagttgttggataaagctggatagtgtccttcattgaaagtgacatggcgtgagacatagacacgcccactaggatgttcacacaagtagcctttgtggtgagtagagtaccccaaaaatagacattgttgagatctcaactcaagtttgtgagtgttatatggtctcaagtgtggataacagctg

SEQ ID NO: 5890 - DNA, 1583 bp, Cannabis sativa
aaatttcaaagatcactaaaagcatcttacataaaaataaaacagattcctaataactattaactaagaatgggagacaaattaatacaacctactttgttctcagtttcgcaaaccaaatcactagtatcattgacacttgctggaggcttcaattctgacgagtggtctatagagcagcctttcctatgagctgctttacttgaagtatcaccggacgcagaattactgcacttgctggccaatgaatgctttctatcctccagcaagaaattcccgtgagtatcaggactgtccttcctcttttttttacatcttcgactgaaagtaagcaatggagccatcgacagggctttttctgctgaaccattacttgaaattaacatgtctttatcaactgaatcagcaatttccaagcttgatgtctctgactttaatagagtatcatgagtttcaaagctgctttttacttcaagagatgattttactccagcagaattcgtactcgtattagcagtagtacccgtcaagtaagaagctaatcttccttcaatgcatcgattatcgcctgaaatgtcagtaataacatcacaagatgaattcatttgagtgtgacatgtcttattccgcaaacaatcctctgcggaagagggtacacctccttcccttttggggatactctcatcagaactcttcatcagaagtttatcagaacttaaagttttctctgcagcattagattcttcaatgtgtatcttagcctcaagtaagcttgacacttgtactggtgaagatgctgaagaatcttgtttattgatacaagtagagcataagcttatcccctgacaaatatgctttgagaaataaagagtaaaacaaatcattagacaatctaaaaaaaatgctttagaataacataattatcaatcaaatttatgaaatctcacctcagaactttccttttgatcttctgaggtgtgcttacccatcagttcatcatacaaatccagactttgtccaagaatctcattttcaaccgatactgaattatggcacccttttcctggggcatgactattacctgtcagcctcctacgcttatatgtcaaaaacaccttggagccaagcatttaaactaacaaaaggcaaaactgttgttgcaactttgaaaacttgtgttttctgaaactaaaaaagctttaatacacttttctagcgtagacaaacaattaaggcatcgtatccccaaacacacctgaaaagatttaaataaaaaaacttctccatcaatcaagtggctgctacagtaatatggatatattcaaaattaacacgaaaaagtaatgcttgcattgacatgacacatgctcttttgaatcaaagaactttgacaatctacaatttgcaaataagcacatccaataatccccgacagtttttctaaatgtgcgaatgtgattgtgaagttcagaataaaacaaagccgcaatgaataacttcttcattggcatgtttaactttgcaattcattttaaaactcgcaagagaaacattgaatggccaggctaaaaccaacccccccc

SEQ ID NO: 5891 - DNA, 776 bp, Cannabis sativa
tttaagatattattcctattattaaggctctaatttttcaaccttaaccagtaattctgaacttttgttgtcaaatatttttcagagaccttgggagtcaaggcttgaaagggtctatcagtgatcagattagtcttctttcaaacttggtaagcttgtaagtaccatcttccttctttactgttcaatcaatgggtatttaagccgcttatattatatattcaaaggtaacatccgtgcacttaacttacatgcagttgtaacatctaaaatgtttgatgtgtctttttttttttttgctcggagtttgatgtgtccttgcttaccatatatctaacccaaagacatgtgtatccttctactctgatctcatcaagctactctgtctttcagttcactcatggaatatattctttttgacccattttgtcagtcttcagtaaaaatcgttgctctccaaaatgcgaccatatttgtttaaaattaacacgagctttttttgtattaacaaaatcatgattagaatgggcaccaatacatttgaagatatgccttaatcagcatctgaaaaaatggatccatagttcatgttaccttgacagagctatccttaattttttgttgggtgtggggggcacatgcatgtatttgatgtaattttagaaatgaatgttcttatcataaagtaaagcagtgccccttacatttgaactgtaggccttgattactgttgtttcttatcatactaattgaatccaagtttatataaatatata

SEQ ID NO: 5892 - DNA, 929 bp, Cannabis sativa
taagtataattaagagataatattatataaaatgagaaaaatgcatactcttaaaggtgaaaggaatttgattgacaattctgagattgctaatgcattcccacttcgaacaatgctatcacaacttacaccaattctttccatcacttcataacaacctaatttattataagaattaataattaattaatggggatttataatttataattgtacaaaaaagatcgagcaattaatgtataaaagattcttgcaaaaactaaataaaaatagattttttttatttttatagtttttttggtaaaaaataaaaataatgtaaggtaaccggttaccgtaatgagataattgattactctaaaaaaataactagttaccctaagtatttttcacatatctttctttctattgatgtattcctacaaaatatatttattttgtaagaaaaaatatattatttttgagtaaattaaaactcataaaatatgtcattttcacttaatataagggtgaatatgcatatgttgcgaaaaatgaattctttttaataaatccaattatagcaattttagaccaaaaactttaatttagttttttttttttttttttgacaaaatgatctgaattcgtattaactgaataaaatctaaaatatagcatttctaaaaacataattggcattttttaagagattttcgcagtcgaaatgattattcaaaagattctatattttgtaaaatggaaaccctaaccaaatttcattcaaacttttttagggttaagatcgtatcaaaaattgggtcacaatcattgttaaagggtgtagaagagaatattttagagtaaaaaagaatcgaaaagttcaaccaataaaattgaactcactacgtatgaatactaaccagtactcttacaaaataaaaaaaaaa

SEQ ID NO: 5893 - DNA, 567 bp, Cannabis sativa
aaatgaattcaatgcctgaatcatttggtgttaaaagtttctctagtgcagcaactgaccttactcccccaaaattctcatccacggctgctataacacaccataagacggtggttttatctactgctacccctccagcctacttacatttaagtgatccccacttatctagttccacaatgatgactatgccaataccttctgcttccaaaacatttgtttcttgaacaattactgcagttccgaatcccgcctcagcaaaaataattcacccaactgaagttgcacctgatgcaggaaataggatggcttctcttttccccaaaagacaatttgtttcctcaagtggcgatgttcgccaagtgctcaagcgttgtcgcacaagaaatgccccctttactgatattaccaacatcactgaatcgtctccaaaccttgactatatctctatttcttcaaacaactcactggtcgaggacaacgaaggagactctttggccaaggctgttacacagcctcgccaatcacaatgattctgcttaattggaatgctcggggcttgagcaa

SEQ ID NO: 5894 - DNA, 1336 bp, Cannabis sativa
  modified_base (284)..(285): a, c, t, g, unknown or other
gcaacctccactcgacacgtattccgcaccaacaatggtcctagttgtacggacccttttccccacgagaaagagccctcttgggggcccaatagtcagtattttttatgtattttactccaatagtgggtgggcttttaacaagaaaccctaggcaggtcatgggtatgcctataccagtacttaagcctatataagtccctgtatttcttcacaaaggtgggatgaaaaaattacgtagccgaagctttgctaaaacactctctaagctttcatcttcttcnngagaaacctagagaaccagagttagggtttcattgtaaacaccacaatatattgactcgtggactagggataattaatgtcagaaccacataaaattctttgtctcatttatttaatagttatttaattcctaaagcttttatttaattagtttccaaaaatttcgataaatacctactaatcgctaaacaacataattagttatcatttaatccaactgttttatgattatgcaataacaagttgaaacatccatttaacaagtagtaaacacattcaccacaaaaaataactccaagtaaaatatgcattctccatgctatttataatgatcattctcttcaacaagctcaacaataaaaaatggaaaaaattgcatgataatcaaactatctcagaaggttagttttcttttcacaatcaaaattcgatataaaataaattgataataggtcaatcttatcaaaaatgcaaactaagcgaaatcttacgaatttaaactatataaaagaaagaaaaatatcgatttcgactgctactaaaaatcaaattaaactaatagaggacatagccaaatccatttacatatggtacctagaccttttaaaagatattcataatacaatctcataaaacatgcaatgaaaatcacgacccaatctagtttgaggtaaaatgggttggaaaaagattaaatctttgatgatcaacttctctattaataataataaaaaaaaaactatactcagaagaaaaaatcctagccctagcagaaattcccaatttacattataaaaaacaatcaaatccatgcaaaataccttgaataagctttattactttctttagaatgtgtaagagcccctcgtcgactttggtatgatcactccctttgcctttggtatagatgaactagagtgaatcgaattcccttgcgtatagacaaatttaagagaaataatgaaaatgggaagagaagagtatagagtagatgaagctcagtcacttcaaccgcgcgaaaaacaataaagttgacaaaaataaattcaaa

SEQ ID NO: 5895 - DNA, 942 bp, Cannabis sativa
aaatgtgtctacaacacctagttagaccttatatgtttaggaagccaaaagataacgtctctaacttttcttcagttcctagataaaatagccgtacccctctccacgtatctggttggggtattgatggtgttgtaccataggctacagggactctaaatggtcactgctaacttcctagtcttcaaaactaaaatttgaaaggttttcaccagatgaagatgagtttgcacctaatcgggcatgattcttgtaaacaagttgaaggagatcttggtcgatatgatgatcacctccccagtactcaccagggttcatctacaaaatgagggagacaaagggtgagagttggacgagggaaatgaggaaaaacatgtttgatatgccgaccaaggcgattcaaaaagaaggaatttcattccaaaatggaattcccaagtccataggtttaaaattatgaagaatacctagaaattctttagaaacccacgaatgtgtgaatttggaaaatttcaagccaaaagtggtacggaattagaaaattagatgacctaagcatatgttagtcaaagttaaaaggcctaacatcctttactcttggttcagtcaagaacaagtttaagaacacagaaattttgcaacacaaaattcagaaaaagaatgcatatatatggcagaaattgcataaagaaaagggaaggataacttactcactatttgaagctttctgaatgtgcttggagggtttcagcgatggagattctagcaagtttcttcaaaaaattcaagaatgaagaaagaaaatttttactttggttttctaaaaaataaaatggctaaaagaatccctataaagcttaaaccctttttgtgtaggtatttgagagggataattaattcaaaattcaagttttttgggtccccccccccccccccaaaaaa

SEQ ID NO: 5896 - DNA, 860 bp, Cannabis sativa
tctttttccaagtaatccattattttagtcatccatgtgaattctctgaccgtatctacctccattacttcggtccgactgaccgttggatgagttagcacatcaacaagaattacatcgagtaactcttcttcccttgttgaggccaaacgggccaaagcatctgcatgagagttatgagcacgaggtactccagaaataatcactcttttgaatttctgtagcaactcgcagcttagggcgagatatctagccaaatgtcctcctctagccagatattccctgtttacctggcatacaacgatctaggaatcgctaaaggcttgtaaatactcggtcttcatttcaagagcaagtttcaatcctgcaatcaaagcctcgtactcagcttcattgttagatgtagaaaattcaaatctaagttcagcatgtacgttaaaattattggggttgtaccaccccctgagccttcgctattggaggctccgtcaacatacaaagtccatatttcattgtttggtacgtcaggatcaattttttcttctataagtgccaccctagtacttggaaactcgagtatgaaatctacaagggcctgccccttgatcacagatttaggcttgtacttgatgtcgaactggctcaactctactaaccattttaacaatctacctgaggcttctggttttgctaaaacttgcctcagagggtagttcgttaaaacttcaatactatgggcttggaaataaggtcgcaattttcttgacactatcactagcgcaaatgcaaatttttccatccgaggataacgagattcagggtccaaaagatgcttactgacgtagtacactggatactgc

SEQ ID NO: 5897 - DNA, 1749 bp, Cannabis sativa
tgattctgtaaagttttatgtttaataactttgtcagagtaaaataatataacaaatgcaatattactgatattatttggttaaattatttgtgttcatattttttgttttgagtgtatatattctaaccgttgttaattatcagaatgttttttttaataaaaaaataaagaaaatttatttccgtatgtatattgattaatataaaaagagaatatattgtgttattaagcaaagataaagagttttttcattgggataattacataaacataatttattttataaaaaaaaattatacttttattttaaacatttttacggaataaaaaaattatatgaaagtaacaaaaaataacatcaaagcaatatcaaaataacataaaaaattaaccactcgaggctagctcaagtggccataggtgagtgtgtgcgtgttggaggtcctggttcgagtcccaggtaaaacatggttgtaatatataaatgcttaaataaaaaaaaaaaaagcaatatcaaaacaacataaaaaatatttacaaataataaaaaattaacaataaaataataaaagtacaacataaaaataaaaatattaaaaatattaaaaattttgtacggactgtatttttatatatatatttttttgttgtttttatgtattttttttattaaataaattatccctagttttaattgtttttttttaacagaaaaagttcattaaataaaatacgaaattagatccgatcattacaaaaaaaatatttgtaggaacagttacacatcaatcatatttgaaacaactcagctagcaacattgttagcagtaaaattacaaaattttgtttgtttatttaccttttgatgctgttcttgagttgtaagagttttgcttagattttacttgtgtgatactttctactttctttttgggaaaagtttggtaccttttggtttgagaagctcaacaagtacacgtttaagtttaacaatccaagaggagatgctctcctaaacagattttttttaaaaaaagagttaattttataaaatttataaaaaaaccgtttcaatattttgttatttagcatataaaaaattgtttacaaaattataattacataaatattatattattacattttttttttttgcagaaaaataaaccctatatttaagattatacttccttggtatttttgtaatttttttctaaattttaggcgttttcgaaaatctccccttctaaattaccattttacttcgaaatattctattttaaaatgaatagcttcaagatataagagtttattatagaatcttctaataaacgatgcaactaatgtaaaggaaaatttgcttaagattgttataaagcatagaatggtatatatatttcaagttttattatgtgacatatttatcatggtaaatttgaataatattaaataacaaattcttttagtacaaatttgtatcttgacaaatggagttggtttgggtaaggagtttgaggtccagtgggccaaggctaaaagcctaaaagttgctgttgggcttgggcttgaattttaacctacgaaagtcttcttggttgaataggtagccaaggcttcttttctttttcttctctataatataatattctttacattttttttttttgaaaagtattctttacattgtaccaacacaaaatttgttacttttattccatttacaaataagagttctaaatgtaattaa

SEQ ID NO: 5898 - DNA, 2055 bp, Cannabis sativa
agcctacaaggcggttaattagatgttatcattcaaattcttaatcttggctacaattgtgttaaaatgactcaaaaaggcctttagagattcatcaggttattgttttacgctcgtcagggaggatgcatcaggtctcctatctctcgaagacgagaattgtttcttaaaatattgtgacaactgttccaatgaagtaatggagtgcttagtgaatttatcgaatcaaatgctagatgctcccatgagggatatgggaaataatatgtagcataaattattccctacattactggctcgcattatggtattgaaattgtttaagtgagctattggttagttgtcctatcataaggcgtaacatgtgggttcttaaaccctttcgagaattgagaatttatatatccagatgaaatggttctaactccttgtctcagtcatactcgaggagctttccatactctatatcttgatatctcctgaacctgtcttctaactgaatgacccttggctgtattaagtcatcagtgggttgattgagttgcccacacacttgtggagcattcctattttatctccctctgagatctggtgcattcctattaactgctctagtaagtcagggtgcctttggttcagttgatctcggagatcagattggttgcacatattctggcatcgctcttgcctattaacatgagtgatcactgatcgaatgggtgaaatactttttcagtaataactttgcaagttgttgacgctttcctgttcatctcgatattcccaacgaggattcatctctcctagtggtggattttcccatgtgcgagatctggaggattgactttgcctttgggtcctccttgacccactttggattgtgtttgattatgatcctcgagttggtcttcgcctttcaaacacattggtgacccaatcttcgcttaggtaagtatacatactgtccctttcattcctcctaggtccgtgcagtggatgtgttaggcaagtagatcgattaggtggttgttcatttatatttttgccaattttgtgagatgactgctgaccttttgatcgtgtttgcctcaaagtagtggcaccatcttctcttcatgtaggaccccttccttggtttggtctgctatgagttcaacttccttggggttctttccctgggcaatgcaccgtcttctcttctcttctcttacttgcttgcctggttgagtgtttactattatgaggaagttttagttttttttggggagatgcattttcttcgagttttaatttcaatcaaaggctctcaatgaaagaaccaaattattaatacaaaattttgttaacaaaaatgagactctttgaatgaaactaaatgaaatcaaagtaataacctttatataattaatagtaacaacatttaataagataagataatttttacgtagttttgtagttaaatctacatagtccacgagtccatattatttttgagttgtaaatccttctagaatacaatatatatagtataaaatataatgaatactactgggttctctacacttattctttcggggtggttactctagaaaaatgaccctcccctatgtcataggttctatcccaatttataggattttttatgaatggtcgttattccctttggccttatctagataattgctcatgaaacatggacaatctcaatgtttcatatttacatcttgtgtgataattgaattaactgtcaataactgttatttgtccttatttgaaaaagcagtttctttgccaaggtgacatactcaaaatatgatttgcattcttcaatggcaataggaatgacaaggcgtatcttgtgagacataggtcgaggcgtctctcttgcttttgttgtcttagataagtcttaagatagcttttcaagattgtatcttctgtgctccttaggattaatcctcttattttatgattgtatctttcgtgcttcttaagatcaatcctatcgcattgctcctatggtattcgagatgactcgttttttctttatgtgtt

SEQ ID NO: 5899 - DNA, 714 bp, Cannabis sativa
gagtcgacaaggactaaattaattaacatatattacacatatatatgcacttcgtgatctctctcgtaccacgtactacaactttcactacgtaaaacagaattaatacacacaaacacacacacatatatatagcgcatatctcgcgcgcgcggggcagcgcttagaatcctggacgtccacgatcgcagaaattgtagacagtgcatgctcgagaaggtcgacgggcattcttgcttggccgtatgcatgactggtatatgtgggcatcacaaaacggtcctctctttctagtaatatcataaacaatgtacttaccatcatcaccaccaccaatggcctcgtcctccatcaaaattaactcttttatatctccattttcgcattcttcaatagtacagctggcattgaactgtgactgtcttgtgcctcccgcaatcactgaaacagcttccatttttggtgctgtactacttgctgcggaaagtgttattgtgcgaataagcactaatagtactgacaaaaatacaaggatggcataattagagatggccatgtattctcttctcttcatttttagtcttctctactatctttacagatctttaattagttgagtttgttcagggacatctgcacctatttataatatgcacatatttgttattgttttttatttccggcttcaattaattaataaagctgaaaagaaaa

SEQ ID NO: 5900 - DNA, 2451 bp, Cannabis sativa
aggttagcaaaatcaaaattagacaaagatttaagttagagttttctattagatcgttcaaatgaacatccaccaaatcttcaatgtcatgaactctttgctgatgatcaatttcctccagcctttgcttgattcttgatcacttcttgagttgaatcttttgctaaaaaccgactctgatatcactgttggtatttgtcgactcgatccctataccaactcaacatacacattagatcatcaagattctaattaactttagcattcaattaaataattaccaatcatcacatatacaatttctcacatacacattcaaattctaatctataaacacaaattgaattgaacaatctttgataattcaattttcatacaaacagatcaggatcaacaattcaaacatgaacaaacacaacaattacagtaaaagagataaacaatgacagaaaagtagaagagatcaaacacaaagatttttcttgaggttcacctaaaacttagagttacatccccattgagctcgccataggaattggtctgctcttgtactataatcagtcttgaattatatcaatggttttgaagattctaagtcacatagattaactggtaatcttcttgatctcactcttcttatcttaatttgtctttataattttctctattctctcaaactcccttctgattcactcacttgagaactcttctctctctagcctcttggagctcaatcttgctcaacgatctgctcaactgagttgagagactctactatatataacagtcttggtggttggttaagttagttataactgttaagttggttataactgtgctgttacaaatagatgaaactaacactaaataagatgtatctaacttcataagttcacgtgtgtattaagcttgtaaggggatttgatttaacaattttatataatataatatttaaattaaataatataagtaataaataaattaatgtggtaaataacattttgtcaaatcgtaacacaaatatgaaatgaattatggtgtaaaaggtgttataaatcttttatattgaagatcatagaatttgcaacttatctctctattatctagggttgagcatcggtcggtttggtcagtttttttctatataaaaatccagcattcgattttcgatttggattggtgcaatctgaaaaccgaccgaccaatccaaaacctatcttaaaatcgactgttttgaacctcggtttggtcagtttaaactgcccaaaccgaactcttttttttctttaaaatatgatccaatttattctataaacacattattctacattttacaactacaaacatataaattaattgttcaaaaactaattattttatttttttaactttaatattaataaaataataatatattattagtaactacaatacataaagcaaaaaaaaaaaaattaataaattaatatatatgtataacaattaatttctgttttttcggtcggtttattactcaaaaaaaaaaaaaaaattgaccgttcaatggcagttttaaccgttagcagttttttcggtttttggttccgtttcgattccaacagtgttcgataagtcggtttaaacttttttttattttttaaattttatgttcactcctactattatctctcttaattagtaaatggagttactcataattttatactagctatataattttatagtaagaaaactaaaaaggaaatacgttgatcataacaataacaattgagaggatcattatttctagagacagggcacatggaatcctggccaagcttagttaatctacaacacaaagtatctttattatatattatatacaccacttgtatatatatttatatatttcattaattaattaaattataacaaactcatcaacttttaataattaatacaatctctcacacatgtacacacactatacaattctaataattacatatttacataagtattgctatgcttgtaatagtctctttgggtccttgaaattttcttgcccttgaatataataattggatttgtagagtagattatatatatagcatatttcaatgattagcatatatatatatatatattaattatttctgcacataagaaaatgtataaaaaaatatatttataattaatttaagaagaaaactaatattaatatggcagaccagctatgtttacttgttgatttcactttcactttcatactatataatatatataagtccaactatatatgaacaaaagagtacagtaatacataatgtggccagcaaacacactgtcgatttcatatataatcttgtgattaattaattaattaagttgagattaatattcaaaggtaaatgaatgagaatgacaatatgtagtaattagtgatataatatatgtaaaaagatcattgat

SEQ ID NO: 5901 - DNA, 574 bp, Cannabis sativa
gaacaagttattggctggttgttgttggattcatttgctgaagataacagattagatacataattagcatatacataaatggtatttatgaaaagaattattcaattgagttcttttagtaccaaaaaattggttactagtaaccatttcatttagttttcttgaaaagaggtaacttaattagttaaaagttaaaaggaagaagacttacctctaatgatgctgagttgaagttcttcaacacctcccatgtcaaaagatgaacaaatctctcacaaacaataatggtgaaatgagatagagagacagagagaggctttaattgaattcggtagtaagtagaactgcagatttagattgcattaaatactatcaacatgtcattttcatcattgaaatgaaaaagatatatttttttatattcattttaattaaatagttaaattaagtatacatactcaaatttttttattattatttgtcattagattaaaatttaatattcaaatatttatagttgatttattttagtacccatattcattaaaaagtgttcaacatttttatatatttt

SEQ ID NO: 5902 - DNA, 754 bp, Cannabis sativa
tcatttctcatcatgacacttcaaccatcattccttaagtaatcaatgaacacattcttgtttggactcatgtggtaagtattgtcaaggatccattcatcttgatccgtatgatctggtgcaggcatgtccaatccttgaagtttcatctttaaccttgattaatctccattagaattgtagttgtcatccactacaacattggaatcactgccattatcttcttcttccttgttcttctttttactgtctcttaattctcaataatttctaattaagtgacccacattgccacaatggtaacacttcctggtttccctgttcttgatttggatctagaatttcctctagatctagaattatctctcaatcttgaactgcattgtctatgttgtcttccttgagacattaaagcttcattagacatggattcttgctttgctacctttttccaattcaattagcattccttgatcttagagtgctcgttacatcttctaaagtgagagtgccactgctatacattataacaattctcatttctttaaattgattaggcaaataattaagaataattacaactttaatggcttccgcatgttgataagagccaaaatagttatattcaaatcatctaaattttgttctaaggaaacagtagcattcatcttaaaaccataaaacttctctttcaagaagatctttatagcaatggacttagccatgtagatttgatcgagcttgctccaaattt

SEQ ID NO: 5903 - DNA, 924 bp, Cannabis sativa
gagttttgtttttctctcattataagccaaaatctgttagtaattttcttcgttagatcagtactaactttgactgagagccctaacgatttgactgcaattgtcttcttaattaatttgctctaatcaaatttcctcaaaaaaaaaaaaaattgctccaatcaattaattatttaatttttttaataagtcatagttaataaaatcgatatatatattgggagtactatatatactgctacgtacagagccatggttattagctaaaactatattattatgtaattatttaccagcactataatctaactaaatatttctatatataacaattaattataataaatttacagacaatcatatatatatatatacatatatcttccacttaatattccaattaattaattacttaaacaatattactatatagatatatattaccatgcatggttattaattagggtttgttaaatattattgggaaattaaaaagaaaattaagagagatatacaaggggaatgaatgagtatatagtgagtggctggcggatcttggtatagacagattgactactgagattattattatccctattagtattattggggggttatgtcagtttttttcttgatacacacaaaaaaacataaaaatgaaaaagttatacactcaccacagaatactactctttttcaacggtgggtctttcataaaagtgagatatcaacatttcaacaagggttgaatttataatttcttaataataataatgctgttaataattatatatatatatttatattaaaagcaatcaaattaagtacaaaatgattaatatattataataattaattaattacccctagtaaagtagtactgtttttccatataattaataaagttggggtgaaaatgagagg

SEQ ID NO: 5904 - DNA, 2218 bp, Cannabis sativa
gacatcttgaacagctctctcaatatgttttggttcagaaactccaacggcatcacaaaacgcttctcgtctgtagtgtaaaccacaaaatgaccttttttattattatacgacgtcgtagagctttccatatccatttctaccgtattgttataattactaccacttcttgggaaagagatccttttcctactcatagctgctattctttgccactttcttgccatcttgatgagcaacttggggctaatcaatatcattctggctttgatgatcagatcactgctctctctttctctatttattaagtaattatattgtgtttattaattatacccaattggtttgaaataggcaacgaagtgtagcacaagttatatactcactatattccgacatactacatcttgaggtgttgtatgtgttgggatattatattaaagtgcatgtgattagttatattaagcgttttgaattgtcaaatatcaagtatattggtaattcatgttctctacaaccgactcgtcaagagggaaccattttttaagaacaacctctgatttttctttttccttttttgtcttgttcaaaaggacacataattacgggcccaagtctgtatgtgacaattcattcagatgtatcatgtatcattagtacttgtacaactaagaccaatttcagccacacacatactattatagacttgtagtactgtttaaatatgagtatgtacacatttttcaaaaaacacaaaaatatagtttgtgttctgttggaggtaataaaataaataaattattgaataatgtttttggttgagttgcggactaggttgttctctttaagatgttttgtggctctgcctaaagtatacacgacagtctatcaatcgtggcgttctcatgataacacaatctttgtatacaaatcgttttgcatcgaatgatatcactctattgaaccctaaaatatttgctctgagaaatcataaaagtttttgaagagaatcaaatttttctttgttgaagagatgtattctcttgttgttcagatgcgatttatatagagaagtcgatccaaatataaaacggtaagaaacgggtaatggaattgtgagggaaacgttggttcatgttagtgaaaagtggagcattgacggttgcttttactgcttcagttaattaattgttataagattaattgcataataaattaaaaatatttattttattaaataattcttttgtaaaaaataaagtgacaccacaaggtttatttttatgcattttgtagagtctattttaatgtgttttagtatttttattactttattgttcggacttatgtttaatttttgttgttgtttgtttttcaggagaaatatttggagatctctttttttttaattattttggtgttcttcaagcctttttgagacaaatttatatatatatataattataaaaaataaaactccaataatacttagttaaattacttgttaactcaatttggtcaaactttacatttttatcttcaaaattcatgatctaaagccaagagtgatcacttataaaaaaaataaattgaaaaatctatgttttggatattaaacacgcttcgtttgtgactaaaaataaagtttgaagcttcaaaccaaaattttactctagaccacgaattttgaagataaaaatgtgaattttaaccaaattgaggcaacatgaaatccaactaagcattattgactgattgttcatgtcattaaaaagtggatcattgagtgttgcttatactgcttcaattaattaaacgttataagattaattatataataaataaaaactatttattttattaaatattttttccttaaaaaataaagtgacaccccaccaacctgctcactagtgtgtgagtcctcacctatgcgcacaaaactcggtgactctaagggcaacaagaaatccaactaagcattattgactagttgagtccaacaattggtgtgtgagtcctcactgatagtattttggtcataactctctcaatatagctcaaattggattattcaagatgttttaaaaagagaaaagaaagatctagaacttttattgagaaagtgggtccaactaagtattattggtgaggcaacaagaaattcaactaagcattattggctggttattcatgtcattgaaaagtggatcattga

SEQ ID NO: 5905 - DNA, 621 bp, Cannabis sativa
aaaaaaaaaaaaaattgttttgttagttgcgatattcatttgtcgaccctaatacccttactattagaagcgattttttatcgcctcaagtattgtcgcccctaaaaattatatttattgtagtgaacaacaaaaaattgtttctcaatgactagcattaaattgctgcttttaagttaataaaagattatagcatgtgacaggacagagaaaagggccctaaaaaacaaataaaattgctgcttttaagttaataaaaaaatatagacagagaatagggccctaaaaaacagtagtatatataagtggccaaaagtatattattacattgatcggaaaaaatcaatgatgccatcatttcaattatagttcttattcaactattttaatagaggagaaatacaaaaactaattattgggtggatagtgagtagtgctataaatatgggtttgacgttttgacatcgtggaatcaacatgagcttgagtgcgggtgtacaacgagacatgataaaatactaaaaatataggcttaagcacgacacaataagcttaaaagacaaaacgcataaacacagatagactaaccgaaaagtaaaacacgataagtccaaaagacac

SEQ ID NO: 5906 - DNA, 2047 bp, Cannabis sativa
gaagatcaaatgagttagtaacagctgcaacatagattagagtaagacccacctcttccatttcttttttctgggaagattttgaatctgatctccaagcaatataaagtaaccgtaaaccaaaaaatgcatatagaactgcaaatgaaagaagataaggtaaaagtccagattaataagatgatagaatgaaaatggatagtcgacctaagcatgaaccaggacaacctaaagaacgaatgaaatttgtgcaatcaaagaagcaacaataaaatgcttgggacctttccaagaaaaatgtaagtagatacctgtagctgcactatttgtgtgctttcttgatatcaagtttggaacaatcctacccagtcccgttgaaagtacctgaaatgtacaacgaaaaagatattaataacattgaaaagagatgaaaaagaaccacaaagcgcctttcgagtttccaatctcacttttcatttgacagtttgcaaatggagtggcagtacatcatcaaggcataaaaagaaaataattataagagcagggagatatacatacatttatatgtaaaatctttactatagccgtacaaatgttacaagcaaggtaaggataataagataacttacagtcataacaatcaaggcagagagtgccccagataaaacaattgactttgggtggcgcattgccataagtgctgctataatgaatgtctcatctccaatctagtagtccccaattgaaaattaatcagattaaagaatatacgcatagtagtatgaaaactcactagcaaagcagaacctatcagaaaaagtaaaatagtaagcacttagtgaaatttgttaggtatttggtcgtaatttcattaaaaaaatatgtacttgttaagagatttacttgattaccacattaatcttaggtgaggagcaagtgctgtgaaatacccctgtagttcatagtattttctaaagtacaatatcaagtagaaaaaaataaaaagagctcaaaaacaaacctcgctgactaaaatcattgaaaagcttgcaaaaaatgcatccaagattccaagaccagagtccaagttgacacccaaatccaaagaatcaacatcgttcttgtctccagcagaatccttcgcaaggctgcccagatcaatctacacacagaaattaagacatatttatctaaacaacagcattcaaaacaacgaaacgaaatcttataatagcagtaaaattggactgtaatcaagctacagaacctaaaaccaatagaacaaattacacatttttatggtgatttatcaagtctaagacttaagatattgacaatagattaatttgatgcatttcgagcttttgattgtttactaatacgtacaaaagctaaattcagtttggatctaaaacgattaccgtatgagttcaattaaaatatgcatttattcctcttttttttttttttttacaaatttctgcaaaatcttctaaaaccatacataccttgctccgacggcccagatctttggatccagtataattttccctctcagtttcaaccccagactcctgcaattaactcgatcaatacacaatttatccacaagtgcgtgcagaagaggtagaaagaaaacaaacctgagcagaggcagttgtaaaaatgagtaacagaagaagaaaaaagagagagagggaattcatagtagggtctcttaatggaacacccgtagtttcttgaatccgtttggttggaggaagaaaattgtatctgaatctggatttggagaaaatgaaaaggagaatcgggtggtgagattgtttgaaatgggtgagatcttgttagagatctaaaaagctgagtgtaaagaggttgtgatatatggagaaaagggaagcccggaggtcgaggtcggagttgggtgggcttacaccaccgacaccccgttgaagcttttgactatactaaaaaaaaattaaatcaacttcaattatatattaactctaattattatgtaaaaactaattatattgtatcattcttt

SEQ ID NO: 5907 - DNA, 1441 bp, Cannabis sativa
accaaaaatcatagttttctctatgaaaaataagaagaggtaaagaatagtggttggagtcaaaattcatggtctcaaattatgccaaacaatccaaacggagctctgataccagtaatgatttgagaattaatgtgtattagtttttgaataggtggatatgaaggaataattttttagtggtttttgtgataaagtagtgaaatagtaatgttgatgagtagttgttgatttagtatatgagaatagtttggcttagaaaaaagaattgtatgtaaaaagtagtaagcttttattgatagtttgtagcttttttttttttggtttggatgttggttacaatttagaacccatggctatttatatagtttctagcgttcaagcttttgtgctagaatatattgtttgctctcgatccttctagtttaaggaatttctccatacaattctacatatttcttaagcatatataataagaaaattctagattaaagtttttttagaaatgcatgtgtattttattgtattttttataagtttagaaaactctgaagtattctacaattatctaaaaaattagagtaagtttttctacaaatgtgtagaatattctagattaaattgagtactgtaaaaatatataacaatttgtaagatgatatataaatatgaatatcattaatatttatatagaaatgtgtaacaattttgatatatgaatattattattttattattcatatatttgaatataaataaaaatttgcctgctatttaaaaaaaagttggtccgctcttaagaattgaattgcgacttaaattcattgctgcaacgtccaatcttgattttatttttgttataattattgagcatcaaataaagatattcctaagacttattatatattcaaataaaccaacaaaaattacttggaaagtacttcaatattagtaaatgttagaaatctttatgaacaacattactccacaattgaaaaatgaaagaagcaagatggagcttgaggtgtttacagacatctcacatctcctttatctctcaaacacccacagaaacatcactatattttctcatacatgacacgacacatgataaaattacaagtataatctcttttaagaggaataatgaatctctaatgggggcaatatacataagaagaaaataagaaagattaaatttcttgcccaatgggctggcataaaaaccttaagatcttataatactttgtaatataaagttatctttatatgttaatgatgacaaagcatagcaacattgatttatgttaaataaaatattctaacattataatcaattcgaaacacctacaaatctcgttaacaacacttgtagaaggactctgcgggctactctaacaatgaaaattggtagaggtttttttttttttttttttttttt

SEQ ID NO: 5908 - DNA, 1601 bp, Cannabis sativa
tttcttcgttgtaaagggaaaattaattcatttattttatatttgaaaacaagaagagctagagggccccccacccctagtgatctcctccactcctcaaaatatattgtgatggccgggtagagaaaaaataatatgatatttccttcaaaaaaacttaatattaaatctagcaaatctttaaatattttcaatgcaatatatatatatatataattaatttatgcatgtttagacgtctaaatataacttgtagtcgtcgtcgataatctttcaccttcacctatatatagtatagacgagacgacccaattgcaataatattcttattaaattatcaaagtaagacgctagctatcctttaaaataatattttacagtaaaacttctatataatatcaatagtcttgtgaacaaattaattatattttaacaaaaatgttatagctaaatagagttattaataataaaaaaagtcctaacacaaaaaagtattgactttaacaattattaatctataacaataaaaaaaaaattaattactattaagaaacaaatataggggtgtgtataaattgatccaatctaatgagaatccaaacattagatatccaattgtgttcggatcggattggatgttatttttaaatatccaattgaatcatatcgaattggtggatagggtgtttaaaaattcaatacatctaacatccaatcaaattaattaatatttttatttagtttagataagtaattatattttacattatattgttgtacatctatatgtatatatgaaaattaacatttaaattttactcttttttcttggattggatggatccagtccaatctaatacatactgaacctaaaatattaaattgatccgatctgatccaaaaaatactaggtctaaaatattggctaaatttaaattaaactaataaatatatataaaatacatccaatagatagatccgattaaattcaacatctaatggatgttggatcgattagaataccgaaattaattggatcagatcggatggtaaatttaacatctaatatataattagatcggatctgaataaacttaaaaatattagatgtggtccaataaacacctctaaaaagaaatataactatatatgtacatttttttaatgaagaggtgtaggaaaaaaaaagatcctactttgggaacataattaaatgtaaatgaagactattagcaaagtaaaaactaaaatccaatggtgcatcattattaaatgcatcccatcacttattagccaattaataatttatttagttttactaattaattattgattgaggtgtgaggtgtgaaaaaaatttctcagctgtaatctcattcatatgacatgtgattcccccctccccaaaatgatatgatattattaattattctatgtgtttaaaaatgttattgttgtagtgcgaatatttttgtctaaacatactagaacattctcgagagaaatagacacgtggattcagtcctcaatggaaacgaatgtcgtgtcagtataatggctctcatagagctaacctcgcatgatttaacttgcgagaagat

SEQ ID NO: 5909 - DNA, 1289 bp, Cannabis sativa
acgtgagccacatgtgtgaggaatccggcaattggactttggggtttggctgatcggtggctgggcaatcctcttcagtggtcagtgagaataaacttgcactccaaatagggttccgaaaagaaccctaaactcaaatcctaatctctttttaaatatgaactctagttttttatttcgaatttcaaatcacaattctaagtatgactctgataccatgtagagaatagtaaattgtgttttgtatctcatagaataatatatatttatatacaaaactaggagactaaatgagaaactactaaatacaatttaccctaatttttacaattaatattctaatagtccctatttgttgggaccacttgtattcaagagccattagagctccgtataaatacctcactcttccattgaagagggagatgatcatattttgctatgagtttaaagattcaatacaacaccaattttctccattaatgttctgagtttctcttaagcttttgatcttcacccctttgcattttgttttgaaactaaagtttagttgacgagtttttaccgtcaacacgatctaatcaatttgcggtccgtgattttagacatcacgggaaccacatcagaaacaactagtagttttggatatgatttcgtctctaccataatctcataaacaaatatcgaaagagacaaggtagaatcgaataacaaaaaataagtaaagaacacccaaatacaaagtatggagaaataccaaactacaacctgagacagatgtgagtaggctaaaggggagctgaaaaagaaccgaagatgaatcgccgtcgaatccttcgtcacacgcgcctccacgtgccggcgcgtggggtagtttgctgaagaaacgagcagcgcgtgagccacacgcgtgaggaatccggcgatcggacttcggggtttggcagatcaacggctgggcaatccttttgtgtgggcggtgagaacaaaagatctctctaaatatggtttctaaaaaagaaccctaattgaaaaacccaaatttgtgataaactctaatttcaaattctcaatttcaaaatcttgctctgataccatgtaaaatatggtgattgaattgtctattgtatttcatagaatagtatatatttatatacaaaactagaagactaaaatagaaaactactaaacacaaatagaaaactattaaatgcaatttactctaatttttacaactagtatataactaatactctaacactatatatatgataaaaattatgaacaag

SEQ ID NO: 5910 - DNA, 1496 bp, Cannabis sativa
agctctaaatttaccttttttagcgacagctcgtatctattcctgagtgaatttttgtcgaaccttgcaaagctttttccaactaagagagaataagaagtattctcaaaagagatcattacccaactaataaactttgaaggaaagcagagagccttcaagagatcttcaataaacatccagttgactgtattataggcttttcgaagatcaattttaattgtgcaccttggagaaatgttcttcctactatagcatctcaagatctcttggagaataaggatactatgggctatggaacgaccttgaacaaatgctctttgattttcttgcactattttagggaggaccgtggaaagtcttgaacataaaaacttagagatgcacttgtacagagtattatagcactcaattggtcgataattggctgctgaagtaggacaatcaaccttaggaatcaaggtaatggcagtactatgaagctcctggaggatctgattagtgtcaaaaaaaatgaccaattgctgaacaaatttccttccccacctcaggccaaatatttttataaaaaccagacccaagtcgtcccaacttggagatttgttgctaggaatactgaataaagcttttttaatctccttttgtgtaaaaggtttcaaaagagcaagttgttggtcaagcgagagcactggacccatggctatgcaatctttattcacctttaaagaaggtgtgtctgagctccccatgacactttgaaagtgactaagaaaatgagtaactacttcagtaaaattatccaccactatgccatgagtatctgtaaaagtagcaatgcaattttcttctttcctcttttttaaacaagcatgaaaaaaggcggtgttatcatcacctttttgcacctagttgattttactcctctgcctcaaaaatttgtggtacattttttcctgagtttgaaagaaaacaacaatttttttctcctcttacaggtacttgatatctctttagttcgcctagacattgagttgcgactttttatactcatctttggcttactcatagatctccccaatatcatcaatgaaatgcctattaaaagctttcagtttatgtttaagtctcattgtctttagctaaattcctttaagacccttacaagccattgatttcctccaactatcggtaacagtgagcctaaactctagatgatcagactaaaaattaaagtacctaaaaggtttacctctatttttcagtgatactagaagccacaacacacatgtagtgatctgaagttgtctctcaagaaaaattagctactgattgcgggaagttgtcaatccaatcttcattatgaaaaacatgatctattctcgaatagatcctagcttgcccctcttgattgttagtccaagtataatttgatcccgtccttttcagcaatcccattaaagcttgggtgagccaattagtagaatcaaaaatctcag

SEQ ID NO: 5911 - DNA, 1025 bp, Cannabis sativa
ctttgtggatattgtaagtttgttcgtctaatatgtttaggagatcccttctctataattgttctcaaaatatgtttagatgtaattacttaattttacattgtgatctgaggtaattaagagatttcaattatattttgaaaataattacactatataattactaaaaatattttattttaaacactaactactaaaaatattatttttttccatttaaaaaaaatatattgtttttttgtataattattaccttatattcaaatacatcttattatttaaaatataatgtaattattacttttagtatacattacttagtaattttacacttatttctaaacacactcttaagtgatttttctttcttttctcttgaatgtatagcactaatgattatttttcaatgagatgttcattttcaaaaccgtcgagttcaacaaactcaacagtggatgaatccaccattaggtaggctaaaattgaatactgatacaacggttaatgcaaggacaaaaacttctgactttggtgtaatacttcgcaacagttgtggtgatacctttccaacattgttttaaaccggaaattatggaagcattaaccttgatgtatgatctataatggattaatgatctacatttaccaattcactacatagagtcaaactctttagtagttgtcaacggattgaagtcacatcaaactattgtctttgattttcattgtttgttatcaaacatttcacaattagtgtccgatttcccaaaagtacagatatctcatgttaatagatatgcggatactgttgcccataagctaattaagtatgctctttcgatggatgctcattacctcatagttgaaggaactttatgtctattgtattataactcttattttaatataatagcctttaatctaccaaaaaatgagatgttcttttatttttcttcaaaaatagaaaataattattcaattataaaaactggaccatataggataaataatacactaattttcct

SEQ ID NO: 5912 - DNA, 842 bp, Cannabis sativa
gcagattcagggagttcagaacaaggggattaggctcccaagaaaacttggggaagttcaaatctctttaactcattgtgtttatttcgggttggtacttgagattggagttaggattgtgatcccaacactttggttgttcctctgcccttgaagctgagtctcgggcctttcatcgggctgtgttatgtgttatgtacaaccattcttaactggactcattctttgggaaagtgtatctaccatgattctccatcctcaacattgtgatgttttcgttaaggaaaaaaaacaatcttaatgggttggagaggagattatatgtgacttagctttataagatggagattcttgtgttgttgttcttgatagataacaatgcttgatagattctgtgtatatatatatatctttgtatcataatagattaaaaatttgaaaaaatttacaaaaatatgcacagaaattttttatttataaaaatatttcttcagtatgaactgtttttttaattattttatagttgatttatagttgtcgtggggtttatttcatgtgattttttagttatttttttactttttgccgaacaaagtgtagttttataattttgaaattttacaagagtagttttgtaattaaaatttatagaccgtaaaattgtaaataaaatataaaaagaatggtatttttgaaaattcttctttaataaaaagttaaagggtaattctagcaccctccgaaaatggattcatccatacattttaatctgttttggtatttagaagaattttttattccaatttttttttcagtcatgtacgttataattatgtaacaca

SEQ ID NO: 5913 - DNA, 849 bp, Cannabis sativa
tgctgacgtgtacatacagttaatctatctaaagaggaagaaagagggaaaagggagcgaccaaccaactaacgtgtgattcatatgactattaataattaaataaataaaagaagaaaaggcccaaattcccaattggccaaaaaaaatccaatccctggtttgattgcaaagaaagaacctttttcattcattgattcgttcttgttcttcaatcctagggttttagttaaattagtttgctcaaatttgagattttgttagtttatcaaaaaaggttgtagaaatttgatttgcccaaattatcaattggccaaaaaaagaaaaaaaaatctaatccctggtttgatttcaaagaaagaacttttttttttctttcactcattgattcatctgtattgttcaatcctagggttttagttaaattagtttgttagttcaaatttcagattttgtcaatttattaaatttgatttgaagaagaagaaggaggatgatgatgatgaataatgaatggtcagaaagggagaagcagaaggaaatggaggatgatcggatgatcgcccaagttctcaccgaagaatatgctcacttggacggtgctctcgctagacgcctctccaatttggctcctcttcctgtaaattctttacttcttacttcttcaattcattcaatttcatcatcatctcattaatttttgtgtgttttcagcatgttcctcgcatcaattcgttcatccctaacttaagcgatgctactttggatcatcaccgtcttctccagaggttaaatgtttatggtttacgtgaagttaaggtctccggcgatggaaattgccaggtacta

SEQ ID NO: 5914 - DNA, 1573 bp, Cannabis sativa
ctctctctctctctctccttgtttcccatgcccaatcctttttgagagccttgaaatttcatattcatcaattcaattatttttttttcaatttttttctttcttcctttgctgagcttgtttcaaggattctagaactccccaaaaatccttgaattctttaattgagacctccaaaatacttccatgcaagaaattttaagttgaaaatttcttctcttgaaattaccttggattcgcctttccaaagccaaagagacttttcttgagttgtaagtaaccgaattttgaagtcactatgcctcgaatgaagagaagcagaagaattcttgatgaatatgatccccatgtgactcaattcattagagctaagctaattgtgcctaaatctaagaacttagacaaggcacgtggtgggaaagtgatgataactgaacttctcaaaattatcattgcgagtgatgacccaagaaatcaggctttcaagttgagacctcttgtgtttagcaccatctctgaacatcaagttcaactgatcaaagatgattatcttttcccagaaactgttgtcacgaaaccatgatctggatgtcccaatggttcttgatagcttggtcgaggttccatatgaatgtgggtgcttacttacctttgcacccatggtttatatcaattgcagctttctttggagtttttacctaccaaataaatctaaatggttatagaatcatgtcaaccttcttcattttttgctgcttgagaaattggtctgtcctaaatccccatgaaattaacttcttttgtgacttgaacagaaatctgactcaaaaagaggagggattctatcccttccatcaattcactccacgtatagaaaacatgactaaaagtaattgtggcctttaccatgaagaatactgttataccacagtccttccatcaagacatattaccttccaaaaggctagccctttcaaaagacctctccattgattggtatgaataggaaagtatataccatgcttattaaaattgatgcatgggaaagagatgggaggactttgtttaccattgaaaaacctctacaattttggccttataatgttttgtcgataagtttatgtggatactcgcttctctgatgactcttggacgatgccaatcgaacaagatgaagaggatggtcagagtgccactgtcatcttgtctaggacaatgtcaaaagatgagagttcagttcgaaatgacccagaatattcaaggagagtatttgtagttttagaccaggatgatgaagaagttacttctactcaaaatgttctagaaagagctagggaatcaacagattattaatgctccctattcagtagttataccttgttgtcttgctcttcttttattttactaactgcttgtcttttgttctttgtagacaacatgagtttcttggctcccatggcatcctatttgaacaggaagattccagtgccaaaggagaccgaacctttcatcagggaggttattcaaggtattcctaccgagtcttttgtgtaagaacaataccatggaacca

SEQ ID NO: 5915 - DNA, 828 bp, Cannabis sativa
ccagatagagcattggcgcttggatacttcttcaatttccaagagaatatcggcttccaggaggtcattttccggagaaggggttctagcttggacttcaagaagaagactatcaagtaacttcaatttgctctgacacattccaaagaactccctgttccacttcgctaactttctccgggtacacccaagcttagaggccagttggaaactcttgcaccccccccacagtgatattccaagcctctttcacaacctccttacacgaaggatcacgattccaagcttccaagtaacggaaaggcctcgagaaattttcacgcaccattaagagatctaaggagaccggggcatggtccgactcttttatggggagaaccttaacaccagccttcgggaaatccaagatccaatccgaactacaaatcactctgtcaaggcgctctttaatcagacaagaaaacttcctcctattggaccaagtaaaaaagtttcccaccgaaccaagatcaatcccaccagaaaccataagaaactcggtaaggtctaaatagtcaccctgagaattttccactcccccaaatttttccatgggattggctaaggcattgagatcccccataagcgcccaaggaatcacagacgaacccacagagatagccaactcctcccaaaaggcctttctatcaggtttataaggggggccataaacaaaaaaccccgtccacttaacacatcttagaatattagagaaattaaccgaaatgaaatattgttgagaattaattacctcaatctcaatacccgccttccaacataagcagaggc

SEQ ID NO: 5916 - DNA, 919 bp, Cannabis sativa
tcatcaccattgtttgattctttctttgataataatttcttgttattttgtggctgaaattcatggcaaaaggcaagccaaatctctcatccatttgagcaaagctttctcaaaacgaaaggctggagtggataccaaccttttcgctgttgatcaaagcaatgtagtcaatcatcatgatcttcatgatcatgatgatgacaagaaatttttgaaggagaatgatagaattggaagattgccggggcaaccgaatgtgaattttactcagtatggtggatatgtcacggtgaacaaaacagcaggtcgttcgctttattattattttgttgaagctcactataataaggattcattacctcttcttctttggctcaatggaggtaattacaaatactaattcttcttcttcaagagttattgtttaaaaaaatgaaaatgaatcttgaatctctattaatgggaaaattttgatgattatttttttttaattttatttatttatttttgtatttaagtcataattgtatgatatggttcttaattatttcttacgccatacaccttttcaatgtctttttctaataatttataatttcattttattaattattaattgattattctgtcttttttctgtatttgattaataatactatttcatagtaattaagctagtaatcacatttgcatgaaatatgaacccaataattttattttttctttcttaattcataatagtaattaaataataataaaataagttaaataaatttagaaagctgtacaatttgttttgtacccaagtttaggttggaattggttgttaaatcaacattaattgtagttttcatcacaagcaattaattaattaatttctatatggcatgtaatgaatgaattatatatccattttggc

SEQ ID NO: 5917 - DNA, 545 bp, Cannabis sativa
ctactaaagagaaaaagatcatcagcaaaataaagatgagttaactttagatctttgcatcaatgatagaacttaaaatcatctcttagagccacttctacaaacacttgagacaaataccccattccaatcccaaaaagtaaaggagaaattgggtccccttgtcctaaaacccttgaagtcatgaagagattcattaaacatgagagagaacttcatagtctgaacatagttcatcacgacaacagtaaatgagctaggaacattgaaggcattcaatatctcttcaataaaatctcactcaatcgtatcataagccttcttcatatccattttgatcatacaatagggttgatatattttccttccataatgcctcaaaagatcttggcacaccattatattgtgaactaaacatcttgatttgactattgctacttggaagaacaactctcaaccgattacaaattatttttgtagccacattataaaccacattgcaacaaacaataagaatcaactactatattaggacaactacactt

SEQ ID NO: 5918 - DNA, 1691 bp, Cannabis sativa
agagtttttgattatattataggttgaagaacaaactttaatttttttttctgtatatattgaaaaatattaaatgtatgcagttgttcattagtagagaagtcctgaagtacttcatatgcatcaagaattatagatatataatcatttgatatagaaattaagatcatacaacaaaatggaacaaatatatggtcttggagtaccatcattctcgcaaatgaaagtttatattatcattaatgtcttaagttcacatctacttgaagtttcaaacttttgtatgaacaacattgtatatatgcatgcatgaataattaaataagcaggataaatattcatgttccatgaacccctcatccataatttagaagtccacacatactctggaagagttatagaaaatatattatcatagataatatacggtgatattttaaaagtgataacaataatcttatgagatatattatcaccaaaataattatgaatcatacgtgtattaggggacaacatattcgtgttgcactctttttcccttagctcgggttttgtcccacgtacagaatttttctggcaaggttttgaacaaggcaacatgcaaataattataattataaaatatatattgcaccttttttttttctttagctcaggttttgtcccactgaattttcttgacaagagttttaacgatacaactttaaattatgttaacatacttgcgctttatgaagcaagtagagaatctgtgagagtgagatcattgacataacatattcgggaaacatatggattacactcaataaaaaagtatcaacacaaacaatactctatgaagataatactacttgcattgctcaactaaaaggagggtacattgaaggagatagaattaaaacacatttcacaaaattctttcttatacatttcaagaaaatggatattggtattcaaaaaattcaatcaagtgtcaatcttacaatcttatttgcaaaggcatcaccaacatcaacatttgataacatggttcacaagattagaattcgtcgattagaaaatctcagcaaatgcttaaatgaggggtagttaattcataatgcactctttttcttttaaccaagtttttcaatagagtttttaatgagtcagttattattgacatttaaaagggattgttataaaatattatatatagatgtccaaattacctttaatgcttgattatatttccttttattatattaatttagtatctcatttttttagttatatttttttataaatagaagttcacccttgaaataaagaagtgagaaatactcaattcagtttctctaattctctcttcttcttcttttctttttatatattttatgttattttataacaacaaacaatttattgcaataattaacatagttgtttctataatatttttcacacttacaaattttatttttttcttataataatatatattgaaaatctttcaatacatatacaatgatcttatatctatgaataatgctagatactcatttaaattgcacatccttattacacatagtaatatataataaatattaagcatttaattataccgttcaaattaattacacatgagtatgtgtaaaaaatgtgtataatcgagtgcgttcaaatcattttttaaattcctatatatagta

SEQ ID NO: 5919 - DNA, 618 bp, Cannabis sativa
gtgaaattcatttacactttaaacacattaccaaggaaattatgcagagaaaacaaggacaaattttttatacatataaaatataaaatacaaactaaaactcatatactcaattatgactcaagtgtctctttcatcacttttacctcagatctctacatatctcatgacctttactacttacattacatttatcttctcacaaactcatcaaataactaatgccgtcatatatttacgcaacatataactttgtcaactaaacttctcttttgcacaaactagcaattatcaaaatcatttgaaattgtttggtaatccgaacaataaccgctctggctgtcaaatgattgtatttaacatagaccaatttacacataaaggtatctagggttagtttggtacttataataaattagtaaactactatatttggagtataagttgtattgtgttaaacattacgatacttaattttaatacaacccacaacgtattatggaatacataagaaaataattgtatgagcctgtattgtaatatttatgagcttaggttgtattgtggtaaagtcagagttggggtttggggtcaacgtcgaactcgaggttggggttc

SEQ ID NO: 5920 - DNA, 2824 bp, Cannabis sativa
ataactcccgctctggctccctatatattgaggccccatcaacatataccttccaggtagttagcttcaggactgattcatctagggtatcaactaacttggagcattccactacaaatttggctagagcttttcctttgattgacactcacggttgatattgaatatcaaattgactaagttccattgcccattttaacaacctatcggaagctttcagctttcgaagcacttggtagagaaggtaatttgtcaacacttttatggtgtgagcttgaaagtaaggtctaagattttgtgaggtgattaaggaaaaggtcattttttcaatcaatgaatatctagattctgtacctagcaatcttttgctgatgtagtacaccggtagctatacttttccttcttctcgcactagggcgacacttatagcgtgtttagacactaccaagtatagatacaaatcttcccctttcattactattaaaaaataaggcccttagtcaaattctcctttagtttttagaaggcctcctcacattcttcggtctattcacatttcttctttcctcgcatcacgttgaaacataagatgtacttgtctgtcgatttcgagatgaacctactgtgagacgccatccttttagtgacactctgcacctacttatgcttttggggagaaggcatgtcgatgaaagcttggattctctctgggtttgcttcaattcctcaagaactgacaatgaagcctagaaatttcccaaaggagacaccgaatgtacatttcttgggattgagtttcatcccgtaccttcagagaaccaaaaaggcttctttgaggtttatacagtgttccccaatagtttttgattttaccaacatgtcatcgacgtacacctccatgttcctcccaaactaattcttgaacattttactgaccattctcttgtaagtagctcctatgtttttcaaactgaatgtcatcaccttgtagcattatacacatttatccatttggaagctagtgtgttcttcattagcaacgtgcatcttaatttcattgtatccagtataaacatccattaagctaagcatctggtaaccaaacgtggcttcaaccatttggtcgatctacgggaaacggaaatagtctttgggacacaacttgttgaggtcaatgaagttaatgcacattctccatgtattgttgggcttagggaccagaattaggtttgccaaccacatgggatacagagcttctcggaggaagtcatttatggtcaacttatccacttctacttttaaagaacctgctctcactgggtccaatactcttcacatttggtgaactgacattgcatccttattgatgttcaaggcatggaaaattgtgttgcgatcaatccctgtcacatcaaaatggctccactctaacacatcttgatttctcttgacagtatctatgatgcttgctttcactgctaaaggcaggtttcttcctaccttaatggttttggtggggtctttattgcagatgttaacttcttccacatcctccgtaggctcgagcgctctttctgtacccacatggggatctaactcatcctcaaaggcccctagataggttcaacttttgcctgagttccaatcccaagagcaattggtgtctcctcccagaccatgaatattgtctgcttagagacattgtaacaatttttttacgctcctttggtcacctctaattgttccaattgaagtcaccactcccaaatccactaagacatggcgtcttagtattgcattgtacactatggggcaatccactaccttaaatgtataatacttgtaagcacttgcattgttccctattagcatttgggcatccccattaaagccatatagttggataggacaaggtgacaagtctgattagtgagtccaatcgctaaaaaggcatgtttagacagattgttcactaagcttctattacccaccaggacattaggcaccctctgttaaccaccaaggggtcatgatgaggaaaatgcacatgtctagcatcctcctctatgaaagtgattggtgggtttgttatctgagaatgttgggtgggtgtttgtgccagcacacatgttctcctttcatgcctaattctctcaaatgtctcctctaaaattttttgggacttcctgcaaggtgcagtacacctgagattgtcgctacattcccatcaaccggtggtggtgccaacccttggggatatgtagatctcgaagccatcaaagccatcgtagtcggagctagtggagtagggagtgccagaggatttgttctgggaacttgagggtgacttattccatgagaaggatttgcaataccttgctatccaaaaacaatcacatattcatgaatgaccccctatctaatatatatgatgggaacctagacccattgccccaaatgccccactcttatcaatgtttcgatttcatcatttaggaagtcacattcattcattgtatgtcccacgtcccgttgtattcacaacacctttttgggtctctggaatttttctccttgaggcattctagtgggctacctataatgaaccatgttacatgttgccttatatacatttccatgagtgtccacaagactaaagtacctgatgtactgtgtatcgtactctttcttagatttctttaaggcttcttctcgtcctagacctcttccccctcttttgctcagggagtttctcacttcttgctctgttaccccacttttgattatctaggtgccacactacatccaatttacactgctcctg

SEQ ID NO: 5921 - DNA, 1118 bp, Cannabis sativa
  modified_base (982)..(986): a, c, t, g, unknown or other
acaaaagtcttagaccgaaaaatatatattattttttttcgtgttgttaatataccaaactatgtaagctttcatacctaagtacttttttcgggcaataatttcatgtaacctaactaagctatatatttataacatcaacaaacaactagtatttgttgtttagtctttttttttatatatattattttttagtaaataatttcttctactttatattattagcactttaaaatatttaatgttaattatactaatatggtacttaataagggaaatttacatggtataataacttttgtcatttttttacaaaaatactgctaggcgatattttttatttttttactgtgtttttttataagtttcatattgcagtatattgtgttaaatttttattggtgttttactggtgttttttagttgttctactgttgttttgagttgttttgttttgtgttttactagtgttttataaaaccacagtatttttaaaaactttttcatgtgacagtatttttgtaaaagttaacccaaatttcaatatttttgtaagtttccccttaataactagttagtaatacttatgaatgatcttcgtacaatttttttataaatagttttttgtactattattgttatgtggcactttaaaatactcaataccatacttattcacatacacaataattagttaataattttctaaatcatattaaattaaaatttgtgggaactgatattgaactgtaccacactacaaaatattgttacttttaatgacaactctttggtcacaacataaattttttttttgactaaatatgacttttagtcacaacaaaaaattacttgtgactaaaacatagtattgtaattaaaaatacatttagtcacaacaaattaattgcaatttttgtgactaatacctttagccacagactttttagtcacaatataatataggaataataatttatannnnntcacaatttttttacttttaatcataaattttgttgtgactaaaagtaagattttggtagtgccaataacaatattatcttttgtggtgctttgcaccgtgtcccatataacattttcgttattaatatgta

SEQ ID NO: 5922 - DNA, 1053 bp, Cannabis sativa
cccagggcttttatcggggctcatggactgtaatgctgcaaaaacttcagcactcgagaaaggttcaacaagcgactgattcatctgcgtggttattgttgtagggatggcatttaatacatgttcaagagagtctgaatgtaccccttcagtagcaaataaacttgaataataagaacaaataacctcagtcaaatcatctttactacttacagccacaccaagattatttttaagcgacttgatggagttcttggcctttcttgaagaagcatgagcatgaaaaaatttggtattttgatctccacattgtaaccagtccactcttgacctttgatgccaatactcctcctccttagctaaaagttcatcaagaatttcctcagatttttgaagttgattcacaccagcaggtgtgcgaacagcagcattattcaagttagcaaccgatttctgcatcatagaaatatcctttctcatcttaccaaatttatgtgagtgccattgctgaagtgcatcagtacaggaagcaagattttgttgaaaatgatcaatatcacaatgaatgtccactgtccagttatcacgaataataacagctgcttcctcttccttaagccatattttttcaaaacgaaaccttgactttttggcagatttttcattgatagagttaacagccaagacatctacagcgatagctctatggtccgaagaaaaaaagtccaaatgagcagtagataaacattgaaagctattgttccaggaatcattggtgaagcaccaatccaatcgttccttgatggtatccactttatgacgacccttaatccaggtgaaaggatctccagtaaatggtaattcatgtaaatggcaatggtctaacacttcacgaaactcctccatttgttgttcacatcgcagatttcccccttgcttattatgattataaagaatttcattaaagtctccaataaccaaccaaggaagcaaaggagccacatctttaagccttttaaggagagtccatgtatgtatgcgattttgagtagc

SEQ ID NO: 5923 - DNA, 2671 bp, Cannabis sativa
gtggattggaacttccttgaagaaatacttgctgcctttcactttcctcaaaagattattgagcttatcatggtatgtgtcaaaactctaaaattctccttactaattaatggtgaactgtatggattctttgaatccaaaaggggtttgagacagggagacccgatgtctcctctcttatttgttcttggcatggaatacatgtctagaatcatgagagttgtgaccactcgcccaggatttaagcatcatgacaggtgtactccattaaagcttaatcatttgtgctttgctgatgacttattacttttttgccatggtaattatgtctccatactcttaatgctacaagggttaaagattttctcctccacgtctggtttagttccaaatgaagagaaaacagcagtgttctgtagtggaatgaaagatgatgaagtaaagagagtactagaagtatcagggtacataagggccagtcttccttttagataccttggtattccaattttttctaagaaaatctcttcagccgactgtaaaggtatccttgagaagatggtcgcgcgtattaaagtatggagctcgaggaacttatcctatatgggaagaataacactcatcaactcggtgttaattgctattcactcatattgggctcaaatcacaatcttgcccaagaaactgctgagggatgtggagagcatttgtagagcatttctttggaaaggcatgacaatcaattcagggcatgcattagtagcatagcagcaggtgtgctcaccaaagaaagcatggggctaggctttcgaaatatacatgaatggaatactgcagcaatgaggaaatatgtttgggcaattgccaccaaaaagacaatttatttgtcaaatggatcaatgaagtatacttgatggggaggaagtggtgtgagtaccagccaccaactaattgcagctggtactggaagaggatagtagcagtaaagaacaccctcacagctaagattgatcaacaagctttttcggtattgaggtatgacatcaaaactagtattgatttattgtttaccaaaccagtggatgtgaactggagtaaaatagtttggaataggccaactataccaaaacatagggtgattatatggctgatattgctgcaaaagctcagaataaaaaagcaaatacaaaagtttaatccattggtggataagagttgtttattatgtagcaatggctccgaaacattggaacatctcttctttaattttcattacagcaacatgtgtgtacaaggcattaaagaatggctagaatggaaaacaaaggtttctgcagaagattatataagtgaataaaatatgatatcattaaaatttaaattttatattaattatatgttgtaataatttttaattaaataggaggaactgattaaggagcttgataggaaatggctcaaaagacaatcccaaagcgataaatctagtactgaatctgatgttggttatcagttcgacgtacttggaaaagttcttggcgaaagatctaacaatcaaagaggcgtgggttataaggtcaaaggcaaagaaaaaaaaatcatcaagtcaaagtcagtcgtcggcgcctccttcgcccccaaatgaaatgtttaatactgtggctaaaatgttcacaactatacgtgacacattagggagtagcctgacccctgaacaatgtgctaatttatataatctacagtttgagaactttattcaaatgtacaatcaatcgcagttgcctagtggttcatcttcttagagttatgccgctcctccacaacatcaacaacaacctactttgcagcaacaatttcggccttcttcgtggcatcaattctagaatttttcgcagcaacaacaccagtctttttctcaacaacaacaatagtctagtccgcaattggaaaatcagttcttatatagaaccccatcgaagtctcctccgcttggctcaaattttgctgattttggaatatttgggagttcatcgcaggagcaacaattttttttgactcctattcccaaacaagcttagctagggaacctaacacttggtttatcgtcagatcaaccatatgttacttctccgccacagccatcgggacctcggaatgataataatacagatcaagagactttgtaattcgagaccttaatgaagattttatggaataattagtttatgttttttagtaatttagtttaattttgagacattttaatagtattaatgttgaacattgttgtgtagtttaatttgaaataattttaaattattaataaatattgttggagttaaatcataatatttgtaattggtttaattatatttatatatttataaataattatttatatattatcattattttatatatttattaatttattttttttatttttaaaatttattagcagcaggtattaacaatggggtcccgccgctaatgcccgctgctaataatattattaacggcggagcttaattgcgctgctaataactattattagcggctatttaataacgacatattattaatggagaattacctccgctaatagcctatagcggtcaaattagggtttattaatggcataatccatcgctaattaagttaaatattgtag

SEQ ID NO: 5924 - DNA, 749 bp, Cannabis sativa
aaaaaaaagataatttatttgataaaattttaattatataaaatatataaagtttattttggacaataaaacactaaacctattacaatcatccaatctagtttgagagtctcatatttttgctaatatatacataaaaaataataataaagtatataaattcatgaccaattggttttaaaattgatcctcatgcatcttacaattctaatataatatcaaaaagtagagccaacacttaatgatttaggagatagtgagctagaaaagagccaccaaaagtccaaattcgatccaaaaaaatatagccaaaaagagccatttgtgattcgggagatagtaaactaaaaaagaaccgcttgtgatcgagctgtcgaagaaagtagataaaaaataactaatattttaaggaagaatgttagaaaattacacattactaatgtatagaaagataataaaatatataaaaattcataaaccactgctctcgtaactaattaattttaaaataaaaccctctatcttacaattctaacaaaatctaataccgtaattagtttgattaaatctcttgtgcttgacaaactaagtaatcatcaattacaaaaatatattagataatttttatatgcttggccaactaaatgtgctttggaatttgtttattatagttttgtttagtgcaattcctagagccgtacgaagcctattatttttgcttaaataaatggcgatttctttctttcttt

SEQ ID NO: 5925 - DNA, 2460 bp, Cannabis sativa
ccttttcttatcaacgccaaacgcctttacagtttacaccaacaaaaagatgaagggtatttcagtaaattcattaacctcccatttaatgagagtttagttttcggggtcatttcagtttctctcttctctgccttgaaactatttaccctcctctcctccactgtttccgtctcgttaaaagcttcataaaatggcccctcaaaccaggagaacgacgtcgtttccgcgtgtgatcattgataatgatacagactctgaacatagttcgtccgaagaagaggaagaagagcaagtagaggaagaagaggatgttgccgtgaggaataatggaatggaacccgaacagtctttggaccccaagaacaaaggaaaagcacccatctgtattagtctcaagaaagtttgcaaagtaaccttttttacactttccctgtactatttttctcgttcacttcttaaaattattattattaatttatttatttctatttttgcgttttttggggttcaaattgactaggtatgcaaaaaggcgggacatgaagcggggttcaaaggagctacttacattgattgtccgatgaaaccatgcttcctctgtaaaatgcctggtaatcatggaaatgactgacttaatagtttgtttttttttcttaatgagattatcagaaatgatttgaattttgtgttatggtggattttggagtgaaggtcacactacaatgtcatgcccacatcgaattgcaaccgagtttggggtcatccctgcatcccataaatgtagcagtaaccaattgttctatgtctttgagcgccagcttggacatacgcgatcccaggtatggatcatcatttgtttttaacgaaggaactttaaagtgttgtgtaatatatgtatccatacatacggttacttctgtctaaataaggcgacatatttatgtttcagtttcggttttgaacttgtttccctgtgagttgtattaagtgccgtgcaatctttactagatgaaaataagttgaggcaagtcatgttcttgccttctccaaattgagaactggaactgggaattatatttttaagtagagcatttttctgtctgattatttggtcatttggaagttaaggatttgagttttttcaactaacatagtgatggcctaactttcttggcattttaggtcttattatttttgcaagtgagatgtgtattgaatatatatatattatataaatggaggttgctgttgtagatagactcgcataagtatacacaatgagagaaagagagagggagagaggaaagaaaaaatattgatacaaggtctcaaaataatattgtcaccattctttctctacaatggaaaataaacactttgttctaatctatacaaatgttcttatctagaactctatgaaatcgtcacgcttttcttattatgatttattggggcaaccattgcaggttagttaatttcggtggtttatttgttcatcttttttaatttgttgtttgttatattttgcttcatgataggtcaaaccagtgcgcatcattccagatcaagtttgctgtgcagttattagataccacagtagacgagtgacaaccttggaatttcacccaacaaataataacatccttttatctggtgataaggtttgtgcaacctgaaattcactacttgagtactttgtttgggcttttgtgtgtttttttatgttttttgatgagttgtttgggcttttgttaatcattagtagttgacacttttctctctttttggtttacacctattgctacacaaaaaagaaaggacaagttggagtgtgggattttggtaaagtatatgagaagattgtatatggaaacatacactcgtgtattgtcaataacatgaggttagttatctctttattgtgccatagcattgttgtatttgtctgtttttcatcactctgtatatgttttactttgtgcttctccttccctttatccgattttttttttctttttataaactttgtagatttagtccagcaaatgatggtacggtttatgcggcatcatcagatggaaccattagctgcactgacttggagactgggatttcattatcccttctgaaccttaaccctgatggttggcaggtattgattcactttctctttctttatgtttcaaaatgatcattatgcaaattttattcaatagtttacgttcatagctaaggggtctatttctcatttgttttaaatggtgagcttagatatacaattaatgtacattttttgcaatggaattcgttactctttattttataattttttaattcttgtgtttgcctttagggcccaaacagctggaggatgttgtatggcatggatcttaacaaagagagaaatgctgtgctagttgctgataactttggttatctctactcgtaagtattcat

SEQ ID NO: 5926 - DNA, 958 bp, Cannabis sativa
ttctccagtaagaacccctttgaaggaagatggcccgtcatctaaggtttaatcgctggggaagagggcgccctcctaagaaaaacctcttatcaacatattaataaaggtgtggtcaaacagaacgcagtttgtcctttttggcgccccaaaaccaagaatggtgatgaattgcaacaatagcttggtatttcctcttctagacttgtccctgatgagcctctataagcaatgataaagcctccaacctgtatacttgatttagacgaaatttaaaaccccatcttggcggataaaggatataaggcgttggtaatgactaaccctatcaagaatgttttgccttcaatgacaattgggcatgccccctctaaacccaaagactagtttcttaactttactattacgactttggtgggccccgatgttaataaggttaataaagcctcaattgagacccatgtttctaccagactctcaaggggccaagaagcgtatttagaagaattaaaaggcctctttgaggtgggcctaaccactgttagggatactcctagtgagatgggtgttaagcacacatttgaagtaaatgaacgcaccacccatttcaagaaaagaaatttggttgcttgttttttattctagtcccaaacttggtaagttgagtcgtattgaagctataaactacaacttaaagaaaaaaaaaggtgggcgctccctttgagtttaagcttaaagggaaaaatttggccttggattgtgatcactgctcacggatcatgaatcatcccaaccgttcccctctaccttccttcatccctcttggcttggagttagaactgaacgcttactctattgatgatgaggttgtggaaggcccctctcaaaggaaaagaactaatttgcaccaaatattatctaaatggaaagcccaatccaggttagttctagtcataac

SEQ ID NO: 5927 - DNA, 1654 bp, Cannabis sativa
tattccttttaaggagattcaatataaaaacaccatatattagagcattaatagacactaaaataaaaattaaagagtggtaaaagacacaaatagtataattcaacactatcataaatataatattaatattaatgtaattaaataatgactatgaaactcaaagatattttttctaaaggtaacatttcgttagaaggaattaaaatataaaaacagtattgagaatgaaaaatataaaaataagaatagaataaaataaaatttataatgcataaaaaaaattgataaaaaaattattaaattttttctcatgttacattagaatgattttcaaaatagaatagtcaatctactaaaatggtagaaaaattattttattatagtgatattttaatactttaaaatgtaactaaacaaataaaataaaaattattttttttttctattctattttatattattatctccaaccaaacactacctaaattgattggctaaacgacactaaattccttaatgaatttttggtccccaacagtttggttggtatttggtagcatcattaattattattatttttgttttttctagaatgaaagaaggaaaaaaaacaaatttactacttataatttttgctgaaaactttattataatttttttttttaaaaaaaaaaacaccaataagtattagttactcaagtctcatatagctattggtagattatttttttttttctaacataaacttcatcaatattatatataaggcatatagtcaagaaaataaatgaaaaaaaaaatactaaataactagataaacccaaccactaaacatgtggtgactcaaatgagaaggttagttgtgcaagtggatgaacattagtactatgaacccacttacaataaaataatgtaataaaagaaaacaaatttcacacacgaaaaatatcacgaagtacaataccaaactaagaaaaacatgttctttaccatccatactttgcacaagacgaagacaatttgaaaatatatcttcacatgacaatagcccatttaaaaataaagttggagactatggagtaaagcagtcgcttcaaaaacaatgggttcaaaataggcaaccaatggagtagtcgttgagaacaaaacgaatccgacattatcagacaacacaaccccaagtttcaccgctcccacttctatttgaacactagcatccacgaacagataaaattgccctagctgtaatactatccccgaagatacaatagccaatatcaaatcactaataaaatccataaaattaaatttcttgataccgcataaaataatttaaaacttaaaatcttatcaattcatatataatttaatttaatcactatcataaaatatcattatttatttgttaaaaaaaaacaccatatctccgtcacatatatctccgtctggccatggtcaacaagggagatacattgagcattggactagaccaattgatccttacatcaaagttgatgttgatggtgccattttttcgaatgaggagtgctttgggtttggcatggtggctaggactgcttcaggaagtgtaatcgaagctgtccagattcagaaaattggaaattgaagtcctttacttgtggaggctatg

SEQ ID NO: 5928 - DNA, 798 bp, Cannabis sativa
gggcacaagcaacagagataactccactgtttcctaaattcctactattagaaatgattactcaactatcctaaactatgaaatattactaatatgtagagaatttattataaatttataatagaggacaaataattaaatccaaaatattggcattatagatgatttcaaaatgcaattaaatccttaaagacttaattttcttagtaagagagtggcattcaaattcaaaagacaatggaagaactcaagtaattttaccagctacaccaaagtatgtgtggtaaacatcaactgcatcatctggtctatctgaaattcctccattttcaacgtcctgagattacaaaagtcaaccaaaaatctcgaaggtgatctggaagataagagtacttcgcttagttataagtttacctggcagtccaagatgaacttcacaagtttttccttattgatccaatgtactctgtcaatcatgatcaggctagaaagaacccaccacgaatagcagacctggttaagaaaaacgaattcaatagcagattagctcaaatgattcaagattagtggagaggtccaagaagcagggctctgaatatatcttattaaaaagataaacatgccatttctttttaaataagaattctacatacatctggaagtttctctggacgcccattaagacctccagatttgacttgccgctcacacaaccaccacccaagaaggtctttatcgatatgatgcagagaccccgtaatagcaagagctcccacacaacagaaaactgcagtgatg

SEQ ID NO: 5929 - DNA, 518 bp, Cannabis sativa
atatatatatatttctcatcatcatccttgccttttcgccgctgttgcagagagtagagagctagagagagaaaaacccaaacccaaacacacacacaaaacactttctctctctaaaaagcttcgaaagaaagaagacgaaagaaagaatactccttccttatatatatatataaatagatacagaagaaagagagagaaagagaaagatttgttgtatggattttggatttcatttttctcaatacccattttggttatgaagaaaaagattcaatttgagtttattatctgttaattaatcttaatcattctctccagtttctttccaccattgttaatatctctcttgcgtttttcggttgggggaattttttttcttctgatccgacggctcaggatctcctggtcctggtccctcccaatcgtacgctcaggactccttttgtcagtgtctctctctctctctctccctatcattccatcttttacgtaagtaatcttttatgtatatatat

SEQ ID NO: 5930 - DNA, 1913 bp, Cannabis sativa
ttgactcaacaaagtgggctacttcgttgccgtaaacgatggctagatcttgtccaatcattatttaagaaaattgtgcaaggaatcatgactatggaggcaacacctataattttcaaattacatacatcatcttaaaatatatatatatatatatatatttttattttcatcttatccacataaaatttgtcatattttcttaaaaaaaaaaaaaagcattgttattggacaccagtggtatccagtacaatctataagtagtgtcccatcattagtgagtgatattccctaaaagttattttattaagttatatataacctgacacttaattacatcaataatggtatgacaccgagaatgatactaagcaccagtacttctctttagcaattctctaaaaaaaaaaatactccaatagtttttttttgaatagataatactctagtagttaacaactcttaaagttttttaccatggtcccatatcacattgaattaatgattttttaggtaaaaaataacttttttctaataaaaaaaattaaaagtcttgtggtcattatctatattaagcaatactttacataaaattagtcttgaaaagtagagattaagaaccgatctcttacctcttagcgtaaaataagactctttaccactacaccaaataatatttaatatatattcttattatttaatattttatttatataataataataatatttttttcacaattttaggactctaagcattcgggagccaaggcgcatgcctggcttgcttaccctcaggaccggccctgtaagcggattatgactcacatttcgattacatgagggaattgtgattcagtggataactctttagtacgcaataacatggattgttctgttaacgacaactagagtcagcttaaacataaggcaacttaggcaatcgtctaagggctcacaaaatttaaggcatacattttaagggtagtatacatttttcttgtaatgatacgggtgatacatatacactaaaaaatatatttcatagattattaggaaaaaaaacttcatttaattaatttcaatatcaatattcactactaaatatcaacattacaatttgattaattttaatctaaaattttaaaactattaattaataattaataatgtcataaataaattttcttatacataaataaatttaaataatattataatagtttctaataattatacctattttattttgattatttttatgatgttgatttattttttgtaaaagatttttataaatgaattaaaattcattcatgaaaaaaaaaacaattaacatgtgaagaataatataaaattaatataaaaattaaaaatcttaataataagaatttaaaattaaatgtctgaaaataaaattgcaataaatctccataaaattaataatattgttaaaaatgtctaatttaattttcgcgtaaagtcttgttcaagcttaagacgacaatagcattggcattatttgcagtggagatcacatttgtgatggtgatatcgttgttactgtcattttccaagttgtaattcaaagaggctggtaagaatactatttaagcgatccaatgcagtcttcacggctcaattcgtggtcggttcccattcaatcttttggcttaataatatatatgatgttaacgttgatccctgcatgtaatcatgtttcttacattaatgagcttgtgtcttttttaatttagggcatcacgtaacaattgaattgacaagtttattatatggtcaaatttggatgaacatttatttatatatagctacgttttagttgaattaaattttgagaaaaaagataatattttgtgatagtgttccctggtgtgtaaagtgtaatcttgcatg

SEQ ID NO: 5931 - DNA, 837 bp, Cannabis sativa
gtagcaacatttggctgaaccccatgttcaagcatcattctcaaccacttacctcctaacccaacacgcccaagtttacaacaaccataaataagtgtattgaaaatttgataatcatcacaacccaaatcatttttcaattccaaaatcattttttcagctgtatcccaatcttctcttctacccaaaaccctaaaaaccaaattataagcacttacattaccatctaacttcccattaattctcatccactcaaagaatctcaaagttttgctatcattacacccctctagccttctcaaaacagcattacactgctctaagctcatatcagacttaataacagagtaattaacatctatttcaccatcattaacaaacaaattctctagttccctttcccacctattccttctcacaccaacttttgaacccatctcccttttactctctttcttattagcaccactgtaattggatttttgctcaacaatgctctccttaactaaatcactgtgcaaatattctttagacttaatgttaatgaccctattcagagaactgagtgtataagctctaccaacatgaaaattgcttgaggttagagaggaattcaactttttggaatcaaatccatccaaagaaactgaaaatctaagagaacccatcacttaataaagcaatatcaatggaagagtgaaaagtactaaccaattaaagagagagagatgggtctgagtgtgagtttgagtttgagtgaggtgggttgggtgtagcttttgaggatttggggtaagataatggaagttggaagaagtggacgaaagtaacggctct

SEQ ID NO: 5932 - DNA, 1302 bp, Cannabis sativa
aacaacgtgatctcccagcaagataagagaggggggcttccttatcctcgtgctctgcttcaaggatttcagcaagctttgtgtgattgcgatttgaccgatatggaactcttgggctatccctttacttgggaacggggcagaggcaccacgaattgggttgaaattcggcttgaccgtgctctcatctcagcagactggtttcgtatttttcctcaagctaagttaagtaatctcgagacttctccttctgatcactctcctatatttcttgttcctgaaagtgtttcttctcacattctatttcgcaaattccgttttgaaaatgcgtggctcaaagagcccttctgctatgaattagttcgtgacagttgggatgcttcgccaggtgcgcctattgacaagaagctcctgttatgtgctgagaggctttcggattgggggaagaacatcactggaaacttcaagctgagaattaagaggtgtaaacaagaacttgctgatctcagaggtagaagagatcccatttcagtgcaacgttttggggaagtgaaattgaagctctcacagattttggatcaacgtgagaccttttggaagcaaagagccaaacaattttggctcaaggagggagataggaatagcaaatatttccacatggcagcaactactagaaaggggaataacaacattgagaagctcaagaatgatagtggaagttgggttcattgggataacggtttatctcatcttatagaagattattactccaatttgttcactagttctggtacttcttgtgtggaagtggttgatggaattaatggtactatttcagatatgattaatcaagatcttacctcgccggtctcggaagaggaggttcgtaaggctctttttcagatgcatccttcgaagagcccggggccagatggtatgaccccgggattttatcagaaatgttggaacatagtgcgtttggacgtcgttcgggtggtccaaacttacttccaaactggtagttttgaggggaatttaagtagtgcaaatgttgttttaattcccaaaaagaagaaccccgaacacgttacagacctgaggccgattgcattgtgcaatgtcctatacaaaatcatcaccaaggttatggctaatcgtatgaaaccttggatggataaggttgtgtcggctacccagagcgctttcattccgggtcgtctgatctcggataacattcttgtctcatttgaagtgctgcattatctcaaaaggaagaaacaaggcaaggaaggttacatggcg

SEQ ID NO: 5933 - DNA, 1278 bp, Cannabis sativa
gtgttgaaaaatagatgaatcatatggaattatattctacttggaagcaattgatggaattgctctattgtaaagattgtacaaacctattaaaggtagtaagaagtcgtctaagttagatgataaggaatgagacaaacggaaggatagcttctactccctccaagctcatctgaccaacgagactcctgtcctgtttaactttcaaaataatgccaaggactgtcatcattgatttttattcgcctatggcttcaagcccttcgaacgtcttgatctcttaatcaagtggacctgaattcctccactgctctggaaagctccaaccaagttcttcttgaaccatgtcgtcgtttttgtgactctttccaaggaggagcttaatgtaggagacttggtcacaaccgccaactaccaaaggaccggacttatttaaggccaccaatcagttaaggacactaatttgtaaaaactgacgtgtccgaatgcttggaacaaggaggtcgagaggaagctttgagtggaatacatccaagaggcaaaaaccaagtatcaagcctactagaggaggaaggagcaagaggatctcttagcctatgcctgaagtgcactagatagaaagatgcagaagaaggcagacaagatgtcagtggttccaaggccatcattttctttcccgatccctaactctggtacttttggagctattacctcgagttcccgtaagtccaatctatcctttcattatgttccttttgtcaggaattatgctcgttctccaccagtaggctttgataggagattatttagagtacgaatgcctcactcctagtggggttatagggacaaagagtgatacttttctaatattggtgatttcctatgtaggtcccgaatggggtctgattctccaattttaatctttctggaccattcttgctaccttacttcgagttggtttctcccttcaaatagttttttaggagatgatgacaccaacaatattatttatgagtttgctagggaagaattaggtcgtctaggtaggattagttctttttgcatgtctttatctttgtgaatttttgtaagtgtcccttatgtttcttccatttttgtctgcagctaagccaatggatgctatcttcgcctccttcgatgcactaagccccgcagaaggcgatactattccacctactaactttttaagggttataatgactcccgaaggtctaagcgcggtaggggcttcagatctagaggtcgtgtgcatggagg

SEQ ID NO: 5934 - DNA, 1268 bp, Cannabis sativa
aaaaaaaaaaaaaaaacgtaaagaccacattttttttccctcaacatcaaaattagaaacaatcaaaattgacgaattcaaaacaacaacaacaacaacagaacacctaacgaaaaaacaaaaagctcaataattcgatcataaccaaaacaaaatcctccaatctctctccaccatttacacacaacaacaatcaagtatctaataagacaaacaatcgagtaaacaaatacctgaaaattgggcaatgaataatcagagacagagaggaagagaaaacctctctatcttcttcgattcggagaaaaccctcagctttagggttatctgtaaatgagaaagtagtatgaatctgagtccgtaacaaaagaagaagaagatgaagaataaaacgacgccgttgagggtggtggtggcggtggtgagagaagaggaggaagaagaagaagaagaagtaagagagagagagagaggttggggttttgttatggtgtgtcgcgtggctccaaatccaagatgcgatgcctgattgccaggtagtgtaacacgtggcacaacgtcctttctcaattcactcagaatattatttatctcttcgtttgatcctttttatatgccgtttttctcacacgattttcctccgcacgtgtcttgcacgcacacgtactactaatactagtagtagtagtactattgctcttccactctattccctattattatgctttattaattattaattcaattaaaacaaaattaaataattatttcctaataaattcgcagcttggatttaaataattaataaacaccaataattaaggctctatcttttttttaaaaaaaattatttatttctgcttttttaattgaatgacacgtgtgtttatctttttttaatgtatatattttattttgaattttaaatacatttataattccgtaatttaatgaatattttttattatctttttaaatgataaaaaatatatagcgtgaaaaccctatcaaaatattctaataagaaaaagctaaatgataatataataagatcatccaatgaaattcttattatttttattatcaatttttttaaaaagatttttattatcaatttatcactgatatttttatataaattaatctgataaatgattttttttatttttacagttatatatggtatattcatccaatttgatacaaatagagtatgggtctgtattgggttgatgtccttgtaattattatttaattatttatttaaa

SEQ ID NO: 5935 - DNA, 612 bp, Cannabis sativa
agggtgtgatttggtgggcaaactgtttgagcgcacatgtaagtttgattttgtggcagccattgctttctttctctcaagaagatggaaagttttgtttgtgagttttgattgtttagcaaattttgccttgattactttgccatcaactatgtatgtatttatagatatcattaggtaaaggaaacataaagcatcttcttattcaaatatcaatgcataataacacatggagaattgaatcgaaactttatgtcagcaatgtttaggcaatgttccctgctcaccattatctccaactcatttcctatttgtatattaacttgtatctttgagcatctattttcatgaggccttgctatatgcatgatattttgtaatcaacacgagtggttttggcacatttccttataaaataaatcaggccaagtgccatttaattaatctcacgaaagatgctatgtttgtattatttcaaaattttcaatataaagttagttattgctggagcctggcctactcaacttggggtacacgtttacagcataattagggaaccaataatattacttaattttaatatgtaaagcaatatctccaaaagcccattaa

SEQ ID NO: 5936 - DNA, 1349 bp, Cannabis sativa
ctacattgaaaaaatctttggctgggttatcctctagacatgagcttggtacatgggttgagatgaaaaatgtagaaaaacaattgaatagagttcttgaaaaagatgaaatgtattggcgacaaagaagcagtgcgttatggttaaaatggggagatactaatactaagtattttcaccacaaggcttcggcaagacggaagtttaatccaattaaagggttattcgataatgtgggggtatggcaagatgacaatcgaattgttttaaagttgattgaggggtacttctctaactttttccaagcttctactatcagtgatgagattatggagaaagttttacgggctgtacatccaagggtgactagataaatgaatgatatgttgttggaagatgatattgtgaaggctgttacaaaatgaatcctactaaagctcctggtgaggacggtcttccggtacttttttatcaaaaactttggaacaatttgaaggaggaggtggtgactgtgtgccttaggagtcttaatgaaggggatgacatcatttgtttaaacgatactttcatcgcgctcattccaaaaattaagaagcccacgcaagtggaggattttaggcccataagcttgtgtaatgtcatatataagattgtctcgaagtgttttgccaatcgattacgaacaacattgggtatggttatttcggacacccagagtgcttttgtcaaggggagattgatacatgctaatgctataattgggtatgaagggttacattgtatgagaaaaaattaatttcaaaatggaaggaggatgactttaaagttaatatggcaaaggggcatgatcgggtggagtggaagtttctcaaggcaatgatgttacgattgagatatcacatggactaggtggaaaaaattatgcgatgtgttacttctaccacattttcattccttgttaatggcgaagtacgaggacgagtggtgccaacacgcgaactacgtcaaggtgaccctttatctcattttctcttctttttttgtgcggaggccttctctaatttaatgcaaaaagaagagcaacagtacattaagaggtcttaagtttggacaaatggactctttgtctctcacttattctttgtcgatgatagtttggtattttttgatgctacattagatgggtgccaaaggttttaagatctattataaaagtacactcatgctttgggccaagtggttaattataataagtctgaagtatgttttggcaagcagatcagcacgaaaagtaggggtcagcttgctagttttatgggtgttcgagaggttgacagtcatggaaaata

SEQ ID NO: 5937 - DNA, 866 bp, Cannabis sativa
aggcccttcatgggatccttctatgccaacacatacaacattcagcttaaccaaatactcaaacttaatggtgataagttttgcagacttggaatcagaaacctcatcatcatcatatacatgaagcaccacttttagagggtgaactagatgtcctgcctgttcaaggttgtccttcggtgaaatcctccttgttcgttttctccttctctgtccatcttcttcctcatcagctgcatcatcctccattctagaatactccagattagaagaaattccagtgtccacattagcttgttggtgagctaaagtttgtgcatccttcacgctaccaagtatctccatatcaacttgttcaccgaatgcttctttctgggccagcaactgtgagtaaagcacatagagaggaggtggaagcaactctgctgagtgctgctgcttcagtttctttgtatgtagcactcctaatatgttttgtacaggcaatgatgctttcttaagtgatttgaggtgtgatggaagactagacaagaactttttacgattcacaatggtctctgaaagacttttcttctgctgttcaagtttttcacggagtttgcataactctttgcgctgaaaaagttcaaaatcaagcctcttcaacatgagattgtgcgcaggatcatttgacaatatggacttttgtatatcttctggtgcatcacgaaaaaactcttcctcaggaacgagctcaatatcagggtattttgatttgaagtctttgcaagcttttatggctttaatataatgacccttctcatacattaaattgtgaagctgcaaggttgcaaaatccactgggccctttgcattttctgtctccg

SEQ ID NO: 5938 - DNA, 1768 bp, Cannabis sativa
cacaaacatgcctgctactgaaatatcacccaatacaaacacagcatctcaaccattaccccaggatactgcactttcactcccaaatgccactccttcatccaatgtcccacaggttgctgtcactggtactcgaactcatcatatgcgcactcggtctcaaaatggtatttctaaaccgaaatcctacttgtctacacggcatcctttaccagaatcactgctaccatctgaaccgagaacactcagagaggctttgagtaatccactttggaataatgcaatgagtacagaaatgggagccttacacaaagcaagaacttggactttagttccatacagtccctctatgcatgtcataggatgtaagtgggttcatagggtcaaattgaacaaagatggatctcttgatcgatacaaatcgcgtttggtagcaaaagggtatcttcaagaggctggcatagactttgacgagacgttcagtcccgtagtaaagcccacaactgtgcgcactgttctgtctttagccgtatcaaacaactggcaggtatctcaactcgatgttgcaaatgccttcctaaatggtccattaactgaagttgtttatatgcaacaaccgcctggttttgaagacaagaactaccccacctatgtgtgcaaattacacaaagcactctacggactcaaacaggcaccccgtgcgtggaatgacatgttgagacagactcttctcagctggggtttcactcagtcacggtcagatagttcactttttgtttatggttcaggcaaccgtttggtaattttcctagtctatgtggatgacatattggtaacaggacctaatgccaacttgattacaaagcttgtttcggatctcaacaagagcttctctctaaaagatcttggtcctgtccactatttcttaggagtcgaaatctacagggacaaatcaggcatgtacttaagtcaaactaagtacattactgatcttcttcaaaaagttcatatggagggggcaaagtcgtgtcccaatccagcaagtgccactacgaaattatcattaaaagaaggagatccgtttcatgacattgctctatatcgaagtaccattggggctcttcaatacctatctcttactcgtccggatgtggcctttattatcaacaaactcagccaattcttgcaagctcctactacacttcactgggaagcctgtaagaggctgcttcggtatcttaaaggcacactcagagaaggtatttggcttaaaccagctgctgttcccactcttcatgcatactctgatgcagactgggcgagttgtgttgatgatcgtagatcaactggtgcatacttggtgttcttgggaggcaatttgatcagttggtctgttaaaaagcaacaagtagttgcccgttcgagtactgaaagtgaatttcgtgccttagcaaatgctgcagccgaaatcaaatggattcgatctctccttactgaacttcatgtcccattggttcactgccctgtcatttgggtagacaaccaaagtgccactgcccttgctgctaatcccgtcttccacgctcgatctaaacatattgaaatagacttgcactttgtaagagatcaaatcttggacaaacaagtttcagtttgctatgtcccggccattgaccaagctgctgatttacttaccaagtccttaaccacagatcgattttcttatctaaaaaccaaactaaacatggtctcaaccccatttagtttg

SEQ ID NO: 5939 - DNA, 653 bp, Cannabis sativa
tcaagtttctgacattaacaatgtatgtgtaatagagtcacaatccaaaccccacaaacaaaaattaatcaaagaagagtaataaatataaagagtctaaacccaaatagagaaatgcatcaaaaaatggagtgaagtggaaaaaacaaacctttcgttagtatagaaggagtggtaaaggagcccagaagcaaagaatccattggcattttgcatgaaccagaaaagcttcctcagttcattaacacccaaaaagagaaaaagatggtgattgtgattgtgagcctggtttaataaatctgagttgtgggttttctcaaagattgaattttggaagaaatggagggaatgtgtttgaaaagagcggagttatagagtgtgtgtggcttctctcctgaatgactcactgagcatctctactgtgtttagacacagtcattcactcacccaattcttttgtttgtttattccttttattaattaaatattcatttttccattaataaataaataaataaataaaaataatccaatggctgagattgaaagataaaaaataaatattaaaaaatattaattttattaattaaataattaatcataatttacattaaaaaagtagtttttatttttattttaaaaaatttagaaaa

SEQ ID NO: 5940 - DNA, 597 bp, Cannabis sativa
gtagactgaaaaggttaagaggttgcggttgggtttgggaagaggcagatgaagacaaaatgggtttagacgctaataaggagctgtctgtgtgcttgtctggcgataaagcgtgctcaccaccgcggttactataagagaaaattctggaatcctatgctcctctcccacgcccacccgatttcagatggctttatttttttttttccattttattactttcctagattcttttctatctgtacccaattgttgtgaccacagtttatgactttttattagtatcgtaaatacaggttggatttttttagtatgaaattataaattaacacaacacgactttgacaaaatatatgattaaacatgaaagttacaataggtaaacataaaatggactagcctgaaaaatatgacaccaaattttaaaaaccctgtaatattttttatatttttatattttataagtaagcacaatttatatttttttatgtaataattctatttaataatccgaagaattctcacacaaaataaatatttaaaaaaaaagttgagataaccgttatcattattgtatcttatttgtagttgctacga

SEQ ID NO: 5941 - DNA, 1141 bp, Cannabis sativa
ttttctcagatgcaacctaaactctaatgtgccttcaatgtactctagaatcctttttaatacaacccaatgtgactgaagtggttgttgcataaattgacaaattttattcacactataagcaagtgagatattgcaaaccccccacaataaacctgtaaggttgcacatcctcaactggatcacttccatatgcttacaatctcaagccacttatcatgagagttgagcaaggcttagcattctacatcttggctttgcagaaaatatttttggcatacttctattcaaacaactaactgcattccttcagtattgtacttgacttttatgccttaaaaatatttcaattctcccaaatcctatagagagaacttgacataaagatcatgaataagttaagacacaactttggaatcactgcctgtaatcaaaatcatcaatatatacaaggatgattgtagttgactgtgttgtatgacaaattaaaagtgattaatatgactttgaagaaataaaaccaagctgcaacaaacacttatgtaacttttcaaccatgccctctaggcttgttttaagccatacaaagctttgtgcaattcatacaccaaatctggagcatttgcaacttcaaaccctaggggctatttcatgtatatttcttcttgcaatgtaccatttagagatgaattaatcacatcaagttgtctcaccatccatccttgagctaaagccaaagtcagcaccactcgaattgttattagtttgaccattgagctgaatgtctcagtgaaatcaaaaccctgctggtgaaatatttttgccacaatccttgctttgtacctacttatagttccatcaaatttttgcttctctttgtaaactcattacaacctatggtttttcttctagggggagtttaaatattgtccaagtagcatttcttaaggcaagaatttcatcttgtatagttgagttccaatgggcattgagaagagcatcaacaagagtttcaagatctttaaatgctatgaacagtttgggttttgagataccaaacttgctcctagtcttcatagagtgagatttaagcactttagaggtggaaggggcattcccatgatggtcagaagaaacttga

SEQ ID NO: 5942 - DNA, 957 bp, Cannabis sativa
aattccctcgcagttcaaaaacatgcgcgcaaaagtaggtgaaaacttttaccgacagatttaattgcgtcggcaaaaatattgaccatttgaccaatcgacacgttgcatcaggatttggcttttgccggggcataaatgcgctggtaaaagctctaaaaatttttggcggtcaacttctcccctaaatgaaaacgtgggtgaaaattttggtgagaacttttgccgtcgcacttagatgtgctggcaaaagttctcacattaatgaaacgctgcgttttatgtttatttgttcagcttcgacttttgtcggcgcgcctaattaagggcaccggcaaaagttcaggctgaattatcaatacatgagaatgaactattctatatagtaattatggtgaaaagagattaatcagattaatcctctttaagtttatacgatatatttaaattaaaatcaataaagattttatgtaattaattatttaaatttaaatcatttattaaatattatttaattttttaaataaataatataattgaattatgttatagatgtttatttcctataattaattgagagaatctcttaaactactcaaggaaaatcttaactaccttaaaagaatatcttaaccaaaaaaaatatcaataactattttttaaatttaaatttaaataaatatttatcttttgaattaattaattaacccaaaaataaatttagtgagaataattctatcttatatgcgttacctatgttcatggccggccctgaaatttaatactattaattcactaatgaaagtataatttagatttaatctaaatttgtgcacaacttttcagttttataattaacacttaaaaggaattgttaggctatttttagcctaagtttcgggtcgattttagagttgttttctttgttgatggtatcttttagaatggttttatctt

SEQ ID NO: 5943 - DNA, 596 bp, Cannabis sativa
atttggttgaaaatgcatcttgttctaagcttaaatataaattacgaaaattatgaatgttaataacaaagcaactaatcacgacacattgtgtatgttttttcggggggccacacgactgggcatatgatacccgccaagtgtgctgagaagtgtggacgtttccaacttcttggtcacttgttttaaacataggttgtggcctaaaaatgttaagtgtaaattcaaatgtaaactgtttttgtcttcatttcatgatgctcgagggccattcatacaaaagtgaattacattaaccttcacacaaaacttttggggtttcattagggtctcatgtcctctgcctattggtagtaccgacgtaggtggtctgctttctaggcatgagagactcttgatccatccattctctttaactgaataagaccttgacccacgttctcgagtatctcataagggccttcccagtttggaccaagtacctccactcctggttcttgtgaagctgggaatactcttctcaaaataagatcaccaacatcaaatctatgacttttcacctttgaattaaagtgtcgagcaattttgccttggta

SEQ ID NO: 5944 - DNA, 2036 bp, Cannabis sativa
accctagcagagcaagttcttctcgatcttaagtagaaaccctaggatccttcccacacacacacaaaccaggttagataaatgaaaaacaagagagaaagggagagaaaataccagaaaatattttagagttcaccctaaaattaagactacgtctctgtcaagctcatcttagagatttagcttgatatccactatcaacaatggtgatttacagcttgtggagcttcatgtcacaagatcgatcaactcagtttcttcaatttttttacagctctgttttgtttctctttttagtaacttgatctaacttcgtttttatttgtgcatgtacttccttctcttcaaaactcctcaccacgaaagtattactctttgcttggaacctcctctctctggctcttggagctgaagcttcgaactagggcttacacctcttctctctcactttttctgttcagttgtgtatttcttcattttctgtagcttatttatactgtaataaagagtcggctgatcagagttggaagttagttacaaagacagttgtaactaacttctgattcttggtcttgtagaggcaaagccacctaggatgagtcattattttttgttatttagttgttgttgtatgctgatgtggatatgttgtaaagggactaattataagtggaatttactcaacaacatcccgctcgaataaggagcagtagagacccctcagtttataggttcaaattgaatgtattttatgtatttaccccgttagtgggtcatatttacatgcactctagcaagttatgaatatatctgaactcgagccctaacctatatatactacattataccctcatgtaaaggaattaaaattcattatgtaaatacaatatagcaataagttaggatttttgagattgtcaccacttaaaatctcagtaaacaacactaatatataatctaatgatatgcaccatatattaatcatatatttatattataatttgtaataatgagtatatgtgcacatatattacaaataatacttaattagcacacttatagaacaaatcatgtttaataatttttagaatttaagataaaatgaaaaatattttatcttaaaattaattgacaacgagaagagtaattcattcatcttttaaatatatcattttatttctacacattagtaatggtggggctaattaatctaatacacccttctcacatttggatttgaaaaaaagttgaattgtgacatttaaaagaattccacaaggtcaaatcgagaaatttgtaggtgtacacgttgagcaatttctatatttttttgaaagaaatcaggaaattcattaaattaaatcaactgttacaagagaactaataaaatgtggacaaccatctgtccaaataaaatctcctaaaaaactatatgttattggaatcgggcctatattgatccagtctatgacaattgtcgaatcacttttagtattggagatagagaaaaatcgaatcgccaaacaatacgcaaccccaaccttactgcaagcaacttcaccacattcacagcgaactctttcggtgagccccactgcccaacacacccaaatttgtggattttttttgtttgcttaaatacggccaagttaaaatttagtaaggtgttataaggtgcatgatatctatcttaaagtgaattgacaataaaataaataatttattcatgttatatatgtcattttattgatcttttgtcacataataaacaaatacgtgtaaagttaatttgagtatatatcatatcattataaataagttttatttaaatcatcaatcatatattaatttaattttttttaaaaaaaaaaaagaatatttttattattattccaaaagttatgaataacagaatatgaaatattttcctatatatacatgaacaatattaattctgcaaatataaaaatctagatttttattatatgtacatatatgtattaatactgaccgcaccaatatgtatttaagcatat

SEQ ID NO: 5945 - DNA, 643 bp, Cannabis sativa
gaacatcgaaacatacacaagctggaagtataaataaacatcgtttcattattatatagccttgatagggtaaaagagtacataaccgaactcatatcatgctggtgaaaaggttattcataaatcactaggtcacctcttagaaggcttaatgagttttcaagaaaatttcaataaagttgtgcaaaattacaacagaataaagctaaatacaaaagggccccataaacacccacccagtgacgtacttggtgatagacttgacttgtaatgatctcatcgctaataatatttatgagtatttttacaagttatatatcattattatcgttaaaaaaccctaataaatcaaaccccaaatctgctgcccccccacctttgttctcttttttctctgccaatgtatttttctctctcgattcttcatggctttctttagctttctcttgtttctttggaggatggcaatggagctttctcttgtttctttggatggcaatggcactagacttcaacttggtgctcgacaaagcaacgatttcacccgggctttgcgaggcatacgtactaagaggttggctccaaagctctcaccaattttcttctctctccattcttcttttagatttaataggtattagat

SEQ ID NO: 5946 - DNA, 2532 bp, Cannabis sativa
ggccaaataaaaaagcttttatgacaaattcactaattgtgtcaccgctctaatcaacagaattgttaatgtcacttttatcagcacaattcgctaaattacttttatcagcgtatttcgaaaactgcgctggcaaaaaagtaaagttttatcagtgtacatttgcagtggctaaaatctaacttttatcagcatatttacacgctgaaaaaaagtcatttttaccagcgcttttcattttttgttgataaaaattctaataccaacgttgattcgccaaccccttttgccaacacatcaaaagtaaattctattttaccagcgcaataccaaacttttgccaacacattttgacatttcttgtagtaactcttcctcggacgctcgccgccacgaccccaaaccccaccaaaaaaaaactaaagaactatcaaaactttaataattagaaataactataagaattatattgattaattcggtttgtaaaatggtgtatcaaacgaattctctaattaaaaaagtgatgacatgacaaataataatgttaccaataagtcaaatttttgttttgcattaatttttttttttatttttggccatatatataaagaaggtgtgtaatatttacctttagaagttaactttttaatgcataaaaatatttaaaatattaattaacatactaaaattgtttaaagtaagattttttttgtttaaaaaaaaaaatcctaaaatttattctcatactatatatcctttcttctcattatggtaaagttcatcaacaaatttggtaacttctaagcattaaaatcattactttccatatgcatacaattcccaaatcttcacattatatatatacttgcattattcttcatcacatatacattacaatcttttttttttctactactcaatatgagtgttcaaatcaatcaaacaatgatgatggtttttcttggtgtgttaataataatggtgatgagtaatggtataatggtagaagggaggacaaaggtgaggattatgaatgaattagagccagtttacttgaatctaacagctcattgcaaatcaaaagatgatgatattgggaccaaagtggttgcctatggagaatggtttgagtttgatttcaagccaaatatatggggcacaactctcttcttttgttccatgagttgggacaataataatactgtcactactcacaattttgatatttacaaaagcagtagagacaaagataaaggcagcctttgttggtggatgatcaaagttgataagccttgtatgcttaattggaaaactaggaactttgatatttgttatcaatggaaataacatatacatgtaacttatataatatatcataataataaataaaattttaagattatatatgagtttgaagctttaagtataacagtttgaattagtaattaactctcattattggaatggattttggttgctgaagtataatccatgaatgagtttgaagctttaggtataaagcttaaattctctaatggcctgatttgtgattgttgggttatattgtgttttgagcctatgaatctgtttagaatacattagtacaatgttcttgatagtttgagcagttttggtaaggttttgattaggttttggttgatgagaactcgagtattttgagttgaaaaattttaggtagaatcgggcgctcggttttagtaaccgagtacccgattgttttggttgtgcttggaagtctaggtacccggttgtaaatccaatttatttcatggatgagtagtctcggggtacctcaattttttgtgtttttagaatatttagggtattgtccttttatttatcgataaaaaaaatttatattatgactcttagttccataaagtgttttagcaagacaccagtttactactattgtgccttaaagtctctgattgttaagcatatttccactcaaatttgtcaacacacatgattatggatactaagtaagaaattaagttttcccttattagttcatgtatgatatgtaccaccgttattttccattaatgaatatattcattaccaaagataaaattaaaataaataaataaatattccccaaaagaaattaaatattttccattagaaacaatatcctaaaaatttattatcataccaattctaattgtaaagtctaccaacaacaatataggtaacattttagcattaaaaaccattatcaaaatctttaaattacattatatatatatagacacacacaaacattattctatagttacacttttaaaagagagggagagagagagtataattgtggtcaaacaagatgagtaacaatgtgaaaaatcaaccattgaagatgttttttcttagtgtgatagtaatatcaatggtgagtagtattattgagattgtagaaggaaagacacatgtgagagtcatgaatgaattggagccagcaaaagtgttgaatctaacatgtcattgcaaatcaaaagatgatga

SEQ ID NO: 5947 - DNA, 1222 bp, Cannabis sativa
tttatgtctgtggttcatatcttcttgatattgtggccttttcatctagtttttgtggtttgattatgtttgtgtttttgcttttactggttcagatggagcatcctagatgttctgaatagtcacacacacctacttgtttcaatccctccttttgcggatattggtgacccggtatgctaatagataacttgtaaataaattgggttgactatgcctttcaatgagctaatttgtcattctctgacaaggtagttgcttcagcatgaagagcttttaaagaaaaaacttatggatggaaatcttcagtggctttgttatttgtcaacaacaagtatgtcttatatttcatctaaggagccatattcacgtgggtcttgttcaagcttataaacttaaatgagtaagaatcatgtttgtaagcttatatttggcaggtatatatggaaattgtggtggtgagtgggtagacgaagagtgagtttatgtaaaccaactactttttcatacgaactgttttttctttaactgaaatttgatgtctcccatatgaattacgctatgtaagatatcctgctagcccaacaagtgagttggctaagctgaggctagccgctgagaagagatggttagatcttggccatagtcttgggatcaaatcgcatgtatttcggcttggaggtatctatggtcctggtagaaggttgtgatgaatattactctcattatttggtgccttctgctttaaatttgcaattaatttattgtttcagcgtctaaacagcatagataaatataaaacaccacgacattgctttgcaaaatatgtattaacctgttttaaagtgctggctatatagtcttttgaattttcttgccacatcaaggtggtttttcctgagtctttgattcttctctttgatagcgctgttgatacgataatcaaacagaaggacttgtcagcaggtcagagaaggagaacgcgtaagttatacacatcaagagttcatgtagaggacatttgtcaagctcttagggccattactttagcctgtttccctgggtaggttttttagcctttttaccatgctagatgctacaattagtccatttttcttcttatacgtttccttctagtgttacaaaagtaaactacagattgtcaaaacattaatattcatgttgaaaactttccgatatgtttagatgtatccctctgcat

SEQ ID NO: 5948 - DNA, 1173 bp, Cannabis sativa
ggttataagtgcttgagtcctcatggacgcatctatatctcgagacatgtcatcttcaatgagtctgagtttctttgtcgacttgggtttctcaacactcatcagcctgaacaatttgtgactatgtcaactcctcactcttggtttgttttgccttctaatactcacactacaggtgccaccgactctgtcccaattgtttctgctgcagcatcctcatctcagcccgatcctctcactgtaagtccctcttatctacaacctggttcgcctatacaatacactatgtttgatgatcttgaccatgttacaccagtccctacaccaacatctgtgtcaccaggttctgcatcttcacaaccacctcaaactgactcttcttcaacagagttacaaactgtccaagcccctcttgctcccacgcatcctatgatcacacggggtaaggcaggaatttttaaaacccgcgtgttcttagctgatgctcagtttgatcgttctattgttgaaccagcatctctcgctgctgccctccaacataaggggtggaatgctgcaatgtctaccgagtttattgcactcaaacgcaagggaacctgggtgcttgtccctccttcagatacttataatatcattggatgcaagtggatatttaagatcaaatataatgcagatggcagtctacaacgcttgaaggcacgcttggttgctaaaggctttcaccaaaggccaggtgtggattttgggaagacgtttagcccagttgtcaaggctgcaactgttcgcgttgttctcacctttgctgtggctcatgactgggaagtaaggcaagttgacataaataatgcctttcttaatggagttcttgatgaggatgtgtacatgtgtcagccccttggatttgaagatgaacaaaatcctcactttgtctgcaagcttaacaagtctatctatgggttgaagcaggcacctagggcatggtatgataaacttcgagccactctcctacaatggaattttgaaaattccaaagccgattcctccttcttcatgctcaaagaaaccggttatgtcatcatggtccttgtatatgttgatgacataatcgtgactggaaacaacacaaaagaggtaaatgcttttattgagaaactgaatgttactttctcccta

SEQ ID NO: 5949 - DNA, 1507 bp, Cannabis sativa
ccagtggcgggtcatctaggggtcattataggcagacctcatatagcaggcgaaatgagcaaagccatggggcactatgctcggaccctccgtcatgagcaaaaaattaacatcttagtcgtggaaaaaagaaattccaagcaacttatgcttgaggagcctgccatatcctttgcataaggagatatttcccaggtcatgttccctcataatgaccccctagacataactgcacaaatagggaacatgatgattgctaggtgcatgattgataatggagcctcttccaatattcttttcaaatcaacttattaaaagatgggactccagttgacaaatctagcaccttgtacacaactaatatttgacttctttggccaaggccttgcagccttaggatatatccaactacctctaacagttgaagaaagtcccacaacaaggacactggtggctcaatttatagcaatcgacgtgccatcagccttcaatgcaatgatagggcggtaagccttgtacaaccttaagcaataacgtcaatttaccacctatgcctaaagtttaaaataaggcatggggtgggatgcctaaggggagatcaataatctgcccgacactgctataccttgtgtaacgcactacttgcttaggcacgctacaatgctttttaacttactatgcatacattttgctatcaaaggggttttcaaaaatcgtgtcaagttaaactttaactaagctttaaatttttataaatatataactgttcataaaaattgggatcccgtctgtaaagttagctacattactcaaaataattttataaaattgtcactccatgaatacaaaatgaaggtccaagtggtcccaagactgaactctctaggtcttaccatcctaatatgtacaatcatcctcaagccatggactcactggtgcacgacttttacctttcctttacctacacatgtaaataatatctgtgagtcgacaaactcagtaagaaaaagatataaaatatatcatattaccgacttgtattcaagtgcccatacacctatacaaggcataacagatcatcaagaacattcttaatggaagtacgatcattgtaccatatccactaagtactcgtcccgtactagtgttgataaggctaaaacgcatctcaagtaccactgaatgttgtaccacatgcacgatgtactcgtcacatactaccagtgcacttcgtacttctattgtactattgttggtggtatacaaatcacataacataggacacaatttacatacatacacatatacatgtatatatcttatgctagttttacctcgtttcttgattcaagtgtgtcggtcaacctcaatagaaattcacgcgctttatggaggccttttaatcttggcttaaggtttctcctcaatccttgctgaaaatggcttgaattcggtagcctaacctctagtttttccttatttcaaagaggggagagagagagagaga

SEQ ID NO: 5950 - DNA, 920 bp, Cannabis sativa
agagagagagagagagaaagatgcgtttgagagagaaagagggagcgctgattttgttttttttttaattaaataaggataaaatggacaaaatatgtaaagaaaagagttattttgtataattaatggaaagtttaattttttatatggggtgtattttaaagaatgaaaaatgaaatttttattccactagatgtaaatgcatccaagtttgaatttattggagagtgaatagttgatattttaactccaatatatatagctcattaaggtattttttcttccgcgagatgaccttaagaagcacatcatatgtaagtataaaattttaatttatgtatcaatacgagtcattttaaataggggaaatttataagaaaaatctttaagttcattttgttgcacttaaatattttttggtggtaaaatttgtacgtagtttattttgttgcatttaaatccgtacctaaatttgttagcggcaaaactccttatgtagtcattttttaacaaaattagtccctgtattgttactaactcagggaataatgttgcatcaaatgtgttatggttgtgatttttgctgccaaatgtgaattatataagaattattgttattaaaaaatttatttagggatttaagtacaacaagatgaactatataaggatttttgttgccaaaaaacttatataggtatttaagtgcaacaaagtgaactgtatatgattttttgtcgcaaatatcccataataaaaaagaaatttgaattttgttctaacatacaaacaataaatcttgtgttttaactggcttgattgttcaaatagtccatcctcgtggtggaactgtatttgaagtctctttataccgcccagggttaaggttttcatttggaaggtgtgtcttgattggtatccta

SEQ ID NO: 5951 - DNA, 1207 bp, Cannabis sativa
aaattttggaaggaattacctaaaattgaagaattggtaaaagcaaaattttaggctctcaattttttgtgctaggcgtgtggaagaggtgggaaagatgaatggaggatctctctatttatagcaattgatgtcctctattcctaagccaacaaggaatgggtttaaatttaaatttaaaaaaaaaataaagagagaaaaatctactatcttttctcttttctctcctttctttttatctttaatttttgaatccccttgttcaaagaggaataagaattcaaaattccttgttctactagaagtcattgaagaacagaaaataagtgctgagattgtcaaaattgatgcccacttggtagtttcgagagaaatgggcttagttcacgtcatcaagtcaacctcacacaagtgtaacgttgacttggggggtaaatttacccaaaaaagtgaccctggtgatgtggatattaatatttaatacgtggcaagaaagaaaatatccaagatttgagtagtcccgagtcatagcagtcaacctggaggggtccctagccttgtgcccaagttgactccgggaacaatggaatgggtgtctgtatgttgcaaagctattcttaacttacaatctttcagtattctacatcaagaagaccaaaagaatcaagtcaaaggtctggaaacttaaaatatacaaaactgcacccagaagtcaacccaggtgcctagggttttcactcagtgcccaggttgacatcccaactggggtttcagtttttgggtccttcttagtgcaaatggttcaaaatttgtactgttacaagaataagacttgtcacgaacatatttgaggcaccagaattagaattagtgtattttcatttttgagcacctgagccaccaagcaccctaggaacctagtgcacccagcgcccaggttgacatattttcaacctggggcgcttccaatcacaatattgaagaagtatactgatcattttattcatctccataaaaaaacgaagaatcaagtacttacaaaaaagaaacagatcaacctagaggctaaaatagggacccaatgcccaggttaacgtaagacttaaattgagcgcccaagttgacactttttcaacctgggccattttccttagcattttagaagaattctttcaataaaatcctttgtttttgtcaaatattaaga

SEQ ID NO: 5952 - DNA, 948 bp, Cannabis sativa
ctcttttttcattcaatctgcacgcccaacacagtaaaattaatagcctgagtcttctgcttcatcagtttttcaagtgttcttcagttttcaagtaatttcttcaaaattttcgatttttatttttgaaaattttttcttcttcccacttatgaagctcaatttaaggattttggatcttgttggaaatccttaaacttcattggtaagccctccgaaaatcaaaaatacaattttcatgtgcgtcgtgtgagctaaactttttccttcttgcaaggtgcagtttgttttaactttcttggaaaaagttttcttgcgctgaattgagttgacattcagctatttgaagttgaggaaggtcaagtttagagtagacatgcttcacgtaagaagaattacaagaaaacctgaagaatatgtccgagacaaaggccaattaatttgtgaaaaactcacagtgccaaagtctaaagatctggacaaggctcgtggtggaaaagtcatggccactgagttactcaatgttgctattaaaagtgaggacccgagagatcgagcctttgaactaagaccacttgtttttagttctattactcaacaccaagttgaattggtaagagatgagtactcactacctgagactatcttcaaaaaactaaggacgggatgtcctagtggctctcaaaatccttgatatagttcttggtcaaggtttcatatgaatgtgggtgcattcttgcctcttcacccgtggtttgtgttgattgctaactactttggggttttcccttattagataaatttgaatggttagcagattttgtcgacattcttcatcttttatcgtgtgcgaaattgacctattccaactcctcacgagatcaacttcttatgcaatctgaaaagaagtcctactcgaaaaaagaatggtttgttcccaatcaagta

SEQ ID NO: 5953 - DNA, 1365 bp, Cannabis sativa
aataatatctcataggtgctaggtactttggtggccacaatgatgctccttatataaacataataatttttatctttctttttcttctttggaagttgttggatcacgattagtattgtacttgctcagaaagtgcccctacacacacacacacaccccagtaatttcccggaaacatctatccatataattcaacttcacatatattgactatagctaggctgtgtttggtgagaaagttgttaaacatcatctacatgctaatctattcccttactgttcctcctatatatgttttgttttccaaagtcttcaaacttattttgaattctctattctttattaagttattataatgaccataaacttgtatatacattatttataggtaataaatgaatatatgcaattaattaaatgccaaacgtccccattctctcttccaccaattttaaaaatgctcgacatatcattctattattacccccaaaattaaataataaaaaaagttataaacgtctaataatgcatattcaacctctattctaaaaccctccggaaaaaaaaaaagaaaaataaacagccaccataatgagatgataatattataagggaaaataaaatagtaaagtttgtgtgtgtatatccctaccaaaatactatcaaaccaaattggaagcatcaggcaaaccttgatgtcgatcatcatctctaccagaagacctaaccactctgctatctattactattactattactactactattgttaccatctgaagagctcttcacgacggttatgacggctcgacaaacaggacaattggagttagattccagccatggatttatacagtcactgtgaaacgcgtgcttgcactcgctcaacgcctttacatcttctccttcgccgaaacccatcaaacaaacggggcactcctcgcccatctgcttcccgtctcttactttcttgtacttcaccacgtccgagtctgatggtttctccgcctccgtcgtgtcgctcgcggcggcgctactcgttctgccactcgagatctgacgacgtggacgaaaggggtcctgagggcatttgatggcaaaaaagaaggtgtagatcaaggctgggatggagatcacggctagaatgcctaagatgaattcgagggctgagagatcgacggagcgcggtggcgccgggaagggcggcggcggtccgattatgatggtgttggtacccggaaaggaagtggaaggagcgtatgcgtagtagtccatggtggagagaggaggcctgctgagatagtagagtggtacttttgtttggtttttagcattgtaattgtggttaaggatgattcttttttt

SEQ ID NO: 5954 - DNA, 1686 bp, Cannabis sativa
ttagaaaagaactattatacttaatagcaatcctctatagcaaagtaaccaaaagtaattgaaaggtgattggttttctgagaatgaatttatatgtattgttttgttcacataataaaaaacaaacaaattaatcaatttccttgaagaaaaaaaaaagcaaattaatcactttatatattttttatgttaattacttgacttgttaggtaggaatttatgtatcactaattcaaaatgaagtattttgtgggctttattcatgtcgttttaattaaattggtcgtcatgactttataccatttttttaggtattaataataaataatatacgagcgtagttttatgggtaattttcatctttataatttttaaagtataaatttataaaaatataacaaaaaaaaaatattttataggaaaattatagagaaaaatttaaaaatatggaaaaaataatataaggtaattgactatctctatggtaactggttatcactctgaataccataagagtttacttttacttgatgtttttatattttttttaatttttccataaaataatcttcttttttttttaaaaaaaaaaaaggggatattttcaacacaaaaagtataatttttttttttttctataaaatttgtaatttccactaatttatttataaaatacaaagtacataaaatataatagtaatgtcaaaagtttaaataaaatgtttattaagggttgttattataaaattatttacaagcacctattccttttaaaaaaattagctaactagtaattagttgtagtgataaaattacattttttaacaatattatttacatattaattattttctttttaattttagaacaaacatttacattctttaatcaattcttttttatcttcttttggtgctatttaggtaacttgtttgtcacaacaacaaataactacatttagtgataattttttaattacaaaataatttatttataattaaatttaatttttaatcacaataaaaagttacttataactaaaatatagtatttagatacaaattgtacgtcctaatttaacaaaaaattatttataactaaaatataatatttagatacaagttgaactacagcaagtattgtgactaaaattacatttttttttttatcactaatatttttagccacagatcttttagtcacaagacaacaataatgatttataattaatcacaattttttttttttactttttgtcataaattttgttgtgactaagaataagattttttgtaatgtatataaattagtgatgtaattgtgcaagaattgttttaaataaagattcagcttttattaaaaaaaacatttacattcttaattattagtaattaaacaccttgattattgtcatcattattagcctaaatattagtgcaccttcattccaattctcagtataacctagctagtatgtattagtgttattgacctaaattattgttattatacataagattctctatcatactatttctacaccatcgattggggtccatggctacatgactagctagtataatatattattaatgacacatttttcatagttaaaaaacaattttaattaaaccaaagatatcattaccattgactttatttacaaactcttttaattattgtata

SEQ ID NO: 5955 - DNA, 882 bp, Cannabis sativa
ttaagcaagaaaagtgagaaaaaaacctacctgccacccagatggaagatcatcatccctcgagagttcacttactacaggcttctttatttcatctttcctcgactctggtgtttttcttgtaggttctttggcaactactttggtggggttttcatcgttacttgactcgggagtttttcgtgcagcttctttggcttgttgtgctcttcttcgcttcactcgttccctcctgttccatgacatgatacagatattaaagaaaagaaaaatatgcaatatgagagtagagtccaagctctaccacaaggaaggaactagtctcttaccaatcaccaccaagaggctgaaaattagcattatctttcgcctctccactggcaatctgttgcgccttccattcctgcatttaccgaagtataagaaacaagtaacaaagactgcattgaatttaatttaaaaacaaatgatgaagaccaacctcgatttccctttgtctcttcttttctaacatctcatatgcgttttctggttcctcatcttcccgcaactcttcttttgctgccttccactggttaaataaggcatgagacaaaaggaatttatgttagtaaatgcagtgaagatgaaaccgaaaggatatgattagtagcatataataccttgtcgaccaaactggaaactttcttatttaatctcaacgacggggcattagcaactgaccgctttttaacacgtggaactgacaaaaagaaaaccaaatgtgagcaagtgagttttctggataaatgcacacccaaaagattgatattattattgaaagcaacacaaaaataaatttaatctcaaacatgctgagaactttacctttagcatgaacct

SEQ ID NO: 5956 - DNA, 1143 bp, Cannabis sativa
cgatttgatgaacacccctaatcaaagacaatttttaagcataaattgtcaaatttcctttttaaattagaggtacttataagaagagtttgtggtactgatttaaggtctgtgcttgtttttataagggaatgatttaatcattaaaaaaagggaacgaaaaagacctgtttggccaactttaacgccaagactagtgacaccaatcacatacggtattacaacaggtaggtgcatctcccaccagctaactcatatgttctattgagcttttttgccttgtttttattttaaaataaataaataaaacataaggatgtttggaaatcaaaacttgaactgaatttttttttaaaaaaaaaattataaaataaaatagagaaaatataaataaaagattaaatgactgcatactaaaaagaaaaaacaattaggatataaaatgcattaaatattcaaaattttagatttttttagtgacaaaatgcaagatctccaataactacaagtatcgtttctaaaatttctaacgataaaatacagtgttttatcgttagaatttttattcaacgacaaaattgtcgtcaccgtaactttttgcaacaaaaattaaaattttaacattgtcgcggccgttagtgtcactaatcttagtaatgtcataataagataataaaaattatcatttttttgtggagtttaattattatgagagaaagagagagatgaaaagggatatatagaaaagtggattgaagtagttaggaaatatgtggttcgtaaaaatcaaagttgaaggtttcaattaatttcgtgcggtgtgcaccagcgactgccttcagccacctaacttcaacacgtacgtagtggcctactccttaaattcaaagcttttttttaggtgaaatattggcaattcccattaaaactaactatgaccatcctgtaattgagataaaaactaagccaacttcacttcactttttaccatatatttatatatatatataatatattgctactcatttagttaaacagaaatgaaagggaaatgtattatacataaataatagtcaaaataaaagttattattgatatttgaagaagtcgttatttcataattaatcgcactttttaagagct

SEQ ID NO: 5957 - DNA, 1254 bp, Cannabis sativa
taagatatttataattaaaggtgtgttatatattattataatattaattttgatgtaataattaattacctattgtaatatttattttgtttttaaaagtgatgtaataattatactgtaataatgattacattatataagaaaatttgattattttttttttaatttaagcatttatatattacaacaataaataatttgcgactcgaactcaagatctccaccaacacattcttatagccacctgaattagaggctcaagtagttaaaaaaaaagttatgtaaagagtattacataactaaataaagtaagattaaaataactcaaatactttttattaatataaatatataaaaattaaagtaaatttatcacttaattcattacattattattattattattccaataacaaatcaaataaaaattggcattactattgttatatttcgttacattattgttatgattacatccaacaaactaaacattatggagtgttttaacatttatgtgtaaaaacaagaagaagaatccaaaatagagaatgagtgaggagtgaggagaaggaggagcgccgcacaataaggatagagaaggccgtacataagacacgtggcgtacgtagatttcatgggaccacattccccgagtggcgcgccaaatgatcagggaatcaggttccgtagatggacaggagtgtgtgggcccagctcagcccagtccagtccagtagctcagcccagcccacctgacatgaatcagctgctgctggtgaggtcaggggctcaggcggctcgactcagcagagtcaacaacaacaacagtagagccatttcagagaaaaaaaaataagagatttcagtggtcccctccgcactccataaaaccctcgcccaaaggggaatctggtatttcagaccattgcatttgccgtgattcatttcgttccatgctttgctaagaataatattgatggaatcattagtatgtatatatatgatgacaccattgctgtttatttagttttgaaattttgatatttattaatggagctctccaactaacacttgcctacctactacacaacacatgtccacctcttccttgtaaaaggaggtaggaggttctttgtgaagaagtttcacatttattttcttatgtataatattcatttaaataatatcttaggttgtattgaatttgacattgttaataaatttggagggttatattattaacatctttgcgtt

SEQ ID NO: 5958 - DNA, 866 bp, Cannabis sativa
ttcccaacctttggaacttattcacagagatttatggggcccctcctacatcaaatccaaagatggctattactattatgttcagttcctagatgatcacggcagatttacttggatctatcttatcaccctcaaatcccaagcttttgaaatctttattaaattcaaaagcatgacagagaagtagtttaatctttctattaaaagtgttcaggcagattggggaggggaatatctaccctttgccaagtttctcacagatcaaggaattgaatttacacatccttgtcccaaaacaagtgaacaaaataggagggcagagcgtaaacatcggcatataacagagatgggactcactcttcttgcacaatcggggttagattttaaatattggtggcatgcatttcatacaacaacctttccaataataggctcccaactcaagtgttagagcaaaaatctcctctagaatttctacttggccaaatccctaattacaaaattctttaaccatttgggtgtgcatgttacccacacttgaggccatacaacaagcacaaaatggagttttgatcccaacaatgcatttttcttggttattcctctgttcacaagggatacctatgtgaaaatgccaaaggaatgttgttcattgcaagaaatatagtctttgatgaaactacatttcctgcacattaatcggcttcagcttctcaggtacaatctaaaccagtctctaactttcctactgctagttttttaacttctaggccacataatattagttctaactcttttattccacttgtggacaactatggttcctttatcactgagcaacatggccatgctacaaacccacaact

SEQ ID NO: 5959 - DNA, 743 bp, Cannabis sativa
tgaatacaaaacaaacccagttgagtcacaatccaaggttacaactttaaaagtccagctaagctatactaaactactggctggttgaatcgtttagtagtaacaacaaaagacgagtatcacttttttcaaaggagacacttttattactttactagtttggtgttatgattttaagttatttttttgaggcagaatttgattttattttagttctcgagaaaggaaacaagagtagaaaaatgaaaacgtttcattaaatttgagggcattaagattcaaaccaaaccaaaccaccaccttgctcaattatgcacgccaagacctgacatgacactcagctttcttatttctcttcaattatcaaaattaaaactctctctctctctcttacaatattattcatcatgacggggtagcatcagagaaacttgggaatgattattaaaccgtgaccaaactacagttagtttatatatataatattttatatgagaaatgagaattgagaaagtgaatgagaaggacatggctttgagaaatgcgatatgattggcttgaatgtgaaggatccatccatgtccaaatccataatgcatttctttggctttttttctttttctttttttacttttctaataaaaatggaaaaattattaagtaatatttacactcgtatttatttcctcatatcatagaatagccgaggaagcaagcattattaaaaagtatgcacttttttt

SEQ ID NO: 5960 - DNA, 537 bp, Cannabis sativa
ctggtaaaataatttccaataaacatggctcttgggcaaggtagatcaacaggtattcgatcatttgccaacaacaatcatcacactgcaccacctggtcgaggcagaggtttctctaagtttcctcctcagaaagttgtgtgccaagtctgcatgagattggccacactacagctgtgtgtcattaccgttttgataaaaactggacaaccctaaaactaggtaacaatcgttcctttcttactgagattgattgtgattgtgatcctcaggcctatacaaccacgatgatctaagactttggagaagacaactcctggtactttgattcaggagccactactcatgtcaccttcgattcaggcaatcttgatgagtccaaacccttctctggccctgacactctagccataggtgatggtaagaaattgtttatttcttacactggttctgactctattccctcctctcataaatcttatcctttatatatgaaatctgttttaattgtgccttccattaccaagaatcttgtta

SEQ ID NO: 5961 - DNA, 5015 bp, Cannabis sativa
tagcctatgctggcaatagggccgacaaggggtggtctggccagatcctcttggtgggccagcttgctgtctctttatcatgcttcagcatttggacttctatcaactgatacgttgtgcatggtgacttggtcttcttcctgtaagttgtactccacgtggcatcattcttgcctatgtggacattccacatcatttgaacaaaaattgggataataaaatgatataattgtaagtttataatatcttctccactgttaatatcagtctagtgcaatgtatagccaatacatcctatattagttccctttactaatgctgtagaaaaggcattccactaagctaagtctaactaaatcttattaattatattatcacgtcagtgtaaatctagtgcactgataaataatataactaaataatttaaagcatataatcacaatcgctttctactatgatgacatcattgtaattgtaaataaaaatatgtttaggatttggtagaacttatacattaaacctatgatcacgtatgaaacatgtgaacaaagcatatgactaggtcatggtatgatttctggtcgttattgaaagtaaataagaatatactgaattgggtttgtttaaggcataaatcccacaaacttagtcttcattaatcatgagatcatcatctttaaggctagtgcactcaacaatgaagtctggtaatgcatgtcctttcattgatgtgttaggctggtaaatgatctcaaactgacctagttcaactacccacttcagtaggcacccttatacttcaagcttcatttgaacttgcctaagtggttggaagtaaggacttagtgttttagaggccagtaccaagtagtaggttagcttctcaatggggggaataccttgactcgaccccaatgagacacttactgatgtagtagaccatgtgttgtatcccttcttccttacgcatcacagcagtattagttgcatgctcgatgatagcaaaatagatgaataattcttcgccatctattggtgtagataagatgggagggctggccaggtgatgtttgagagctcggaaggcttgctagtattcatcaatctattcaaacctcttgttgcttccttttagtaaattaaataaaggaacaaacatattggttaattttgagacaaatctactaagtgtagtaattttttcatttaggatttgcatgtctttgacttatgatggtgacttcatgtcttgcaaaaccatgatctttttagattcacttcaattcctcttgatttgacaatgaatccatgacattttcgtgattggatgttgaaggcacatttcaaaggattgagcttcatttgatattccaacaagatgtttaagcattcctctaagtctctgatgtggtcttcgaatctctctgacttaaccagcatatcatcaacatagacttccaaattatttccaattaagtcatgaaacatacattttactagcctccgctaagtagcacctacattcttgaggctgaaggacattattttgtagtaataaagcccaatgtcagtttagaaactacattgctcttcatcttgtgtacctgattcagtaccataaaacaaacattgagtgggagtgttaatcaaagaaatagaatctatatcttccataattatttagaagtgaaacgatagtttctttagagcttagcttaacgataaaaatggaaaagctcctatttctataattatgttggtttattgaaatgccatttataagtaggcaagtattttaaggataaaatatatcgaagcgtaaaataataaatttctccctaatcgatataaaccatctatagatgatcattaattatttagattaaaataatggataattcacatcgtatctgtacttggtgtacaaatcgttctatgtaatcaagagtgtaattctaaatctataatggagtcagaaagaattaataagtaacgaaatctattcataaattttgagaactgtttattaggatcttgattacttaggcccatggtccccacactatctagaataatattgtcttgtagacatttcttaaaccaattagaattctaaagaagactttgacttatctaggaatttcactaagggtttatttgagaagaaaagtgaagagagggttttctttttgttaattaagaaccttagagggtctaattgataaacatatttaataataattttgtttaataattattaaatagattaaattagcatttaaataataagaatagaaaaaaaatagtaattttgaagaaagatatggatgtttcatcaagtaaacaaaatgataaaattcaaacccatggccctatatatataattcgacgaagggttttatttaaactcattatatcttttcaactaattttaattctaagcctaaccctagaaaaaactctataaatagaagatgatggtttttgaattcagtagactctaataacctatctcttgttagaaaaaattgtaatcaagaaaattcttttattccctgtagaatttctaaattctttgcctttactttcttaaattttcgagtgttagctgttttagaattgctcgcacaatttaagacgtggaagattgtgaaaaaaggtgtatttcaaagaataatctaggtttagtatacgttaaacctctgcaatagaaagaaacaagagttagaatattgaagggaaggagtcttatattccgctgcaaccaatataaggttttctacaacttttacatgtttattttatcgtttttagaaatttcatatttaaaatgtaagattatatatataatcaaacataaatgtttataaatcaagatcatgttaaaataatttctaacagacctactcttaggggaggggtgggggaggtgactgtctaacatactttaggggtagttacctatcttacacttggggataataacccaccctaagagggtggttgctcaaaccccttggggtacttatgcaccctaggggtggtcaattttttcggggaccgtcgctaaaaaaattaagtaactatttaaagccgtcaggaaaaatttagtattcctgcagtttaaaatcgtaataaacaaaagagccaacgttttttaataaaatgcaaatttttaggagtcccttatacccggtttaaaattatcaggtatagtaaaaccgtcgcctatactatacctgatggttttaaaccgtcgggaataagggcccattaaaaaattttcacctacttcttgccacatttcccacgtgcccacctacttttttttcatttcccacatgcccaccaatttcttttcacctatttcttttccattttccacaccctaaaataaaaatcttaactctccaaaaccccacccatgcctctgcaccatcgcactcctctctcgtcgtcttcctccctctctcgatctccctttcttctcgcctctcgtccacccatctccacccacccctcctctcgtcggtctccctctcctctccgtcgcatacgtcgaaccaccacctcctctcgttgatgtccctctcatctctgtctcataagtcggaccaccaccacatcccgtccgtctccctctctctctctctctctcactccgagctcggtataaatatatttatttatttatatactttttttatttattatatatattattttgttattgtatagatttaatgtgttttaaagttagttgttattgtaataaaattaattagttattttattttaatttaagtaaaattttaaaacaaatgtagaaaaaaatggcagaaaaatctttattttattctctttttttttttttttacatttcccaacggtttaaaatcgtgccctgtactataggcgacagttttaacccgccgggaaatctacattagcgacggtttgtaactgtcgcctattttgctcattttgcgacggtcgtataggcgacgattatataaattgacaggaatactttaaacgactgtttaaaacgtcgagaaaaaatatttttatagtagtgtcaaatctctttcccatacataaaatataccttgtgggggtaacaacattgtatatttctcattaatttagtctcaagtaatcttgtacaacatgtcgttatactcgccatcgccatgtcactcttattgaaatttaggtaaacatgtagcaaattgactcaaattatgtaaaaaattatgtcagaaattactatggaaaatatttacttcaagcctaattagttgaccgtttaaagggaaaaaaaaagcatatatttgcacacaatatttttttcttgaaaaattctaattaatagaaataataatttttatgaaaaaaaataatcttaaaatcataattcatatgcttagctaaggatcagcataagtaaggacattatagaatggaagaaaaaaaaaattaaaagataaaaactttttaaaacttgaaggctaatataccttattattgctgttattattttgtagaatgcatgaaaagaaagttgtagttttgggtatagctgggcaatatttcatggaagaggggacttaattattgatgtcgggaacaggtatgatgaactatgtcaggctcatttaaacatccgttgataacaaaagatttcaaacaaatgttcagttaattattacactattttagtttggtttctcacataatataagggcacctaacctaacaatttatataaccaccacctacccactattctttttttttttttctccttttattgaacccaccaaaaaattcactagtaaaaaaaaggttaaaaactaatatacatatggtgaactataataattgtgcttgggatttagacttcatcaacatataatcatatatcatgaatcaatatttatatatatatatatcatgatcaattcctgcaaaaccaaatatcatgaatcatatatcatgatatatatatatat

SEQ ID NO: 5962 - DNA, 1051 bp, Cannabis sativa
  modified_base (148)..(149): a, c, t, g, unknown or other
ttttagtaatccatgtatatatcccatgttagtttggttgtatggtattttactcgttattccagtggcatcatatttctttctttctttttcctccgttttttattattaatttttaataagaatgtatttatatatatttatatanntatatatatatataaatactagtaaaaagttagatgtgagtcagattttatgctaagtattttctactttatttataagtgatacaattaaaaagaaaaaccatactctcatcataagagtgattgtcgccttcctccgctcatgtctccataacgacgaaattataccacatactatatatatactatatatgaaagatatactcataaatgagaatgttaataatataatttcaataatataaatgagcaacaatcactttccacgcaagaatttgttcgcaataattgcttctttatcttcttctgatacaaaaatactctatcaagaaacataaagaccttaacagttaattattttattctattattatatatacagaaagaaaactcatttcctgacttacagttttaccactaatgcaactgatgatcaaaattatcacaacaacttcaattgaaagcacattttttttttacaaccaagtgaaattatgtaaactatattttagctaacgatgtgatttcaaaactattttttaaaaataaataattaatcaaaacataagaatttataaactatgtcaaatagactctaaaacaaagaagtaataatccaaaatatacttaattaattatctttattgtccaagtccgaaataaaatgaaagaactgataatgtgaaaagaacccatttttcataaccaacaaatcaaagatcacccaatagatttttgagtgcaattttttttcatcatatgtaaatgaaaatgaaagaaaaagaccttgtaaacattagacaaaatgaatttgcacccagaattgatgatgattccatggattgttgttgtaatggctgaacatgtggttcagctctattaccaattttgaagcagtgttg

SEQ ID NO: 5963 - DNA, 1082 bp, Cannabis sativa
atatatgtatttgtcaattgtaaataagtaaaaataataataacactaaatattttaattctttaattaaaattattaaaataatgtaaaactaaactatatattaatttatctatagcgtgataaaaaattgagtatttataagtaaatattcaaattctaataatcttaatatttttttaaataattatcagtaaaatattattgaaaaattacataaatataattaggattattaaatatacaatatagtttagtaatcaactcattaattgtaaaaaacaaatattgaaaaataatgcacgaattcgagtctggatatgaaaacgggccggtgtgaaaatatcgagcctacgagccgtgtcgagcctaccctttgaaaatattgacacgacatgacatggcccatatttttttaaggcacgatccatattttgaaaagcacaaaaaaatgaatcgtgttagcacgacgcacacgaatttacaacactacttacaatagttgcacataatgcttctagattccggtgttcgattgtcaggcccttgtgaatcgcctcctttgtaaccacttggagtagagattttcaatggtgcatgattattatgactaaccaaagcactactaagagaaacatatggagtagttttcgtgcaaagaacttgtgactatacagagtcaaatttggatgagtgttgccaaaaagctcatgatagccatctgctctcgctggcacggttgaacattcacaccaggactacatggcaaaaacacattaagctttttgtatatcctcttcaatgccataaaaaagttcataagagtttgatcttgtatctccgcgcaataaaaggctttgcaaacatctacatatgagatagattgtcttttccagaatatacaaaaactccaagtaatccattagttctttaaccaattcacaatgattgatcaaactaattatctcattatcaatagaattttgaatttgaagaaataagtgagcatcctctcatagccacatttttcttgaatcgtctttttcttagggaggatcatcagttagatgaccatctttgtc

SEQ ID NO: 5964 - DNA, 1798 bp, Cannabis sativa
tctctctctctctctctcttacgtttcaagtgtcttaaatgttctggtcctaaacttcaatggtctagaattaacataacataaatgctcatgttgtgtgtgtctgcaatttaggttgttttggttttgaatttctgtgttactttacagaacaatttgaagtggtacaatccggtatgagaaccaagagtttcatgaacaaaagaaaattctttggtattccaagtagagtaagaaagatgttgaagtgcatacgttcaggggagcaagtgaaaatggatgagattgatcattcatcagattctctggctactagggactattcagcaagtgggtattcctctagaccaggagaagttgatccaaagcttgataatagcaatattgaagaagctgagtcctctcttcgtgaaagtggttatctaaactatgaggttggtttctttttctattctctacttggatattttttactagtttgagttgcacaactctcaacttttttgctttatatttgagtggttagaaaacttttcttgactcaaatctaccatgaattgagacatgttatctaaattcgaaacttgcgaacaaacaacaacttgaaattgtaaaatttgcaaaataaccatgttgaatttacactgtacgaccattatgatcgcattatgtaaatttatggtcgaacaatatactttttagttgcaccaaatgtggttattttactaatgaataccactttcacaaaacactggggttgttgcagttgtagttcatataaagactcattatttaatttggttgacaaaaatgataagaaattaaagttatctctattcatatcttagtatgagtttttcgatttcatgattaattgttgtggtttatggctttggtttataggaagcaagagctctactaggaagactagagtatcaaaagggtaacatagaagctgcacttcatgtatttgaaggaatagacattgcagcagtgattcctaggatgaaagtatccatttctagaaggtgcgaacaaaatagacgccgttcacagagtgaatctgttccgcatatgtccatgcatgctgttagtctgctccttgaagctgttcttctcaaagcaaaatcattgcaaggccttggacgatacgaaggtatttcgttctactaactgtaatttacattcttatttcatagtttcgggattctgtttaacattgttgttgttgctgctgtctagctatgactgaaccgattgcatttattacttgttgattttcggttgtaaactgttatgatcctctaaaactccattctttcgtcttgtacttcttgcagaagcggctcaatcttgcaaagttattttggacactgtagagtctgctttgccagatggtttgcctgaaaacttcacttcagattgtaaattacaagatactttatgtagtgctgttgaatcactaccagagttgtggaaacttgccgggtctccaaatgaagctattttatcataccgaagggcccttctctataaatggaatcttgacatagaaactactgcaaaacttcataaggagttcgcggtttttcttttgtatagtggttgtgatgcaagccctccaaatcttcggtcgcagatggaaggctactttgtcccgaaaaacaatttagaagaggccattctgctgctgctggttctactaagaaaattagtcctaggaaagattatgtgggacccttcaatcatcgatcatctgacttatgctttagcggtttcaggtgagctaaaggcacta

SEQ ID NO: 5965 - DNA, 2459 bp, Cannabis sativa
tagtaaagtattaaagattacaaatgcaatttacttaaacatatttagactccctctagtgatttttcgcaactatttgtaatttaccttactaatttgatctctgaaacacaacaagtagtgaactcccttcagctagtgatgcgtgatcacttcctcccgaattgagacttagaaaaatcttctctcaaagatatgtattcacttcctcccaaaatgagacttacaaaattcttctcccaaagacccacacttgttcaaagcttattttaaacctattctatcaacaacaagagaataatagcaaagatacaaaaacctagcaaaacactttaggattttacaaaagaaacactcttttagttgctctctaggttctatttatagatcatagaaacactagagacaactacaaatacgtttttacagttgtaagatactttcttaaaataaactccaatttgtagtgacagaatcacaatctgcaatgattgaatcgcaatctacaatgacagaatcacaatctacagtgacaagtcagatagaatcttcaaaactttccatataaagccaagatcaagatttttttccttaattcctatcataaaaagatcacacaatctgttatacaaatagtaataccaaaagtatcaaccaaggaatcaatcaaattcaattttaccataaaaaaacataatattcaatattttttataaagataattatttctcttctatggaaaacatttctaataaaaatcactcagccataaacattgattgacaaattaaaatcaatatttaatttccattaaatatgcaaaataagtaaaataatattttggcaattaaattatcaaaaaaaaaaaaaaacttacaatctctccatttagcaatttagataatcaaaatattttttaatttaaaaaataacccctaaacaaagttagtaagaacacaaattcaagaagagaactcctcctaagaagcacatcaaaaacataacaaaacattgctaacttttaattaaataataacaacacaaaacaaattcaactccctagaaaaaaaagagcctagagttgaacacacataccaaaaattaaaactttatactctccctttttatttatctcaagggctaaataactcaaagatgaaagaaaataagacatgtttgaccaacctctgtgatcgacctaagctctttgtcttagccacggtgatttaaaaactcaaagaacacaacacaagtagaagagtagagagaaagacatctcgagaagaagaagagaattagtcttagaaagaaagaaacaactaaacaatggatagactatcggtaaaagagaaggaaataaaataaataactaaattaaaatgaaaagttagcattgtagaccaaataaccacccaatatcataacacaaaaaaccacttcccccttttgaaattcaaaattgaacataagaaaacaaagagaaggaaagcaaaaattgcagtcaacactccaacaaatcataattaatatggaataatttttataagaaaatttaccacaattatttcaagatttgcaataattaacacttaccaaacaaaaagacatttattatccaagccaccgatttttttttatacatgtatatatataaattaaaattttatataaagttaaaattactctaaaatacatctatctatcttacataaaaagtgacaaaaatcatgctatgctttcaaaaagtgataaaaaaaaatgtatttttagaatatattttatatttaatagatgttgagaaaaaaataaacaagtttcaagacataatgtgtgtattaggatattttttttattttaagaagatgaaacttacatacttgtacacgtaagatcattgtcctcggcatgatttttattttttacttttttcaatttgatccaacaactgaatgttgtcaccctatactaatacgttcgaaatttaatagaatttaaatatcaaacatagaatcacatcaaacaaaatgtgtgaaccaagcaattgacacagtcataaaagattttatatttttattgaataaataatgagattacatagaaatattttcttttaggcataaaaatcaataaactctcactggtactaatataaaacaaataatggatttctattaatatcatgttcttgatatgtcactcaaaataagttcaaaagaagaaacacacaactattcaaactgttcttgggattcaaagtgaaatcctacatgcatgtgagagcattcaaagtgttgtctacacagtacaaagtaatcacgattttgtgattaaattaagtcccatgatttatcagtacacaggatttctactgatatgataatcaacaatgtagtttacttacaccttggataagtgttatgttattttcagggcattggtaaagtcatcttggattggat

SEQ ID NO: 5966 - DNA, 620 bp, Cannabis sativa
aaataaaatattgccaagttatcaaaaaataatattatattactcaaccacattccaaaaggcccaactcttggttttcaaagaagcaactattatattatattataatattatgtctgtgtgcaataaatagatgattaagttattatggagaaaacataaagtggtagaagataactcaggcttacttcttagcaacttcctcctccttacgcttcagcttcttcttaagcttcctcttcctcctaagtttatctgccttctttccagagatttccccatccctaccaccaagtccaacaaggctttgtaggcacacacactcgtcaaattggttaggcataccaggaatgatcacattctcagccttattcctttccaaatcatacaaaataaactttttggaatcctgatccattagtattttattaccacgaggcttcaagtatgtaactgggtatacataaccgaaagagcttatctcatctgattgcaccattgaatacagcttagtccaagattctttaaccccatattccttcattacccatatgtcaatacgatccgctttggtttcccaaaaataagaagattggtcagaggtgtaattagcaatcagg

SEQ ID NO: 5967 - DNA, 1276 bp, Cannabis sativa
tatatatatataaatggggatacatttattcattatgagttggccaacatagaaaatagtggagtcatatagtcgtagtagtcgtagaataacacagatcatatcggatcactttatttattaattaaaccgaaaaagacactgaattgaaatgggatccaacgatattgcatcgtatattgacaaaaaatacttatcattggaattctgattctgtgcttcagattttagttgtcgtataaatatattaattatatggaaatttttttttttttttttgctttatcgtatatatgttagtaactggatttcctagcatgactcataaaattttatgttgaagtcgagtcattcatacatagcattgtttaattgtacgtatactatatacgaattagataaaataatccaacaaaaggtttgatacttcaataatttattacaagtgttttcttgtaaataaatattttaccactttagatcggtgttgtttcgaaagtttggtcgggcgtgcacttcaagggttaacttttacttgtttcctccaaaaaataataataataaagataaaggggataaagttgattagataaaggctttaaatatatatgctagattcctattgatgacatactattataatggccaaataattttgtttaaatcattgaagatacaactcgctcgataacccttttaataagacaagagaactaaacacaaggaattgttcaataagcaacattatgccaaactaatgattggttgattagagcatattaccaaaaacaaccttcattattatattatataatttaatttaattgagctagtatttgtaagcattgtacgtatatatttaaaaaggaaaagataaaaaagtttatttgataaaaatcagataaagtactttaataataatgtagttttagactgacaaggccgaaaggacaatagaccattaagccaatggcgtaagaaagtccttcaaagtatgcctttgcagcatttctattcggtttggtttctagatttttttttttcttttttcttttggagtattgtaatttgacattcaattattttataattactgagtgatgtctctcattatttattcaataataataatatgtcattttttttagtgtttttacttaacctttctctttttaaaataatggtaaaaagtttattagaccatttatgtagaacctactacttttagtgcaatgaagttaatgattcaatatcaaatattacaccaaatataaca

SEQ ID NO: 5968 - DNA, 1214 bp, Cannabis sativa
catcttttttgcccctaacaccagcctaaattaccaaactcttattcaggattacatgcaaagaccttctactaatcaccttgataagtatcttggactacctcaatgttttggtagatcaaagaaacactccttcaatcccctgaaagatagaatttggtcttacctttcaaaatggcagggtaaactcctttccaagggaaggaaggaaattcttctaaaagcagtcatccaagccattcctacctatgctatgttagtttttaaacttcccgactctttctgtagctttgttgagaaggagatggcaaatttttggtggggagctaggaatggagaacgcaaacttcattggaaaaaattgcaatccttttctacttccaagtgttcagggggtcttggcttcagatctcttaagcctttcaacaaagctatgcttgccaagtaagcatggagaatccaaacaaaccaaacctctcttcttgccactctcttttagtcctaatactttccccgatccacttttttgaatgcccatttgggtcattccccctcctatgtctggcagagctagcactgggggaaatctctcctaaatattgccctctgtaggagaattggtaatggtgctaccactcgcatccttgatgaccattggatttcaaactgtcgttttctccccatttccctcccaaatcaccttacccacgtctctgacttgctcctcgccaatggggattggaacatcccccttatccaaagatacttcccacatgacattatcagtgagatcctttctcttccccctgataacaaccaaagtgactctttcttctggcagtatacttcctctggccactactctgtcaaaactggttatcatgttgctaaaatcgtcacccatatcccaaccttcttcttctagtgctgacacccttaagtcttggtggaagtctctctggggtctttgtactccccctaagataaaatatttcatctatcatctttttcataacactattcccactactgaaaatctttacaacagaaaatgtctcaactctcctaattatcctcgctaccacatacactctgagtgtgtccagcatgctttgtttgattgtaaggatattaagaaggtattttttaggtacgcccttcaaacatgctctgaatagcttaagaggaatacatattctagatatgctcttata

SEQ ID NO: 5969 - DNA, 679 bp, Cannabis sativa
aatcatgatcatttgaggatgattaaaagtagtactaataataatgatcaagagattaatgaagatgatcatcatgatgtgaacttattatactcatgttctcatgatgatgtactcttctcttcattcctcaattcgattatcaatgaagatgcttttctttctagtaatggtgatcaagatcatcatcatgaacaacaacaacaacaacaactacttcttcctaatcatcatcatgatgatcatgaagatcctagtttactctttccggtgaataataataacaactcttcatcacccaatggaggattctgcttcgatcaaccaaagtagtgatcattattatatatgtagtgtgtttggctatttataatttttagagtttgtgttttgaataatgttttgtattatgttttatgttataaatatatatatatatatatatattaatatgtatacttatacttgtatgtttttctatgaacttcatttaaatcatagttgtttcaatggacttgtgttgtggtttgtattgtgttcattttttaatatgtaatacttaaaccttcaaatattgggtttgttttgtaataataattatcttaattattaataaattagataatcatatcatgaatgttgtatctaatatattaccacattattgaacttattttaa

SEQ ID NO: 5970 - DNA, 1444 bp, Cannabis sativa
ttgcttatattcactttgaaactaattaaacttattgaaaatgaatataatgaagatgatgatagttgcagtgcttgtgttaatggtgggtaatatggaaagcaggagtactaatagtgtgaattattatgagcaaggtcagtgcatagagaaagaaaaacaagctctcctcaattttaagactgctttagatgatccaggtaaaaatctctcctcttggacaaataatcctaataataatagcaacaaccaaaattgttgcaattggagaggtatcacttgtgatagccaaaccaatcatataattaagattgatttttctagtgtttatgaaatcaatattaatggtgtaattaatggctcctcctcattagttgaactagagagtttggagtacttggactttagtggtcagaaattcactcaaattcccaagtttcttggtgccctaaaaaatctcatacatctagttcttcctataagtggggttattccttatgagcttggaaatcttaccaaattagaatatcttgatctttcaagttcttctgatcaaaataaaatggttgttgataattttggttggctctcacatctcacttcattgaagaattttgttcttgcaaatgtgcatttcactacatctggccttgaatcttttagggttccatcttccttactaagcttgcgtgtatcaaaatctatacttcccaaagtagatacttttccattttcgaattcttcgaattttctcgaaactctttccctcacacaaaattctatccatcccgacgcgattactttgtttttaaattcttccatgaaccttattgatctcaccttccaagaaaacatcatcaatggttcatttccaaattcctttggccataaagattatcttaggaatgtctatatgtcaaataatgaagttggaagtagtaaaggattattgaaatccttgagaaatctttctaacttaattattttggatatttctatgaacaatattggtggaaccatacatgatctatttgaaaccctatcttcaactaagaattccttggaggttttgcgtttaagttccaacaaacttaaaggtttaattcttgatgatcctgagaaaactttcccatctttgaagtatttagatcttggctataatttggttgaaggtccttttcccaatcgcttgagtcaatttccgaatcttgatgagttgtatttaaacaacaacaacttcactggtctattgcctgatctttcctcaatgttcaacttgaaagttttcaatggagcacataacaacttcaatggtacttcaagttatggtattgctcaactttaccatcttgttaggttagatgtctcttggaattctttcaatggggaatttagcttacaagattgtcctagtttgaaatttcttgacatatcttataattct

SEQ ID NO: 5971 - DNA, 1701 bp, Cannabis sativa
aaaaaaaattaaaacatgagaaagttctaacaagattgctttacaattgtaaattaaaacaatttataaattgttgttgaactatttgtacaaatatttttcaaaatgacaacaacgtacaccatactaataaaaaaaaaataaactgaaatatttttctcaatgcagaatttgataaagaaaaaaaataccaaaacatctcttttggaatgtactagactttcccaatattttgataataatttactagaaaaaacatgctaacattactaatttattttaacaaagctagcattaactttgtttaaagatatattcaattcatatatctctaataattttcttaacagccacgaatttggtgttacatttataactttgctaatatatttattataataatgtattaatgtttacgaaagtagttatcttaaaatactgtttcaataattaatggtatcctattaaaataatcttcttctatctttttaataatttctttaaggaaatatgaccaactttgcaatttgtttgttttcttttaagaaaatatacaaattttctctatcaaagaaaaaaaatattataccattttttttcagcattaaatgaatcataaccatccgatgttaaataaatataatttattcaggttctttcaaaaaaattacatcaagaggcaaatatcattgtaaaaaagtgagattgttgggatttaatttctaaatttctcaattgttaaattaattaaattaggctaattagcaatttttctctccgaactttgacatgtactaaatcatgcccactgaacttttttggccgttaaaaattctccctgaactattaagattcttaaatttaaagacttttatctaattttagtaaaaaacttctaaaatggatgaaagttcagggggcatgatttaatacatataaaagtttgagggacatgatttagtggatatcaaagtctagggagcataatttagtacctgaaacagttaaattaataaaattagaaaaaagtccttaaatttatcaatctcaatagtttaaggggaatttttaacggccaaaaaaatttagggggcatgatttggtatatgtcaaagttcggggagaaaaattactaattagccattaaattatcatcacagaattgaaacacatatttaatattatgagtattaatatttattatttctagttatattttaatttattttttaaaatagaggcctgagcggtgggagctcaatgcggtagtagtctcctttatcctttatctcacctcagggccgatcaactataccaaaaacttacattttaaaaataaaaaaaaaagttaaaaaaaataatttataaagaaattctcaatattatttatgaatattaaatattcttcaacaatgggattcacatgtctaaacttgattcactactgattaaatatataacactaattggtttagctagcataagtttgtctcatatctatactttactttggacccaaagtgtctactagttgttatgtatatatatgtccttgtaataattaacaaaacagtttaattgctcaactgtctgcctcatggccttaattatacaacaaaaccttttgttttcttttctttaaaacatgcttaaacatgtctcaatatagcctttgtcaattttctgtaaataatttaatca

SEQ ID NO: 5972 - DNA, 789 bp, Cannabis sativa
cccttaaatataaattgatccatttcattttcctcacattcccaatttctcattctctttttctctaagaatttcaaacttcaaaagttctttaaagttttgaattttcatattttagaggaaatttctcaaaggttgaagaactttttgatttttaaatctatgaaaatgaattcttgtacaaaaggttagtatcgcttttgtaaatttatttgtatgaatgttcgcatactttctgaattttatagtgataaaaattgcatgagatcaatagaaattatacaccgtttttttttctccttgaaaaattgcatgaaatcaataggattaatcatagtgcagctcaatctcatggtaagaaaatacaaaagacaatttgagagccaattaaatttcatcaatagggggtgcacccattcgtttttttaaggcgtgcaccacatataatacctagtttttatcttttaattcattttttttaaatagtaaaataaataataagtttaaggaataaaaataaataactttaaaaatggtaaaaaaaaatgaaacttaaaaaggaagaaaaaaaaaaagaaaaacaagtgactaatttgattatctaatgtcaagagaaatatgaagacaactatatatccacgatgcaccacaacaaccttatcagagagagaattaaagatggagagatacttatttaaatgatttaatattaatttttattaatttaaattaatagagatggagagatacttatttttaggtaaagtctcacttttttttatttattta

SEQ ID NO: 5973 - DNA, 597 bp, Cannabis sativa
tatttgaaggcttcaactgaactttttaagtatgattctggtggtggttggattgagtttagatggcttgaagggttaattttgactggaggtggtacttttgatggtcaaggtgttaaagcttggccttacaacaattgtcttcaagattccaactgtagaattcttccaactgtatgtttcagcatatagtctgttaaatcatactttttaggctcaaaaatctttactaataaagactgtttttttgggtttttagagtgtcaaatttatgggaacaaacaagacattagttcaagacattacttcaataaacagcatgttctttcatattgctcttgtgggatgtaacaacttcataggtagcaaaatcaagatcacagcccctgaagatagccctaacaccgacggaatccatatcgaaagaagctctcatgtctatgtatctcattcaagaataggtactggtgatgactgcatatcaattggacaagggaattctcatgttgctataacaaacatcagttgtggacctggtcatggcataaggtctttgtacttaacatcctcttttcggtttgaacttactcttcttct

SEQ ID NO: 5974 - DNA, 641 bp, Cannabis sativa
gagtgcctccttttaaaaaaaccaagaacaaaggtataggtgtttctaggtgtggtttagtcttttcaaattgcagcacacattttgcttaagtgacctttgatgcaatggagtgattggatttggttaaataattattttgctgtattttatttttcattaggctctttaactaattagtgtccaagaatgttttttaatttgagaatgtaatatactatagagactgtaaatactacatgaagccttgcctaaattatatcaaacttctagtacgaatgggaaaagcaagcacattttatgattcatagtggtatttgggtatttatatataggtacggtaaaaaaaaattaattaaaaaaagttatttttaattttttattatcatttcaattatttttattttatttttaatttatttgttttaaaaaagaataaattttatttaggattttatttcatgtataattaataacttatatttaaatcaattaaaaataatcaaataatgtataaaaatggggtaatttgggaaatgtaaaaaattaaaatacacttgaggtataaaagtgtagtttttcaaatcagagggtaccaattgatcattatatgaaatagagggtaccaagttaattgcggc

SEQ ID NO: 5975 - DNA, 1122 bp, Cannabis sativa
aaaaaaattatacatggtgtcaagtaaaaatatattagtttttgtgatgtattttaaagaatagagaaaaaaattgttgggagtgcttttatgcgtttttacaaagtgtagattcttgtatgcatttcctttattcttttggataatatttaagtagtaaatatcatttgatgttgcgtattttgtaaaagttattgttttagatctttgatttttgttaaataataaatcgaattttgtattttttttaaaaaaatatataaaataatattttgagttcaatttttgttaaaacataacataatactaacctattatggaagtgtttatgaccagtggttttattttttgtaatttgtattgattatattaaaaagattaatgaaaattgagcttaaaatattattttgtattattttaaattaatacgaaatttgatttattatttaacaaaataaaattcttatcgacaacttttaaaaacataaaattcaaaataatattactcacatccaaattactttcttttttactattttaaattagtaaattttatttgagagcatgttaaaattagtctagtttatttataaaaattaattgaaactataaaaaataattttaaagagcaaattaaaataagtatcaaataattttttttgaaatagttttttaattaaaaacttataatgaattaattataatttgatattctcatcatatatttccacacataataatttaatgacgtcaaaagtgacaatttgaaaaattttcaaataataataataatatgactaattaaaatttttgctcctaactttaacatgtatcaaatcgtgcactgaactttttaagtcgttaacaatttcatctgaactattaaaattgttagattaaaaaacttccatctaattttactaatgaacgcttgacgttgatgaaaattcaaggagtatgagttagcagtggcggacttaggatttaagttgaggtggggcgacacttttttttataagtaaggggtgtatcttttttttttctacattgcataacatgttaaaaattaatgtaaatttatattgtagtattaaatgcagtataaagtaaaaaaaaaaaaaa

SEQ ID NO: 5976 - DNA, 685 bp, Cannabis sativa
caagcatagcccggccaacctcccacaaatgaaaggctcccatcttgcatttggtaggcacttggtgtgcagtcttcatccgagacaacaattcaaactgcaatttgggcttcaacaacctacaaaattaggggagaaatatcagttattcaccaatatttgggggataattaacatatttattatttattatttaataatgtaacaaatactttataattcctaccataaatacaattaaaaagaaagtaggtcaatacccgctatcataaagggaccaaacctctataataaatcttattgtctattgcttttcatccttatttgtgaaaacacgtggcaagcatcagatctccatgaaccagttgtcggttgatcactttttgaggtgaacaaaataaataatataataaaaggtaaagaaagaaatttgagagtgtgggagtcgcgtgcatatgtttgatatataatatataattatataataattttattattttaataataataaagatagaaaagtaaagatagagatttgagaaaaaacttgggaaatgtgtttttatacaagtgtacagattattaaaaaattgggcacgacccattgtgctgccaagttgtatcgtaccagtaagttattattcttgtagtgtaacatacaaaatactgaaggatagtgagttaa

SEQ ID NO: 5977 - DNA, 930 bp, Cannabis sativa
gtaccggacaagagaaaagggcggtttttacttacattcattggctcactttccccagacaagcttgattcatcaacagttaagctgtatcccgaaacaaatatcccatcagcaggaacctgatcaccgatagaaagatgaacaagatcaccaactagtagttcatatatcgaaatcttttgtcgacaaccatctcttgtcacttgaaccgcgatgttcttcttttccttatccaaatcccgaaattgcaaagattgtttgtagtcactaattgcagttaccataacaacaaggaaaatactaagtaaaattcctaaaccatcatacataccatttggccaaccttcagttgcaacaccaacaccaattgatgttgcagcagaaatcataagtattatgagtgttaaatcttgacaagcatcccaaacaaacatccaaaaacctttagggggtttctcaacaaaacgattttgtccataaatgttttgtctgacagttaaatcagttgaaagtataccatctttcaatgaaacacatagttgtcttgctatgccttcaactcctccatgttgttttagagttatttcatcgtgggatcgaactatgttcgagagctcattcgattcaaccccgaaaccagcttcctctgcctctttggagagcttgtgtttagctttgtttccagctacatgaagtgaaaattggatcattattattacaaggaaaaatatgtaaataataattagatgatttgagtgatttaaggagtgaataccagcaatgaattgtaatgctgctttttgaacacataaggctactcttatcttttcctgttacatatgataaaaataccataacagagtaattaatgggaaatattagcataaattagtaatgaaaagatttttctagtatgttttgtaattttaa

SEQ ID NO: 5978 - DNA, 1510 bp, Cannabis sativa
catgattattatctcgattggaagcaaaggattatattccacccctgtctagctcgcgaacgtgatagttgactgaacaagacctaggcaatcgctaaatagtttcaacagtgtgttgaccaaaaagttggcaaagaagaatggaaatacctgcaccttcatgaccactacccctgttccgattggttactctcattccactctcgtgaataacccatgtcgcttttactgctgaaagtagccctacaaatttgatgaactggtcattctcaaagatcatcaatgagcccacatcgccatgcacgaaggctacatccgggaactgattaggaactggcactaaagaaagtaaggtcatgaatggagcagagtagaagaatatcagggctaatgcaatggagattattagcaccatcaggagcaagagtagcatctagctcccaaaccactgaaaattcagacgagaaggcatggttgttgagagatgagtgactgagagagaaatagaaaagctataataagcttaatacaaagatactgagagacaatggatttattccctaatcgttacacaataacagaatagaaaatgggaaatacagcaccacagtcacacttatcactctaacatatgccacattcaataacaaatttacttaagaattgtatattatatgtctatatttagacaatcaattgagaacaaaggtatataaattaatcttattttgttgtcactataccgagtaacatatataaatatatatatttatatttatataaaagtcaatcaaaggaaaaaggtaaacaagatatacatatatacatacacaattaggccatacatttttcaaatataggctagctgaaaaacagtaagcatgtatgccaactgaacataaataaaaattcactcccttaatcatggaatatgattatgggagggagtaagaggagagaatggtctaagtaaaatcatgaaagagcagatgaatttttcactttattgaaatactattggcaaaaatttcagcctcttttcatggatttacttacactcaagctattgaaggttctatcatcttgatgtctcgatccaattgtaaaaaatttccaaagtatctatcaacaaatgtcctaaataccttctatatttacatcctaaactaaaactgctcttgtaattccaacagatagagacagagtagaagataaatatgagtaaagtaaaggacacaatgggagaacgactatgagctcataacatacattttccacaacagttagaagaaaatactcaattagtattaagatcacaaattgtaggaaataaagcatgcccaaaatgcccctacatcaacaccacaaagtacaaaaaaccaaggtcaaaatagaccttccccctcttgtgtggatcaagagtgcctttcccaaaacacagccgttttgatggctttaaaagactcttattttttggctgaaaccctagcatgttgggttttatgcccta

SEQ ID NO: 5979 - DNA, 913 bp, Cannabis sativa
atgattttgattatgatgtccttcttcgaaaattgtctccaacgttggccaattcgccgtcgaatatttccggtgccggcgatgtaatctcacaaggttaggagctattgcaccatgctttaacttcattctattattatgagccactttactactctctttcaccattttcatgatcaaatataattaataatataaattatatatatatatatataattataaccaaaaatattgagagatgaacttgtttctttggagtctttggagaattgtaataatattattattgttgttgttgttgttgtggttttctcatttctcaaattctatctctatttataaggtgtggttggattttaatatatattatctgtacatgtatgtacgtaaattaaggggaaagtcaacgtggggatttgatatggtcaaacaaacacagtggtttgactaagttttttgagcgttgaattttcttacgcaaaagaaagagcatattataaaactgtactacgtcgttatgtgcgccagtggttcacaatgcttttttgtattatttttacactatgacaactttggtgggctaaatatatatattatatattataaatataattaagctcttttattatgtaaattaatttagcaagggtcataactaaatttatctataaatatatagtttttttatactagggaatttgtatttaattaatttaatggtatatatatatgaggaacacattattttcatttatatatatatagatattagaacatagtgtcaaaaaattattagtgtaataatgttttaaaaaatgtattaaagttgtcacatattcaaaattatgttaaatttagtatatttttctaaattaataaatgaataaaaaatgataatttttgtgtattc

SEQ ID NO: 5980 - DNA, 611 bp, Cannabis sativa
aaatttgagtgctaagagagtatttagatttgcccactcaaattaagggagtactcaggatagtgtggaactgtgaagtctttcacattctaagaagatccagactcaaattcttaataataccctgcgacaaaaagaatcaaggaatagagaatttgaacgaaatgagacactaaattctgctgcaatcactataaggattcaataaacccttatatgtttatttaattattttagaatctatgttagttcgttaacaacaacatacttgaatagtaaaataaggtcctagtaaaatattctttctaacaactggtatcagagccatggtaattttttattgttcaagtaaaccatatcaaaaacaatttttcatgtgtttttatgtgagatttagatgttacatgttaagtgataatatgccttgatgattgattgtattttgctatttttctatataaactaatgttaatttttttttctggaattatttatattgaaacatttggaaaaattaggcaagtttaatttttacagaacttgatttcgatgaaaaattaaaagagttattggcttttcgaaatttgggcaacatggctaccagcatcact

SEQ ID NO: 5981 - DNA, 570 bp, Cannabis sativa
tttttttttttttttttgtgatggtaattaaatttttcacaatggtttggtcgagatgataatcggcctactctttaacacaacaatgatttcaaatgcaattttcatttttaggatttgaaatagatcgatttttttttttttttctaagtttgtttaggttttttttcgacaatggagttttctgattcagtaacagaaatttccttgaaattaattaatcagattgaattgatgcatgcactgattaaaaaggagattgagttaattgtggaggagttggcgaaaacaatttcttattttgattatagaaattattttgattggacggtataaaacttacgtgacatgttatgtacactcatttaattgattaatgataatgatgtaaatttaattattagataaaagattcccaaaagtacaagtattttttgtcctttttttaaaaaaatatttacgtatatacatacatactatttttgtaaaaagaaaatgtctttcttatcattatatataattagtcataataattgaggttaaaataattgaaaataagacagagtaaca

SEQ ID NO: 5982 - DNA, 933 bp, Cannabis sativa
gtcccatggtatttcaaaaacatggggtcccacaactaacacaacctaccaagtcatagattcggcaatacattgcaaccaatactatgggtcagtcaactcaactcattcaatccacatcctcaaatactatatctaatttcttaaagttgaccaaaccaaaatccaaaataatcactctcactcttctataagcttatctacaaatgaccccatttaatcattactcttcttcaacacccctaaaaaaaagtctcaaaacataaaaccaaccaaactcaacccacagatttgactccactctggtttagtctcaactcaactcaaacctatccatatatataataagtgatattattgaagatgtaatattcacaacaataataataatatggcacctactgcagcaatgcttatcttatctaacacttacaggtcaagtaatactagttgtcaagcttcaactcaggctaatgcaacattttctgggctcaaaatctcagtgctgaaatgggtttcagaacacaatcccatatctaaaccaaaatcagatgagaagggttgggaaagttttattgataatcaagatcataatcatgaggctacaatcaaaaacaggtttaaagaggcacttgatatcaccacctgcttataatcaagacctagttcattttgttttttatatgttaaaaagtttattctatatgtatttttttagggtgtttttctaattaatgctaatttcacttaaatttgtacagttatatttgaggaagtgtcatctgagttctacaatgtacaatattcatattattttctttttaatttcatatagaataaaacaattgggagatttgtatttaaattgtttaatttggtaaaacaatccttaatctttttcttattaataaaaaattctttttgtgtttaaat

SEQ ID NO: 5983 - DNA, 768 bp, Cannabis sativa
agctcctcaagctttttgataatatagagacactatagtcatcaagcagatcattaacaatttcaattggtggatagtttctttttaggttaatatatttcttttttatgacatttttaagtagattgcttgtagcttaaggatgatctcgagaagtaatatccaatgagtacctatgtgtatgtctaatctttctaatgatgaacatatctagttttccatgttttgatgctagcaaactccattttcaattgtcatctagacaaacaatcttgcaatcagctggtgaggatctttttaccttatatggatgatttatttttattgagtaaaggttgagggcattttttagagttgctttgtttttggaaacctatccaatatgaatttcatgcacctcaggatttgtaatcacttttgtttccaaacttgtttcctcttccttctcaattgtttcaattatgaagtttttataatttgtctatatagctagctttgtatttgtaattttcagtatattccatgtgtaattcaatgtgatcattatgtttagagcttctaccaatgcaagtttcaggtaatgtgtccgagctatgtgtagggtcttctgtggttgtagctaaatttatttactcatagtttacctttatagctaaatttattttctcatagtttacctttaaagggtatattgtctcattatcgtttttgtttctaatttgttcgtagaatttttaaccattatcatctttgatcttcataggtggc

SEQ ID NO: 5984 - DNA, 610 bp, Cannabis sativa
ctgtgaaatagccaaggtattctttctatcattctatttttcagttttcccctcatttttttaattatatttttttatgcttagctaaaaaagaacatgtggctataaagagaagtaaaataggaataaacaaataaattctgtcctgtcaagttttgaaatgatagaaagaaagaaaaaagaacaataaacatatgctttggccagtgagctttaattgtcaactgaaaagttgtttatgggcatctcatggtggccctagtaaaatgcacatgaacgaaagcttcttttagtcacagtaatcatgcttcttttttcttcgtcttctctttcattatgttactatgagagtctagaaaacttttctgatgttgtttatcagtgttcctgcttgtgcagaagatacattagtaaaataaaaataacgaaatatgaaaagtgatttgaatttttaatttttttcgaaaaaggaaacaagggcatgagcacaagtgacctactcccaagtatattgagagaccttgcttatggcagaggaaggccatggtttcacaaaattaaagttctaatcaaactaaacacaaaaacaagtacagatacttacaacact

SEQ ID NO: 5985 - DNA, 1015 bp, Cannabis sativa
ccattatagaagttatggaccaacatccacttctccatcccgtgatgggggatactttctgataagatccttaaacctctcccaagcatcataaagagactcacagttgagctagtagaaattgttgatctcccctcttagcctgacaactttagctagaggaaagaacttagaaagaaactttcagggccaattcattccaagtgttgagtgaattaggtggtaaagacaacaaccaactcttcgctcgttccctcagtgagaatgggaacaaccttaagcgaataacatcgtcgctaattaactctatttatcttgagtgtttgacaaagctaaacgaagttagctaaatgcatgtttaggtattctaacggaagtccccaaactggactgtggattgaaccatatgaagaatggttggcttgatttttgaaattatttgcttcaacagcatgttgccttatataggactggatccttgtcatggtgggtagcacataatccctcaaacttctgtcaagttgattgttgccattatcctgatccacaacaaaccatcatgcccattatgagccatgacttcttctaattcaacccttgtagcaactttttttaacctcttgtttcttctattttgcttgcaggtcttcttaatctcaagatcaacaggtactcttctagttggcttttgactgcgcataaactacatgttcttgagaaaagaaaaaaattgacacaaacaagttagcaaaaaaatagaaagagagaaccaaattataattaaatttaattgctttaatattaactaaaatagtccctggcaacaacactaaaaacttgttatggattttccaacacgcaagtatacgtatctttcacaagtaataatagactcacaagagtgagatcaatcccacaaggattgtagttaattaccaaacaattaaatttctaattctatttggtgacaatacaaataagaaaagatattatttctactaaaaaaacaaagaaa

SEQ ID NO: 5986 - DNA, 1479 bp, Cannabis sativa
agagagagagagagagtgtttcttgtaccattattgagagagattggagctagactccattattatacagattgacaactcaaattaataaagagatcatcaagcccttgaggctgattttagctgtgaagtagaatggtgtctagccaatatttacttgaaccacgtatatgttgtgttctttatgttttcaattctgttttagactttgatttctataaaccagtctatgatttatatttgacgattaattattttcttgtttattttgtgtgtttgttcctgtttgatgttgtggttacaacagccacaattaaagttaatgttgccaaaaaatttcatttcatgtaaaaataaataaaatatgtaaggttataagttaatgaattaaatgaatcacaatatacagtattgctgccaaagagcaatgttctttatcatttatataagagaactttatcctaattatttaccacaataattattttacttttattttcactgcctaaactgacattgatggtttaatacactagaccatcaaatattatggcatttacattttgtcacacaaacctaaaaaatttccccaataatgcaaaacttgcataatattctcgagttgtgtaacatttactctgttctgctctgtttcacctactttcattattgtacatcttcaaatgtttggaacaagtaaggtaacacccatatttattcaaatcacacatattatatcttctcatccatttattttaataacaagttaattcatagagacatattaaggtataataagcatgtttcaagttagaaccttgtctaatcaatttttattaaaccatagtcaataatcaaattattaaatagatttcaaaaacttattcttttgtattcctattattttcattcaaataaaaaaaggcaaaacttgaatagaatcgtttggctgagctgtcccagtgggagtaaaccgagtaagatgagttagtagagtcggtggagaactgaagagaagctggctgccacgtcttatgaagtcaaactctttctctctctctctctctttacaaattaaaatttgattaccgttgtccttgtccttctccaaagtgaccaagtctacattgctctaaattgattgaaccccactcctctttagaattttccagctcaagacgtgctaccatgtctctttataataaaaaccaaaaccctaaaagccctttataccaaaaccaaaaaacaaaataatatacttattacttcacactttttattaaacctatcataactcataaaaccgtgttgacaaaacaccctaaaaaacaatccatatggcgaaaatcttaaaatataaatattattttgaaaataaataaataaaaaaaaacctttaagttaaagaccaataatcataaagagattttatatataaatacagcatgtgaatatggtaagaggcactctgtccaaaag

SEQ ID NO: 5987 - DNA, 1870 bp, Cannabis sativa
ggcggcgcccaagggtgcataaaaaaccctagaagagactttaagaagaagagagaaaaaaaccataacagagagagagaaatctaatcccaacgttaaactagttacttttcaacttgctcaaatttaatttctttaaattgcccacatttattaggacaccaaaactatatacagtaatgcgattccgaaggcgcggtgtcataaaatctacagagacagaatgtcgtttacctgacaacccaacgatatgtcgtttcttgtttacaaaataataaaaggtaattattattactgcgaaaatatataaaaagaaaaagaaaatgtattatgaagccactacatgcgcagtttgtctgtgtgacagctcgattccatatcattcattcaatacacaccactctcacacctctttccattaattctctctctaatttattcccttttcttcaacttcgattccaactttcttttccctttacgttttctcattaaaattctgtttggttactaagaaaataataacacaggaaaaagaaaaaaaaagctaaaagttgaagtagagaaaaaagcgcaagtaaagcgaagtaccttcatcgaaaaacgacatgtcgtcgtcggacgatgagtcgggagaggagtaccttttcaagatcgtgatcatcggcgactcggcggtggggaaatcgaaccttctctctcgttacgctaggaatgagttcaatatgcactccaaggccaccattggagttgagttccagactcaaagtatggacattgacggcaaagaggtcaaggctcagatttgggacaccgccggccaagagcgcttccgtgccgtcacctctgcctactaccgcggcgccgtcggagctcttgttgtctacgacatcactcgccgaaccacattcgatagcatcggtcgctggcttgatgagcttaaaagtaagttcaatgagaccatttatatatatgtgcatatttgtgcgtgcgcttgtatatgtttgagctgaagtaaaagtactctgctagtgcttaagtagtttgtttgttgcattgttctccttttaggtcgtttcggattttcctttttattggctctgaagcattttgttttttctgttggatttgcttgttgtgaggcttgcgactcttttttggttttgttttcagatctgaccttatgatgacgcttcagggttaagttaaattatagaacaaagtaattggttgactcttttctttcttttcagggtaagagtttgtgtggggataataaagtcctgattagatttaaattaatgagaggttagctgtctatccttattttggtaaggcgtgtacaattggataggcacaccgtttatatgttaatgcattagacagaggttgtcttgcactgcatcatctgtatttaatcatgtttggagcactggggttagttatttgtgtgatctcattaggtatccagttgttcttctctttctgagtgtttgaaagcaataattatgaaagtgggcagcctgagatgctgcttttattaattggcttttgattatttgactggaattcttactatcttgtttggtcgagtgtttactttatagatcttagaacattcatgtggcattattccttcaacgtatgaaagttactccatgctggaaaaactattatgttctagggtttatttgggctactttataactttaaagacttaaaagaggtcaaagcaagaataaagaatgtccaatataaaatcccctatcaacctttggagctaggggcatttgttgtgcgtataaatgataagctaccaatacgttagtgggctagttaggcactgtggtcttagttgttcggttcagat

SEQ ID NO: 5988 - DNA, 1687 bp, Cannabis sativa
taattttgaatgtttcttaccgaattctgatatatttgcagcggttcctcggggacccattcttaccccagaaatagtcgagcgtcaccaaaccctactaagcctggcatatgggctgcgatctgctaaattcttgctgaacgagcagaatctaaagaacgtaggcctccttgcttcggacaaatatacttgtgattataaagcacccaagtatacctcgtggcaaaaggtccccgtcttagaaggagaggaaaatgatgactatgtggctcacacacattttctcgagagagttcctcctcggttagacggaagaccccgaggtaatcaatgtgggtggtcgcccacagtgcttagggctgaatgtaacactttagtctcctttcgagatagttggtttaacttttttatttggaacctcttcttgtagatcgtgtctcccataggttcaatagttggtaccctaaattccacgtccagattaactgtaatgaatcgtactatggtatagctgagcaatatggcaccatgacagatagggcaggtcatatagatgggagctgggatttagaaccaatcaagccctttgatatattctagattacaggatctagggagtttagtgaatactataatccttcctcgccatcctccaaagaatatggtaaccctccttagtgggagttcttccacattcctactccttttaacttaatgttaacaatctttttcttgctttgcagatatggatgtggacttggagaacctattcaaaagccttccccctgccgacaagatacccaggaagagggtcactcaagctgacgaggccttggattctgctaagggacccaagaggactaagacaaaggccaacaaaaaaagaccttagagacagcttgtgatcgaagccgataagacttttgaggcagtgaatgaagtccctgctgcgaggaatgaggtccctgctgaagggattgaggtccctgctgtcaggaatgtcgaggaacagcctactgggtcggtgcaccaggtgaaattctttagttctcgtccggaggtggttcttctcgagccttcttaccctcttccccttgaagtcaaaactgaaggatcacaactaggcttgcaacatgctaccaactgttggcgaaacctcttgacacttgaatccggcgactgggatcttgccatccgaggcagtactgaagacttggccaaaagaagttgtgagcttctgtttcaggttaagccactgatttctttgtgtctacccttccttattctctcctttttactaactttagtttgtcttttcttctcaggcttcttttctcgttcacgccacacatcctcagtcatcccagtggatcgaaatgtaaagttagtgaacatagggatgtggtggtcaaaaagaggagtgattctgaagttgaggtttcacaggcaaaagaagaagcaaagaaatagcatcaagctgactagcaaacgatcaaggaacttgaggattctcttaaatccctccaggctgaccttgctaaaggcaagctgatcatgaccaaaagctcaaagagttagaggttgagactaaagagagggtcaataatattggccgaagcactatttatcagatttgttcattcaatcccgagttgaactttggctttttaggcgacaaggctgaaga

SEQ ID NO: 5989 - DNA, 700 bp, Cannabis sativa
gatggctattgatgaagctctcgatcccgatgaggagacaatggtggagagcatatacaaagttgttgagttagcaaggcattgtactgctcgaaatccatacctaaggcccgacatgggacatgttgtcaacatcttaggttctctcgtcgagcaatggaaaccttcttgccaagaagacgatgagaagatggtaagccgacatgagcgtaacatgagccttcctcaagctttagagagatggcaaaccgacaaaggaacttttacaatgttcgatgatatttctttcaggggagtttatcaaactgctcacactacataaaccgttcagactgtaatgtattgtagtaaaatatgttgagaattaacatattggaattaatacaaatatatatatgtaacatacctaaaagaattctagaatttgcattaaatcttttttacatataataaaaatcatatttatctaaactccaactagttattttaataattagtgtaatattttggtgcatatttttaatttacatattattactcaaaaaattagacaccacatttgcattttcagagtctttttattagtttttttgagataagtctttatattagttctacaatggttttgtgaatttttgggaaaatgatgggaagaatgttttgtaaaaatgggttttgtgaatttttttattaggaggga

SEQ ID NO: 5990 - DNA, 1040 bp, Cannabis sativa
tttagtactttatgcatgatgtttgtgctttacctgcttttcttgctgagtctttgtgactcacgggtgctttgtggtgcaggtaagggaaaatgaaaagtggattagccatgagtcagaggtctcccaacaaatgtacatatcagcctctccgtcctctgtgcttagctgacaggattcgtctttagtaatattttgagtatataacaatatttggtaacaaactagtacagtggtattttggtaagaagtttgtaaccaatgggatcctcgaatctagtaatattttgagataaaatttaagttatactttaattaattttctaaagttttaattaattcatttttttcttagacttttagtttattattataaactaatttttaaagcacacgtgtggcgccttatgtgttaagacattactaaacatattgatatacagtattatttgattaaagagatggtggaatctaaatttttaactatttcacatgtatccacatgtgctcaacttgctgatctatttacaaaagcacttaatgcccacactttttctcatctcagaaattctattggtgtgtgcaccatctaacctggacaaagtagcatctagttgttatctcaactatgcatgtggttgtatttaatctttcaattgttgtttgtttgttcttgagtcggatcacatatgaattgctcgtgtaaagtggtgaatattgtgtcaccccagttgagaaggctaccttccatggatgcaatgggaagagctacccttgtaccaatatgtgactcaagtagtttggtccttctcttattagttattgagaaaaatccatgggctgacgactacatctctatgggagcgtgagccgcaactggttgacaaaagtcattgagtgtagatatcttcgaaagacattttttcacaaaataaaaaaaaatgttcattggctattctcttggcctttgctctagagagatgagtgttcttccttgattaatctcttgattgctcacatgaggtcacttcacacactaa

SEQ ID NO: 5991 - DNA, 1200 bp, Cannabis sativa
ttttccgaaaaaacctgctagtagtattttctcagatgtttaccgttccaataccgagtaactagaaccaactctatgttttcatcatacgacccaatttgtatgcttctgattttgtaacttcagttactttgtatgtcccttccccatttggtccgagcacacctttcgcactatctttagtgttaaggaacactcttccaagtatcatatctctcacaaaaaaattcctttctctcacatgcttgctgaattacctaactactttttgttgataagcttgtagctttaagtttgctagatctcttcattcttcaatttcatctaatgactctattaagagattgtggttggcctcctaatcataggttaatcttctgtgggatgaaggctgcagttctacgggcaacattgcttcatagccatagactaatgcgaaaggagtttgcccggttgccatccatttatacgaccagagtatctcaggtagttctttaagccaattacccttagcttcttcaagtcattttctcacagtgtccttgagcgtttctttacacctttgacttgaacatttttttgggggtgtgtgactgtcgagaagcttttcacaattccatgtcttgtgcagaaatcagtgaacatttggctgtcaaatttttttcccttgtctgacataattttttgaagaaatctgtaccaacgtatgatgtttttcaccacgaagtctaaaactttattggaagttatagtggctagtagtagggcttctatccattttgttatataatcaacagctacaactgcatactgcacaccgcctttttcctttgggagttgtccgatcaagtctattccccatacaataaatggccatggactttgtatttggatcaattcattgggcggagctctgggcaccctagaaatctttggcacttgtcatatgtcttcacatatacttttgaatcctcaatcatagtcggccaaaaacaaactctgcccccagctaggttgctatagaacccttcatgaacttaagtaagaagtcgtgcaactttaatatgattgttatgcgaatcatgcaatttgttttcattttacaattatttgttggtcatctataattggtatctatgaattcaaatcaaaattttgaaaagtgagattttgaatatgcttgatttttttttttttttt

SEQ ID NO: 5992 - DNA, 502 bp, Cannabis sativa
ttctaatatgaagggtgtttatagttttgtatggttaaaaaatgttaacaatcttttcatgatttttcattttaaggccatgtttggatgttcacatgttaagacaacaattatagctgtaaaaattgaatttttgccacctacataataatcatttttctcttgcttataatgagttatttttttggttagatatgtgtgtttatttagatcactatatcattcttgggttaccaagtggcaaagatggtgccaaacttacattaaaagagataacaaaggcatataaagtaaaggcattgttgttacaccctgataaaaatccatatgattcaaaagccactgctcaattccaaaggcttcagtcttcttatgacatacttaaggatgacaaggctcggaaactgttcgacgaggagctaagccgagagtctgagcgcgatgccaagagacggaagatggattctgatttcgatagggttggtgatgaaatgaatttttc

SEQ ID NO: 5993 - DNA, 1116 bp, Cannabis sativa
ctctcttttgtaaatttacgtgttaagtataatcaagtctgaaattgtgtgggcaacagcctttgtaaataatactaaaaaggttgtttttttctcatcttcttcaccttttttctgctcccattcatataagtttggttatgacgcaaccctgtaccctagaagtgagcccaaataggccagtgttatactcaccttagaaggagttatgaagattttagcagctaatgtcccctgagaagtgatggacctgaatccacttcagtaaattttatttttaggtttagatggattaatttttccagaactccatgctatgatagctgtttaatagttggagttggtctcataggctagtcgaaatgtagatgaattttgtctgaaaaatcattgtgagaatggtaaagggagcttttttgacaccaacttaatgtgaagatgaaaaaaccagagtaaattcacttgtttgtgtcgtactgtcattaataaggaacttaccctagtagtaagcccatgggttctaaactttataaaggagttagaaaagcttgtattctttccatagtattatattctcttttagaattcatcctcacccaattgacccatgttggcaagttgacactttagaaagaaagttcatctggaatctaaacgattcgtgcaattcgccagttcattttgtttgaacttaaaaagtaaaggttggagcttgctcttgctaaagtttgctttattcctttccagtcctacttgtacactttagtgcttgtcaattcttccttacgtatcaagccaagaagactatagactgaatcttgattaacaaaaaaatagcaatctttgtagagcatgaataccatagactggagatattcattcacatgtactttttaaacgttttccattctattagatgctctttgcataatagttagatttgacatcattattattatcgttttgttttcaaaaaatgttttaattccttaataatttgctttttgacatagagagtagaaatgtatttggtgatttaggatagtgtggaaccatacaagtatagtaatacttgtgtaatgttgaatattgtaataatatcttagctgatccttt

SEQ ID NO: 5994 - DNA, 2101 bp, Cannabis sativa
attataattttttagtcaacttcaatattcaaaaatacatattagaatattttttttcaatttttttttatagcaatgttcgttatctctgtaaattttgaaaatttttgaatagtttacagaattgtaaataagtttgaatttttttgaatgagagtggtaaactcgaatatcaagaactttatttttagtattgaaaattattcgaatttttttaaaaatttatagtgatgatattgtaactaaattgaatactgttatgaaaaaaaattgaaataaaatattctaacatgatttcggatgtgaaaattgattaaaagattgtaattagtacttctaaaaaaaaatggccaaaagaaagaagttttacataaatactagatttaggggtaaatattacaattatattgccacatgacagaatttacaaaaatactgccctaacccatttttatttcttttatattgtatggacagaagagtgaattaggatgcccccaccttccaaaccgacgaacagaaccacaaaaaaaaccagaaaacaaccatttatttcggcgatatgaaaaaaaagtgaaatcgacaataaaacaacaacaaacagcttcatcaacaccaaaaattaacgaatcaaaaaggttgaaaacttaaacccaactaaattcttttaaatacaaaattaaaaataatgctcaaaacatagatctggaaatcaataatgaaaatgatttatagcttctaaaattatttttatataaatgcatgattgaagtaaatgcattctaatatacataatttttgaagaaaaaaatgtcgattagaaattaaaatagaattttgaaatatccaaagttgtttaagagtcgttcttgataattacatgcaatttattggaaatcagagaaatagataaaatatggacactcaaatgatagctggaatactgaaacaaaaaaatacaacgtcgatggttgttttagcgttgttttacaattgttgtctgtttgtaaaaatattaaattgttgaaatactataaaaaaaattccaggttatagaatctatacccgttcttttaaagagtaatggacaatggaaagaaggaaaaattaagtcaattatgaggctagtagagaattcataccaaaggattgcaaatatgaacaactcgtacatattctactcttttcattggaatgcgacccaacaaaaataggtcaattgggtcgaatcgagcctcacctgccatagaccaagcccgacctgatatcactttggcccgacctgacccgacccgacccgactactttcttcagtctagcgggtcagaggtcgggcccgacctttattttttttaaaaaaaaaatcagtttatctatttatttatttttaaagaaaaatagttgaattcattaggtaaatgaattcccaataaaaatagaagacatgtttaaaaatttattaaattttccataagttgattttgcattgtggatgatgttgtttttaagtagtttttttagataaatagttggattcatttggtagtaaaattcattaggtgaaggaattcctaataaaaatagaaaacatgtttaacaatttattaaattttgcattgtggaggatgttattttaaagtattttttgtttaaagataaatagttggattcatttggtaataaaattcattaggtaaaaattttaatttttttgtatgaaaatcggtgattcaattatgcataatagaagaaagtttgagattggacttttgttcctaacaatatttggtacatcattaataactaccgaccataaactcaaacataataactaccaaaaataaatactaaacactacattttgttctctatttctattttgttctcatccatgtcctcactcatatactaaataatgtatattctaatcatcaagattaactacgtaaggctcctgcaaaaaattaaaaacaaagaaaagtattaataataaaaactaataatttatttgataaattataaaactttaactaattatcattgatggatcaacatcactatcttcatcattcacattattgtaaaaacaaaacaaaaaaaa

SEQ ID NO: 5995 - DNA, 598 bp, Cannabis sativa
gtagttaaagcgtgatgattttccgtgtagtagtataatagaatatctgattatttggtattggttcaaagtgttataactttgaatgtttttgtcgtctacttttggtgatattgttgaggattgtaaacagattttatcttattttaatgatatttttttatgttttctgttaatcgagttgttgatcgctttacgtctagagcgtctcgtttatatgttaatcgtattcattcagtgtgtataatctctctgttaatgtttttgacattgttaaagctgagttggtctaattaaatgaaattttagtaaaaaaaaagaattcttgaatattttttattttcaatcaacattaattaataactaaaattataattttctaatttactccaaattattaagtttttaatttgtgtatagggtacttgttagcctctttcttgtgtgttttaatcacttcactagcaagatgaaattattaggcatgcctaataatttgactaataaaaaatagctataattaataactttttttaccggttgttattttaacaagaaaatgataatttaagagatctcttatcatttattaattatt

SEQ ID NO: 5996 - DNA, 1170 bp, Cannabis sativa
tccagaacattcactgatgaagctgattctaatactgagagtattggtaaaacttttcaaatcctctctctctctctcgctctctgtgtatatatatatatccacacctatatttataggtgctatcttttattaactggattcctggattctcagtggataaaggtgtgcaagctatcaagctagggtggaaggaatacatgcagcagcctgttcttcctgcaagccttgcctatgtgctcctatatttcaatattgttctcactccaggaagcatgatgacagcatttttaacacagcacggtattttttcctttctttttccataacatgcaactatattgaacggccttggttcctcttcatatatcaggccccaatttgttttgggaattctactttgggttatacattaagcttacatcatctttctatatgagcaaatataatatacaatacatggagaagcttcgaactggagatgtaatctaacattgatctattacatgccagtacaagcttatgatttcaaatgacaaagtggattttatagagtattgttacattgtgcatgtgatacagccacttatgatctgtggttatttattacttaatgcttttaccctggggctcaacaagggaatttatatgtttcttctcttttctaaatacttccttcttgaattaacatcaataaatgattctatatagcaattcagtcttgagccttagcttttttatttgtacatatgtatcttttgactctagtttttaactgaatttatattctttgacaggtcttaatccatccatcatagggagctttagtggactatgtgcggttatgggtgttgcagctacatttgtgtctgcaatcctgatcaagcgacttggcattttaaaggttctctatgttttcttctttctactttactatggttttggattgtgttttcagttttcataaaattattctaatcgccaggcaggagcgcttggattgatatttcaagcttcacttctcaccatagcagttgctgtttattggagcggatctctttctcagcatagtcctctgctcttcttcttgtgcatgattgtaagattgtttctggctttcttgtttttggtaacccaattattgataaagttttcactagtgtgtactct

SEQ ID NO: 5997 - DNA, 979 bp, Cannabis sativa
aatattgcaaaagaaagacttaatttagtaccattgacattgataagatttataataattgctttccaactttactttaattataactgttaatttaatatcattttagtatcttattgtttgtcataacaataacttacaacccttctttccaaactcttcaaacattacaaccccatcctcattagaataatactgcaataaaattaaggcacttctaatcctctctttgtaacattatatatgtttatgcataaatggcccacaacctctgttttatcattaatctcaaaagtcccttaaccgtggtatacactaatatactcactctgcaataacaacttcagtaattcttgttacaattacatagacaaaaattagtcaaagcaattgcatagacaaataatcttcaaaaaaaaaaaaaaaagaataagaataagagaaaatggacaacccaatgaatatatatattgtagtgaatgaatcactctcaagaacccaatcaagaacacaatgcagcaaccaaaaacaagcacaaataaccaacacagtttgatcacaaactgtgctgatataaccagcaacttaaagatcaattcaaagagaaaattaacaccaagagtagataaacatagaccttttattgatgttgaaaacagtacatacaatgaagaaaggatgagaagaaattacattgaacctcaccaatagggaaccaagatcagttgctcttagttcccttaaacatccctccttttcattcctttattactaaaatctgattttacaacataactaaaaagtgtgttacaaggtctatttatagtatgtgaagttggtcgtttgttgaaacaactaactcgggtaccaactgtcaaaacagttggtgacacatcagcaaaagataaaacataaaatggttgaactaaacaccacatatatgttacaataacaatactctaatagtcactcaaactaa

SEQ ID NO: 5998 - DNA, 1230 bp, Cannabis sativa
cttgaatttatgtactgttaacttctcctagctcttctagtgtattcttttattgtttttagtagaagcttgccaccaaaatttacacattaattgttccatctcctgacaagtatccaccggtaagagaaaaacactcatagcataactcggtaatgattgtgccacggttttaattagaagctctttacccgctttagacagaaattctttttctcattttgtccttcaaaaatttcagtagcattgtcttgttacgcccccaagatattcggatggcccaaataaaagctattattacttgataactctacgaatacaatgatgatatataataatataaatttataattaaattgctatttatacaatttttttaatgaacactaaaactttcctaaattagtatcacattagtgatacattagcaaatcattttgaaacataatgtaaccaaaggaatcatttgcaacaatttttaattattctaaattaaaagtggaaaatagtataattgtaatgataataattattaacacagaataaaccatagacaaaaataatggttattcttttaataatattaatacatgtaaactcttttcaaaagtggcaatgacaacttttgatatacacatcccttttatgttttctttagccataaagaggatttgagctataatatgatcttttcctatgccaaacaaatgtttcctccacagcactacatgtttaactggctcatatttacacacacccgaggaagaaaagaaacactgagatacaacaatggacagaccaccatgtaaactcatctcatcaacaaacatgtacaatgttatggaaagcagaaaatctggatcagcaacctcttcttttactataatcttggacaaagatgataatgaaatcttgcatcccttcatatgaatctatcggatgaacgaactctataagtactcgactttattgcttcgtcgtccttggattcctccaacatagcaagaccattcagaaacttatccatcttagctgtacaaaggggcatgtctactactgtctaggtctgagttcgaatggacatcatacctataataactttctcacatctgcaagataagatgtatcttgtatcttgttaagtacagcatgttcctcgaggagtctctatgccctctatttcccttaatattcatgtacacagaagtagactgggctgcatgataagga

SEQ ID NO: 5999 - DNA, 1142 bp, Cannabis sativa
tatttaatcgtttatatattacatgcataatctagaactcgaaccaggacctccaacacacacgcactcacctatagccacttgagctagcctacttcacttcacagatgcattgcccattttacctcagaaaaattaaaggattttttttataattaactaaataaaaagtgaaaaatattaaaaacaaaaataaaattatacaaaattttaaatatttttaccgcttataatttatttttttattcaaaaattatgacttgattcatattgttgtgtttttatagtattttttattgtatttatgtttatgttgtttttatactactgtaaaattataattaaaaaaaatacactaaatactaattttttttcaactttacatttatactttaacaattttttttttttttatatctactttctatatttaattttttcttttatactactttttacttattaaaacttcaaaaaaaaaaaaaaaaaattcttcattataggatatttttatatcttctttttttaatattttttttttctctcttaaaaattaaattaagaacactttttttttttttttatattttttatcttttacattaaaagatataagtcaaagtaaaaaaatgaatgctttactttttatttgttcatagaatttttatcaaaaacaaccatttttttaatactatcaaaaatagaagagataactcccgttttgaaagttatttggcgtttttatacgatatccgcgattcctctcaatttataattcaatacacaaattaattaattatgctaggttagctacatgttgtgtattattaacaatttctaccgaagatgataagatgatatcttgagcaattacatatctaggactattaccacaaattgatgtctcgagcgttccatacacattacttctcaatacaatttctttttggatgttttgtagtttattcagagttaatttatgaatgatttgtatattttaacaagattgatgtcttgttatttttctgttgatttatagttatttttttgttattttataattatttttatgttgttatttaggtgttgtatagttggttttctgttatttttgtatgttttttttgtacaattgttattta

SEQ ID NO: 6000 - DNA, 1381 bp, Cannabis sativa
caactataataccaagtttaatattagcaatttatgtgtgatgatattattatttttgtgcgagtaattatgtatgtacgtatgtgtttgtatcgatttgtggacaaagatgattatatgagcttagaaagtatgttaataataaatcttgtgttacatcgataatgcttcattagacattacatatttatggtagatatattattagcttaatataaatagatattatgatataatttcatgttattagtaatacatcatatatattttatatagtattaaaaatgaatatatattattagtaaaaaactagtatgatatattatgatagtttaaatattaatagtatatcttaagatagtcatgttagtataaagaggattcaagtttagatattttagggttatttaaatttatgtttagatatgtagtggccaaaaattgcaccaaatgctttttacggtccaaattaaaattacaatccttcaaaaccaagtcagtaaatataacccagtcacccaaaatacattgagctttggctaaaatacatggcccaaatgagcccagtagctacaagacaaatcaaatacaaagaattggaacgagtctataactgatccataagaatcgatccttcatcctagaaaaggggaacaccactttccacgttcgttcttcaaaatagatgaatttgaccattagaggctctttaaaaggagaacccagtagttttgaatgatcatctcatcatctctcactgaatacttactcaagcattcacacaatacattactattattattaccagtccttctccatcactctacggtgaaaatatctattttctatcttctttatttacattcggttattctttattcgaattatttactgactttatcatcggagtcccttcggttggtaccatcccggtgtcccaaggttaatttcaacgctcctttttcattttgttagtgcctgcggtccttccattccgatcattgtagattttgccctctacaattttgcatccactgtggggccctaacaaactgaatcaggagcaagggacacgtatccaataccatggaaaatttggaaggagagattgacgttcaagcctaaatagctactcttatgtctcagatgagagaaactaatgaaagccttagaatggtacaagaagagaataaagcattctgggaagagaatgctttgctgaaatcaaaggtggagatactggagaccgttcaacgtagtataagtctcagtcaagatttcgtgttccaattccatccacgcaatcccttgattccactttgaccacaaactaaggccaacgtccagcaatcacagaaacaccaccaaactaaacaacaca

SEQ ID NO: 6001 - DNA, 1692 bp, Cannabis sativa
atcaattaaaatgattcatacttgtatgtttccacgcttcaccaaagcttgaggtaccttattgacatccacgcaatagaatttgactctgtcattaacagtatatacatcaaaatctcacagtgatccaatatcaataaacaagtatcttctattcaaattcaaaacaaggttgcttttttatatcgaaaaactccttaccatactatacactacagtacaggacagggtagtttgtgcctgagattatcatgaatgacaattgacaacttatgtttatgcttttaatgctaaatgaagccctcaaactcatctgaacatttaaatattctagtaagagttcaatcatccattagaaaaggaattaaatttggagttgatacaattataaataagaaatgaattttatttagctacttaaaatctattgcagcccaagtcacagtaatcaatagtggaagaaaacatgcacttgagctgaggagaatcatgtgtaggtcctaatctataagtggggtcaaaagctcttaaaatatggagaacttactatactatgtactatgagtcagaggagtatagtgcatgcaaaattgaaagcacctaatcctaaaacaaaaagttcaagagagtttacatgttatcatattcagcacccaatttctctaactttggtttcaaatatatgcatttccggcaccaagaagccatcctgtccccaaaacaaaaataataagaagaaaaaaaaatgtcataaattcttattacaaatcaccaaacaggtggcgtgcataattatcagagtgaagggagacaaaatggaagtaccaatcgatgagaataggctgagaaatttctgttgcatgagctagaatctgatcaaggtgatcagaatcgttaatgggttccatttcaacggtggtgggtccggacagattggtccaaaacgcctctgctctcaaatccctccttgaaattttcttccagtctctgtttttcaaatcaaccaaaaacccagaattttttggcaaaattaagccacacccgttactcaaaaactgggtactgtgatgtttttgatggaattctctgcataaaatatgagaagtcgcagcaggcagaacagacattgtttcactggaaattaagaagagaagatgagaggtttagggagataagagtcagaagagaagggctaacagaatcatcatctcatggttgttcttctcaagttagaaatggaatttagttatgtaaaagtttggagtgtgtgctgtgatggtcaatgcttatcctcaaaagtgaagttggggatggcatcatagcaagtgcaagttaggatgtggtggggccacatttgatgggcaaatattatagatatattagttttgaaaatatgttatgaaaatgtgactagttcactgtacataactggttttaaaattttaaaaattgaattagatttatacacttatgttaatttagatttttaacctctctcaactttgagataattgacatgtattaaattatacttcttaaattttttaattggttaaaaattccacctaaactattaaaatagttagatttataaacttttatctaattttagtgacgtggataaaaatttagaggttcaatttagtatttaatagatattaaagttctaggggcataatttagtacataaac

SEQ ID NO: 6002 - DNA, 1173 bp, Cannabis sativa
ctgggacttgtcttgcctctgtagtaactcagcacgaggctctctttcaccaccggttgctgaagaaatgaccattttttatgggttttttctttgctcttggttggggtatgctgagattgatttggaattagattgccaaaagatcaaccttgcattgtcgaaaaaagaaattgttttggctgaatttagatctgttttatctgatattctttttatttgtgtaaatgttaaaggtgttaattttttgcattgtaaataaactgaggacaccataactcgtagtcttgctgagatggctcattctttagactatgctatgctttggtggtcaaatttatcgaattgtgtttgaatcgtggtatttttggctgatgccttcaaaaaaatactttgtaacttacattatacacacaatattttagaaaaatctctctcctctagcatcatgccatcatacacaattagtttaacgtacgtgattatcatgtgagagttagacctcgataaattactaataaatataaatatgcagcataatttttaaattatttaatgatattttatcatgtacaaatacaaataaggtcgaggataaaatatacttatgtcagaaaattgggagaagcaaaagaattcttttttcttataatcaatcaagtagactccccactgttttatttttcctcttgttttaaagtgccactggttttttatagttcatatctatctctacatacatccctttctcacctatcaatattattgttttttatttgtctttttgtttctttcttctagcttgcacacctatgctttttggatattatttttaatttttatttttgttgtaaacgatacactttattataatatgtatacattcacattagacatataattatgtgttggatatgaagaagcttcattgaactattacactaggcttatcatagataaattgtataagtgcagtatatattgattattatattaaatcttattattgaattaattattatatttgttctattattatggatatgtgtaagtgtcattattatgaataaattaagagttgaataattatacttcacaaattctacttctataaattattcacgttactaaaaaataagacttttgttagattatgtccaatatgactaagct

SEQ ID NO: 6003 - DNA, 758 bp, Cannabis sativa
tttacctttaatctttgctttctacttccctttaattattgctaaaaaatcactcaaaatgatgaagaaagtggataattcttctggttcttcctaaggccgattatggtggagagagagaaagagataaaaacttttgttttctttacttttaaaggtcatcaaaaataaattactaatataaacttaattgaataatttgaattaactccttagaaaattttactaaactcactaaagaaaaagctttaaccccttaaggaaaatctcatttttgcccctcacttaaagcttaagctatcttaaggcttaggggtaaatggtcacacaccataacctcgcctaatcttgatattccaaatatcctatgattgctccgctaaataaaaaattctaatcaaactcgtgtgactctaatggctaaactgtcccattttatttgttatcgagcaaaaatctcaaaaaatataaatgttcacatatagcacttataatacacttagagtttaataaaatctccaaaattaagaaattataattctaatgcctatttcttgaaaataggacccataatataaaataatcacatttaatcatataatataatttaataatgctaatttccttattaatccatattttaagtatacattcattacaattatccccctgttaaaaggattttgtccttaaattttaacctaaatagctctagatattaaagcctcatgccggactctaatttctaggtggcttcc

SEQ ID NO: 6004 - DNA, 2096 bp, Cannabis sativa
tatataaataattaactatatattattgttattatatatagtaatatatggggttagtagccacccatatcttataatgttttttgtaattgtaaattaatgcaaatttattaatatgaaaaaaaaaacattattacaaattttaaataataataataatataataataatagatcctcatgtttcctggctcttgttactgtgaaaaacaaacaataacttgtatatataactcattattatatactaaattaaaatttattgtgtacttcaaattatttactttgatgtaataaataagtttgtaatctaataataaaaataagtattaattaatgattttgttttggtaaacataaaggggaacacgttgctcttgttcaactattttcaacaaagaacatacacaaatgttgctcatgttaggcatatttatttttattatttttaagaattaaaaaatataataatttggccactttaattaaaaaaaaaaaaaaagaaatattttatattgcttgtattgaagttgctctcattaaaaaaaaaccaatatttcataagaacattattattggtgtctagatgtcaatttgtaattagttatcgatatttcttaaaaataattacattaaatatatatgagatctgatacttaattacattaataataatattaacacgcaccactatcagcgctgacccaaacattagttactgtacaagactccccatatattaaaaggtcccattttcttttatcacccctatatatataatttaatgttttttttataatgtatacataataaatgttcataacactaaacatatgcacttacaaacaaaaaaaaatccataaaatcttatggtctgaacacacatgattctaaaattcttgtctattctagaattaataaagtattttttttaaaaaaaaaaaaaaaactagatttataaaatattgattaattatttttttaaaaaaataaaaataaaagattcgattttaatttttcgcccaagatccccaaactgcttcctagagcctttaagcattactcttgattatatatttcatcgacaaacgtgttttaagagtttatccaaaaataaataaaatttgcagcataaatacataagtttaattctctgttacaaataaatacttaagtttaatttttagcagtaataacacctaagttataattttggaactccataggtatttggctgttaaatatcaagtaattatccacgtgttattttataattggtatatttaaattaattttttaaaacaaaataaaaatttaatgacctggaccaatcaaaaaattttacttacaatttactcaacacttaacaatcaggtacctataaaagttctagaattataacttattattatcgccaaaaattaaataaatatatttatttattactgagagttaaatttagatatttatacggtaaattactcaaaaatatatatataaattttatgagtttatatactatttgtgctaaaaaaaatcaaaacaaaataatctataggaaaaatttaagaaaaagttaaaaatatgggaaactatgtaaaggtaaagagagagttatactattttttctcatatttttaaacaaatcctcataaaataacctttttttttaggaaaaaactatttttatataaatttataccttaaaaatcataaaaataaaatttccaaatggatagactttcacatattagatatatatatctctcacacactaaagagattatagtgaacatggaactcttgagccgaacaagaaaggtagatgttagcaaaaacatttaatctaataattttgagatttaaattccatatatatataaatatatatatctatatatatatgaacacacatgcagtaaagtctcaattagacaatataaaaaggagccgtaccatattcttgttcaaactaataaagaaatcatgaagaagagacagtcataaatattgcacatgttaaattctcttctacacataattattattattaaaattctcaaaaagaatgaaagtagatgctacaaattaaaagaa

SEQ ID NO: 6005 - DNA, 580 bp, Cannabis sativa
atgacacagtgggcacttttcttcaacttctacatgcttagatcgcatctgtgaagtagttggcaaataatttgctgcagcacgccataagagatctttaactttcagaagcaccctaattttccacagttttctctaaaaactagcagtaaccgattgcagttcagcatctttattctcttgcagcattctgtacgcacttttaacagaatgatggcctgtgtgttccaacttccagcaccaaacatcatcttgtctactagaacttagaggaatactaagaattaactccgcacctctatcatttattagatcacgaatcaaatcaacatcccattccatatgtccaggcaccattaaagccttgactttctgctcaacaagtgcaggatgtgttgagaaaattctcggattctcctcatgtggcaaccaaggatcaagtaaaatattggcagtcgagccatctccaattcgaactcttgcttcttttctcaccacttcttggatccctttcttgattacttattattcgtttgaatctgactgcttagcattaatttcaactttttagaagagatct

SEQ ID NO: 6006 - DNA, 1640 bp, Cannabis sativa
ctcttttgcacttgctttaagtaaggagataaccactacccttaagctttctgcactaataggagttgacccagttgatggaatggacaaaggaaaacaaacccctccaccagttcttacttatgttcctcattcttttgatcttgatatgcctgtaatggtcattggttctggtttaggtgaagttaaaaggaatcctctgttccctccttgtgctcctaagggtgttaaccatgtggacttctttaaggaatgcaaagaacctgcttgttactttgtggttaaggattatggtcatcttgatatgttggatgatgaaactaagggacttagaggcaaattatcccactgtttgtgtaaaaatggcaagtctagagaacccatgagaaagtttgttggaggaattatggttgccttcatgaaagcttatctaggaggtgatagcagcagtttagttgctatagagaacaagagtgagactcttccagttgaacttgaaactgttgagtttcatttatgaaaaatagctcaatcaatggtttggttatggctgctgagtattggagtagtaatgctattatgcatgtcttctatatatacataagaaaatggaatttatatttatgtataatgatccaaatgtacaacttcataacttttcagattccaatgaagcacttgagggtgaaaatcataacgtacaaaaattgcataagttgtttttactagtacaaaatacactgatttagtggaacaatctactgttactcagaccgaatcatacaaacttatgttcaaaataaccaaaccacaaaactcatggtaatgtcctcctatttcacttaggaagggttatatcatagttacaaagtgtttacgaattcaggaattcgaaatctattttttaaaacatgcataaaatttataatatcaaaagtgtcgccaagcaacaaacataataaatttgtcatgtctcgaagatcgtaaccctccaaatctaactatttggatatgtatattcttcaataagctcatcactcactatctttcggttttagctttgcctttatcaatacatagaaatacatatgtgagtcgacagactctataagaaaaatataaaacatacaacatatatttgacctgtaattaggcgcccatacacccaattaccataagtctaccaacgcatataactaagtctcgaacatttttaactatagtacgattgaccataataccagtctatactcagcactctggtcgtattgatgtggtagcatcagtccatactattagtacaattaaccatagtatcaaactgtactcagtattctagtcatactagcgtcagtagtgttaattagtacttttctatattgccaaatagatatattgtcaatattcaggcgcaactctatgtacaccaatactgctactattgatatgttatttatatggcaatcagaatacatgtatacaaaacacgtgcatatgtgccgatcaacctgagtagaaaatttctcgacgatagaaggatctaagtcgcattagcagtaaactggtaagtgtttattctgaaacactttctaatacctataaataaaatctagagcttttctaccgaactacgtggtgaa

SEQ ID NO: 6007 - DNA, 971 bp, Cannabis sativa
ccaagaaataatgtagagaattggggtccttaagagagatatgcttgttcaactttgcaatgaaagcattgagttcatttacattgttccttgtaataatattgttatccacataaattaagccaaagataatagtttgatctgttatgtagaagaaaagggaaatatctacttggaaatttctgaaatgccactacaacaatgtgtttttaatctgtcaaaccaggctctgagagactactttaggccatacaagacatgtttaatttatagacataatcaggtttttgatactacacatcgtcttctaggtatccatttaagaagatattatttatgtctagttgccttattgcccagttatttgatactacaatagtcagaataattcttatagttgatgccttaataactggattgaaggttttattgaaatcaatacctggtctctagtgaaagcccttggcaactaacctggcctttagttttttagctttttccatttgactgtatttttttttttgtacacacatttgttcccatttaaattgtacttagctaagtatggtactaatacctaagttttacttgccttcaaagtaactatttttgttgacatagcatcgttccattcttttaagctgagagcttcttctagagttcttggttcttttgtacttgggtctcacttttctttgcttagataaatctttggtttaaagatgtcatctttggctcaagtgaccaaaggaggaattggcacttgtggtggcaagggttgatttggtgcatgtgattattcttcttcctgagttgagtgatctatttttgcatcaattagattagtattgtgtatttgttcaattgtgatcactcacctcatgttctccatgatctgatcaatgtatttgttagagatgatgcttcaatgaagattgaagatgctgggaggaactgtaccaacaaaataa

SEQ ID NO: 6008 - DNA, 700 bp, Cannabis sativa
tcttatctttaaggaaacccaacaatgagaagccaaaatagctgagcttcctaacgcttagacaaccaacaaatagtcggtctccacccaaactgaacaaagaggctgctttttaatccaactcaatgcttcacagaagctcaaagcttctgcaatggctggagcaacattgctggaatgcacttttgtgtgaccttccaacagaagaccattgtggttttgaacgacaaaagcacaaccaaatcgattgtgatctttaaagatagatgtatctacgttgttcttgatgctatttacttgtggtttaagccaacgctccaccccttcacaatgctgaatatcagaccatgatgactcaatttgagttctttgagcgtgctgccattgatgaagatagctcttaacagaagctattacggttaaaatattaatcgatttacttttgccaaaccaaatcatttcttaccccccaaatggcccaacacaaggaagcaaccaaacattgaaactctgctaacaaagtattaagaatagtcacacaccaagtccaaaaattctccaccagcaacagccactgttgtgccaatgccaactctctcccacacttgctgaaccgttctgcaagtgatcaagctatgctttatagactctacaacctcgtcacacagtgggcaatgagggttaacagttactcgcttag

SEQ ID NO: 6009 - DNA, 1022 bp, Cannabis sativa
gcagatgcatctctgtttattcgattcatgaacaaccataccacttatgtactcgtctatgtagacgacatattgatcacagggaatgatcctaatgaagtttctctgctcatcactcaacttaacaaccaattcgcactcaaggatttaggggacattaattacttcctgggaatacaagttacaccaactgagcacgggttgcatctctcacagacaaagtatatcactgacatcatttgcaaagcaaaactggaatgtgccaacagtctccctactcccatgacaggtggggaaaaactgtcctgtattggcagtgaccctatcaagaatcctcaacaatacagaagccttgtaggtgcattacaatatgcaacattgacaagaccagaaatcgcctatgctgtaaataaggtgtgtcaattcatgcatgccccactcgagtctcactggaagacagttaaacgaatcctacgatacctaaagggtactttagactatggccttgacatgactcgatccacatcccttgacttagtcggcttcagtgatgcagattgggcatctgacattgatgacagacgctccacctctgggctctgtgtttatcttggctctaatctaatttgttggtcctcgaaaaaacagcataccgtgtctcgctccagcactgaagccgaataccgcagccttgcaagcctaactgctgagataacatggatacaagctcttctcagtgaactgaaagttcacattcccagaccacctactctttggtgcgacaatcttagcacagttttgatgtctgcaaaccccatcctacatgcaagaacaaaacacatcgaactcgacttgtactttgtcagagaaaaagttcttgccaaaaccttggtagtcaagcacactccagcctatgaccaaactgccgacatccttaccaaggctctctccaacactcggttccttttccttcgtgacaaacttaggatagtgtctctcaccaccctaagtttgagggggga

SEQ ID NO: 6010 - DNA, 821 bp, Cannabis sativa
aataataaaaatattacattagactatttttaatagatgatttatattttcggttgaatttaacctgaaatatatcataaaactatatttactattaatgctcattgaaaattaattttatttatattattttaatattttataaatataaaaactttttagttaatgaataacattaataagcagtaaagatgtaattaaaaaaaaatagtatatattgtaatctaaaatttgactcaaggtcaaatttaatagaattttttagcttaggttaaatttaacacacattttacattattattgaagttaaaaataaaaatacaccacatttatatttttcattagagatcctcttagctaataaaatatattttttcaaagtattgattgacaaaatacacttagtgcatgcacttacatgttaaaagttgatgaattcaatcttagcaaaaatgacatttaacatttttctactaaaatacaagaatactacattagaaaaattttaatacactgagaaagataagatcattaagttcaaggagacttaaattttaaggtaaaagtttcctagttgagtattgagattatttacatttatgaagaactattatctaagttcctgagttgggatcgcatgaaaatataatttaacaagattattaattaatcgagtattaatttatcaaagttatagtgcatataaaaatgacaagaattttgatttttaatgccaataagctatttctttctttcttttcctcatcttatttggttaagttctaattatatgaacctgtatgttctgaaattgcagactt

SEQ ID NO: 6011 - DNA, 591 bp, Cannabis sativa
  modified_base (495)..(508): a, c, t, g, unknown or other
aaatattatataatcgttttttttttgaaacagtacaacacatttttataatattttattattatatataacaagttaaaaatataacagtattattgtatatgtaaattatttggttataattaaaaatttttatatgtttctttatttttaacaacaacaaatttttagttttaattttttattaaaaaattatgatagtattgatgctactgtatagtatccccacaatttttagaatgttattctttctactccaatagtataacatctaaacattttaccacatcatttatctacttaagtaagtattttctttttttataccattagagttgctcttaaaataataaattttttcactatttttctttgagagatccgtcatttttttttttttaattttcaagaaaaaaatgattaattttgtcattattattttgtcacgtggctctcatgatatatgtttgtttgttttttttattttttttattnnnnnnnnnnnnnnttatttattttttttttattttgtaacgaaattatgtatctgttagattttaatagaagcctcatttcaaaaaaaaaaaaaaa

SEQ ID NO: 6012 - DNA, 1060 bp, Cannabis sativa
tctctctctctctcattttttttaatctgatgttgcctttccttttcaggcttgcagcggtatggtggtggtggtgcggtgatgcgatggtgcggtggtggtggtgcagtggtattttcggtttaaaataataatgtataatttgagacatgtttttattatttgtgatttatagttaaaatttcagatatggatttatatgatattttatatatttttggttggaattgtttggttttaatttttttttttaaaaatgtttttgctttagtttataaccaaagcaaaaaataattagtattttcgtctatggctatagtgtcagttacatcaactcaatcaaataggtgtcacttaaaaaaaatgacgcaaattttgtattaatgtaaatttacttatataaatatctatgttaatttttaaaatatatataataatgtaaaattaattaagaatattttattaattaatcgtatattctattaaagataatagcaaaacaaaaaattaacattaaatcaaaaattgtgttacataaacacattttatatagaataaaaaatatatatatttgacagcaactcatattaatattaattaatatagcatgggataggtattcatgatattaaggattatttttgcatttattgcgtaaataatgatctaatattctttattgtagaggaaatattacatattccataatatcttatctattgcctcattatttaaattaatatcaacaaatccggttagttatcagtcatattggcctattgaaaacaaaatctatcttttcaagaaaaaaaaatcatatttaatcttaagtgtcttctacatgtatgtggactcttcccctccatagtatgataagctaaattcatttaataaaatgttaaaaaaatgattttattcttgaaattttaaaacaataatcttaactctgaaaatataaactgaaaaattcatatacttttgtcgtatgttacataccattgaaatgtttttaacctattaattaatacagagacgttctagttaaagtttatactaattt

SEQ ID NO: 6013 - DNA, 543 bp, Cannabis sativa
aattctctgctactccaagatataatcaaaccctcgctttagcccccgcttcatcgcactttggggcacccatgagtaatccctcggggatgagcgtccaaactccgtcccaatctgcacttgccactagcctgataggacctccttagagctcccagagtaagaggtcctcaaagggcagtaaccagtttgaggacaaacgacagcggaggtgatataccccccaatacactcaatacacggagctcacgaatacacatgagcgtgtatactttgctaaccgccagaatacgcattgccagatgcttccccccatgtacagggatagctcccagagagatcccgacaaaaggtgtgagtatcataatgacattgtccacaccacaaatgagtgcaagaacctgaaagatgaaatcgagaacctaatttgattaggtcacttgtatgaaatgatcaagaacagattgccccatttaaacctgatcctaactggaggccccttacctcagggagaagtaaggggtatgcccgaagggcaagtac

SEQ ID NO: 6014 - DNA, 1002 bp, Cannabis sativa
ttagaaaagttccaaacaccatatccagcagaagatccaaaacaagagaaaagacaataacactcattttaacataaatgactagcttttatatacaacataatgatcaaaggaagaaaagatccaaacataccgtccaattgtgagttttggtcaatcttctggaaagtgcacgaatacaagcaacatcagcccgtggacgaattgcagaagtggctatcaaaatctctgcataaaaaaaaaactcaaaaattttacaaactcaaaacccaattaaacaaaattgagaaaaaaaaaatggatctagaataacaatggcatacttctgaggtgtctctctttgggtgggcactcaacgtggtttgtagctttgactatggcaacatcccaaatcctactctttagaaaaaaataaaaaattaaattaaacaaaatccacaaaattattcagagaatcaaaaaccacagaaacaaaatctgatcaacacaataccttagtcaattcccctccctaaaaaaacgaaaacctaactgaattatcagaataataaaaagtgacacatatagacaaaggcaaaatattatgaacagaaatattatgtttctgaatttcccactaaaatgcctcgctcaaacatcaagaaaacaaaaataggaaagtcgcaacacacttttaaagagactttatctaaaaagaagctcaaaagcaagttatagtggactgaaaaaacaatgcagatccatggatcaaaaggtgaaaaagcaaaattcacctgaaactttatatgtatatacaaagaaaaaaaaaaggagtaaagacagtgtggtggaagtgaatcaacagtgaaccagaaaacaatggtgagctaaaggctaacctcttgaaaccgttgatctacttataaagtcaacatctcattctccaactttctttcttgaacaaaattcaaactttgaggatcagaatttgatttgatgtgattcaaagctagctgaggaaat

SEQ ID NO: 6015 - DNA, 875 bp, Cannabis sativa
tcaaaataaagcctgaatggggatcagaagtagctgatagaggaaaggttggtctctttttttgatcaataccatgcatacaataaatttgataatttttttcaccataatgtttagtatagttattgtggtttgttttgttgtattacaggctttatatggtcctagaatgggaatttcctatccaggaaataaaattcctgattggtgtactcacacatctatgggagcttcaacacatgtagactctcttatcacttggagtggtagaagaaacttcttaggcattgtcatatgcattgttgtgaatttcgatgatgggtgcattttcaatgacaatgagtggagcatttattgtaaaatgtatggtttaatcattgaggatgaaccatactatattgattcatcgcttttgaagatacaaaaatatagtgactatgatacacatcatgtgttcatatgttatcttatcaaaagagatattcatgatagattttatcatgcattgagtgcttcatttatctttgagttcgcagaggagaaccagcaatgtgggagttgtgagtcaagtagaatagaacaatgtggaattcgaatggtctacgaagaagatgttgaagagcttgaagaagatcaactgatgcttgatgcagagacacataataatgttgaagagaactaaaatatatatcatatcatttccgttaaaggtatgtgtggtattgttcttccaaatacaaagatctccaaaaattgttcatccatctttatgaaaagttagatatcatttaaaatggcgttcctggaagtctaactttaactctttatgtgtggtattcgaatgtcagttttgctgctattgtttgtgaaatgga

SEQ ID NO: 6016 - DNA, 979 bp, Cannabis sativa
  modified_base (145)..(152): a, c, t, g, unknown or other
taatttttaaagaatattagtaactaattataaagtatcactcggggttggtcctaagcagattaggcccacgcttagagctcactcattttggagatcaaaataaaaaaaaaaaaataccttttaaaaaatatatatttttttnnnnnnnnttaaaaatattatttatttttatagtaaagatctaaaaacttttttttttaccaataatatatttcaattcaagatcggccgtggtgctaaaatcttgtacttattagtaatgattgtgtatatataattaattcacaaaaatcaaaaaagtataattaattcacaccaattatggaatggttcaatatattcacactagatttgctataaataggcaacatgtaaaaattttacacaaaaaaaaaactatattaatataaatatttaattttcaatattaattttaaaaatattaaacttaaacttttagttgaaaaacagaaactcaaaataataaaagttgaagattatcctttgattatctttttaattagataaggttagatggataagctcaatgagaaagtgaatatctttagtgtaaagctcataaacttgtaataacatgatggagatcttgggttactaggtttaattaagtgagcagtactagacatgattatagtttcttcttcttgcttgactcaaaatctatatttttatttttgatgtgataaagaataagaaaccaatacaatttttattcatagtctctctcttaaccccctaattatatctctatatttgtcaagtgtcatgtttcttctttcgattcttaccttaattagcttgtatttatacatatatctggaacataataactttaatttcttaattagggtataagattagttaaattaaatattattttttttaaaaaaataaaatcattactaatttgtaactaactagaatatactacatcatctcaaaaaaaaaaaaaaaa

SEQ ID NO: 6017 - DNA, 1268 bp, Cannabis sativa
atttaatttagttcacatttccttatctgttactaaacatcgttttacaaccttcttttaccaaaaagctataaaagtgtgaacaatgggcaaattagaaaaagtgtcgacgtttatatggagaaaatacgcagactacgtatataccaagtgggaaagatttctcctatggaacatggttgagccctatacaagacccaagtcattcacacctgttgttactgtctatgttgctgctttttacactggggttgttggggctgccattactgagcaactctacaaggtacctcttttctctgcctttacttttgtttcagctaacattgacgagttattgcattctaaacactggtttgtacctttgtttcccgggttataatttatgatgtttgggagtgattgaaacttagtggctaacaagaatgtttaataaaattagttgggttttggcttctatgtaaagaccaactcaagtcatttgaagatgggaaaaaatgagatgaaccaagccatgtgagttattcagtacttaatttcattccatgataatagtgtttctctatgggtgttgagagttgagtgtttctcttagggagttgagagtttcttccatcgagtttagtgtttctccataagagtttaaagtttcttcatgagagttgagaggttttttatgagaactgagtttttaagtaccctatatgtgatcttgttacttctaactccatttttcaaggcaataaagaaataggcctagtgcttgttcttccatggatgtaggctcaagcagttgagttcaaactatgtaaactctagttgcatctttgcttcatttcttagtttattccagattctattagtttcatctttgttcatttcagcatcaagtttagttttgaatcttgaatttggttcaaaatattgattcattctctttttagattgatgttcttgtttagtgtaaactgtcttaaatcacaacatatgatatgatcacactcgtagcatttaggattgatggcttcttaaggttttttaagttttataatatcttttgacattcagctaatttactctgcagagattcttgttagtgttgtaacctatctaattggtttggattttcttgttgattactgctttaggggggattggttgtgaaacataagttttgatagtgtccacggtaaggaaaaatagaaaaactcaaggtgccagaatgggtgatatcctttaaattgggacccattttctaacaaaatttt

SEQ ID NO: 6018 - DNA, 783 bp, Cannabis sativa
tcctctcttcttgtcaaataaaagaattcatgatctctcctttataactagaatccaaaacacccacccagtgaaacctagaggaagagaaaggcaaaacaaaagggtccggtccgggtttaggtgtatgtatctgttacaccaacgggtgggtgccaagcttcttatgttttaaggcccagtttttattttaataaaactttattttaagctttgttcttaaaaattgtaaaataaaaagcaataataacgtgtgcattcttccacaaagaaactccttggagcatactaaatcgtaactagaatttatataataactcaattaaaaattatagctcaaacggtaaatttattaaacaaaaaataaataaataatatataacataattctcttaaaaaaaaattaactttttttctccaacaagctaatcataatcaataggtttttttcttcaagtaaaaaaatgctagggacgatcctgtctcaaatcctctccatttctttttgtttttaataaaagacaaatttcacacattctttttgaggaaaaagcctcgttgagacataaattctgtgggataaatctcaacagcaatgcttgaattgaattattaccttttatataatacccacaaaaaaaaaaaaagtagtttccttagtactctcttcaaattagcagacattctaataaccattttcatgtaaatttcttacacaacgtggcaattgaattcattttaattgccatgttaataaattgtattccctaaaatacatagcag

SEQ ID NO: 6019 - DNA, 630 bp, Cannabis sativa
atattgaagaatttggtggttgaggagtgtgttctagagagatcttgctagctagatggaaataggagaatcacaagtagaaaaactagcagtaatgattttttttatactgataataatttgtttgaacgaaaaacatacatatattatcatgaaacaatggtaatatagatgataaaagaagacttgaaacatattataattgataattcttcagttgagagcaatcaagttgggttggaaactgtatgaaatgaatgaatgaatgaacaccaaaactgtacaagaatccacacacaaatcaactctttgaggaggcatcgttattcatgactggataaccttaagaagagcttggtgaatgaatattttggataaatataataaaaggtaagcacaattatggtattttatatcttcgatagcttcacattataattatgtaaactttaataaagtataaaatataatttttaattatgtttaaaatgactttatagagtgtataaggttactcaaaaagtttggaatcgtttggaaatgtccaaaagaacattgcatagggtatgcaaaaacgcaacttggagttagtaaaagtgctttaggcgacatgttttttttttttttttt

SEQ ID NO: 6020 - DNA, 1370 bp, Cannabis sativa
aaaaaaacgacaccaaaaactctctactactattaacaaatcacaagtctatactaaaccaaaatcatatggtgatgataagagagaaaataatgtcttttctttttctactcaaactgaatgtgtgtaccacataagactagaacaagactttattgcattaacaaatatgtgtaattttcctatacaattttttttttttttaaattacattaatcagtacaaaactctaatcaaaccttcaatgtttttttttctttctttgttactaatttttatattaattactaccttctcaagcatatcatcccttcacaagccaatgtaccttcaagatctccaataactttagctattctaacctcgagacctcgttgaacatcatggaagagcgttctaacagcatcagcgaagcgtttcatgtcgaagcttcctacaggctcgccaaggtccttgacatcttctgctaaaccagcactaatcttggattgaatttccattagtttctgtcctgttgcaacaatgtatctttgaagctgaaatgtttcttctaagaagtgctctagttttttggtcttttcttttgttcttgttgtgttggagtctcttctgtatagctctagatcactatcatgctgcaatttatgaaatgagtcacataaacattgtaataaatcagttgtgcatgttagcaaatttaaagaaattccaagaaagaaatttcttgtgataaagaaaatggacgtgtttgaaaaatattgaattggattggataggattaaatcgatgtgattctatttagtacaccataactaaatcctactaaagaaattacaaattttttggtaagattcacaatttaaatctacttagatactatacatattttatattttaggaaatttcataagtttttctaataaatcttaaaacattagaagtaaggaaatctcacaagtttctctaatatatataaatatttcccaagaaagaaacttcatctaattataaaaaatggtcatgtttgaaaagaatttaattagagtcgataggatcagatcatgtcaagaaacatgagatttcatttcaaaaccaattggcgatgagaggagtagtccatgcatgttatgtatggtatttaattctgatcacaagtagcacttttgactcatagataggatactttctgataccatgtcaagaaatatggggttctctcttaaaactaattggaaataagaggagtaacccatgtatcttatatatagtatttagtatctacatattatcaatgtcggactctctaatatttttatgaagtgatttcattatgaatctacttagatattatgcatattttatatttaagg

SEQ ID NO: 6021 - DNA, 801 bp, Cannabis sativa
tctctctctctctctcatttttcatcccatcaacacttactgtcactctcacttcacttattgcctctctctctctctgttcttttctttctatcacactctaataattgtcttttaacaaatcagaaacatttcaactctctccttattctaagccaatcagaattgaaagaaaatataagaagaagagaaagattttaagtagtggcagtaccaagtagttgtgtgctaaaataaacttttcaatatggcttcatcagcatctccaaacacttgggttaagcctagaattccttcttcttcttcggtaaaaatcagaaagcccaattacataagttgttctcttcaagctccttctcttccaagaatccccaaaaagacaactacttctaccactaccccttataaccaaccttcttctactccttcaatctccattaatcatcgttcgaaaaccccaattgaaaagtctcagtcttcatcatctggctctgagctcaacttctttcaaaaagtggcggcgattgctctcgacgcagctgagactgccttagtatcacacgaacgcaaacaccctttaccgaaaaccgccgacccaagagttcaaatcgctggaaactttgctccggtgcctgaaacccctgtagaacactttttaccggttgccggtaaaattcccaaatgcattgacggtgtttacgtaaggaatggagccaacccccattacgagccggtagccggtcaccacttcttcgacggcgatggaatggttcacgccgttcaaattaaagacggcgccgt

SEQ ID NO: 6022 - DNA, 686 bp, Cannabis sativa
aaaattctaagtaatttacaatgccgaataagatttacattttttattgcacgaacctttaggtctatgaagtaaaatttccaatataaataatataaattagcataaattgtattaatttgtttttttttttgaaggaaagtgtattaatttgttagttggtcaattataaaatgtaatatggtcaagctagacgacgaaattaaatcaaaagaatggaaaatatgtcaatattaaaaaagacctaaagaacatgatattgacaatggaaagaaaatcatactaactagggtttttatttggaaaagatttttgtgggactttaaattgtctttattagtggcttgaaattggtatcaaaaacctaatttgccaccataacttttgataaagaaagcatcaacttagaaaaaaaaataaaaataaattaaagttgagaaaattaatggagaataaaggaaaaagggctttcaactatttaattctactaaagaagccatgaaataatgtgatgttagtactaggaacgtactttttggaataataaaagttaataaatcatttatgaaataataattatcccatttatttgtacacaattcttaaatttccatttcatgaagaacaaaatatattagcatattcaatgattttgatggttggaattaaagtcaagggatttgttc

SEQ ID NO: 6023 - DNA, 3021 bp, Cannabis sativa
tctaattacacagttatgagaaatactaatcaggttgctcaaattcctaatcctattttctctgttgttgtaaacgatcttcagttttaataacagtgaaatttttcaaaaaaaaaaaaaaaactaactctaattacacaattattgcgtaattacgtaaccaaaataaacacgttaaactcagtcaaaatataactaaattacctagtatatatatttatatgaaaaacacaaaaaaggtacgagttaactgctatttttggaaaataccagaattacatttatgtgtgaagaagtggtatttttgttagaaaaagcccagaccccaaaataaacttgagagggaaagagttcacttcaccctcggccgtattcctgaacttgcttcactttcagttgccttcttctccttcactcatggacctttatgtggccacaactgctcctcttctcagctctccaactccatctctgccactccattcatccacacctagggtttcttacaggcctctctcatttttcactttcggaaaacactcgaattggagcaagctcacatatatggattctcaattaacccctcgtgcctctcgaaacgatgacaatggttctactttaatcacttcccacattgattccggtaatgttactgacattaatcatttgctcttcagcttacaaattttgtttctttatttaattttgatattggtttttttattctttaaggctcagaaactcgaactggggaagtcaaaatggtgactaaggagaccaatgtttcggtcaaaataaacttccttgatcttatgctaatgttagatgtaactaaattttttccccctaattttttattcttttcatttgcatttgacatttgtaagcattatttacactaaatattttgcttttggctgtgtaccagcttgctggaaaaaactctcatcatattattgaggcaaccttcaaagcatttgccagggctattcggcaagcaacagggtctgatgtcactgtttgctttaaataccacaataattcttattcacatgttgatgattttcctactcaaagatttccctcattagaacatcttgtttcttgacagttcttttgccaacatgtcagataaatcatgtcatgttgtaataccatcacaagaagtttcactgaatagccgaagagctctagtgtgtggtgttgcttcagtcttggccattataaacttcaattgtggctcggttccatcaatggcatgggctgaagacaagtcaactgagcaagaagaggaagataatgcaggggttataggggccatcaaatcactgtttgatccaaatgagaaaactaagtctggaaaagagttacctaagggctacctgaaatcagcaagagaagtggtcaaaaatctccgggagtcgctgaaggaagatcctaaagacaatgccaagtttagacgtactgctgatgcggccaaggaatctattagagagtatttgagcaattggaggggacaacaagctgtggctcaagaggtattgtttttcataaacctattacagtcctctcgcagtcccatttgagcttttttcgattttatgtcactaaaagactggctcattggcaggaatcttatgttgttcttgagaaagcaatcagatcgttggcgagcttttactcgaaggcaggcccctcagctgccatgccagaggatgttaaatctgaaatattgaatgatctagatacagcggaagagtctttatagccaattatatagctgaagtgattaagattactaaagtgtatgtatcagtattactaaaattatccaagctcaaacattcctaatcaaacttctgtgttgaactaaatcttgttgtgaagctaagaaataagatatttatttttcctggtgaaagaaaacgcactagagtgaggatcagaatgtatacagcatacattattcactaattcaacgctggaaatttctcattattacatccaaaacaaactgatacaatgataaaaatctcaacaccaataattaagttgccacaaagttatacaatacaacaatgagaacaagatacaggctcaagaaaatgatagcaatagaaaatatctttgggaagtactatcctaattatttgagcagccatcttacgttcttattcatggaaaattaatcagaagcttccgccaggctgccgagactcccttgccaacatatcaaatagaatcattccttttataagatgatgacaaagggtatgcacttttgccattgagctttggcatagcctatgattgaatgtgtaggtatcaagaacgtgatagaacacctttggaactgcataagatgaaaagtacacattgttatcattaatcaaccgaaattgcaaggtgaacccatctttgtgacagcacaattaaaagtgatatgaaattaaacagtaaaaagtgtgtacaagttttatgtgtctagcattactctttcttataaacctttgggcggttctctaatttccaccaacttatctattcagagaaataactggattcacagcctacaggtatcacagcattcttattttggcctttcaaaaaagttgtacaactaggaattctttttcagccttcccagacaccaataataggttgcaacttgattgaaaattacaaacatttaaccataattaaactattttggtaagaaacagtgacatcaaaccttggtacggttcccaggcgacgggggtcgtactctgttgcttgccgaagagccctggcaaatgctttaaatgttgcctcaattatatgatgagagttttttccagcaagctggtacgcagccaaaagcaaaacagttagtggagataaaatgaaggggcaaaacttatgcttgtaaaatataatgcttacaaatgtcaaataattacctgccgaatgtgaagtgtcataccagaagtattcaccaatgactggaaaaaatgctccaccagctattttaaatttgta

SEQ ID NO: 6024 - DNA, 594 bp, Cannabis sativa
tagtgtttaatgagcctgattgcatttgcttgtatagtttcaatttatgaggtttttatttattgatgttttcctcaatgaaattgcagagcttgactcagactcagaagaatgctattcaaatggttttgaattgctgaccaatttgtttggtaatatatttttttatattatattcttcaagggtttacttgcttagttttgtacaagaatgatatgaaaagaaggtttttttttagtaagttcatatagtttggccaaagatgtctctgagtattgtgtttttgaaatgagagcgggttttgatttttagtgttttagaaatgagagcgggttttgatttttcaaattgggtagctgccagttctttgcatcatctacgttgtatgtaacattttctttgtatattttttcatttattattgagaatacatgatctgtctatttttcccgcttgttctatttttgtaccattaacaaattttaaaactgaacttagaagttgctggattataattttctgaaatttcttttattatttttgaatcattaaaaacggtcgctgggcttggaggtgaaaaattacaaaatttc

SEQ ID NO: 6025 - DNA, 977 bp, Cannabis sativa
taccgtacggatatcagtatatctcaaaattgggaaactctgctacactctacactattgataagctaccattgcgtattgtaatgtgtcatataccttaaccaatcaacctacaaatatttgttgtttacaatacacttaatttaacttaaataaaaacttaaagagacctttcattttttattttgggcccccgtatagtacaggttctaagcacggggcctagtccgcttatgcctaaagctagtcctggattcaccattcagcctaaaaataaaagaataaataagaatctcgcccctgaatttttctctattgcgaaaatttcagctgaagtatccagattgttgcaaatatcccccactagttacattttgctcattttttaaaacaatttggttatgtgactataagttgcaagtataattgcaagtacaaatacttgattaataactttaagctacttaaaattcaatttattgacattaaacatacaaacaatagctctaagaatgcacatacatactctcataattcataattagactgttatttatgcaattatgtttaatctggactcttgaattgggttacattaacgttatgttaatactatatcaacaaattgtttaaagaaataatcataatacaacttcaagaggatatttgcaacaatttttacagttctaaagaaatttttgcaacaaagataaattcagagaacaaaactatacaaggtcatagttcttgggagaataaatcctatttgttcaaaatataaatagaaaatcaataatgcggagccaataatgaagttaaaacatagctaacttgttttgctaattttgtatatggctgtgttactgtgatgttgttctaaggctcaacctatttagcaaactaaaacaaattagcaattcatgtatctttcttttcgtaatgaagtaaaaaaattcttacttgaaagttggtttagg

SEQ ID NO: 6026 - DNA, 596 bp, Cannabis sativa
atccaacattcatattggtacatacatatcaataattattctcatgagagttgccaaaacatattcatattcataacataatgatctgagagtagcagagcatgatttgaaagaaatttccgtcactgttagcaaaaatttctgatttccatctaaagaagaagaaaaaaaataagaacccgaaaagagagaaattgcaaactctcatggtcagtatcattttcaatggtgtagtaaaaaagaattattatggattcaaaattttgttactgaattgcctccttaaaggcaacaacatatctatcttggcttcacaacttatataaatactgttttcactctccaatctccatattttcacaaaccccggaatgaagaaactgtgtagtttgagcttcagaggttgctttttctttcttacatagctgagccgagctgtgacttctctctcaacgtctccacaaccgtccttgttgcttctgttcttgcatccgcctgtgataagaaaaagttcggtgtcaacaaaaatatgcagaggactttatacaattgctttaatctaaaccttcttatgttacgaaattggtaaatatgaa

SEQ ID NO: 6027 - DNA, 602 bp, Cannabis sativa
atcatgggcatataaaagaaaatgagattgaattgtattgggtgttattctttgtagagtggcattggcaatagagaagttcaagtagggattgagaaaaaatatatataaaggtagaagaaaaaaaaaaaagaaacacaagaacgaaaagaaaaaaaaaaaaagattttctctagtgtcaatttttctcaatccttcgaaatacaaaggaacttagggtatgttaaattaggatgttaatgtcaagattggttttatatttatatatttatggtatatgtgagcctaaatgactattttatccacctgtgccaaagcctattattacaagcctaaaaagaccttttgattcttgattatgcatttatttagtggagaatagtgagcattgcaagcatatggaacaaattttgttagttgattgatggttgtatttgacatgcataattaaattgtctcaaatgtttgttgagtaatattgtaatgattatggttttatgagatgaaagaaagaatcaagggggttaatgaagtaattgagctgaaattctgtattagagcatatattttgaatttttgtagaaaccatgttacttggctta

SEQ ID NO: 6028 - DNA, 629 bp, Cannabis sativa
atgtcttaaataactataatgtacttaatcttaaaaaaaaaagtttgattaaaaattttttttagatactaaaataaatataaagtgcatttatattcttttaaaagcatgtattataaaattttcctatattatttagaatagttgcatggccattattctatccttatagttgattataatgaccataaagcactaataatagtacataatattgatagatattattttccatgcacatagtacttttatatacgtctatgtatttttgtgtacagtatacacatcctttatttatgtatagattataatattattatgtttattaattttaaaaattgtcattatattaatttataaatccgacataaaacatatggcttgttgagagtgtgtgtgttcgtatttattggtttaattcatttgaaatgatgataagttagtccaacaagagtcagacacacataatatcaaaatatataataatgaattatcttgagataaattaactcaaattaatgattaatattattccttaaaatttgttggaaaatatatgtatatattctgatattctccttgatcgcgagtgtagaaatgtaactttacttgctaacaacgaacttcgt

SEQ ID NO: 6029 - DNA, 803 bp, Cannabis sativa
aaaaaaaacaatatgggcagattaagagagagacttaacgagaagagaaatcgcttctgccccaagtcagtccaatttttcatcgacattggcaagcaaaactttggccatgaatgacacatctttgacgcaaattcggtgagacatagagagctacgagatttgcagagaaagaaagagtcggacaatcggtaaagatcaaattttaaaccactttggccatgaacaactcatctctgccacacttagttgtacttttccgatcacggtgcaccaccgacgatgaggatgacatccaagtggtttcgcacctgggtcgctactcgaaggatgaaatattggcggctttgacatggatggatcgacctaggctcgtgattgggatggattgttctacgctcacgacggtggcttggcttaaatgtcatagtgaagggtctgaacgggagtgaatggtgctcaggtggtaaggtctgggtcgtaagatggtgatgatgtttgggacagaagagaatggtggtggtggacaccgactaggtttagagcaatgagagagagcatgagaagaagaaaaagaacttttagggaattagggtttttttcattcttttttatgatttattttttttagattcatttattttaaaagtagactaataaaattgtgtcatgtgtacactatatccatgtagacaattacctgtgtacacatggacatgcccacatgtcacttaacagcaaaaattggatggaaatgactaaatactaacagaatttaagtttggaagattttaacgccaaaa

SEQ ID NO: 6030 - DNA, 826 bp, Cannabis sativa
taatgagatttgtcattgaaataaataccatcttcaactatataaaaactaatttttatagtagaaaattctttaaaatgtaatactttttttttttttttgttaaactaatagtattttaatactattattttataaaattaatttatatttaacaaatttaaattataaattaaatagtattaaaataattaaatacttactatagtaaaaaataaaattagagtattaataataaaaataactttcaattttaattttttaattattttaatttaaaataattagaaaatatataattagagatgctctaatatgaaaaatattttaatctttttattcggttttcacacgcatacacagtaaggtagcaacctttgaaaaacaatcacattaacatttggaaactaattactttcgtttcagtccagaaataagtttaaatcacattggaaattattactttggaaatgatatgcaaagtgcatcctcattttaaatattttaaatgagtaaaataaaagtttgttggtattaataataatagagtgagtgtagtctgtacgaggggagggagtgtaaaatatgattaggctgagaagagtgaaagaggggtgttttgggtaattaaagaggcactgcgtagggcacgtgaaatttcgcattatatgagatgagaatagagaattagggatagagatggcttttgtggggcccacatccgtatccgcatccttctctgggccccacacgctctgtacactgaattctgaataatcatcaaataaaataccatctcccaatccaatcttcctctctctctctc

SEQ ID NO: 6031 - DNA, 880 bp, Cannabis sativa
gaagaagaagaagaagaaggtaaggagggaaaagggtcatggttgagaggtaaaagaccttgcttttgtcgttgatggcggtcaaaggctgcccatccacgagattttccattcccatctccacccaacgacatctccagatttttgccgctgaaattggagaaaattgagagaaagatccaaactttaggaacccaacacccaccaattgtaattacacgtaaatatatattataataatatctaaagtggtatttttaaattcgttttttatatattttatttgcatatttattttacaattacataaatttaatttttaaaattatgattttataggtttttttaaaaaaaaattataaaaatatatttttattataatataaaaaaaataaaataaactgaaaaacaaacaaaaaaggaaaagaaaagcaaacaacatcacagttaattggttttactaaaacatatatttttataaataaaaaactcaaccgtgaaaatgataaattacactgtattaatattttctttttgattaatattttcaaaaaatattttctttttgactaattaaaatttttatcacctaaattttgacacatgataaattatgcttttaatttttttttgactgttaaacattcttaacattgttaaatttaaaaaatttaaaaaattttatctaattttatttaattttaataattcaataattattcatatactaaataatactttttaaattttaatatctaactaattataactttcttttaattatgttaaactttttttactaaaattaaacaaaaatacacaaatccaacaaaacaaactcatcagttcacaaaacttttaaaaggcttttagaatttga

SEQ ID NO: 6032 - DNA, 561 bp, Cannabis sativa
atctctctcttccatcttctaagtaatgggtttatgttttgttaatttattggaaagattgaaaaggtaagaagaaaatagctctttttatagactcgtatttattgggttagcattgtcaacggcccctcagtgaggctggaaaaattggtatattctagacaagatggaatagaacattatttaagatatgtatattattttggttttggcctttgttggtgaactcacatgtatctctgactgacatgccttcccttctttgtccttagtacgtgtctttgtccttgaaaggatattaaaaaaatttaatgcccaagcaagttttaaattagtctgcaagaatcttccctcttctagtgaatggttgaattaagagtacatttccactcaaaaagaaagcaaaaatatttaaagatggcagttctaaaggagggaccgtcccacttttcttaccaaatcccaaccttacattacatatcagaaaataccatcacttctttcttataccattaatacgatgactgtacaaatagctataatctttctttgaaattacat

SEQ ID NO: 6033 - DNA, 783 bp, Cannabis sativa
agacggttctttcaattgggttttgcttgcagggaagtgtatgcagtttcgatcgtgggaccttttcctactgctgtgactaatctactcgacctcactaggctgtaagatccaccataaacctttttctggttttctttcttttgattgctttcaagttaaagttgaatttatgttttatgagtgatattgatcaaatctagcttctcagaagtcttgtttaattaatacaaagtttgcccttttcatacttttgctgctgaagttctatgatttagtaacagcagagttgaattaatagttttggctttgataaaattgaatgcagctaattactaaaagttatgtctcatatttttattacgttattgattcaaaatgttcataatttgtgtgatcatggtactctatgacagggatctccataacaacaagttgacagggcctattcctcctcaaatcggacggttgaagcgtctcaagatactgtatgccctgtactctttattttagcctcttgagttttgcaatttcttgtagttttatctagatggttggtgccttatgttaattaatcactaataattgatgctgacacactgactttttattctgttctagactttgctaacttgtatgtttcttccagtaatttgcgatggaataaactacaggatgttattccccctgaaatcggtgagctgaagagcctaacgcatttgtgagtagtctagctttctcatgataaatttagagatttatgtatctgtttctatcagagct

SEQ ID NO: 6034 - DNA, 506 bp, Cannabis sativa
gctttaattaattctaaattttaatatagtatcagaatttcttgtgattagcttacaaagtgttgttgctctaaaaaaataagttaaactaaaacaaaaagcttttgttgtttctcttttaatgtctatttgagatctttcggtcaatgtcggtctaaaatgataattttgtatgttttaattatgttgcaatcacgacaagtttaattaaattaatattcacttcattatttttcccttagctttagaaacttaatatagaactggtcactgtcttgagcaaaatgtaaaagaatatgttacttataattttttgattgaaaggaagaactctttcattactaaataagcatttctcatactaagtaaaaatcccattattctgaaaaatagagtaaaattagtagtcctaatggaaaaaaagcaaaaggcataacctacccaattttgtaaataaattgggatcttgtcactcaaatacatcaaaattaatagaaacaaaaaaa

SEQ ID NO: 6035 - DNA, 1746 bp, Cannabis sativa
tctatttctattcatatttattttgtaagtgattaatgatggttgaattcatatttgcttatttcatgatatacagattccatttaaagctcctgatagattccgtggagaattagacactacatacttggatgaagagttacggtaagtaaaacatccttgaaagtcacaaatacatataacatatatcaacctcaaaataaatagacactcctaatgtgctttggcgaaaataaaatgaaataaaacaaagaattatatatgataaagaaaacagcctttgggtcatcaatgatcctttattattccaaccaatattgaaattatttgcttaatattgaaatagtaattatgatatgagagtttggctaaatcgtttaaacttgagacatctcattcctttgtttagtatgagcattttaatgtctaagacccttgacaaaaatagaagaaaacacataataatgtcaaagcaagagaatttaagatattgatagccaagagtaatcttgctaattacaataatttattatatattttgatttactcagtagtaatttataatctataattatacatcagaaatgtttttggaatgaagtaaaggaataagaaaaagagaaatgtttacatttaggcagtttagtaatcagacttaacttaagaattacatcttatcaaattccttacttcagtcagttcttcaattgcaataatccccatttgtgtttctgctgtaaggttgagtggcctaaaaggacaacaaatttctttactaacattacgttttgatttctttttgtctcattcaatattagtgaaagtgctaaattctttctactagagtggctgaacatgcattgttcattaacatgtcctcaaacttagttttgacagaaaattagtagaacttgaaaagatgctattttcgtttgattcatatgctgcaaaggatttctctttatctacatagattttctgatatagaccgtatgcaaatgataataaacaccaactcatgaaggtgatatgtcttgtttcattggcagtgtgtctagaggtgatttgggaaacttgttcatcttgaaaatgattgacccgtcgtaccgggttcctgtctgaatggttctcaactagctgtctttctgataggcataaaagggttatatgggtaattgtaatggggtattggtaatgtgtgagtaggaaagggaaaagggtgtgaatgaatttgtaattgagcagtagctctttgaattgggagagtactgggtctctcgattacccagatatcaatacaatatagttctctgtttttcctatttctatccatgttcttgctgttcttagctatttgatagaaaattcctctcactttcacattgcctcccatcaaatgccttaatagctttaatatatgaacttgaattctgaaacttgaattttttctggaagaatctccaaccaacttgtttgtctatagtgcaagtttgagatttgagtatgggcctccaagggtacccatttttgtgcgcatggatgaggactcacacactagaccaccacacatgcgcgctgccttcatctgagctggcggtgaggtgtcacttaattattttaaagaaaaaaatatttatttatttattaattaattttaacattaaatgaagtagtaaaaatcgatcaatcaatgatccatttttcactgtcatgatccatctcttccacgattatattaccgttttc

SEQ ID NO: 6036 - DNA, 1250 bp, Cannabis sativa
tttttttttttaaattaatattaacttataattcatatccattttaattttgtattagtattattaaatacaatactatatttggtattgatatgtattaatagattgtgtaaagataatatatttttaaaaaactctaccctaacaccaacaacgggtcgggtccgggtccaagtttgggtccaggtccgagtcagggtcctatgtccgggtctcggtccaagtctgggttcgggtctaagtttgggtccggatccgagtctgtgtcctggttagggtcctgggtccaggtccgggttcgggtctcgggttcgagtctgggtcccgggtccgggtccaggtcctgggtcagggtccgggttagggtcctaggtctgggtccgggtctcggtccgagtccaggtcccaggtccgggtccaggtccaggtcctgtgtcagggtccgatccgggtccgggtcccagtcccggtcccaatctcaggtcccgatctcggttctgagtcttggtcccggtcttggtcttgggtcccgggttcgatcctggtcttggctcccgagttaggtcccaggtcttagtccgagttcggggccgggtcgggtccgtcttcgggtctgggtccgagtcagggtcccgggtcccggtccgggtccgggtccgagtctaggactgggtccgggtccaggtccgaagggattcgagtctggaattaagtttttttaaataaattgaaatcggatcagatcagatccgatccagaaaaaaattaggcggggcgaagcggatctgatccaagatccaataagtatctgaatgcttcgaatcagaggtgatccgtcagatcggagctccaatccactttaactaaatagatctttttgacatgcttagtattggagatgtgtctgtgtgagggtataatttcatcgaaagatgtgcaagtacagtaggacttttatataaaaataattttgttataatacagtattaagaattatttgttgtcatttttgttttattgatgtttttttagtataattttatttaattataaattcttaattagaatataatttgtttgattctcactgattctttctattttatataatatatatatatatatatatatggttttgacatacatcttactatgcccattatcctagctattctaatttcttcactacatttttacattttaacctatgtaaataaatatatatattttgaacaagctatatatatata

SEQ ID NO: 6037 - DNA, 756 bp, Cannabis sativa
acctaattaactaaaaagtgacacttatttaacaatttgatattaaattacactaacaaattattctataatacatactataagtttaatttaatataaacacacttataggtattaagaatgcttatcactatcacaaagtattatattattgtaagtgtaataagttttgataatttaatattttaatttaaaaattcttatgtaacatcgctaggcattcacaaaccaaaagtgatatttaacaatgttcatatttacaggaggatgagcaagtgcagcagatggtccatacacattgggttattgttttgtgagggaaaagaatcaaagtgtgccttgtgagagtagctaaggaccgtcctcctcgaaaaacctattatggcagaggacctatccaattaactcaatacgtatacacttaattatttataatcgtagttttgtttggctgaacttttacttctgaaaacttaagaaatttttcttgagaaagttaccaaagctagcttttgtgaaagagctctttagagcttaccccaacaataaaagtatttttaaagtttcgaaaacttaaaaacaatttttaaaagtctagccaaccaagatttataaccataaccagtagtgctcaacactttctataaataatgatcaacgattatttaacggtattccttaaaagttattttgttaaattatataagacccaatacttaattacattagtaatattacattaaaaaagtactagat

SEQ ID NO: 6038 - DNA, 544 bp, Cannabis sativa
aaaagtccaataattttttttctttcttaagatccaaaactaattatatgtgtattttgtgagtaaataatttttgattagtgttattgttattattattattgtagattatgagtaatggaaggctgagtagtggtgaacacagagttgtgacaaatcaaaaggttgggagaacaagtgtggggagcttcatactgccttctatgaattgtcaaattaagcctatcatcaatgatgatgataatgataataataataatagattactctttaaaccaatcatattcaaagatttgttggctaattatgtggctgatactaaagacacaaaaccaccacttgatcgttataaaattacttcaactaataataataatattacataattattattagctacacagatttcttctctttttattggtttgatgatttggtttgtaataatatacaattaatctttgattataataagatggtgatgaattaatgttcaaccaatattcaacatatatattagcaacaattatcaacttgattaatt

SEQ ID NO: 6039 - DNA, 800 bp, Cannabis sativa
gagagagagagagagaggctttgtttctctctcctgataataatctgtttgtttcttgagaaatgtggagtgtggtgtaaaagggtgtaaatacaaggaagggtggtagagattgaccagtggctatttgcggtaaactctctcataaattcagaccctcacgccgtttcaggtttttgtgaccaaatacaaaggaatgtgactgacacgtgtcagtgtttgttttttttttaaggatatgcatgagtattgtacccattagggtttgaaagttgtatccagtcaggccaattatccagtttttgcatgcttaaatggaaaaacacaaacacaaaaggaaaacactttgaccaaatggattcccactcttacattttcccatttttctgtatatatattacacatatacccttcaaccctttcaatttatttccttaattcttctttatttggtttctatagtatcctactaaattatttcaaattttttaactaaacaaattaattgatatgtttctacaagttctgatttattaattaattcattggatatatcgaataatacactccatatagatagatatatataaatttgtgtgaagctatagctcttcatttggattcgaaactactgaattttttcaaccttaaaaaaaccatacttcaatcccgacaataatatggtctttttttaattataggtccctgcactatactattactactattgtgtaaacaagagtgttgaaaagaattataaagatgtcatatagtaagtaatagctatatatagctagatg

SEQ ID NO: 6040 - DNA, 2890 bp, Cannabis sativa
gggtcataattggcgaaccccataatgcaggcgagagaagcaaggctagggagcactatgcttggactctccgtcacaagcctaaaatcaacatactgatcgtcaaaaaaagaagctctaagaaactcaagcttggagagcctaccacctcttttacagagggagatgttgcacaggtcagtttcccacacaatgcccctggtaattactgcacagatttagaacataacagtttcaattgaatggtggataacggagtctcctctaacattcttttcaaatgaacctatgaaaatatgaggctccaactaacagacctagcaccttgcaccaaagtaatgtacgacttctctagccaaggcattgcacccatgtgatacatttggctgcccttgatagtcaaagagaaccctacaataagaacattgatggcacaatttgtaataatcgacgtgccatcagccttcaatgcgatgataggttgaccagccttatacaagctaaagatgataacatttaatctaccacctatgcctaaagttccctacaaggcatgggataggatgtctgaggggagaccaacagtctggccgacactgttacaacctgaattcatctaaagcaaagaatgagaagatgcccgccaagagctctgaccaaaagcttggcaaaaggcaatgaaacctagcccaaagcggggaagcagacatagatcctcgcttaagggatcctacagacagctctcgacctgtggaagaactaaaggaactggagattgatcccactcttccgactagaaaattgaggtttggaaaggtttagcaaccgaaataaaattaaaggagttaagttgagttggaatggccctcgtctttcccatttgttctttggagatgacctaatcttggtgggtagggccactttggaggaagctaccgggatttggcaatgtctggagaaattctatgagtggtcgggccagcacattaatagacaaaaaacctccatcttttttagcaagaataccagtgatgggatgaagcgcggctttaaataaactcttaggatcagcacagtaagaagtaacatcaattacatggggctccccttatatgcagatttcaacttcattctagacaatcttgtctcaaagctccatgggtggaagttgaagtctttaatctaaagctggtcgagctactctgatcaaatcagtggggcttcctttaccaatttatgttatgcaaactacaaagttgtctaaaaaacttgcagccaaaatagatggtatggttagagatttttggtggggatgcgatcaaggcaacaaaggtatttatctaaaggcataggatcagttgtgcctccctaagtctagaggtggccttggtttctggaagactttataaatgaaccaggctttccttgcaaaatgggagtgggctctccttaccgaggatcaatctttattttgcaaggttataagagccaagtacctaaaaggtagaccattcttgaagtgttcagccaagaattcaaactcttggttctagaagaatgttttgaagtcaaaagaaatccttatgaaaggttcttgtaaactcatatctaatgggaaggacacagacatttgtaatgatccgtgggtggttcatggtgggaacttttatccctatcctttaaacggtcgcccaaaaggccttgagaaagtggcaaatcttctgacagacgatgggaattgggatatccccaaactcaatttcctatttgatagggaaacaactaatagtggatgtggacgaaggaaccaaatgggcgtttctcttcaaaatctgcctacctagcacaagccttggcacgagctccctataccaacgtaatgcctgctttatggaataaactaactttagaatcttggagcgtcataaagttctttggtggagtatattctcaaatgccttacctattagggctactattgcgaagagaatgcatgttgaggatgtttcttgccctatttgtggtgagggagaggaaacaataaaatatctttttctctattgtaattttgagtttcacctatggaggtcctccccctggggtgtgatgtcggtgatgggctcttgggctcgggtgtgggattgggtaaaattcttatggagcctgaaggacaaaagagtagacgtacacaaattgtttctgtatgcttcaattgtggtggatacgatttgaacattctgaaacgataaggttcataattattttatctgtaactttaaacactatattgactctatttatatatgttacacagattatgacccttgtttgcttccagtgccgatgatgactgcacctcctatttgatccccacctctggacgattggatcaagatcaactaggacgttaaatttggtagtgactcgatgtgcgtggtggctttggctagagatcataaggagtcagttttgtgggtggctagtaaaattctcaacttctctaaccccctcattggagaagctgagcttgtttgctagccctggaatcagcgatcaattggaagcattcgttcgtgattatcgagagtgactctgtgatggtgatcaacacgctcatggggactagttccgtttggggtattgaaaactatttgcttcaatgtaaacatctctcacactttttgcttagttgtaattttttttattgctagactttgtaatttcgcagttcataatgtgactaagtgagcgtttacctgtaatgtaactagtatggtcgatccatcctttatatgatcaggaaacttattatgtaacgaccatgaggtctgactttttctatctttaatatattcaggtttattcaaaaaaaaaagtgtagacaagtagc

SEQ ID NO: 6041 - DNA, 1683 bp, Cannabis sativa
agaaagtagaagaaaagttgaaggcagccaaaaaacaagttgaagagaagctagctacaattgtggcccaaagagaaaaagaatcgataagttcattagtagctactcttcacttatttggaagaaagatcttaatatcgtaaagcttctaagagtagaagagggtgaattatcttaggtccaagaactttaagggatgaaaacttcttctgctaaggaggctaaagagtccgactcagaatctcaccttccgaatgatgagcccaatgtggaaccctcccttcctacttccaacacagatccaactactaatacctttatacctttatccaatttcacttctgaaatagctattttagttctatttatttatataaaattttaacaaatgttctgtcaatattttgtttttgttttttgaataaatcatagaattttattaatggtaatcaactaaaataatagcctacaatccaattaggacatcttccctaaataagaccagggttagaattagaaaaacgagtcaaataattaatagttcccaaattgtttgacaaaaacataaaataaaatcatatgaaaatgattgcagcatcacaattaaccttaagaacacctacattttctttcatccatcgctaagaagatacagcagtagaaactgttgtagcaagttcattcaacctcatagcttgaactctcaactattgtgtaaggtatgtaactgcactactaaccccttcagtcgcggaaaacttgttataactaacgactaacaatgatttgatagcgatgcatcaaagaacaaataagaaccaaaaataaaacaaaaccatgtcacacagacaagaataaaacactcaaaaccatgtctcagagacaagactaaatactcaaaaaaatgtcagaaagacaagactaattgcaatagcgaaaatcgaattatagaagcagaacacaaccccgaccaagctgcttaagcctaaagaagcctggcaatcctaaccaaaggaaaaagacaacttctggtagctatacatttaggaacttctatcagtatatttaatttgcctttcacaacatatatcaatctcaatatccccttttcagtttctggttttcttttcagtttctttctcgaactgttatactgatgttttgctgagttgttaatgaagtttggttgagtgttgtttctgtacccaccagttatcaaaaaaaaaatatatattctcaatatccccttgattattatctcatcaggctcttctaaaaattacgtaacgttattggaacattcgcttataatatacaaaatttcataggcgcgttttccaaaattgaatagtactaaaaaaaacaaagcattatttacaaagtttgcttatacgtaattaatttctatacaagatataatattaattttcggtattaaatggatcagttgtgtttataattagaggataatgttaaaagccgaagactgatagtacgaaggttgttccaacgaaacctatatcaatatgcttgcttcctcaaccatcgagctcttagtctattaaaaaaatgtacggccaggattccatttaaccatattgaaggtactgttttaccaaaattttagaaaacatattcgaactgtaaacttcgaaatactataaaatttatgttgactaaaat

SEQ ID NO: 6042 - DNA, 580 bp, Cannabis sativa
tgaaggtatggatgtggggtctcctcctatcgacggggtcccagtagtaaatgcaagtattgaagacactcaaccacttcccccaactgacaggcataataacccatctgatgctgatgatggggttggtgggggggtcatctctccgtctgtaccagtccaggatgctgctgctgctttggaaactctccgtaacaattttttggagtccatgactctagatcttgaacctgacttcgaacttactgcagaggtggttaggtcgggcgtattagtcagtttctttggtggtaaaggggtttcaaaaactaggctgaaggacattttgaatcaaatatggaagctcaagggacattggaagttcaaaactctaaaacagggggtgtggggtattttcttcgacaaggaagaggattgcagagaaatactacgaaacagaccatggataataaatgggaaacttttggtcattcgtgaatggccagaagatggcgattggtataacgttaatatgggcttagcagtcttttgggtgatggcgtcgggcctccctactccgtatctgaatggggttaatact

SEQ ID NO: 6043 - DNA, 786 bp, Cannabis sativa
cagatattttaccttagccttttcaaagaaaggttcaagctttatcctaactgatttggccgcaagctttgctcgataatcttttgggaaaacatatagaacatcaccttcatcagagacctgttgataccatctttgaaaacattgtattcacaataacaacgaaatgaaaggaaaaaaattcaaagaccccattaacagaaactccattaacaagcttcaattcccactttcacacactagaacactctaaatcccaacaacataaaccacaaatatataacccacaaaaagtttgaatataattacctctaggaaaccattagtatcagcagcaagagcttgcaaagctttctgagcttcattcatcttaagcccagccctgctagagacatcccctatagtaaccctcccaccacaagcgtccacagcatccatagctcgctttctgacatcactggaaagtttatcgctttcaataatacctccaggcctgattgcggtcgttacatcaatgccagctctgacaaccggcaccaatgctagagatcccctctgcttagccgagcgtcctgggaaaatgggtgtttggtaaatgggaaatttgttgggaagttctcggaaaatagaaggttttaggtagagacgaggcttgggtggaagagtgaagcaggtggatatggaagccataaattgactggttttgcacaaattgaatcaaaattaaagttgggttttttcgtttttcaagttttggccatcaaagaaggttttttatttatttat

SEQ ID NO: 6044 - DNA, 541 bp, Cannabis sativa
accgccctaccctaaagacgaccctgcttagaagtaaactatgagctattgcatgaagattaagatgaaagaaaagaaggcttatttacataagcacaaacaagtcatacttacccaaaatgtcaatgtcttactttatatcaataaaatgcctattctctaattctttcaagaactaaaattggatcaatagtgcagtgatttaagatacaaatatggaacaaaactgagaagcttagaactaaacaagtcatacttacccaatgaagaagcaaagcaacaggtgaatctaatgggatgcacctccattcatagtactctttccaatcactaaaatgttttgttggtggagaagaaacagtctctgcattctcgaattatacagatattcaagttttacccgaaacaaggagaacagacgacgcaaaagatagtaccgttacatgggcacatggtatctggaagatcccaactataatccatcaaactgccaatttggtaaaaacttatgagaagtggataaccaagttagtgttaataa

SEQ ID NO: 6045 - DNA, 1530 bp, Cannabis sativa
aaaaaaattattaaattttgtcttccaagacaaatgtttatactattatcgcattagtgccacatgtgtaatttaaaattaataaatatgtattttttaaaaaattattagactgaaaattaattaatgattagaaaaatcaaataaaataaaattaaaacttttaaattatttatacgcttgttgcgctcgtaataatatgacactttatagtgatactcatctagagaacaattgcattgtgagttaaaacttgcaaaagtgaaagaaaaaaatacttcataaaatgaaaaaaatacacagatttgtcacatcgtgggtttagaacttgcatcaaaaagcgaaagaaaaagtactttatagaatgaattatggagattttgacaacaaatatggagaaattttgaagagcttttaccatttagttatcatgtctttcacctaaaagcgacaacaaaaccttagacaaaggggatatgaaacctgtcatgtcatatcattcttaatgtagtatcctaaaactcgagcaaatggagttgaattgccaaagtttaaacattaatataaaatgcaaagaccctaaagtattgtaacataccagatgaaattaacatttaaactttaacactcaaataaggtctcacattttatattgacaaacatcttattatatgtaacatgcaagaactatccaacatgtcttaaaaaataagtgagtttcatagggggtgcaaagacataagcaagtaattgtaagggtaaaaaaagtcatgtgcaactgttgtgattggtcacatattaagattacttaactatcctaactaaataaactaactgtctgttatgacacagatgtccgagttggaactaaagcctacaaaagacctttgctttgtaattcaacataatacaattactgattagagagagctgtttagagagaaaaaatagaattttgaagagcgtgtaaaatagaggttttgttcttgctgagtattttttcacaacagcaattaactttgacgtttcactaattttataattgttctaattagtgtgtttgattgctaattgatatttgtaatggtcactataatatcgcaatttgtaacattcacctactattctataatcttgatttagaagcatccttagtttatagttttgcttagatttgttttaaactttttgtgcttcacaagccttagtattttatttttttttgcttattgttgatcaatatttagcatttacttcatgtaaagcttgattcaaattcaaaggactttggctggcaaacttcaacttttagctttttaaaaaactcttccgcaaaaaattacaccaatgactttgaaatttaattttgaatgaaggatgcatccaaccttttccataatacgtaaagagcactctcatcaacttctctactctatttttcaaaatacatcatcaaaaccatactttctctattttacctcaaacttttacatcatacattagctgttttaaaatacatcactaaaattc

SEQ ID NO: 6046 - DNA, 2491 bp, Cannabis sativa
aaataatttccaacagatgattagagctttagcttcttgaatgtgggattccctcactactgaaaaggggtagaaatgtctgcaatggtggctccctcgttgtttcggagaattcttgcaaaacttaatttgttggaatgcctatcaattgcaacatctattgtgagtttggcgagaccatagggaggagggatccaaatgttaggaggacctgttgatccttggccattgagttatttatgcagttttttagccctgcttgatgataattatccacaaaagaactagcctcctcaagaagattatgatggcacgccatagaaccattatgaatgaacttattcctgtcatgacaaatcagccaacacgtataaaaaaacagctcaagttctagtttagttaagatattagagagatgcattaaaattaaatcaaaaaatttaatatgtttagaaaatttgagatgtgagtagaatatcgtacctttccaaagctgcctgacactagtgcaaaagaataaggcatgaaaaatgttttccagcccattgttgcatctgaaacaaattggggaagccactactttccttttatagagatttgaaagggtatggagtgtgtttttggtggctctataggcaaagtgttttagtttagagggtaaggaacaggaccagaaagtggaccaccaatctgagggttgggaacttttgggagtttattggtacttgtcaggggtgaagcttaggtgatatctaaatttgacagtgtagctaccagatgttgtatgctaccaaatgagagaatcttgggattggtcaagggggagagggatatctataatttcattaactatattgatacggaagtatagatgttccaggtcatgtttctacttataaaaaagcaacttcggtacgaggagtttagattgtaagcacaagtctaacattggggatccaataatcatgcggagggtgtgtatttttcccactaccaatttttgtaatgagtctttttttcaaaaaaaaaaaaaaattcccccaactaatgcttctctagacaaaagaaggggcacgaccaatagaaccgtccaggaagaaggaatgaggatgacatctttccttgagaatttgagcaaccaatgaattaggttgggtaaagagacgctaggactgcttggtcagtatggcttggttaaattgaaccagagatataaatcccagactgccatttttcttagatttgtaaagcattgtcgaactatgccaattgagtcttaggtctcttatttgcattagtgcccccaccagaaattggcactcgtagattcaagagacttacaaatattgatagggagtcgaaaccaagacatagcgtaggaggggatggactgtgagagcactttgataaggatttcttttcccccttttaagaaaaactgtgaatccaattggaaaagaggtttcaagttctctctctctctctctctgatataattaaaggcttgttttttagttcttccaaagcattgagaggggcctagatatttttcaaactcatttcttacaggcattcccatgtagtttgagataagagttcgatccctcggagctgtgttagtagagaaataaagagaagatttatcaagattaacacattgtcttgtggcctgttcatagtgaaggagaatctctttaccatcattgtaagaatggatatttgcttgacaaaaagaatgctatcaccagcgaagaaaaggtgggatatggtaggagcggtacgagaaattttaaggctaatgaaattgccagaatgctcatattacgaatgagggaggaaaattctttaaagcacaagaaaaagaggtaaagagaaagtggatctccttgcctaattccccttgtaggagttacatttcctaccaccctaccattaagattaaattgatatgagatagtagagatgcaacggtgaatcaggttagtgaaaccttgaggaaagccaaacttatccataattttttgtgatgaactgccactcaatcctatcaaaggcttttgccatgtcaagtttaatggccatccaacctttcttgccacacttcctttgttttatggcatgagctacatcttgggcaactataatatcatcagaaatgagacgacccaggaggaaagcgctttgattgtggcaaatgagctaattaagaacatgtttaagcctattagcaatagcctttgaaatgattttatagatgatgttacaaaggctaataggtataaaatccttcatggttctggttggcttaactttggggatcaaagtaataagagttttgttcaaattagcaatatctccaccaacgttaagaaagttgagggctaccttcaaaatatctgacttgaccaaaccccaaatttccaatcaaaatttgtgttaaagccatcagttcttggggctttacaaggggaagctggaaaaaatctctttg

SEQ ID NO: 6047 - DNA, 1043 bp, Cannabis sativa
ttttttttttttttttatcttttgctcaataatacgactttgaaattctttgagcaaatttcataaaattagaattgtacatttttttttcttcttttaatcttttaaaaggtttttaaaaaactggtttttagatactatatggtttttttaatttataacactttcatacataaaataatttttttctctaataattttatttattttaggaatgaggaaggaatagaaagaatgaaagaaaaaaggaaaaaagatatactagtaatacttttacagaattttctatataaatatactaggagatgtatgcgtgcctatatatatggcacccatctttattgttctaaagaaaatatttcctacttattcttgtttttaatgtaaattgttaattttttccttaatctaatacacttctttctaataataataataataataataaaaaaaagtgtaatatttacgagaaatatttgagaattgtatgcatgggttttggaagcacttaacacactttaaactacaaacatatatacattatgtatatatatatgtccttagctagttaataattcaacaatttaaataaatatcgatatcagtaacttacagtacgactaatagaatttccagcactaatattgatcgacgaagcctctgctaaagcctgtcaaagaaaagttcatttcaaagtagtgagcatatatatatatatatatatatcaaatctggataaaaatttgcttatgcagtacctgagtcaaaagaatggtggctaaaataaaaaccaagaagagcttcttcatcttaattactttattatactcgtatactcggatataaggttgaagtatatatatatagttcttgttgtaataattatatattgaagccaaatatgtagtttttatatatttttagtttgggctcatgacattgacacgtacgtactcacatttacatatttaaccatatataataattactctgtttttatctttcttcacatgcatgcaatgcaaaaagataagagagagaga

SEQ ID NO: 6048 - DNA, 782 bp, Cannabis sativa
accatttgggtcttgttaattttgcccaattacataacaatgaaaaaacaaaaaaaaaaacaaattaagttagaactcataatcaaataatctaacttatgaagaaaaataagataattgcataaaatatatgattcaaattttttgaagaatctgttaataataataaaaaaaaagaaattaaaatttgatcaattatacaataataatgataatattatcttattgaaaaatataaatattcacaaacagatgttagttttaatgaattttataaaatgaaatattgttattaatattaaggtaaataaaaagatagttcttcacatctaaatctgaatcgtagatcgatcttttgatcaaatttccactcaaacaaatagataatctgttaattaattttatcaaaaaaaaaaaaaaactaattgactacaaacctggttaaactattatttcatagcattagcaaaatgctttaatttttattatcaatatcaaaatatatataatactagtaaaccttgccctttatttttatttttatttaaaaaaaaatacgaaactacatttccacatgaatataacaactcttcagagaaaaacgattaaaactaatataggtatacatataatattgcattgattaattaaataaccttaaataatatttatattaataacaatttcaaagaaacttacacactaataataaaataataatcttctaaggatagaattattagtttgtgcaaattgagttattaattattgtttcattgtga

SEQ ID NO: 6049 - DNA, 558 bp, Cannabis sativa
aaataaataaataaaaataaagagagattaaaaattattaaaaaaatttatagtacactctttaaaaaagccatatttgtacactttttatttgtttctgtatgaagtagagttttttaatatatatatatgtatatatatatatatatatttataattgtatacatttgtaattatataagattacttattattttttagaaaattttgaattatttataatgatgaaagtaagagtacttaaacaattattattatgtgtataaaaaaataatcatttatataacaaactatttaaattttaattttaataccgtaaactatttaaaattttctaaaaaatttaattttaagattataacatttctaaaaaagaaaagtaaaaagcttcccaaatattgaaataaataaggagatcactataaagagccttttaagtggtatactatatatatttaccttaaatattattaatttatttatctaatttggctagcatactattatagggaaaagttcgagtaaatattcaagaattattttttattttttattttt

SEQ ID NO: 6050 - DNA, 633 bp, Cannabis sativa
aacccagcccaaattgctactcattctaatgcagctaacaatttgctatggaattaaaaaaaataagtaaaaagaagtattataataaaaaaagaaaatacattgatggtgaaatgtaataaaaataaaagattggagtccttttcaaaaaaataattatattggagtgatagctacatctacagtatcaaaatatctcaatatttctcttacttcaggattccaactcaatttcattttgatattaatatttgtctttcttatgaaataaattttacattagaatataaatgaagtgaaataaggaatttgaaaactacattttctaatcttaattaggtagtaaaaaataattgactagacagcaaggcgcatctggtgtagtggtatcatagtaccctcccacggtactgaccggggttcgattccccggatgcgcaatttggttttgtttttactcaaaataataatataaaaaataaaacttttcaaatttataaagatttttctactttttctctctttttttttatcaatccaacgaaaataattatctaattaatttaaagaaaaaaaaaattgtaactaatcacatttcgactagagttatattgggttggtaagtaacgtagg

SEQ ID NO: 6051 - DNA, 788 bp, Cannabis sativa
ctaaagctaaataaggcaacaaacaaataagaaagtgaaaagtgaattactttcttccgataagtctcttgacatcaaagatagtcctttcgggattgacggccgcctggttctttgctgcctcaccaatcaacctctcggtttcggtgaacgcaacccatgacggggtaatacggtttccttggtcgttggctatgatttcaacgtgaccgttcttatacacaccaacacatgaataagtggtaccaagatcaataccaataacagttcccaatttagttgcttcctctttggcaatagtaattgcaaaaaggccacctgtgattcagatttgaaaagttaatacaaaaccattactcattacaaaatccgaaaaataatacgtaaatagaagtacgataattatcatgcattagagacaaccatatcagaaatatggatcagaaaatcaaacgttccaaaatgttcgtaacaaagctcctatctactaaccatcaaaaaaaaaaaaaagctcctatctacttagtttctataccattatattacattacgaaatttagtacacatttcaacgagcacatacacgaatcaatttgcttaactagtctaatttcttatgcttctcacttataacaatttcacactctaataatcttactagcaattagcaaatcaaatcaaggaaaatcacattactgataaataaactaatgctaagattcagatctaaatctccaagagtttcaaattgcttaaactcaaagaaaatgcgaaagaaagtaatgcgt

SEQ ID NO: 6052 - DNA, 798 bp, Cannabis sativa
gtcgatcatcacccttgccaccaccatgttgtctatttgcacctctacaactaagggatcgttgtgagggtagctaacattatgttcttgaacaataataaacggtactataattgtgggccccactagatttgtttctggatttgttaattaattcaaaaattaaacatctgtttaaatttgaatttaaaagttggctatagatatttatttatagttgaaatattcacttaaaatggctgaatgattttctccaagtagttgacatattccccaattagttattagatatttagtttaaactaaacatttaaatttttaaaaaatatctatagcagttttaattacaaatatttataaaattattacttaatatttaaattaagaaatattttataaattaaatatttatagttattttcttaattataattattataccggtataaatttaaatttatatatatgtgttatacttaggttgtgttatcccaaaattcgcaagagtgatgggggaatgaactatttgacatgtggcataaaacatcacatgtgtagtatctggaatgataaatcaaattgcctatctaatataaagtattgtgatggctctactcggcctaaaacatccaattttaaatcaatgaagagaatgacgtcttgatgtagccatgaagcgagatgatgctaaaaagaaaatatgactactcagtcatgccatccagaaaacctaatcggttttagattcgtaagatcaggttttaattattctctcaagactgttcggtcaacatactt

SEQ ID NO: 6053 - DNA, 793 bp, Cannabis sativa
tatatatataataataatatcgaagaaagccctaggatcttgctatgaaagaagagaatataattttatttattttatgtatatttttaattataggaaaaggagaaaatatatatagaaaaacagtcaatctcatccttaaagtggaaaccttaaagtggaaagctatatatagaaagctatatataaatatatatatatatataatttccaagctggcagtgggaggttttgcaaggctggttggatactacacggggatataacaaaaaaaaaacactaatatatatttatctatcaaatcatatcatatcatgcatggggatgggggggggcatatatatatatatatataacactatgtatgtatttatatagcaatctctgtcatatctctatagctagcttttgttatgttgcatttggagtgtttcttttatttttgttcttgcaaatatttattatatattttaattaattatataaaccaatattgaaaacatggccttggctagagtatgtaatagagtaaagtgggaaattaacgatcatcatgatgatattatattatttatatatatatatatatatataattataaagggcaattggtcatagctcccaatatatatattttcatgaaaaggagagaaaactccatagaattcaaggttttcatgcactgttgcacatgcttccatctctccaacccattcaccctatttttctttccattcaatcgagagagagagatagagtttcaagtggctgagtggggtacacctatatatat

SEQ ID NO: 6054 - DNA, 1290 bp, Cannabis sativa
agagttcagacctatcgtagaggtagtgaccaaatggcgtcaataccttcttggccaacattttgtgattaaaactgatcataagagcctcaaagaattgattactcatgttttacaaactccagaatagcagcattttcttcagaagctactggggtttccattttccattgagtacaaggcgggtaaaaataatctggtggctgatgccctgtcaagacaacatgaagcaccttcctcaaagttgctggcagccatgactataggctttttgaatttttagatgaattgcgacttgagaatcagaccagtctagatttaagacatattcacactcaacttgagatgaattcagctaaattttcaaattacgtagctagggatggtcttatctatgataagcagaagttggttcttagtcgacattcccatctcaaggaacaagtccttcgagaatttcatgattcgccaattgggggtcaggcaggggtagtttgcacttttctctgtttgagtgcaaatttcttttggtatggcatgcgcctagatgtgagtaaatatgtttgatcttgcttagtttgtcaaaccgtgaagtactcacccacaacaccgtatggtttattgcaacctcttgagttaccggagagagtttgggaggatctcgctatggatttcatcgtcggactttctaactccaacagtgtcacaaacattctggttgtcattgattgattcaccaagtatgctcatttcggagcgctgccaactcaatattcagttagtaaagtggctgaactgtttacaaacatggtgattcgtctccatggaatgccttgcactattgtttctgaccgtgaccctgtttttactagtgccttttggaagaaattatttgaaatcatgggtactaagtcgaaaatgtgttccgcgtaccacccacagacggatggtaaaacagaagttacgaacaggtatgtggagcagtaccttcaggcttttactatttattacccaaaacaatggagtaagtttcttacttaggctgaatatcattataatactagccatcattctgctattggcatgacaccatttcaggctgtatatggccaacttccaccgtccattccagcttctactcggggtaccaccaccattcaagccgtggaggaagatttaatgtcactagatgcttttctgcagcagttgaaagttaatctgcagcgcgctcgacacagaatgacgcaacaagctaacaagaaatgcaaggatattgagtttcagcaggga

SEQ ID NO: 6055 - DNA, 1302 bp, Cannabis sativa
tcaccctacacaaataaaaaaaaatgtgaaatttcacagagaggaagccaagaccgttgtccatcacttttctattggacaaaggggtaccgttatcggaaatgtgagattttcactatttcgattaaaatgactgttagtgcctaaaaactactttttctctcaacacgtccaataaaaaaatgttagacaacggtcttggcttcattctcgtgaaatttcataatttttggagatgggtactgtagggtgacatattaatagaacactaacgcgtgtaagagtaacaaaaaacttgttaaaatttaccctaaaaggaagaatattttaaaattttgaattaggggaccattttaaccaaattttaagcgaaaccaatcttcatattcatgtctaagtagtacgaattcattgtgactaatggcaaaaaatatttcgagatgggtgcggtccacatttcacaaaaggggtaccactatttgaaatgtgagatttcactatttcgattaaaatgactgttagtgaataaactagttttctctcaacgcgtccactagaaaagtgaggctaccttgacgaatacacgttgagaagggattgcattatttgtccagttatcaggaggctcctacaagcttaaaaggaagcttaatgttggacacatccatgttaggagaaaccccatagcatcatttacttatcttaaataaacacagagacagtaagtgttaaatataaagttataccaaggatactacatgtaatatttacatcattacattcctattctctactagcatcaacagagatataaagcttatgtaaagctaaaagagagcataaagcgaaggccttgatcctgtttttatatctgatgttacaatccttgtagccactaaataaagatagtagccaagtgagaaaattgatgaaaaacatgaaagagaaggcttacaggccaaccaagcaaggtttgtgagtgaggttcaaattctccgggcatgtaaaatccataggaagtcggggtgcaaccggaaattaaacttaagtatttatactgcaaattactcttaggaaaaccaaaaagtaaaaaatcacttttcccatgtagaatcaatttcagtcaaaagtgaaaaacagataacaaaatgttacaaacaacctaaaaatgacactttttttttttttctattttgtgcaaatttaccataaaagaatagtcttttcttttttatcttaataattcaactaaacatagcactaataagtccttgaagagatccaatgacaccagcaactgca

SEQ ID NO: 6056 - DNA, 1093 bp, Cannabis sativa
tccattaaatatatgataagctttgaagattgaagcactttcttctttcaaagaaattttttaaaatgatgatctttattttgcttagagactgaaagacttcttcattttcaaattgcactcttatcattatacaatgaacaatggtgccaaatccctctaacattataattctactgctcttttattatcttatgagttaatatgagaggaagaatctggctctggccttaactgtacacagaataaagtaaaacaccaaaaggggttttgttataaagacagaaaattgcccattatatgccccataaaggaatattatctatactattcaatatattttcttagtcaactaatcatttttttttatggtatagctttctttcaaagctactatttaaaagagacacaaaatgatgccttcaaagataaatttccattaattatgagacaattagatgttctgctaataaatcttcatctcttttaaccaaaaacaccaatacatattcaataaacccgagtttaaataaaaaatagtaactgacacaacacttggaactaaaccagacgaaggactaaaagaacaaaaaagctttgtaagatagacgaacgagcaaatagttgaaactaatagggcgggtggcaaaccgcttctactttgaagccactaaaactcagtttcttagcacttgacctccttcaatccatgggcaaagtagaggaaagttgggtcggcacatccatccttgtagtaagcgaataccaagcatccatcatcgtgcatgctctcaccgacaaagctgtgaatatgagcaaaaagtattagcatgtgtatggtgtggtaaacaatatacaattacacatgataataactatcaaaagtgaatgaacacttacaactggaggtctttaattttggggagcaggtacttggttgcaccctcaatgcccttcttaaattcctcttgtttctctccttccaacttgggggtcaaaagtttaatgtacctcttgatccaagtcacaaactgcttcttgtcaaaaggaggttgttcctgtatgaatcatcctgattagataccactcataa

SEQ ID NO: 6057 - DNA, 1204 bp, Cannabis sativa
acatcaacctaaatatatatatgttttgataaaatatagagctgatcatcatacattacatggtcattggtcactcttcatttggcactttttcttcacttctgaccaaattcttattaacttattcgtaggtataatcaatcaagttgtgatgacaggtccttgtgattttcccagaaaacaaaaacgaaaggaaccaacaaaacaagatgcattccttacaacaaaataaaataaaataaaataaaataaaataaaatcttcacacaaatcacgtcacacgagtttacttacattcaatttcatctccaaaaatttattgtttgtgacctagctatctaactatatatgtaaataacattcccaaaaaaaaaaaaaaaactacatatgtgaatagaaattataacttttttgaaaaataaaaatactataaaattccgtttcatattgattttatagtaaagttcaataagggtaaacatcattactgtaattaagacactgcattacattttgttttgtttgttgggctagaaatacaatataataagagaaaaattagaaacaattacttttagaagaagaaagagaagagaggaatctttggtattggtcagcttaaaatggacaggccaattggaaaaaatgaaagagaatcatttggagttttatttattttattatataatatttttgtattgggtttgggttggtatatatattgttcacaaatagggggtgggaccctagacactcatgtaaagtttcaatcctttttgtcaccatagggaccaccacacacacacctcttatttgcttctcatcttaccattacattagaaacagtctttccccacctttccatttcttaattatatagtcttgtatacaataatgatgattgggatgccaatttattattcttattttttttttagaaaaaaactgcttcctaattttcttgattggttctagtcttctatagaatcttttgtcaacatattttttcttatttttaacccactagttaaattaagtgcgattatattctataaaccatggattttcacaagttacaacttacaatggtccaaatttcatttcacaatcaaatcttgtccctagattccttgtaaatccacctgaagatgaggaggatgtaacttaatcgttgggcaatgaaattaattaattttcacacaca

SEQ ID NO: 6058 - DNA, 626 bp, Cannabis sativa
tataaatatatatatttatattcaatctttatccctcctatatatcacttttattttgttctcaatctcatgtgaagtgtctaattatacatgatctatataactagatggaaccctatgtattttattatacacctactttcattttttaaattgtaacatagtattagagctgcttgtgatccgttgtgagtctaaagtattatcggtctaaaaaaacgagccaaacaaaaaacttttacttttcttttttaacctccatttgagatctttccgctaatatgtgccagtttctcagtattagggtctttgagctgttttaaaattcacaaaatttccaacgtactgtatacccacaaatttttcaatttggccttgtgggattttatttcaaatgtcatgttcagctctatacggtctcttaaaagtcgtttgttataaccactttctaggccaaacgtgaaaaaaatatattagagttaacattgctaatgtgtaaaaataaaataccatatataagatgagtagatactcctcccatattatcaacagattttgagatgaaagtacatgtatcttaatttctttcattttaaattctaacaaaccgtatcaacaagccatta

SEQ ID NO: 6059 - DNA, 1836 bp, Cannabis sativa
aaaaaaaaaaaaaaagattatttaactttaataaggccaccatagactatatacactggtacagattaattaaaaaaaataaattataaatataaaaataggatactataattttgggggccatggcctctatagtaacatacattcacccctggaggtatttatgccttcagttatctcatactcttttagtgacctctaaattccgcaaactttttgaaaaccgacgtgaaggtactgaaaatgctgcttctaaaactcaattttgtgatagtacaagacaacaccaaataagaattattattattattattattatacgttcaattatagcactctagtgtaaatttctgaatacaaaaaatgaggaatatgagctatataatgcgattatacgttaagtcatattactgattaatatatttatatagacgtacgtaagcaagttgcattacaaataatattccaagttgagagtttatgacagtatctgattccgaaaacaaaacacaacttgattaagtaaagtatcttatgtttaattattctgaataatttcaactacctcatattcacatataattgtatagtttgtatgtatgtttgaacatgattgtatgactttattgctgttttctgttacggagtagtgtacagaagctactggaataactcgtacagggaaacattcagccacatctctcccactatacactacaaggaaagagtactatatattaattactaataatttaattatatagatttcatcaaaagaaaaataataacaattaattatatatatatcatattataataatatcgccaatatgattatgcatatttttatttagtgtcattttcaattattacataaaataaatctcataatactttggcgatatatataagaccctcttttgttcctttgtgtgctagctgtagttatctcctagtacatgttagagattttattatatcactcgtcgctactataaatttgagctttaaaggtagtgtttagagtcttttagtgtcagttttgacaaaatttactaccgatccgaacgaagctataaaattaaaaacaattgatgctaaaatgtacattatagcatcggttagtatcaaataacaaacgtcatatatacataatggtgtcacttatatataaataaaaaatatcatatacactaataaccaacatcagaagataacaagctgaccccaaattcttaataattaatttatttttcagtttaaaacaatacaagaaaggtgaactgtttttatcccacttttttagttaataaaaataaaaaacaagataaaagatatattgagactttttattctatttttaaatttggcgcctcaaatatgcaggaaaatttttttagacaaggtcctgtttggtagaatgttaaaaaaatttcaaaagtaaaacctaagttcaagattcgatttttatgggttagccaaataagaattagggtttttatggaaatcttttatcccgattgttagttgaaaataaatggtttagtgtgaaacccttttaccccaatttttataataactgggataaaaagtatttctctaaaaacacttctcccatctcgcgacagattatcacacatattatacacaccctcgatatatcctctgctattaacctctcgccagaaaccctgccaaacccgaaaatcgtcgccaaaacccagtgagcctctcgcccattccagaatcgtccaaacccaacaactcaaacgattaaggtatgattttcttctttattattttcccctattctgcattttaaatatttgattatct

SEQ ID NO: 6060 - DNA, 739 bp, Cannabis sativa
  modified_base (456)..(460): a, c, t, g, unknown or other
gggtgggcccgagccagtgagggtgctaccgaagcgccggttgcgggaggatttgatgaagtctggttctgcttcttctatgatggatgacggcttgttgaagccaaagcaagggcgagatggtggctcagtggctcaagccgaatcaaaagtggaagctccgtttgaggtttttcagttgggcccaccgagtgaccattggaggaatgattgtaatctggtgttctctggtgcacctaaaaatttttctacttcttatttcgattaccaaaatttagagtaatcaattttttatcattgaaagataaactgtttgaaaattttatagtgcacttcctaaatataaatggttgattctacaatacacttcccttaaaagagatgtattgatgcacctttaacttatttcggcattcaaaaaaaaattttaatctaatttttttcatattcatgtannnnntagctatttaagatatcttacaaacttttaaaaaatttggaataatttacaatatcgaaaacaatgttcaaacagccgattttacacgcgtataaaataaaatagtcactcgtgcaatacactgtttgaacatagttttcagcgtgttaaacttttctaaatttcttaaaattttgcaggatgtcttacataactataacgtacatgaccatgagaaaaaatttaactaaaatattattgcggatgttaaaacagataagtgtgcatcaatatatccat

SEQ ID NO: 6061 - DNA, 792 bp, Cannabis sativa
aaaaacataacccaaacagaaaaagtgtaactacatacattgcattaattaatgagaaactaattaataatataattcatttcaattttctatatgtataaatgattcatataaataatatatatatatatatatacattgttttatatatccttcttcatcttataaatacaagctatattagaattaataatagtaatattaataaaacagtcaaatattaaactaaatagtaaatagtaatattacatgacttaattaattataataataatattacttggcattattattattacaattaattatatataacattatgattattacaagtaagaagagacctcattacatcaacctgagctttaagacataatatgtaatctagggtttccttaatcaaacaaacttcatcatccaaacactcttctccaccaggaacaagtcttttcagaatttctcttcttttctcaaccattttcttagctaaaaaaccactagaataatgtttaacaactttattcttcttcttcttcttcttgttcttcttataataacaactaatactacttcttctcctactattagtattaatattattgttgatgttgtggtagaggattttggagtagttataagaagaagaagaagaagaagaataagaattgttagctgcttttgttatgatggctcggctccatgaagtgtttcctttcttggcaaaagccatggctaaatttgctgaaagctttatggcattctttctctccaaaactcctacaattttcttat

SEQ ID NO: 6062 - DNA, 930 bp, Cannabis sativa
tatttctaatcactttaattgattgtcgttagataaaagtgaggtcaatattttggtactctcattgagagaaaaagaacacaatttttgttttgaatcttttcaagacacacaaagatggttgtacaaacacggaggtaatctcaacaaaacaactgatctgatggttacgattcctaatgtgcataccctgcgaactgaagagatccagcaaggaaggatcctgaatctactcaacaaacccaaggaaacaagctgccctatccaaggtcacagagtcaaactgatggtcacacagtagatgagcaagtttatctagcctgttaatcaatatagcattcgtcctcagatggatatgccaaaccaaccaattgttgataatagccagacaaggagcccctaggtgtatcaatctttaacaaattaggccttgtacatgatttgagagatgatcttaatcatagaaggggacatgatggaaaatacatccctcccaatattcagccgaccaatgtaaacaactatctgtgtggtaatgttctgagagatctacaagtgacacaggtcggtcaataggtaggtcaagttgatctagtggttcaagcctaaataaaccaacttaagagccttgtacaaagcctaaccggcccaaaattcacgaacctagaaattgatcggactagggaagaaattaacaccattaatctacaacccatgttcaaaatgccaacactataaatgtacacgggaaagaaagatcctctctcccacattaaatacttcaaaatgcaaatggacttgtaggtagtaaagggagatgtacggtgtagaatctttcgagctaccttgacagagatcgcacaatattggtacttcaagatagttctaggaaaatttagatcatgggattccttcatggaagagttccac

SEQ ID NO: 6063 - DNA, 956 bp, Cannabis sativa
taatttctactccgtccctactttgatttaaacaaagtattagaacagatataaaatgaatttaaaaaacgaatatagggtaggagagcaatcctcgccccgccccgtttacatctatctataataaacaagattttgtctaatgcattttaataaaaatttctttgatacttaacttgttcatataaacaagaaggtgttgacttgacacactaggacaaataattaattattttctctctacccaaatttattagtcataatcctattctcatattaattttacaaaaaataaataaataaataatagtcttatagtgggaaaatgatatagacatgacttacaagactcttcttgagcaaaattcttaacatttagtcaagtttctacttaataaataataataattatatttatttgagttttttttattaaaatttgtgaagttttaaattcattttgctatgtctctaaattatttgcagacttcaatcactttttttttaatgtatttgtactcttctatattagatcatcacgtgttactatcaaaaattatttatgataattaattattattatttaatatctactcacaattagggtactaactaattatttttctttaattttttttttaataaggggttaagacttcactaatgatgatatctttctacgagtcattttaaaaagttgattcacttgtaaaaagaaatacaaatgtttttaaataaaaattacaaaaacttcattaaatcaaaatcacctaatagaatagaatgtacagcaattaagtttaaatattttttttaatagaaaagttaataattgcactatattatatatatacatatatttttttaatattttgtttgtttgaatataataaagagtagttgagtttactttttataatgtgattaggtataataatgagcctcaaattttagca

SEQ ID NO: 6064 - DNA, 2706 bp, Cannabis sativa
ggtaaaataaatatccaacaggggcaaactcaaaaataaaatgaagttgaaacctcaaactctcacaaggaaaaggtaaaggcaagatggatgagctcccacaaaaatccactcctaagcctcctctcaaagacgcgaccttgaggacaccaaaggccactagtgctttcgagcctagacgcccttctaaccctcaatgcaaaaccgtgctgagaggaccaaccacgccagtacccaagcctagaagacgggggaatcctcctagtgactccgttaattaggataggaggactcccgcaggttactcgaatgacaattggatctaagtgtattaccttagtggagaagatgacagctagaatcagtatggagcacaagaaatttgtcctttgctggaaggacaattttgattaactctgtactaatgactatccaccttaattagagtcaaatcctcattctccctaagaaagtaataaaagaaatagagggcatatgtaaaagtttcctatggaaaggtcaaagtaacatgaatggccctggtagtattgcttgggataagctttataagcctaaaaaagtaggaggaataggctttctggatatcacaaaatgaaaccaagctgttgtgatgaagcatgtttggtcaattgccacaaagaaggataatttatgggtgaagtgggtgcatagtgtttacatagctcatgaagactagtggagttacaaggccccacttcaaagcagctagtattggaggaaattagtgagcatcaaagagatagtaaaatagatcatggaacctgatctgttttcttcaaatagctttaaaatttcctcagtttataagatgctaacacaggaacaaggaaacttttatgttggcaaacaggtgtggtacaggcttaatgttccaaagcatagttttttgctttggattacagtgctgaacaaattgaaaaccagagaaagactactgcatattcctgttacagatgaggcaacttgccttctttgtaaaaatactgaagagtttgtacaacacttgttctttgagtgtgctttctcacaagattgcttagctcagatgaaggtgtggttgaagtggaatgttagatcacaaaacctacaaacaatattgagatggatcgaaagggctaaaagaaccaagttcaggaagagctgttatacagcagcgattgcagtcttggtttactagctttggcaggcaaggaacaataatttttggaaccaagaaactaccaactcggatgttcttgtccaagatgcaaaatggctagttaaaaataaaatttcttgtgtaatgccaaaatgtataaaacaaaaagatataaaatgatttagtttattataatattgtaatacttatattattaacacacaggctcttttggagtgctataggttgtataaatgagattgtgatgcaatgaaattttaattcataagaaaaaaaatgagatttagaaaatgtaaaactaattacatttaggttattcttatttataacaaattaaaaattattcttgaatagagtattcttaccaaataaaatcaatttatacaacaatacataatctattattttgttttacatgtttaaaaattatttttgaataaagtattttcaccaaataaaataaatttatacaacaatacgtacataatccattattttgtttcacatttatgttttttttcatgtttattttttaataaattatgtttaattcaaatttaaattttcaaatattttattcatttaatttttaaataatttgacaaaatttttaaataaaaaataaaattaatgatgaggatcaataagatatttccatgtgcctactggttaggtatttatggaagttccagaatcttaataaaatgtatttttactgctaaattttttacttaagtattaataagtatttacaccgtaaattattttatataaataatgttgtgattatataaattaattaaacatagttagactatatagtacatattagcaatgtctctaagtcttaattagtgatattaatgggcgattgggcgtctatatatacatgactagacccattagtttgagaaatgttaataaggggcatattatatgaaatgctaataagggttcgattattttttggttaatacgggaagtgagtatagctaattacactagttttcattgaaaaagaaaaaaataacctcattattctaatactaatttttatgttctagctagctaaaccaaattgcttacaactttacttagacttgtataacattttaagaataattgcgagcaaaatcccattaatattagtaattattatacattgatttttctaaaaagaaataagggcaaaagtatttatcttacaattttattttagctatatgctataaatagtaactcaaaaatatgtaatgatatattattaaactacatattaaataattattatttattttattttttaattaatactttacaaatttaaattaaaaaaccaaatcatttttttaattaaacaaataaaagtacttttttaagggaaaaatataaagtttcttttcttatttttaaatgcatggtttaataatatgtcttaacgtatttttgagatgacacttaacaattaaaatagtacgactgtaataaaattaatatataattta

SEQ ID NO: 6065 - DNA, 2016 bp, Cannabis sativa
attacttatatttgtaagtaatttagtagttgtgagagatttattattaaaatttaattttagaaaaatgaagtgaaagtagaatgataattgaaaggatttaactaaaaaaaaaattatattataaactaaaaataaaaataaagaagttgaaagatttttatgtgatgtaattggaggtggaggtcccatgtgaggggccaatagtaagagcccatcactctttgggtgtgggacccacagagtggaagttgaagcggatgctgttcgccacgtgatcaacattggccctacattgtcgcctacaccacaatctctacttcttaatcttaatatatttaattattaattattattcattttccactctttcattgaattctaatttccttcgtatatatgaaaacgatagttccaaaaaaaagaaaccgataattttactgcttaattaattaactataatatttaaaaataaatagcgagaactaagaaataaataagtatatatttatttgtgaaacaataattaataaaactaataatggatcaataatgtttttcaacttccaaactagtgtattaaaagtggggttagtaataatatataatagtggaccataaattaaataaatgcagtgggagatgtggccttccctcgtgatcgcaaatttcagggtcggttgttgcagctaagctcttcttaatactcactcttttgctaccaaaattattatattagaaaaaataataaattattatattagaaataattttttttttaaatgataaatgctaaagtgattattagtgcaatgcgtcattattattattattagtccaactaattaagtatcaaatttcatatagtttaacataataatttttagagaacattgctagtcaatcgcaaagcgatatatatctaaaggtgctaagcatcactatatagtgctcaatagcaataaagaaataaatattccttttaagatatatatatatattattgagagaaactaattaactatataaagcaattttattataggtgggtgttttggtagttacaattaagttctcttctcgagtaataataatttttgacccagtaattaaaaatataatcacaccaactatagtacatgcatatgtttttgaaatagatagaatatacgtaacagaaatttgagttagtagaattacgatgcatgcaccgcagtcgtatatgttctgattggttacgtgtcatacatgttaaccaagcaaaaagaagaaaaagtattgggttctgcttaattaatatgtattatattatttattcaaaaaatatatgtattatattatgatactctacaatcaataagataggctatatatgtattacgtatagctacatacactacattattgtataacctaataacatgaatttattattgtataacctaataacatgaatttttcctttataaaaagcttgcgtcatactctactatagtcatttatcgacacacatataaattgtacctactactcaaagagtggctactctctctctctaaattatatataatattcatgcatatatatattgttgtatatatatatagggacacgattttgtcgtacttttacaaaatatattttgtggtgtacggcagccgttagacaggaaacttatttaatctgagggctggtgttaatctaagggtaattaagattaaaaaatagtaacataccctgagacccatctaatataccatgaaatacattccagtacattacggaacaaaattgtatccctatatatatgcaatatgctattaaaaaacttcctctttattttattaaatattcaaaaaaaaaaaaatataatgaattaaaaataataatgtagaaaagaaaatttgatgatagctatcaactagttataaatattacaattattaatgatgatataatttattaatttatttattctcctatatgtgctgcattgcataattaattatgattaat

SEQ ID NO: 6066 - DNA, 632 bp, Cannabis sativa
tgtgaaactgaactggtcaaacagttaactgcagctactgcacttagagctatttctagcactactctggccttttctaacttgatgggaccactggaagaagtaagcttctacggccatcgaatcgcgtaccttgccccgagcgtttatggtcatccacatgtaagtactcatctactcaaatatgtgcaaaagattcaaacctcgaaccacctatttaaacggcggaagatgttcaaatttaaacatctttttcttctgattattgagcctgagtgagtgtcccaattggggtttgcaggcattaacgatacattttcagagctatgttgacaatatgactattgctctggcggttgacccaaatgtgattcctgatccacaacagttgcttgatgatgtagagcaatctcttcaactcattagggggactattcttgagcagaggatgaacaaggaaattgtctaacttgatgattttttttttgtcacatcagtaattaattaattattttttaaaatgtacattaatatgcacacatgttgattaatatcatttcaagatcatgttgtctaaaattttcaaaagctcctaattcaaacatggaattattacaaccattgttaattgt

SEQ ID NO: 6067 - DNA, 751 bp, Cannabis sativa
cgtgagaaatgtgcaactcctgagttttctgcatcatccatccctggaaattctcaccagcaagtggctgttcacaccagtagcaaaggtcccatggctcactctcggctgaatgctttttctgcatcaacttcaggtggtgagaaaggagttgcctctgtccctcctgttccagtttcatcagatattcagcaaacagcagtcaatgctaccaatgaagttgttaaggagcatggtctacaaagtgatcaaataagattgactgatatcaaaggcaaaaaaatagtggatgatacaccagtaaaattgccttgttccttccagcacccaccatttagaggccaaattaattcaccttcatccacgatatcattcaaggaagttaatgaatatcctcctggtcatcttcccaagaaggcaatagcattacctgtggcaacccctccagcatatttacatcacctcaatgcttctaatcacttgcctatttcaccacaacaatctaccacaacaacaccttttctggatagttctctagccaaaaagtcgattgcaattggtgatggaaccgctgctgagacttcttccattcatgccaagtctccttgtacttttacgaagcgtcaaatgatcaaccaaggaggtaatgttcggcaagtgttgaagagatgtcgtaccaaagatgcttctttgactgatattactaatacacctcaacatcaactcccagagcccatttctgaactggctg

SEQ ID NO: 6068 - DNA, 696 bp, Cannabis sativa
ccttataaccaatttgattgacaaatatgaatttggggttgatgacctgcaattgcaggcccattttgcatagatacgcaaatgaggatgtgtcattggggtcctggttcataggccttgaagtggagcacgtcgatgacaggtctatgtgttgtgggacacctccaggtatctctactttctattcttctcatttcttacataatttatattcgacttttgtctttgaaaaatataaaaagaaagaaaaaagaaaagaaaaaaagtaatttttatatctgccgtaaatttatgacatttttggaagaaatcaataaataaaatatatcattatcagtggtaacattaacatactaggcgatttgtgataattcgtagtaacaaagtaaataatacgagcaaataaaagagagtagaaggtttttaaaaaaaatagtggggtgataggcatagttttgtggtttcatacttcttctcgtaaaaagaaggttacaacttacaagtttgaatcctctcatcccaaatctaatatcaaaaagaaaaaaaaaagaataaaataaaaaataacaattactaagttgttttaactctcatattccagtacctttgcggaataaaaactcccgtatttcagtaaaggaactggatatagtagctatatcaactcataaataaattatcttaacattttgaatt

SEQ ID NO: 6069 - DNA, 543 bp, Cannabis sativa
atatttataaatataataaaaaataataaaaattgtcaaaataagaaaatagattgaggtgtttaaaaattatcaaaataagagaataaattgaggcatttaaatctattttatcatgttattgtctcatattttagctttatataaatatatagattctaaaattaattatacatttaaaaattactaaataaaaaaggagtaatttcaattttgaatacaaaagataacaaacaaattacaaaaatacggtctgtacgaaattttcaatatttttttacagtttttaaattttatttacataaaatactattttcgtatatatattttcatgtgagattacagaagggataactacataatacactatttttgtatttttttttatatttttacattaaaagattttttttacatttttacagtatcctataaaaaaaatacaaaaacaataaaaaaattacataaaaataagtaacaagaaaataacaagcaaacaacattaaaacacaaacaaaaattaacatataaataatgaaaaac

SEQ ID NO: 6070 - DNA, 1201 bp, Cannabis sativa
ataatataatttattaattaattaatgcatgcttcattctcattaccattccatgtagctaataattaatttgctcatataataaataaatatttatttatattatctccaagacacacactctcatttctcataaatccatttggaaagtatggagactaagtctatatcataaccaaatcaactaatcatataactaccaagtcatcatctccatactacacaaatattttataataataattaaaaaaaatcatatggatgtatactattgtttcctcttagaattaattacaataacaaactaattaattaattaacatgtctttttcatctaacaaggtctttttcgacgtctcacctaattatcaatgggcgtctcttaattattaataacttatgtcaaaatgaaaacttgttagcaaatgaaatgcttatatgttactaaacaagagcttaattatatattgttaactttgaaatatacatacatataaatataatattctttttcatttatatagtgatttaatgataaacttgccaatttcacacgtgtgatttcctcttcataacttttctttcctccactttatctctcatgtgccctagctttcacaaacctcaccccactactactactattaatctatattttaagctataacactatatgatgtcttatgctagaaaatatttgatgtaatactatatgatgtcttatgcagggttgggatggtaattataccttcccgtcccgaatagggcgggagcaggggtcgaatttcgggggcagagtgggtatagatttaaatgttcatactgagtcaggattggggtggaacggcagaatagataccatcccgaacccgtcctgatatgatatatatttaagttttaaaatcatgactagtacaattaaaaaaacttcatgttttaagctttttaatgattatattaatgagacattaatttttatgaaaatacttgcggtaatatatattaataatcacacttaacaacttgttaaaaaatgatacttaaccacttattttacgattactaattttgtatttattaactctatttactcatgcctgaccttgagcataggcaggctaggcttgtgcttagggcccacgtccacctaatctagggcccaaaaaaatttctcttcttaatattatacattttatactga

SEQ ID NO: 6071 - DNA, 797 bp, Cannabis sativa
gaatcatcctattggttcttttcctatcatagtattattaagaaaagagcaaatattatatctatcgaccattctgttttgttaaacgacaatttagatatcgtattctgtaaaaatgaacataataatacctcaaaccgatttttgccaaacatttttatccctaaactctaactattgtgacgtgatttctaatctatcctaaattgatccaaatggtatatagccttaagaaaatatattattagtatgagaattaaagtacttggatcaaaggtaatcatgaaaattccaattatgagagttggggaaatgtattttcaaaggaaagaaaatgtacaagttcccatgcttcaatgtccttttgtgaaccatcatacaagagccttctgcatacaaagataaaatgaaatctcaaaacgaggattattgaaaacataggttaccaaacttgtttctcgagaaaactcagggtaccaaataggtaaattccttattctgaatatgggaatacaaagaagataattaagagaaagaactgattaaaacaaagcatgagaatcatcaaatttatgtactcatggttgtcataaaatcccagaaataattttttctcaatccttttgttgttgttgcttttcaattttcaaggaaaattttagaacccatttacaaagctgaataaattcttttgtataaatacagtcagtgacagattttccattgagttctaaaagagaatttaaaaatggagtcaatcaagtagttctccttaacagaagcaaagttccaaaagg

SEQ ID NO: 6072 - DNA, 1330 bp, Cannabis sativa
cgggtatgcttctgttaatctttgttttattatttaatttctcataattagagctaaatgcaatttatgttttccaacactacttataagttttccaacattacttagtccttgtaccttataagaaaaattatgtagtggttgctatagctttttcttttcttcaatctatttttggtttgtctaaaataaagtttgttctttctctttcttgttaaatgaatttatgccattttaatcttaggagctgttcctttaattatagaaagcatacttattactttatgtcacctttctttgtaatttgtatagaagatatcatgtcacccatcattttttttattttctccaacctccaccgccaccaaagattaatatacttaaattattattattattgttaaaccaaaatgatgaatacagtgtataaatatataatcacattaagagaagtttggaatctctagctatcaaaatcaagggagagtgtccaaagaagggattgttgattttcaattatttatttctttttgttattaaggccacacaacaaagagactaaagccccatatagtgacaaaccacagtttcaagaatcttagcattatcaagccagaaataccaatggggtcttatattgtttactacttttggtgaaaaccagagaagcagtagctatggaccattgcttgttttcctttgcttacatcaccaccttttgtttaattttattaaaaataaaaataaaaaagtacacctcttatcattctcctgaatgatcccacattcacattcaactaattcttgagactaacatctcaactttatcactttaaaataacaaaatttagacagaaaacttttttattttttaaatgaagagtaatcttttttaaattagagcattgctccaaacaacacacaacaaattgaaggaaaaattaccctcgtaaaaatgccgattacataatatcaagattgtctagtgagtaactcgattaacaaatcgtataataaaatataaagatatattattgtgaaacttaaatatgtcgatttcttctaagtagattttaggaataaaacttgtctaaaattgcagaaagaaaatcagtaaacacatggaatttacaagcttcatccgaccctaaaaatgcattctaggcgattagtgcttgagttctcctgatcaggataataacttttcctatgaatcaatcaatctacagtatccagatctgactacaatttctaaatagtaatccaaaaattaattcatacaaagattaccctacaaacttgatcaccaatcaagtttaatcgtctaagt

SEQ ID NO: 6073 - DNA, 1034 bp, Cannabis sativa
  modified_base (545)..(545): a, c, t, g, unknown or other
cagtagcaaaacaaaaccccaaccaacctaagcccaaggaagaccggagaaaaaagacaaccttcgatagctatagatttagaaacgagaaaccctaattttttttagatatatatattttagatttgtatttttttggctaattaaaatttttggcccccaaactttgacatttacaaatcataccccctgaacttttaagctctaaaagcacctaatctctcaaatttctttattggatggattttaaggtgctctggcggcaagaatttatttaatgacctttttacacatttctttcctcgagatttcttcacttttcttcaatactaatcctgtaaaatattaactaacaaaagcgtaaaatttcacaaaacacaaataaaactatttaagaacactttaaaaacctgcctaaaatattactaataaaatcctaacatatattaaaatctagggagcatgatttaatatataaacaatcactgaattagtaaaaatgaataaaattggacaaaagtacttaaatttaacaatctcaatanttcagggagaatttttaatggccagaaaagttcaaagagcacgattcgttacatgtcaaagtttaaggaataaaaatcataattaactatttttctaaataaatttaataacatcaattcaccaaaaaaataattagcaatttatcccatgaactttcgatactacctgtcccctaaaatttacggttgccgaaaaaaatttctcgaacttttatattaacaaaaatttaatcattctgccaacgtatttttttgtaaattagtaaatttatccattaaatagtttagggagaatttttaacagttagaaaaatttaaagagtatatgatttagtatatgtcaaaatttaagaagtaaaaattctaattaattattttataaatgaatttaataacaccaaatcaccaaaaaaaataattaacaatttattccctaaaatttccatactacttatctcttaaaatttatggctagttattttttttttt

SEQ ID NO: 6074 - DNA, 616 bp, Cannabis sativa
aaaaaaaaaaaataagaacataaaatgaaagaaagagtagtgggcatcacttttgtccaaaaattattagcttattttccccacctgatctaagcagtgatcacaaatagaattattatcaagtcttagttcttctagcaattaaatgtgaatttttttcatataaaagtgtgtccaaaatgagcaaccctaattaggcctttatttctatgatgattacttttgaaacttaaactcaaacatgtcatggctgtaggaaactataaaggggtgttaatagaattaataaggttgatttgagggttataaattaatggttagaaaggtcaccccaatgttcaagacaaactgaacatttttgacttggagcatatggtgatgtatcgctacataaccgaccatggttgccctactacgcagcgagacattcttaccttctcgttaccctatgatatgtttctaagagaggaatgaattaaaaatttaaattaattttgaaattttataaaactcaaagatgatttatgtaaatattaagtgtaatgcaatcacaaagataaagacaaatataagcaaataacaactaaaaatataaagagtttaggaatagaaattg

SEQ ID NO: 6075 - DNA, 884 bp, Cannabis sativa
ctttttttttgtttaagttttgctctgcatttcttcttaactagagttctagtcttctgccttccactttcctaatttgctttcttttaatgaaacagtaacagtatgttataacatctggttgtaatcccaatgttgtcacttttagtactcttattaatggattgtgtaagttacatgagaaaatggctagtgggaaagatcatggagatggttttaagtgcagaccaagtctaatttggtgtggagctataattgttgggctgtgtgaggaaggattgataactgttcttggaaatgaaaggtagctctttgattcatggtttgtgcagcacagataaatgggaagaggccaaaggtttgttcaatgagatgacagatcaagtgacttttagtgtgtggtttgatcaaagaagcttatgatatgactgagagaagcttattgtatcctgattaaatcactaacagcactttgttagatgacttatgtaaaattggtaggcttaacttaaggaagcaaagaagctattttgatttgtggactttgcaagaagaaatcaaagattggcatgggaattaggcccaatgtagtaacatacactacctttatagatggtactgttaggtgagatgcaagttcatcatctggtaccggatgcaactacatatgttgttgttttgggtggactgtcactctgctagaacaagcatgtttcagaggcgttggaagtttttcctactcagattgcatgggagctatatcacacatttatccagacagacctggtttctaatgttgtgacatctattgcattcggaaatgtttgctgaattttaaacttgggaggagttcaactgaagaatattcttgtgattgagataat

SEQ ID NO: 6076 - DNA, 1403 bp, Cannabis sativa
taaaaacaaaattataacccaaaaattatgcgatagtctattacaaataagaacaaaattatcaatgcgccagttagatgaatccccaatcaaagctttgatgtacaatttcccaatcgctctcaatgataacaaaattgtgcctccacgcagtttctgtctgaagcgctagcacacaggcctctgcttccccaatgaagggatcaaagtacgtaggcaaaagacttggaagcaatccacaacacagttcctgcgcatggtctcgagccaacgctacggcacattaacccactctccactttcacatcacaattaatcttgagaaagttagtcttataaatcaattttagtttggttaacttgctaaaagttgtaaaaagtgattgttttgtaaaagtttatgtttggagaaataatattcatctcatttaccaaaaaaaaaaacgtcgacttcaccagaggtagcagatgatatcgataaattaatttgactaggaatctggttgtggcacctgaggaggattggggtgaaaatgaagaagaagtggtggagtttggggagaaagtgttgattgggagagtgattgctcgacagagatgaatggacgactataagtattttttttaagaatgtggaagaaggtcgctgactggagcgtgaaaattcttggtgaccatttcttcgtgaaaattctgaccgcaaagatttcaaaatgtggctctcgaaaaaacaaccatggttgtttaacgacgggttattattgctggaaaattgatctaattctggtcaatgagaagatgctcgtcttgatcgttttttatgctgagtgcaaatgagaagtgatgcgtattggggaccaagaaggggatgtttctgagatacattggggctatgctcaacaagttttttttactggacatgtacgacttagaattggatttcctattaaggaaaacatctttgttgaaagatttattatagctgcgagaaaaaagaactagatttagatctaatttgattggttgtccattttatggtacaaatgtggtatatgggggcatgaacagggagattgaagtgagaagcaagaaatggaggtagatgaaggtggttgtttagttctatcgttttaccgtgaagatgatccaactcctaactacttcattgtttatcaacaacaataattagaagacagacaaaagatgaacatacccatagcagggttagatccaaaaaagaaaaatagagataaggtcaaagatcatcaattacgaagagggtcaggactggttgctagaactgaacaagacctctcggcgaggaagttgactagcaaaccgaccaccatcagggaaatcatagaaatagttaaggaaccatttggtgactatccacaatcatg

SEQ ID NO: 6077 - DNA, 999 bp, Cannabis sativa
ctaatttaaatattaaggtagaataagatgagattaggggaagattttttttaggtgattttaacgatgatgtagatgttgttaagatggctatatagattatttgttaacattatttgtatggttaagaaaatgagaaataggtagatagtgagttgtttggatttattgatgggaaattatctgaattgagaaatatagcttttggcaaacttttgtggtatagaatattccattatattaacttggcatttatggatggtgaaacatcttttacaagattgaaaaagtgaaaagataaagtttattcttataaattccaagattatctttttacttttctttatatggttgtattagattctttctagcctaagtaataggactaacaatatttatggtaagtaactatttaaatcatgggtccgtcattctatgtgtatgtttgatgaagtgattgagttgttaaagagcaagggacgtggatccacagtggtcgatgatgtgattaaaaaggttgttgactcttttgatgagaatgttggttattctccggactcatcttcaccgaaggtatatttctattttgttatgattttacttatttagtttataatcgattaaacttttttattattattattattatatttttaggtgtggttattatttagaaaccgaatatttaatggttttttttatttttttttccttgtatctaatttgtaattttttttttttatgattatgtgtcttattaatagttatatgctatgctgtttttgtatcaaatcttattatgtttgttttttgtttaggtcttgcataataatgtagtatttgattttgatgatgcagttgtctgttttgcctgaagagaaagtgatttattatttttgttattagtattatatctagttattttgtagtctagtatttattatgttttttttttgttcaaaaggtttttgctaaagttttcaaagataaacaagaggg

SEQ ID NO: 6078 - DNA, 788 bp, Cannabis sativa
tacctgtgtttgatttcttcttcttctcatctcttttggtttgcttttttagtcttgtacatgtgttgatcttaatttgtctttattcttaactcgttttgtatacggtttgtggagactttgaagtattactgatctttgcaattaaaattgatattagatacataatttgtaaagtaaaattaaaaacattcaagaaaagaaaatgtggcaaaatactgtgcattgaatttgataaaagtaaaggtcaaaattgaccttgaaggttgatttgtgtgtgagttgtataaggttaaaatcagtactaaaattgaccctgaagtgttcgagactacaccctcactatcactcttcctttctcgttctcatcctatcatccttgccctagctttctccctcttattttcttcttctcccaccgcatatatatgtgtgtgcactgaagcattcattacaataatcatactttttaaagtgtggtggaaatgaggtttttaaaagtacaatgaatgttagtatatgacaaagtatgtatgagatttcatctcaaaattaactgacaataagaagaatagtaatctatttatgaatctattaagtagtccattatcaatgtgactctctaacattgtataaaatagattgcttccataggcaacaaaatagtcaccatacatttagttttaaatgattttatttcatgaataaaaaaatcaggattgtatccactcacttaattagtaccttttttaaaattaagttaataatgaacaactaatatctattgg

SEQ ID NO: 6079 - DNA, 949 bp, Cannabis sativa
aagaatttaagaacaaaccagttgatttcaatggcaaaagagtacaggagggaataagttgcttccttagctcttcttcattaatcgacacagctgaggctggtgtagaagaaaggaacccgcttaagacatcagatgaatatgtaggaagactagtagaattacttaaactggagttggtcgaagtatcgaaataacactctgcatcatcaacaatgatatcatacaaagcttctgaacattgttcattctctagactgttttgaactgtggttggcagagcaacattcaccgaaaacatacattcattttcatgattagctttggtcagtccatcaacatatgatgctttagaggattcgttcacatcaggagaagttagctccgattctccatccacagactccttcatgaaatttacatcatcaatatgtattgactttgcatttccgaagtaatctagagaaagatgttccacggacaaataaacatgatcaagctgctgcttctcaacatagtccatttcattattggtttcaatggattcatcaattaaggatgtttcaatagattctgccacactaggaaaattcagctcggaatcatctgtagactcttttatagcattttcgtcaatgacaaagtccgagtttctatttgtcaaagcaagtactaatccagagcctgaattccctacagttttaaatcgatcagaattatcaccactatttctaattaattcatcaagtgatgattcttcgaagtgttcttcattccattttgctaattcagataatgaatcttcatggacatctgtagacttctcatgatcaatttcatcaatcaccactggtgatttttcaacaagaagacctggaaaaaaattctcaatactaatccccgagttattctctgtaaaggtactggtggcagcaccttcttctggaac

SEQ ID NO: 6080 - DNA, 1321 bp, Cannabis sativa
aataaataaataaataaaaaatgtccaacaatgactaccaaggtgatacattgcaagcctcaaaactaacctagtgagcatatactagccagctttttggggggtctcgcttgagaaaaatggcggaatatttgcgggcaaagagacttcaatagaggatttatgggagaaggtaaaattctagatagcaacttggattaataaaacaaaagactttgaggtactttctttcctagatctttgtatattggggaaactttctgtattaattgtgttttagttatggggtttgctcccacaaggtctgaggttcgactccctcctgggtacctactgcctacatagcaattgctagagtttcttggtccccaaatattgcagggttaggcaggaatctttcttttttttttttgaaaagtgaaagggttctcttgtcttagacaggaccctccccgttatgtattaagaatcctcacttatggcggagggaagccttggttacaaaagatcgcctagaacagttagcacacggtggtgctgaagtaaaataagctaagcagaggaggtacttcccctacgacagtgaattccattctctacataaatctaaaaaggacaaatcctcaaaaagtttagttttaaaaacccaagtaaagtagctgtccagaacttaactttctcccacacatcctctcctgaacttccaaccccttcaaaaattctatcattcctttcaaaccacaacccaaattattgctaatgtcgttgttctccatagctttgttttacgtttgctgccaattaatttgctgactatcatttttggtacgaatcttggcataacccatgtcagctgaaattcctttatcaaccttacccataatcgtcgagtaaagctacaatccaagaacagatgcccaatgtcttccccgttgtctttgcagcaaacgcaccaaccaggggagaagtataggtaaggtttcctcttctgcatcttatcatgtgcgttcactttatctaaagacacaagcccaccaaatactttaactttcgatggaacatagcttttccataaagtccttgcccaatacaatccaccaccattcaggattgatgtaaaccaataaaaggctgacttacaagaaaaaaccccatacggatccagtttccacagtcgactatcatccgaaatattcagcactctgacatgttccaccttttgtagcagcgaaagtaggcttggcaataccaaaaacttatagtatgttgagtctgacatgtgcatatagtatacatgctaaataatatgaattataactac

SEQ ID NO: 6081 - DNA, 763 bp, Cannabis sativa
ttttttgagaagatttgatacttattttaatgttccaaggaactctattatataatttattccacaaattacgataataatcatacacgaaaataaattatacatctaaataaataaataaataaattattaattaaaaataagttgatattaatgataaaaaattatatctatattatgtgtccctagaattggttttaactgtaggcggagtaagcttgtgtctaagatctacccatcaacattgagctctccgtacaaaagattaataaaatgtgcataagttatgttcgtatcaatctcgaatgtcaaattttcagctcgattataaactcaatctctaccattaagcttccaaacatcattatacataacaaacacaaaaacaattgaacttgtcatctaaagacattaaaaaaatgcacaattaaagatttagaataaaaaactaatagaaaagtgataaaaaatcctaaaaagccataaatcggtcaaacatcggagaccattgggcccatatcagaccacatctgatcaatatttcaacaaataataatcggaccccatcagatataacatcggacctaaccacttaaatcacattctaattgggtatcagaccgaccattggtcttatatcgaacctatatcggacacatcttcaaatctatttagacgtcattcctaacctcgaatttgcacttgccatcgagccacaccatcataaccctatcaacaccatcgaactaaacgaaaaaaaaaa

SEQ ID NO: 6082 - DNA, 500 bp, Cannabis sativa
ataaatctagtaagagtaattatactataggtataaattgactcaaaaaaaaaaataatataagtataaatattttttaatgataaattagcccccacaaagtaaaaattctgggcccgtcactacatgtcaatctcatccattgtatactctgtcttacaaacatactgcataagtataaatcaatttcaaactttatgttattttctcaataattcaagattgattaaatttgaaacaatatgttaattacttaagtgtttcgaaagatttttttttattattattttttgtcatagttaaatctctcattaatgctgattaaggttcaaatttgtatattttaaacctttaattatgtatataaaataaatttaaattaaatatttcataattttaattgtaaagttattttagttagaaatattcaattttctttgattgatgttgtgttatatttaaggtttgtgggaaaaaaaattggtaaatgattaaaaaga

SEQ ID NO: 6083 - DNA, 822 bp, Cannabis sativa
tgtgcctacatttgcatttttctgaaataatcgttggtgttgtttcgattatttccgcttgaattcgtgttttcaatctaacatttttttcattttcacaggaagtttttcaaaagaagatcaagatcagaatcaacaatacgagttcaattgtaagtgaaagtcagtgactgatattggtgccaggtactgatctaattttatttgataaaaaatatcttcacctttgattgatcaatggcagctataatgtgcctcctccaggggcacctataatggagaggtgtggtagccccaccgagacctcgacaccgtaatcttcagccatggcgctctccatgaactcggcctgcacctccatagtgacgaagtgcttctcgaattggtccatggtctcggacatcttttgtaggttcccagtagccaaagtagattcgagagacttgacgatcgatcccatggacttgttaatagtggtcatcttggcttgggtgtctaggcgagccatgacggcgtcgaggcgcgaagccatgtttacgaatggcatatttggcgtatatatattcgagcgccgtcgatgttgcctttttccatggccttcttgatcttgagcttctccgacttctcttctttctcgcattttccggccagaaattctactccatgatctgattaagcagcttctcggtgttccccatggcgatcacttcggatgatttcaaattgggattctatggtttttgggcagaatgaaattgtagatcctttttttttttttttaaataattgtataacaattttttagctttttatttggatatt

SEQ ID NO: 6084 - DNA, 1295 bp, Cannabis sativa
ggaaattttagagctcttggagcatcaatatgatgtggaaaacctccccgctattctagcgaatttttaagctaacgtagaaagggcttttctcgcttgcttagtaaagtcaagctttggcttcgttccacttccttaacggacctacggactagctatggtttacttaaatagttgttctttcttttccactagtagtcacttaccagtaggtccgaagcaccagcaccatctcgcctagtatcctttggtgtcacagcttcccttcaagttacgattcttggaggttccatagtcgttacccctctctattactatgttcgagtactccatgtatatgaggagctagcactagtaggaatattttcgcatcggaatcagtctcccaatattagtatccatcctccgatcccgcatcgtcaaaatcaagttaatatcaatgcatctattataaaaaagaattgctaaaaggcactactaatgtctagcaccttctttcgtgttataaccctattggtgtaattaagtagtaggtgctctaaaacttaaaaaaataacttttagattatattgcttaactaatcttatgctaccatttataaaaagtattggtactggtggccaataataatgctcattttaatattttaatatgagtatattgtactagcaaagcaccaaatattttatataaaataaaaaaactcccatttttctatttcgctcagggtgtataaacacaaaattcagtaagtcacttgcattgactcggtgagttcagggagggaactgtaagttcatcacttcttcagtcggtgctgtcctcgatctccgttgattgctccgatggcttttccagtggttgacgccggctacctcaaggagattgacaaggctcgtcgtgatctccgtgcccttatttccgccagaagctgcgccccagttatgctccgcttagcgtaactctctcttgttgtttgtttcccgtaaaaaaaaaaatcccaagaaggaaatgaagttttgtgtaatcacaagtataagatagaaaattaatttttgtttttaactatttttaacgaaatttatttggaatttgcaggtggcatgatgctggcacttacgatgcgaaaacgaaaaccggtgggccaaatggttcgattaggactgaagaagagtataatcacggttccaataatggattgaagaaagctattgatttttgtggtatgccttcaacaatagctattagcaatactcaacattaaattaaccaactttgatctcaaaaagttatt

SEQ ID NO: 6085 - DNA, 607 bp, Cannabis sativa
cttgctcatttatattatttgtcatagctgaacttttcacacacacaatctttagccttggattgatgtccctataaacattttcaaagagactgtcttatgttagagatggactttgaaagaaactcaagaccaaaatgacattatcttagactaagttgaaaaatctagattctgttagagcagtttgttatgacatctcaggcaacttcgatagagaaggaatgaaaaacaactattgtcctagctagtttcatttcgaccatgttcgaaacttgaaccttagaagggaaagggaaaggaaaataagtttggaattgatttcatatttttgtgcttcaaaatatgattaataattatgaacaaccttagaatatatacttttcattttttttttcagtactatgattcttggtttcaatggaaattaaaaacatctattccaaagaatctaaactaatagaaaagaataaaaataaaagagaaaaaactatttgagattggaaaagagaataagttcaataacaataatgaaagtatgtggatttctgtgtctactaatttcagaaagttgactaaaaattaaactcaatagtcagatcccaat

SEQ ID NO: 6086 - DNA, 686 bp, Cannabis sativa
ctaccattcccgaaccatactcaagctgcaacctgcctcttcctatactcctcttttaatttacaatgagtaataacaaattaatgaataataccatctttaatagaactcaaatatgtatgtatatataaactaaaaaaaaatatttctcatacttgggaactaactctttgagattttcccaccttgacgagcaacattccctacatgtaaatgaaggacctctgtaccaaatcattatcccattaccacaaatctgaaatattaaacgtaatttattcatcatatcgtataccaaacccaagacaaaatttactcatttatttatatgtgtctaataaattatttcagagtaataaagttaaaaaatactaataaggtggacaatgaggcatctattagaaacatcaatgtcaacatgttagttaaagaagatagtgtcaccgtggacaatgagggcacatccaaaaccattaaagcatctaagatatattccaagttaaactttagtttttgctccaaacttttaaatcattattcagcaaaatttacaaagaaagaattatagtactttacaaggaataacaggacaaatatagggaaaaaatgaaaacgtaatgcacccaccttgcgaaggggaaccaaagcccagatttttctttcttctatataattagtttcctgtg

SEQ ID NO: 6087 - DNA, 867 bp, Cannabis sativa
ctttctcaccttgtctaactaaaaatttcatattacttagatactaattgagcagatgttatttcgttctgttttggcatttagttccattccagaggatggaagaagaaaaatctatgcagaaagcatggcaaaggcaaaagcagaagaagaggccataatagcagctgagaaagctcgggaagctgctgtggccgcgaagcaacttgaggatgaggtaaaaaagctgtcgaagaaaggacaggctgcgagtttaggtgaagatggtgaagagaaagcagaagctgctggaacttcattggataacctatttagcaaagcaaaagatgtgagttctggattgtcctgggacaaactcagctcacagcttgcagcaaccgttcaaaaggcacaagagacaccaaaagtgcagattgcaacagtgaggggacaggccaaggctcggaatctgccatcccttaaagcccttgtcaaacagaacagtcctgcttcaaaaccaaaggtggagccaaagtcaagtcccaaagggaagcagaaagaaacaaagtcaccggaagtgaggaaggtatttggtggcctgtttaagcaagaaaccatatacgttgatgatgactgaagagccttagttactactgatatatatattattggtataattttaagtagttcggcgaagatgggttgtattttgtataattgtactagtccaagtcttttttttctttcttacttttgtgaaaaaaataagcaccaattgatttctatattataattgtaacttgatgttgaagtcttaacaattttattagtatcatgtttggatttatttattgcaatatttaaaagagaaactataataaataacct

SEQ ID NO: 6088 - DNA, 586 bp, Cannabis sativa
gttgatgagaatggaaatgttattgatgagttccctgatgtggttaatcacttcatggaacactttcgtgggtacatgggcaccaaaagtctcacccatttgaagttgaacaaggagtgtattggtcagggacatcatccaaacttcgagcagcaagtagatcttcttaaaccgtttatgaggaaagaaatcaagaaagcatttttgagtatcccgaaaacaaagttgcctgggcccgatgggtatggtgctggtttttttagacttgcttggaaagacattggagcagaaatttgcgacgctatttctggttatttcatatcgggtaatatgcctcgtgaattccttgatgttgcactttctttaattcctaagaatgaccaccctaatacaattattgattttaggccgattgcctgttgtactacaatttataaatgcatatctaagctcatgtgttctaggctttcgaatgtcctgccttttttggttaatcaaaaccaaggggccgttgttaaagggagatcgatagctcataacgtcatgattttacaagatcctctgaaaaactataagaggaaattga

SEQ ID NO: 6089 - DNA, 606 bp, Cannabis sativa
acctcataggtattgtttttcaaaggccgaagttctattgcgttaacaaaaggtgtccctgttccagtattgacgagacaaacacgaacataattctgtaatgggacatggatgatctcccttatagaaggtgtagatataccctctactttcaccgtatcccaaaaattagcacccaagtggatatcaaatttaggggtattatttttggcgtcataattcccgtacagaaaagataaccttatcaaatacttggtacccttttttatgtttatagtgtaacagtttcttattccatcaggaaagcttctgagtcttactgcatgttgttgaagattcagtctgtaaagtggcagtatgctgttactcactccactactgttgatgaaaggttcgtctgagatgtaatttatgcctgttgttggttcggcgaagctggtgtttttgggtgatccacagtctaagctgatgaagcctgatcgatattatatgcataagagtcttaattaattaatattattattattattattttataagttaatgagtacaatggaaaattaactataattaattacctgattgatcctgggcatgagcgacgac

SEQ ID NO: 6090 - DNA, 635 bp, Cannabis sativa
cagtcgagtgtctctacactcttacaatttctctagttacccttacttattttttctcataatttttaactttttctttaattattctcatgaagtaactcttctaaaaaaaattatcttttgcacaaaaatataaaaacttagattttttaattttctcctttttccaattttattataagttttcttgggctagttgtattgagggtcgcctctatataagatctataagtgtaatataaagggaaacttacaaatatattagaatttggggtaatttttacaaaaatactcacacggaaatctttttaaaaataccagtaaaacacaacacagagcaactcaaaacaacagtagaataactaaaaaacaccagtagaataatagtaaaaacttaacacagtatattgcagtataaaacttatcaaaaagcacaataaaaaagtaaaaaataccgtctaaataatatttttgtaaaaaattaacaaaagttaatatactatgtaaatttcctaatataaacctcacaaaactcatttaattttgagttcaacatgagaggtagcataataagtggtgtagttaagccataaattcatgattaatcaagacagcggcaatatttgacttctatt

SEQ ID NO: 6091 - DNA, 943 bp, Cannabis sativa
aagtggctattcgattacaattccaaacgagctagcatgcataactctagggtttataaattataattgaaaatgctaagtgccatctcaccgcaccacgtggtatacatactgttattattagtgtatgttaatattcagttctatatattttaacttaataaatattttagataaccaccgataactcttaattgtgtctttaataaatattcagttctattgtctttctctttctttatttgtgacttttagtattttattctatattgagtcatttagagtgttgatagtgagaagttggtaacttttgaatgatttttgataaagaaaaggctctatgtggtgcataatttttgtgcaccaaaagtagttgtggatgattgctcaatccacttggaacaaagctttgaagagtaggagaaatggaaatataacgtagtctccatcattccatatttgtgcctggctgccttttagagagaaaaacacagcagcaaataggaattaatgaagaaaaggaataggagaaaagaagtacaaaagagaaggaaaaggaggattcatctctagatagttatttctcatcttttatttatgtattatttccttttttacttcttatttttagagtatttttgtgtttttgagtatgaagtaattttgttgtagttagaaacttttaatgaactttaaattgtaaattttattgatgttttatgaaagtttttagccagggaagttttgttcattcaaaaatgcttaattttatatcaatcaacttttacatgatcactaattgaggttagttaattttgattttagaaaaaaaaaatgtgaaaatacttgaacgatatatacatataattatcacattaaaaaagtgtgatttgtagatagtatatgaatatattatttacatgtatgaccaattggaaattgg

SEQ ID NO: 6092 - DNA, 1002 bp, Cannabis sativa
gttgacctcttctacatcctctagcagctttatcactctctatatcccaaccctaggatctaattcatcttcatactcttcttggatggctttagcttccgcttgaacggccttttcgtgagtaaaatctatttctccccgcaccatgaacacggatcagacacaaacattgtaacaactacttgcactcctttggtcacctctgaccactccaatgctttcgttgttgcaaggaaacttcatgcacaaatgcctggtggatgtgattgccccaaaattaactaagataggtcgtccgagtatagcgttgtaggctgtgggacaatccacaaccataaaagtccagtgcttgaaggcataaatgttgttctcccctattaatgtgactagaagctagatcttccccatcaactcgattacctagaatgagaatttgaacaagatgttaatagaattcccattgtccatgatgagcactcatgatactctgttgttggaaatctgagcctcaatgactaaaaggttattatggggaaatatacatgtctaacgccttccttcgtgaaagtaattggatagtttgtcatcttttgacgttgtgctcgcgactacactagagcgcacatctccccttcaccttctaaatccttcaaatatttactataggaattgcgggtccttcctacaatatgtggtcccccgaagatggtgaccatagataggcagtagagccaaacctagtagataggggctctctggtctcggagccaaaattgggagtgtaacgtgagctaggagagcaagcaaggatagaagctgtgttctagaagcttgagggtgacctactccttgcggaggatttataatcccatactatcataggacacgcaactgtgttgtgaatgaccccttgttcaggataaataactgggatttagatccattggcctaggtgtccggctttgactagagattcaatttcaagtagtcacactcattggt

SEQ ID NO: 6093 - DNA, 602 bp, Cannabis sativa
ttgagttcattttatggctcaaatcttagaagccaggaccctttttccctgctagaggtactagtgatcagaatataatcctgtatgctaagcatgattgtccttgtgtgatcggtctcatgcttgagaaaacctgcagcagacaaaaatgttaacataatatgcatcgactgttcatattatttctcttgggcatttttttgtttttcatttattttttggtctccttgtttgtagtttacttgtaagaagatgctatttcagatttattgttattttcttgacgtagataactctctctctctctaatgctactgcttatttaagctggttatatagttactatcattgctgttgaagatgcaaaagtttttggggtatgtttttcgagtgaagaaaatatcacattggaaatgtgctttttgtcatttttcgttgtgttcattttatggatttacgcaactgttgctgcctttgtatcagaatttcataacatcaatatagaagtatagagcaattcactcagatttccaaagaaaattccccatcctaatcgctatttagttaccgactttattgttttagatttctttttttttttt

SEQ ID NO: 6094 - DNA, 1967 bp, Cannabis sativa
ccacttatgaactttaagatctattggcaaaaccatatttatgacaagtggaatgtgtactaaaatagttacatgatgaaaccaatacttatcaacggtgcccattaatagtgcagcagctaacatgtatattttgatatgattttaaatattatattctacttgccaaatatgtaatttggaacaacacacaattcagtcctggaaataaagatgttccatacttctgcattattatggcttatatatacattgcaggaatcattcattactcataacagttaaagattgcatacattatatgctggcaatcgtgttcctcgtgcaattgctgctgtgtaagggaaacatcaaaaccctgtgctgggagactgaaaagctcacgaagatcctgcaaagatttattccaagacttaactcattttaataatagaatttaaaaaccaaggatattacttcaatataacaatcttcatcaaaattacctgttggctaaagtatctggtttgttctttttgctccgttgcagttctaaacaaacctcccttgtatatctagcatggattatgagaagttaataataccaatacaattatacctggcactcaaattctaccaccgaagagcactcttaaaatatcatttattctatcctttaaaatatatcaccaaaatccactatttctattttacattattttaagaattaacctaacatcatcttgtttattttttcgcatctttttcaaaaagagaaagaggtcatttgtcttagactgaacccccaatatacatatattaagaacctcacttatggcagatgaataccttggtaaaacaaaaattagtataataaaagaaatataagctcagccatcataacaaaaaaaatcaccaaatccattccctactcaagtctagaaaggaaaaattctcaaaatgcttagttcttctaaatagtcttttaaatattatattttttcgtatcttttaaatattatagttcttaatattttttattcattgcagaaagagaaactaattgggatgaatagtgttctataattttattttatttttgctgaaagtgttctataaatgtaacggatgtactgtaagtaaaatttaaaaattctgtttacaaaatctaatggagggttcttttatcatcaattttttgtattttaaggaactaatttagaatatccattgtaagttttctaagtagaccaattaacagtaattaaatttttaacctgctttctgtaaatcttttcttccactgtcccacatgtcattagtcgatatacaatgacatccttcgtttgaccgattctataagcacgatcaacactttggttatccgtactgcaatgttaaacccaacagttaacatttgtaatcagataacacaagtattattgtgttacatagtaaagtaatagggaacattttgtagggaacccgtgaaccaaaaattgcagcgagtactaaaacccaaaaatgtaaccaaacagagcacaaagttaatcacaacaacagatacatagttccaaagcatctatatcctccaaaaaatttgatcttgcaaatccctttttttaggagagaaaataagataacaatatttcaagaagcaccttggattccatgcaggatcaacaacaatcacacgatctgctcttgtaagtgtaaggcccaaaccaccaacttgagatgttaggagaaatatgggcgccccaaccccattttggaaatcctaacgatgaaataaaatgacattcttagatagtttaacaaaacattcatcatcactggtatatcaattgtacttacatttacaatcgtcagtctgtcacttgcttttgtggtaccatcaattcgtaagaactcataactgttggacattagtgcttcctgcaaataattatattgttacacatcatacaaaaaaatccaatggcatg

SEQ ID NO: 6095 - DNA, 1172 bp, Cannabis sativa
atttctgataccaaacctcatagaattgtaattatttacacaactagttttagttttcaacctaggactgtaatgatggtgtctttttgtcatcatacatacataccaatgatctttatagttatagcaatatcgtaatgtcttttcattatcatgtcccatctggttcatttatcttgtatgggattagccaacataatacccttaaaatttttgatgttcgagctggagatacttgtgttctttgagatattaataattcattactaaagttggataattctttctcacttggttggatagaaggtggaagaatagctatcttgactacctttgagcttggacagtgagactttaatggtaactaactcgttaaaatcaacaaatggcagacaatgtaaaaaaaattgcaagcaatgagtactctaaatggaaagaacgacacttacacgccaaatattataaggtttgacttttttatcatatgtttaattttttttaactattaatagagtgatttaagaattatataactttaatcaggtcaatattgtttttgatgaatcaaaaatttgtattgctcaaaacaaatgtatacatcctattagcacccatttaagggcctaaaataatcaactatacaatctatacaattattctcgttaacttctattcctctttttccttctttttaattttccttgacctgctacagagtataaaaccatactttatcctctccaacattcttaggccaacatagatcaactctttgaattacaccattctttgactcctttagcatcatgtctggttcctggagaatgccttcccatatcctgatgtttctatatcaccataagttatagacaagactagctaatgcagtagctaagacctgcttcctgaattttctcacctttgatcttcctattcaatgaattattttaggcagagatatggttgctgctttccactatagacagtgcacagcaacagggcactccaagaacagatgagaagatgtttcattctgctggttgcacaacagaaattgctcttcaactgcaatccccatccttttaagcctatccttagttttcagcttctattgtatagccagccatatcacaaagctatgctttggtgtgttgagtctcctcacacttgtt

SEQ ID NO: 6096 - DNA, 1241 bp, Cannabis sativa
tttttttctaactatatgtaaattaattaggttgatctcaatttttttgttagcttgcctgactttcgactttcccttcccttgtagttgtggaaaatgaatcaaattaaaatcaagtttcatttattttcttctttctttagctattttttataagattttcgcaaaacattattatttttctctgattgtgaagtttaaaattaatttttgtttatttctgatttggtactgattttattgttgttagtgttattttgatttggtattttattttatctttaattatatcaactttttctcacaataggggataaaggtatttcctttggtatactacaaacttgacgtcactttgatcgcttccctttgttattgtgaacttgtatgtaaactttgttagcatataatctaagtcaagtcactctaaatcaagtctaagcattattctcctctaattacttgccgattaattgattaattaattaattaaatctcacttctagcctagtgggagattaaattaatctttttactaattatattattataaacttaggtaaaaagcatatatatagggtcagtttgacacagttgtgctgtgaaaaaagcagctgtagctgtgctgtgaaaaaagcagctgtagctgtgctgtgagaaaaaacagcagtagctgtgctgtgagaaaaagctactgagtgtttggtaaatataattttaaaacagctgtgagttgaaaaagttatatataagtgtttggtaagctaaataattaaatagttgttaaatatataattattaaaataggtatgacatttgttatctaatttatttaaataaatttatacatattaatatatttataaatattatttattatattaaatgagaaattttaaaattagataagggcaattgggtcaagtaaaaaattcattaaaccaaaattatagcttcccttaaaagctaaaatcccaaagctagggtggatcaacttttcctaaaagctataaattttacttaaatgtttgaaaaaactatttttttaaattttaccgaatacatattaactcataactttttctaaaaatgattttagctttttaaaaagctctcccaaacggggccatattaaatttgaatatctgcaacaaaaacaaccaactggattatataataaaacaaatcccattcattttgcaatttattcacattttttatgtatatataggcatacattt

SEQ ID NO: 6097 - DNA, 1432 bp, Cannabis sativa
gggtcttcctcctgcacatgaatcctttttctttgatttttctcatacggtaggtacttcacaatctcatactaaacatgtcatgtctagttcttctgatatgtttaattctgatgtgtctaatgttgtctctctacatactagatcagggagacaagttttaaaaaccctcatacctgaatgaatatcactgttatatagccaccaatgaaacttctatttcttctcgggcttcttttgctactactcaccctttatctcaagttcttgggcagcacaaattgtctcctaccttcagagctactatacttgctatttcaagtcattttgaaccataattttttagttaagcccaacacatccttgaatgggacaatgcaatggacacaaaaataaaggctcttaagaagaatcataccttgattattgtctccctacctacagatcaacatgtcattggttcaaaatgggtctacaagatcaaattcaatgctaatgggagtgtagagaggtttaaggctaggttggttgccaagggttataaccaacagtaagggattgattacatagatacttttgtcccagtaactaaattggttactaataagttagttttatctcttgtagtaatcaaaggttggcatctacactagttggatgtcaacaattcctttctacatggtgatctccttgaagatgtgtatatgtctctacctcaagggtatagacctaagggggagtttccaccaaatgcagttcgtaaattgcaaaaatcattctatggcttgaagaaaaattcaaggcaatagtttggcaagttttcaagtgctttaactgaggaaggattttatcattcagccacatacccttctttattcatcaaacattctaatggaagtttcatctttcggttggtgtagatgatgtaatcctagctagtaacaacttggatgagcttgaagctttaaaggtcaaattgcatgcttgattttagttgaaagatttaggaaaattgaaatatttcctaggccttgaaatccccagatcaaataaatggatttttgtttctcaaagaccataggatctctaattgttggaagaccttggttatccaggatgtaaacctacgaatgcaccaatggaagctaatctcaagcgtggacaagatgagaaagagaagcttgctaatccaacattgtacagagggattgttggaaaacttttgtacttgacaattacaagagcaaacatctcctactcagttaacaaactgagctagttcttgtttacacctagagttactcacctacatgcagctcaaagggtcctgtagtatgtcaaaggcaatccttgacaggggattttctttgctaaaaattcagaaataaggttagatgcttacactgactcaaactggtctgcttgtccagat

SEQ ID NO: 6098 - DNA, 903 bp, Cannabis sativa
taaaactctcacaaaattttacttatctcgatttttagtagtaattggatccaccatcagaggagtgccaaattgactaacaatcttgaaaagagaacgctctccctaatatttcagctctagactagttaatataatccatgttgggaccttacatacattatccttcttaaaatcagtcttagaatcccctagcttgagaagaactagtttcttatcaaagaaaatattgccaccctcaatcatagcatctcgatcttcaattgattcaaatcgtatgataaagataacatgagatagaatacccaccttatcgactcctccagacttccaaatccttctggcgaatcccttgagcataaagaaaggtagattcttccctaaaacatagtagacaagagaggaactccaaaaatgaatctcctcttcaatatcctctaactctatcttaatccccttcttagcctcaaaaatcttaattagcaaattttacacttaaaatttgaacaatagatcctgatctaagaataggagtacttgagcacttaccttctcggatatccttcgaacatagctaatatatttatagaaaatatgagaagtcttgcctaatatcatctttcctttgtaaaatctccattttcctctttggtgagtaaaatctaaggttccttctccatcagcgatgccttcagggaaagaaaatcatatttctcttccaacaactcttgttcttcctagaactcaatgacctccactcctagcacttcaatcattaatttcattttttagcctgatttgatgaggaaggaccacatttcttcttcttcttcacaactaatcaaaattttcttcgccataaagccagcttaatatttcattttactttggaattttatatat

SEQ ID NO: 6099 - DNA, 540 bp, Cannabis sativa
taggagcaaccttgcaaacctgtggtaaaatagaacataaataagctaaccaattaagaaacaaactacataaatcgcaatcccatgactatcgaaaatcagatgaaaaggatatataaagaaaaaaaaaagtataaagaggcaaccgagcacaattctttgaagtacagtcaaagcgttacgaacatattatttacaaggttgaatatgtgcatcaaaacatccgaactcaatgtcaacactacttaacatctctcaaacaaaatatcatgcatgatttattaacatcaaaagtaaagcctaaaatctgtaattagaaaaagcatggacagacaccttaacaccttaaaagatgaatttccttaattgcatggaaccgatacctcgtttgatagccaaaataaccatgaaatatttttcacaaccacaataaatgttttcattttatttttaaaaataagaagtaataaatgttattatgcaaagaacacaagcacaatatattgtccaacacaattagttcttttaggacactatttg

SEQ ID NO: 6100 - DNA, 833 bp, Cannabis sativa
tctctttcctttctttttctttcagcattaattatcatagtaataaaacacaaatttaacaaacataataataattagttgatttagtcactctaattcttatgatgccataatgaaaatataacaacacaaatccagtccaagctaataatcataagttttaattaagataagttcaatacatgcaaatatcatataagttataaagtaaattactcttaagtttaataaaatgatatgtgatatttaaaatttaggattttttttatgtaatctagtatatattagcttagaataaaattaattaatatattttttaaaattaaataaataaatatataaaattaataaatatattttaagaatatataaatataattgaatgataatttgatcggttcggttatttattggatcagatgtcctatctaataaccgatccgatctaattacatttttaaatttacatccaatccgatctaattataattagataatcaattctgatcgataataattaaatttaatgactttctgcacacctcaatttgaagggagattctctccctctccatctcttctccttcttattctttaatcaatctcttttatccatctttctctcctatctaccaaatattgtgtaaatatttttatgttgaatgtacgtaaactattaaatttactaagtttgtaaccctcaataacaaaaattatatgtattcgaaaattcaagttcataactctgagtagcaaaattattaccatttttttaatggaaagagacaaaattaatgtcttacataaaccatatgtcttgtaaaagcaacttt

SEQ ID NO: 6101 - DNA, 1203 bp, Cannabis sativa
gactctctctccattgccttgaaaactgagtgacattttgttttatagcagagacccaatactgagtgactattagtgtgtgataaattttctgtctagtaactagtgttttaaaataatgaaattctcccggataaatcaaaagatgattaacataacaattataatgacaaagaaatcctttatttaacatttatatccactatatgaagtttaaagttgaaatgaatctaattataaaagaggattgaatttttttatttaggttagcttgttgttttgttaccgttaacttgtaaatatcaggtttaaatttagtgttgagaactagattttgaaagagtatgttcgtgctttttagctgaaatcttgactgaactttacaatctgagtctagttgtaaactggactttgatgagaggattttgtaatttgaaaactatactttaatttggttgaatggttccatgtttctcctatgcattaacccccctttctctgtcttgttgaaccactgaatgtgcttgttacataacttatgattgctgaagttgttacacaattgttttatcacccctttacgaaacttgttcgagggggcaaaagcaaatggctaattgagtttttgtgatcaaaatggcagatttaagatatttgaggtagatggtgatttgctctgtggagatattaagggttagagagttgggtttgaatctgcaattgctgtacagtggaaatgttgtcaaggccgtaaagctagctatctatgtctatgtgctgctggaatgtgtagtgtgtttaatctgttgtttctcagagtggccttgcctttgccggggaatagtagagtagtgctctcttcatcattttcaactggtggctccatttcttttgtcacagatttgtataatatttggtagaaaagaatgtggtgataattagatacagtttgcatagcacgtgtacattgctaactactgctgctgctcatctttaagttttacgtgacttgtcttttggcattatgctctcttagcagattcaggattctttggtgttatttaggagatagtctgtaattcaagttaaattaagtcataatttcttatcaaatcaatttatccttgcatctttcactgtttcatctcaccaattaatgcaatttttctatgtataaagtggtcctcagtatttatggtgtgt

SEQ ID NO: 6102 - DNA, 994 bp, Cannabis sativa
ttttctcatatgaaagtttatcctttttattaaataatcttttcagggtgagtgaagaagtttacctggagttgacctcaattttattgttgcattagagaaaatttgtagagttggctatgtgaaaaataagagaaatttgataatatgtacaaatatattcattgttaaatttatgacttttttttgtcaaaaaaaaaattatgggatttaaaagagaagttgttgttgatatgttaaattaataatgtgatattgaatttatttttgattggaattgtttggttttaatgtttttgaactgaagctaaaaacaattagcgtcaatgcactaattttttgtttcagttatgacctgaagcaaaaatcttttttcttttgcttcagttcataactgaagcaaacaacgaattagcgtcggttcatagccaaagtaaaaaaattagtatttgcgtctatgttatagcgttggttacacaaatcgaagcaatactttatatgtcacttaataaccgaagcaaaaaactctctttgtagtagtgggtgctagatcttcatcacgttgtccctagactcagaataacgacgacaatagaattacctgtctttaggaccatagatattttataattaatttttgaacttgactcttgtttctcgaacttattttaatattttactttaccatttttatttagttactaactttacatctcgaacatatttttatagtaattcgatcgggattctatttaatgatatatgtgaatactattttttttatttgattatatttctttcaaatataatttagtattcaaaattaattataatactattataaattattaaaatataataaattatcaaatttaaaaaaataacaaagcaagcttttgcctcagcaaaacttacccaaaccatcaataaaatatgtcaggtaagtttttttttggtgcataaatgcaccggtataactatttcctaccatatt

SEQ ID NO: 6103 - DNA, 1858 bp, Cannabis sativa
tataattttttattttaatttttaaatcgtaatatttaatatataatttatttttatacatactttttaagaatatgataatgaacatttttataaaaaaaactattaaaaatatatatttattaaataaaatttatgaaaataaaatacatttatacgtttttggggtacaaataaattttttctattaataattgctacacaagtatctagtattattaaacaatagtttgaattccattttgaatttattaaagaagatttagaagtaatttatactatttttatttttttttcaaactcaataatttagaatatgagtcttatatgctatttataatactaacagagttcgtactaacaaaactaaacaaaaattacacttttactaacatgagatatctatattgttaaaaaaaaaaatcattaagtttagttgattgcaaattcaaaacttttggtaattgttttgaaattcaaggattttcaatttgactttatatgcataatgtaagttaaaattaataaccaaaacttaaactacccaatgttagtggaataggccaatttttatgtatactccaaaatactttccacatttcaaaacttgctaatatttttctatttccctttcattggttatcactgaaatactcaccaaaacccccactatagaatccaagaccgcaaccatcgccaccatccgaccgagaccacaccaatccaaccgatcgagaggactccatctcaatccgaccgaagacaaaaacaaaaaagaaataagctaaaaataaaaagtcaaagagttgactcaagttggtattattaagactacaaaatttcatagccaaattttagttaaatatatccaaaaccatcccttaattgaaagggataaaaatctctaatagaacaagttacatcatactatgatctaacaactagagtaaaattatttgaatatgagggcatctcttccaggcccaacaccaatataatgaactggaatgcccacaagttcttctattctctccacatattcacaagcagcctttggcagatcagaatagtttcttacagaagatatatcggtgttccatccaggcattacttcatactccacctatataaacatatatacaagattcataagcatgatatgagcaagagtaggatcaatcacgatcgcgaacggtgacaagacatattattaccttcaattgctcgaggagacgaaggtcggatgggaacgatttgattggtgtgccatcagctagcttgtatgtgacccccaattgaatttcgggaagatcggataacacatcaagtttggtgagattgagtgaggaaaaaccattaatttgacaacaatacttgagagcaactatgtcaagccaaccacaacggcgtggacgccctgttgttgtgccaaactcttgcccggcaaacctaagaaggtcgcccccttgacccaagatttcggttgggaatggaccagagccaactctagtagtgtaggcttttacctgcagcagtatcaaagttttaaattaatctaatgtgttatatgtctttatcactcttaaaattcatctttggctaaacattcaactagaaaatgatgaattttttgaattccttttctctgaatttgaaagtaattacttcataagtttccatagcttctaccaatttcgtcatatttccttttaactcttgaattcattagatagtggttgtgtttctttttattggaacctcaaatttgattcaataagaaaagattatattctatctgtatccaaaccacgtatatatataagataatattattaacttaccactccaataagatcac

SEQ ID NO: 6104 - DNA, 800 bp, Cannabis sativa
attttcaaaatgtgattattttttacttattttgtaaacatcatccatctaatttaatattcttaaaactttatgtatttttaattaacttttacaaattaaacatataactaagtatacgtgcattgcacgtaacttctacctagtaatctaaaacacgcaattaaaaaaatattggcaaattattcaaagattgaataataatctctgacaaaaaaaaagattaaataatattctacaaaaaaattaatgattatattttctattttggatcattaaattctaatattttctatttccattttttatttggtcttgtttttacttttttttttaaaaaaaaaaaaaaaatacatcataactagacttcttattttgtcaaattataaaataaatcaagtaatctaacttaaccaaaatttattcaaaaaaaattgacagaagaatttcgaatataataaaacggtcttattttgatgagttcattaatgaaacaaaaattaaaatcctaactaatacataaataaatctttataattatgtattgatagaaaataaataattttattgaaaataatttgaaacaaattaaaaaaaaaaaaaatttcttaccatgcaattttattataattaaaacctaaaaatttcttctccttctaataagctatacctttattttgcagaaaatggaaatttaaagacaaaaataaataaataatttattcattatttcgttgctaatataattatttaaattaattataatgtaaaattaaagagcgtctgcccaatattgtgct

SEQ ID NO: 6105 - DNA, 763 bp, Cannabis sativa
taataattcttcaaagttattacaatatttatttaatttgtaactcatatatgtatattatgtatttactcacaaaaaaatcactcatttatatattgaaaaatattaattattttaaattctgtatttttataaaaattactaattgaactatttattttaataaataagaaatttaacactttattttttttaatatattactaaatagtattttaaactgattttctgtcaaaataaataaacttaatataataacttgatctagaagtattatgacaaaactatttaagtttacaacatctgttcgtattgggaattatcttcaagttagttatattaaaaacaattataaaaaattgagttcagagtcctatttatattattttaaaaaatacaaagttaattttattatttaacaaaatggaagatacaattgataacttttgtaaaatacaaagtccaaaataatattagctctataaatatttacattttttattaattaaataggttttaattaaaacttaatttcaaagttgttcttaattaaatatattttatgtatacttcattcatgtattttatgccaactatctcaaattgattttagttatatatattaagattaagcaaaaatcatgaattgctcttttttaaaaaaaaaaatacatatttatatatttgatattaatgaattttttgtgtaacattttagtgtctcaattgttgctacataacaaaaagtaaataaataatcaaa

SEQ ID NO: 6106 - DNA, 655 bp, Cannabis sativa
tttttgttccccaaaacggaaagattgatctaaatagtatgcacttttaacagagaacataccatttctattaaccttccataaaaccttatcttggtgaggatatggtaacctgggaatattcaaaatcttccttccccaatcctctccaaacatctgcaatactatctcttcattccaattgtgcccaattgacagatccgcaatcgttgtcggcgtgaatctccttaccttcaaactatccataaggactttaaattcagatgcattcaacaacaggatccagggctgattccataagttaattgatctcccatcaccagccaacgataccgaacccttgacaatgatatctctgacatccagaatactgctccaaagaaaagaattattgcttctctttttaaccgtccaaaaattctccgaagagcagtatttactcctcaaacaatgaacccaaggcttatcctcctccctagctatagaccaagctaatttagctagcagcgccctgttcatatcttcaaaccttcgaatacccaggcctcccgaagctattggttgacaaatactgtcccatgccttataagacatgtatcgatcttttttaacacccccagtccaccaatacttcctgaccatagcatccaactca

SEQ ID NO: 6107 - DNA, 1338 bp, Cannabis sativa
aaaaagaataattaaccaaatccaaatttaaattcctataatcttaaatttaactgataaacataattccccaaaagaaaattcctaaaaatcttatgtcttcaaaagtcctccaacaccaaaccaagtcaggaggaggcctaaaaaaattagaaagatgcagtgttgccacataactaagataaagaaactgttctagaaaaagaaccccaacaaacagtaaggcctgtaaaaaagggcctattaaccaagctggtcagcagcatcaggtttggaagaagctttctgaagcacttccattgcttcagccaccttgtccttcagagcatccggggattcgataagatgcaaaacttctgtttggtccatctccagcagcattccagtcaccttcgcagaatgttcccgctcaaggcactcaaccagtggatatagctgttctccaagcatctgtgattttcataacacaacaagaaaaaacaggttaaatttggatattcctcataatggctttcgctttttttactttatagtgagttcttgtggatgtaccaatcgctggttgtctggagtagctgaagccaaagcagaagcgagtgccgacattggcactggtccagttcggtgaatttcgacaggagaggcaggcacgggagcatcaaatggcaatggcattatcgaacctacaagactctgagggaccattgatggctccaaaccatttcttccattttgcatgtatctaacaccttgattagggttgcgttgatgcagcagctgaagtcaacaaagaaagaggtgaacaatgtattaataaattgtatttttcttaaaaaataagaatttgagcattagcaggatgattttatcacaaagacaataattagccaaatgtgggggttgaattggaacccaaagacaatattatcacaaaatactgataattacctgctgttgtggcacttgtgggatgttcccaccgcgacgtacccccatcctttgaccaggttgcccttgtctctgaaggtggtatggcatcatgaaatttggagccacaccaggccgcattccaggcaagatttgctgctggaatccataaccagcaggctgagggggtataatggcaggagaaccttgaccataatacatctgttgaggaccaagtcttggtgcaccatgatggaatccaggaattcctgatggaagaggtgccattgcacctggagctcgaatttgagcgaaatgggcctggaatttaaaacatttagaaaacaacataagctttcaattttgaccgaaatgtcacacaaacctccatcgattatcaaaaactctaga

SEQ ID NO: 6108 - DNA, 1740 bp, Cannabis sativa
  modified_base (380)..(390): a, c, t, g, unknown or other
aataaggagaagtattataaatatatcctttttgagagattttagtgtaattttaaaaaaaaaataataaaaagacttatcacaaactttgttttgtttagtgacttccattgatgaaattaaaaagtgttctctttcattagatgattaacgattggagtttggaagaaacaaaattttataataattctccttgtcagatacaagtttcagtgagaagatagggtcggccctgagttaaaaacttaaaatgggctataggcaaaaaaaaaataaaaaaaaatgggcccttactataaagataaataatatttttaaaaattattaaaaatatatatgtatattttttaaaaggcaatttttttatttgggcccctaannnnnnnnnnncctaggcgcgggcctagcccgcctatgcccagggtcggccttgagagaagataaactatcttggtgcaaattgtaaggtatatctattaatgtaattgtgtattgtaatttatctttatttttttatttattattgaaaaatttatttagagttttttttatttggattttgtgacatggttctttttttttttcttcaattgttagatttgcaaggttattgtggtaggaatcataatttatggtacatattttgctaagtgtgaaatatgaaagatttgtgcataatttttttagacattgctttatgaaaattgaatatgaaaaaaaaaaataaataataaataaaggatttgttttggttttagtttctgttaagaattttgataattaggaattaaaaaatatgtataatataaaaaatttattttatttttatttttctttttaataaaaaataaaacttaaaataacaaaataaaataatttgtatattaattattatatagtaggaacaaattttttgtgtatttattttgttttacttaattgtaccatacttatcttgtgtattaaatataaaaaaaaattaattaaatattagtattaaatatgaacacataataataaaaaaaatatctgtatgtacatacattttttatgacataccctacaaataaatatatgttaattataacacaacccaacaattgaacaaaaaaacataataataataaattgtatagttataagcatcacttgctcagtcaaatatgatcatgtatcataattaataaatattagtatgtaattaggaaatttctttagcctaatttatttatttttatatgtagatttctcttatatatcaaaatatcaatgagatatcatataaattttattcctcttatattgttttttttttttttttttttgagataaattccatttgtaactgataatattatgtaataaatagtcattacactaaataaaatggccacaaatgatgatattttcttcctagctgtagtatatagggtttggattttcttctatttgtggacaaattccattgcactgataatatttcacgtttttttttcatacctattttagtttttctttgctctccaagatttctattatttttctcatttttgttttatatattctcttaaatttatatgtagcttaacaaattagtttttttttttttctttctcacaattgattaattaaatttatgattgtatacaaaagtaccagtattatcttttattttttattttttagatttcaacctttcaatttacttagatctcagtaatataaatattatataaatag

SEQ ID NO: 6109 - DNA, 1117 bp, Cannabis sativa
ttaaaaaaaaattattaaataatttcatataaaaaaaataactaattcaatctgcacttttatagattggattggatttgagttactataccgattggattagatccaaaatattaaattcatacttagtgcggatcaaatacattatgagtaaaataatatggattggattagatgaacacccttatatttaatatttattaaaaaaaattcacataactaacaacaaaacaaaacaaattattgttcttttatgtctccaccaataaattaaaataaataaaataattaattcaaagaaaaaagatgttgtgttgaaagaaatgattaattttgttataaactatatttttcatatatataataatagaatacaaatttaatctattaagttttaaaatatatttatattatatgtagtagattcataaattattatatttttgtattaaaatattaattgtatatataaattttttaaacatgcataaatatgtgtggattaaatcatttacttttacatatcaatcaatattcaattcacactagattttaaattttctaattaaactaaatttgtacacatttaataaattgtattggattgaattgaatcaggtatttgatgaacaccctacgaatttagtgacccaaaaagttcataatattagttttggctttctacaccacacactgaaatttcttatttttttacttttttttactgtgggacagaattttttttaaaaatactgtgtaagttttgtactatgtattttattaagttttcacggttattctactattattttttagttgttccactattattttaattattctgttttgttgttttaccgttattttatatataaaaaaagtatttttgtgaaaaattccgtgtgatagtaaaattataaatttttgtcaaaaatccaatatttttataaaaacccctattttctgtcaatgggctgatgaaggatcaataaaacagacttttgaatttaatgggctgaggaaggcccaataataatggctttgtgaaaaccctaacgttctttcatctgcagtgcttttatataaactcccacaacctaacgagactgtcagaatc

SEQ ID NO: 6110 - DNA, 761 bp, Cannabis sativa
ctgatccaatttaataagaagacagttaattaactttgatttaatattcttaactaattaatcccttttgtgatcttaacaatggttggttggtaacttggtagtagtatatggtgtgtgagttttgttcattgcacattgacctataattatatatttttatatattaatttgcaaaagaaaaatgtggtagtttgaaatcctaagtacaagtcaaatttttggccaccttacattatcaaacactcacacactaatatccctggattttgtgaagcttaaaataagggagtgtttggtgcacaccttagagattagatgtggggaattaatgtattttatttatatatacaatggattttattaggaaaatttgaatttcatgtttgattttatcatctaattataaaaaaaaaaatattgtattatatgattgagattattttattgaactaagagagagataaaaaacaatttactttgaattagaaaatgggagaaaaaaaataatactaaatatagatatatttttgatatagtgtaaaaagaatttcttttaattaaatagtaaaattaagtacataaattttaatttttcttttattataggtaattgaattaaaatttcttttttaaaaattaatgtttttaaaatttacatttatagttaatttttaaaaagtaagcaagtgatacaaatccatatatatatatatatataaaatttaagtggaatgttttttttttctaatgttaatcaa

SEQ ID NO: 6111 - DNA, 788 bp, Cannabis sativa
taagagagccaaaccaccacttttgcccttagcagccactacaaaatagccatcaaaaccaagcacaattcgaattctctccatcgcttcttcttttagtctagtttcagataagaaaatcatcccgggatgatgttccttgacatgggaactaagagttttcaatgtccaggggttcccaagcccctgaacattccaaatcagtatattcatgtctctcggcgacccagttccactgcgttcgccgcttccaaggtcactccagaggtcaaatcagcaatgaaagaaatgcccctggtaaaaacttctccaccttaccttccttgccctccatttcttccttcgtaatggtcatatgttgagaggtgttcttattgctaaccttattgtttttcctggccaccaatttcttcttccttccccttttagggcctgaagagccatcccctatttcattgacaaaggtaatagggatatcgatccactcacccctttcaattgacttaccctgctttgactccagttgcaagtttaatccttccatatgaattctcttccccggttgcttattcatcccatctcccaaatttagagaatcccaactgcccgctcttttcttactacccgatcctccatcaccctcaattagcctcattatctgcctatattctcctttatccatcagacccccattcccaacaaacaaggaagagttaggagcaagtaccttcttactgagggagttctgattattgattcttggcaatcgctcgtccccatgatctttg

SEQ ID NO: 6112 - DNA, 829 bp, Cannabis sativa
ctagcttctcccttccggatgcaattagctcggtaagatcttttcccttaacctcagacaaaaggaagttaaccttctcatcctctgcctcaattccaactgcaacaaacagaaatacagatacaattcactttctcattctcatatatacacaaaaatccaaactttaccaaaaattttaacactgcctaccaagtctacaaaggttcatatttcttcaatgtacatatcagacctagaaaaaccattatcaccaaaaactacaaagaaaaaaactaaaatagattggaaccactatagtacttgattggtatattttttttcaaaaataaacagcaaaacagatacatttcactttctcattctcactcatataaacacaaaaatccaaactttaccaaaagtttcaacactaccaagtcatcttagtctcaaatggttcatatttcttcaatgtacatatcagatctagaaaaagcattaaactacaaagaaaaacactaaaatagattgatttgtatctcttggatgctaatttaaagttaaaaaagtttttagattcatttctaccaatcacatataaatttgttcaattacatttccaaaacatattttcagacactaaagtcaaatttttaatttagaaattacagcttttaaatcacaaaccaataaatttttcattaatcttggaaatattcaaccaaaattagctttcctctgtacacagatatgaaattttataacctaatacaaattacaaaaaaataactctaatttttcattcttgttttgttcatttaataatgtaattactttctgatttgtg

SEQ ID NO: 6113 - DNA, 1624 bp, Cannabis sativa
ttatcttctctgtatttccttacttggtatcagagcaaccctcgacaccatgtctactggtgatcaatccaacccagaaactcccataaatcgttcagctccaacgtcctcaactacagcagtcaacacaggccatggagtagtggtcccacagttcggaaccacctttaaccagccctttgccctcaagctagacagaaacaatttctctttatggaaaacaatggtgtccgccattgttagaggacatcgccttgatggatacctcaaaggcactaaaccgaggccagtcgagttcatcactgctattgcaaaagaaggtggagaacaaaccacagatctggaaatcaatccagaattcgaacaatggatagtgcatgaccagcttctcatgggatggctttaaggatccatgacggaagggatagctactgaagttatgggatgtgaatattcagcagcactttggcaagcactcgaagctttgtacggagctcattcgaaagccaaaatggacgaatatcagactaaaatccagatagcaagaaagggctcagtcagtatggttgattacttgaaacaaaaaaggcagtgggcagatgttttggcccttgcaggtgaccctttatcctgaatccttgctcgtatctaatgtgttatctggtttggatctagattatcttcctattgttttgcaaatagaggcaagagcctctacaacttggccagtattgcaggatatccttctcagttttgacagcaagatagagagactaagtgccatctcaggcatcaacaaacagcccaacaatccagctgctccaaatgcgaattatgccaataaaacacctcactccagtggaaaccaaggatactcgggaggctccagtgatttaagtcacaatggtggccgcagaggaggttacaacaacaataacagaggcagatttggcactagaggaagaggaggaaggtcaggaggcccaaaacctacttgccaagtttgtggcaagtatggtcattatgttgcccattgctataaccggtttgatgagagctatatgggctcagttcctgctggtgcaataggacccaacaaaggcagcaaccaacaacatgcctatgcatttgtggccacaccagagatggtggaaaacgactcttggtacgctgatacaggggccagcaatcacagcactgccgatgtcaacaacctgaaccagaaaacaaagtataatggtaaggaaacattgacagtaggagacggtaccaagttaaaaattgatcatatcgggtctggaaggttatatactgctgataaaagttttcttactttgaaagagatgctacatgtacctgatattaccaaaaatttaattagcatttcaaaactaacccgagataacagtgttaatgttgagtttacatctgatttttgttatgtgaaggacaaggaaacaaagaaggtggttcttcaggggaagcttaaagatggtctctaccattttcactcaccaaacactgcaacaaattccagtcataacagtagcaatagtagtctctttatttcttagtttgcaccgtttactggtgtgtctagcctgtccgagtctaatgtaacaca

SEQ ID NO: 6114 - DNA, 4185 bp, Cannabis sativa
taaagtaacgtaaaaatatttttacacaaataatgtaacataatctaaaaaaaaatatattagtttcaaagtaacaaaaatgtatataaaacaaatagtacataaaactggtagcttattataatacatgacaactcaataaaattacccgaatatattttaaattatatacaataatataacttaaaaaataactatttgattataagatgtttataaataaattttaaaggtcatcaaattgtatctaaaattatatgatataaatatattttttttctgtaaaagtaacaaataattttttatcggcagtataagtaaccaaattgtttcttttgaaaatgcaggaaaattaaaaaaaataaattcgtgatgaagaagctgattatattgcaaatgttagttgattgatattgtttatagtatattattagaaaatatggaatagtaataacaacaatattttttttacataaaagtaactaattagtttattatcaatattatatgtaaacaaaaaattacttttgaaacacaagaaaaataaaaaaaaaaaataataaaaatcatacagcagaacagagcaatttttggatcaatttttttaaagtgtcgattgagtggttgctttatctagcaacaattttgtctttaatttttaggtatttttggtagtttgaggaacaatttcggtactgaactcatgatcgatcttgtggcgattgtaaccgaagattttttgttggtgagaatgatttcaattagtgactttaatcttatatataatcacagtaaaacaattttgaaaatcttgtcgatagtttgagaaaccattttggttatgaatgattgattgatgattgatgttatgttgtttatgaacgaagcttttttgttcgttaatagagttgagtgatccaattaagtgcatgaaatagagcttttgcctccatttcgtctgatctaaagcatccttgaactggctttgataaagcaacaacgacctggccgtcatgatttctaataattgctccaatgccaagaattttgtcgactgtattgactgcagcatcgacattaagtttcagtttgtttagtaattgtggcttccatggaactccctctgttggacgagccttcgttgcagcaacatttgtggaacttgcagcagtatgtgaaggagttgcagctgtaggtgaagatagagtagtagtaggagcttgattactgttagctttgatgaaattgctcatataattggttgcatataaagccagagcagtggcatccttattcctatctccatgtattattttattacggtcaaaccatatcacccacataatgcatatcaacatttcaaactcttccttgctaagcagatttgtaacatagaagagataatcaccatttaccaaatgttgtgcctttgcataatcaatagggaaacgaaattgtttccaaacatccttagcatgcctacagcaaaacaaggcatgaccaattgactcccaagcttgtgtacacaatgaacaagctgctgaatttagaaccttcttatgaaacagagcagttgccaccggtatagcattatgaatcactctccaagcaaagattttaatctttgagggaaatttgagattccaaaaaaacttccaccattctttatgtgagtgagatgtagaatctatctccttatcattcaaatccgaagctagatgaaagccagactttaccgtgtaggttccaacagttatataatgccaaattagcctatcttgtgttggaaaaaaactcaaagggatggtcaagattctatccacatctatgtctccaaaatgagtctttaacaaaggtaagttccattctcttgtctctgtaatgaaataggtcacaggtagtgtggctggcccaacataattaatggggcaaaagtttgaaatggcagggatccacggatttgttgcagcacagacatggtaaccattcccaattttatatctgagccctttgatgagtaactcacgtccccaacaaattccttgccaagttagagacatcgaatgaccaagattggcttccaaaaaagtagattgagaaaaatatttgtgttggagtaatctacttagtaaggagtttggcatttctaaaattcgccaagcttgctttgccaaaagagcttggttaaaatggataaaagatctaaaccccatacccccttcaaattttgacttgcatagtagatatcaattcttccaatgaattttgttgccatttttgtttaatccccaccaaaagttagccatcattgactcaagttggttgcaaaacgtctttggaagtttgaaacaactcatcacatatgttggtatggactgaacgactgctttcaaaagcacttctttgcccccaattgagaataatttttctttccaagcattgagcaatttccatatttgctcctttatgttgctgaacatttcttttttgtctctacccgagtaagcaggtaagcccaaatatcgttcatggcaatcactaataagcatgttcaatgtttgattgaaaaacatttgaatagcttggtcggtatttggtgagaaagatatgactaatttttgtgtgtttagcagttgaccagaggctctgtgataagtctgaagaacccttttaatagctaaagtcaaattcttggtagcatgacagaacaagaggttgtcatctacaaacaagaggtgggagatagatggtgcatgtctagttagacgaagacccgcaaggttaccaatgtcttcttcatgattcaacaggcgggatagtccttcagaacaaaacaaaaataagtatggtgataatggatccccctgccttaaacctctccccagtttgacattaccaacaatttctccatttaaagaaaaggaaaaacttgttgatgaaaggcatttcatgatgagagaaatccatgtgttagcaaatcccatcttttccatcacagctgctagatatgcccattccacacgatcaaaagccttactcatatctaatttgagagaagagtatcctttcttcccttgatttttatgctttaaataatgaactaactcaaaagctactaggatgttgtctgtgattagccagttagataagaaagcactctgagactctgagatgacaaatggaagaacctctttgaacgaagaactaacacctttgaaatcagtttgtaaattacattgcacaatttgattggcctacaatcacccatgctagttggagaacttatttttgaaataagggtgataatggatttattcagcatatccatttcatgaccatcgttaagaattcccaataccacatcagttactgaagacccaacgatatcccaatagttttgatagaacattgccgacataccatcactactagggcttttgtctggactcatcaattttaaggctgcatttatctcagctggtgtgaaaggttgtgtcaaattatcattcatagcagtagtaacagtagtggggattgtgtttaaggtgtgattgagtgcagagaagtcgataggctgagctgtgaaaagttcctgaaaaatagtctgaaattgttgttgtcattccttgctttgaatattctgttacaccagcaccgtttttcaatgatttaatagcattattgttgcgtctggatgtagcatgagcatgaaagaactttgtattttggtctccattttgcatccgatccactcgagatcgttgtttccaataagtctcttcttgtgctaataaatcatcaagaatagtttctgaacttttgagctcctccattgatttagttgatcgcttggtactgtgatttaatgcagaaattttctgctgcattgttttaatttcttgcttcatattcccatacttcctggtgtgccatgtttgaagggatgaggagcatttttccaagttatttagaaaaagatcagcagcacttgttgatggagaggaagtccagttttgctttataatggcagcagcttcagcatctttaagccacattttctcaaacatgaaccgagatttcctcttcacttgttgagtaatctaattgagtgcttgaacagtaaccgcaatagctcgatggtctaatctgaagaagtctaagtgagtagtgatcaaaggttcaaat

SEQ ID NO: 6115 - DNA, 862 bp, Cannabis sativa
tagttttatcattgtgtatgtattgaatatactgactgttagtgatgttttcggtgcataactatattaccaaaatactaaccgcaatttatgtataacctgactatgccgtttagactggttatcattcaaatacgaatttcattgagcttcgaaagttgaaatccttaatagattacttatctcaggtatgaggctgttgaattgcgtgatggtgacaagggattgtatttgggaaatagtgtgaatagagctgttaagaatgtcaatgaaaaaatatctgaagcactaattggcatggacccaacacttcaatcccagattgatcaagccatgatagaccttgataagacagaaaagaaggtattgtattgtatttctttatagttggatgttatccaattcaaacttttggataacatgttcccaaaagttttagtacttttaggagataaataagtctcacacttcgaggtctagttatgtagggtatcattgctctctattgtgcttttatctacgtctagtaactaggcttcaagattattatagcttgtggtacttgaaagaaaggagacttagtgctgattgctatatgatctggacagtctatatgaatagggtatcgttttaagatgcataactacttgggttttgtcaaatgttcattacatgcatctgatttaacagaaaatatctttacttcattgagcacaaagttaactttgcttttcttttgaatggggtgatgtttcttacttcatgtcatgttttagggtgaacttggagcaaatgccatactagctgtgtcaattgctgcatgcaaagccggggcagcagaaaaggaggcatgccctttttt

SEQ ID NO: 6116 - DNA, 534 bp, Cannabis sativa
gttttaattaattaatatgcaaaaacttagtccggtatatttcactttcgacttttgagtatatgaaaaaaaatgtggccgtaccaggaaagagaagacagatgctaaggtcccaacattatcctcttggagtactttaactatttcactttttattatattatatataattaaaaaaaaaacaaatgtaaatatgtatagtgatcgacaataagaaaatattcaaactctttttttttaaaaaatttttttaagaaatattctcgaaagatcgagagtagttttatatatataaaatatatatcatcataatttgtcaatttatttatttaaaaagggccatttaactttcttttgttcttttcgacttttgatggattaccaaataaatttcgaatctatataggtatagtaatatacgtataaaatatataattatatattgtgtcttgactagttgcatatgtacagtatacgtgtgtgtgtatatatgtgatgttcaggggtattggatatggccacgataggtgttat

SEQ ID NO: 6117 - DNA, 877 bp, Cannabis sativa
tttttttttttttttgaaagaggtcggtcacatttttgtctccaatttttcatatcctctcaatctattatttaaaatttaaatgacacaccactcactaagccttcttatattattcatctaaaattggaatatgtcgacacaccactaagccttcctatattactattaatatatttaattcaatttaatataattcaatatttcaattataatttataatccagtctaatctaatcaatcctgcatactaaacgacacttttcattgttctttgagttttagtttttagttctaaattgttatttttttaatatcagctttaacaacatttcaagaaaaaataagatcaaaagtataaatgtatctattaaaaaaaaaaaaatagtaattgtagaaacccaacttactatgaattactttaattattattaatttttaggcttgttttgagttaagacgggtcaaggttgtacttaagatccacccaatttaaaatccaaaaaaaaaaaaaaattaagaaaatataaaaaaatttgataattttcaaaaatattgttagaacaggagctcaatgattgattttttttttctataaactttacgcaaagtatctaaaattatattatttttcttttactttttcgtacagattttgctttttttacatgttttttatttgtattttttttttctttcacgttgcttttatgttaacatatctgtatttttcttttcaattttttaccattttaaatatttataaaaatattctctttttgacacaattactttgaaagactgcctaatttgttctgctatagaatagaaacatatactctatattatacactccaccatatattaatcatattga

SEQ ID NO: 6118 - DNA, 1596 bp, Cannabis sativa
  modified_base (729)..(737): a, c, t, g, unknown or other
aaaaatattaataaaattttaaatgtaaatctctttatataaaatatttacataatttttttattttaattcaaagttaaaccaatcaatttaaaaatatgattaaaaatatttaaatatattaagtattttaaatttaaatttctttaaataaaatatctccataatttttatttttaaatatatataataataataaaattaataaagaatattatgttaattaataaaatattattttaaagttaatagagaaaccaaaatacatcgtcaaatactgttacatagtcacactttttatatagaataggatatatattcatgaggattgttttacatcatttttcatatatatccatatatttataatttatataattagtttgcatgatcattattttattccttaactagtcattttaatttataatttatataattagtttctttaaaaatatatggtttgtcaactatttttttttttttggattctcatatttgataagaccaattgtaattacgtatggaaaatattcagttagatttaataaatttatctacttattaatgagttcttttcacttttatatatgccaattaaaaatttaaggctaattagtaatttttctcctaaactttgacatgtactaaatcgtgctcttgaattttgttggccgttaagattccctcgaattattgagattgttaaattagacaaaagtccttaannnnnnnnntctcaatagtttagggggcattttcacggccttaaaagttcaaaaaacatgatttggtacgtgtcaaagttcaggaaacaaaaagcctaattagtcaatatattatatcaaacacattcatcaatacatatatatatatattatattaaatttgataataaaacagaaagtgtctttgttaatattacaatttaaattttaattcattacttttttttctattatcttttattttatattaaatgtagttacatttttatttttttaaaaaaactattgcaattcaaatttacacattgcacttatatttaaaattatatttctattatcacttctctataccttattcacatatttaaaaaatatatttctattattgttttctttttaaacaataaatagaaaaaaaaatgtttaggtatcttaaagaataactattatacaatattcttacctattttttttttttttgagagaaaatctattaatattaatgaacacgttcatctacaacaatagcttcaataaggactagacaaacagtcctccaaacaatatcagtatccatccgtaaagcgtatctagcaagcccatgtgcaacagagttagcgctccgacaaacataactaagaaaaatacctgtgaaagaggatatttgataaataatgtcatgtatgagatcatgaaatctaccataatggtgaggaggattatgaacactttgtgatacagtaagagcgtctatctcaataaaataaattacacaattaatatccttcaaccaatgaagacagcaagagattgcttttgcctcaatttccttgacagagaaccttcccttcattggcttagaaatggc

SEQ ID NO: 6119 - DNA, 1184 bp, Cannabis sativa
ccactataagatgatgatccaagtgagaaaatgctccattaatcactttggctgaagaaaataaatttttccattgctgattgcaaacaaaacgatcaagtctttcttggacatgagccccacctccccttttgttcatccaagtaaatattcaccttcataaccaagatcctatagcaaacacttatcaagaactctttgaaaatcccccatagcattaagatttcgatcaccacccccttcttctcgtttaatgaaaaagtcttattaaagtcaccactgtaaagtcacaacagctaaaacatctcctcaagtcgctttaatagccgccaaaattcacacctcaactaggaattttgataccataaaatctcataaacctccacagccccaacctcagaaatttaactaaagcatcaatatgactcttagtgttgacagaatttttagctaaccgacgaaaaggtgtaatatgagttgcaaagtcaagaacagattcttgaatgtaagaagtaatttgggcagagtttatgctcactaaatgataatttttggatctcctcttatatgaaatattataatttctattcaattaattattataaaatgttattttccatgtaattataaactaatttgtcaaatataaaagtaaaaaaatacatatataattaaatcttaagatctgaacatatctttgtattttaaatagagtttattaaccaattagtgaattgatgtcatttcaaaaaaatacaaaaaaaaattataaaaatgtagttgtacggaattttaaatgtttttacggtttttaaaattttatttatataaaatacggtctgtattttttatgttgtattcctttttattttgttgtttattttttattgttattttttttattattttgatgttatttttctattatttttatgtagttttcttgttatttttgtgttgtttttatgaatactgtacaaatattaaaaaaaaaactataaaatcaaaattataaaaaaaaaaattactaaaaataataatttatgtaaatttaaaaatctattaaacaaacctaaaaaaaagaaaaaaaaaatagatcacaaacttgaattcaaaccaaagcccaagtcccaacaataagcccaaattcgaggcccaattcgcaaacttcaacggcttctttc

SEQ ID NO: 6120 - DNA, 682 bp, Cannabis sativa
cccaacagcatcaacattaagttttagcttgtttagggctggtggcttccaaggaactccttctgttggacggctgtgggttgtagctgtatgtgaaaatagtgcagcagtgggtgaatttagtgcaacagtaggtgatgatcaggtaatggctttctaaattgtccatgtagttagtagcatatgcagccaatgcataaccttcctttcttttgtctccatgaatgatcttattgcaatcagtctatatcatccacatgatacatattagcattttgaaatcttgttggctgagaagattggcaatatagaaaagataatccccatcaaacaatctttgtgccttcgtataatcaatgagaaaattgaaatgtttccatacatctttcgcatgcctacaaaagaacaaggcgtgtccaatcaactcccaagcttgtgtacacatcgagcaagctgctgaacttagaacttttttttttgaaacaaagcagttgccacgggtaaagcattgtgtatcactctccaagcaaatatttttatctttgatggtaatttgagattccaaaaatacttctaccattctttatgagagtgggaagaagaatccatctcagcatcatccaaatctgaggctaagtgaaaaccggacttcaaacttgaacttgatttagcagctctttcc

SEQ ID NO: 6121 - DNA, 1954 bp, Cannabis sativa
agggtttcatccaacgcccaagtttatattcctaactaggattttagtttttatgaccgtcttagtgcaaattggtcaaactttgcattgtgacatcaactaaacataccacgaatatatttaagggatcagaatcagttcagagcaagtttatttttgagcacctggagcccaagcaccccagcacttaggttgacaatttatcgatctaggcgccttccaagtatcaaatcgacaacttgacttttgtatattcatttttttaaggagacttttgtatattctgagtattcataaaaaagggaaaataggtacttttgggaaagaaacaacacttcttgggtgccagaagcaagacccagctagcagcttgactcattggctggcctagcgcccaagttgacattttgtcaacttaggctgattccggtaatgtttttcgtgaactcttctgagcatcttctttgttttagaaaagattaagattcaactatttttgagtaccaaacaaaacttttaaagggttataattggggtggggtctgggacccagcacccagtttaacacctggcactggacccaatgccaaggttacatattgtaatcctaggttgtttccaattaagttcacaaaaaaatgtttcagtcttttttttttttgtcatcacatataatgaagattcaagcaaactcggggagaaaaccacaaactcgagcccctggaaacagagcccagcgcccaggttcacctggtgctaggttaaacgcccaagttgaatcaacttggggtgctgtttcgattgctcaaatgcaaaatttgattcgaccaatgaatttggaatggtcaaacgcgaggtaagagacctcgttctcaggttcaagaaccttggaagtatcaaaacgagatcccaagagctcaagaatgagtacccagcgcccatgttgacaaatggcatggtgcgctaggttatgctcatctaattttgattctttcaacgtccgtctagtttttcaaaataactaagattcatgaagtcagagaatttaaatttacaactttccatttctcattttaacatgtgaaactcactcaacaatgagaagttttgagtctcttatttccacaaaacaacaacgtcttcaagaactgatgatcagctttgctagaatacagaaatagacaaagtgatgtcaaaatatcatttaggcaccttaaaatacattcctgggacatttttatacttacctagcgtccaggttgacgtcatatgtcaacctgggtgctgggtcatgaaatgcctttagtaaaattgccataagtcactcaatattgatatgattgacgcgatttaacttgtattttgatgttatttcattgctatatcaagtcatgtctcacacttcaatcgtaattttaaaactattggccccaaatttcaccccaagggagttacgaaaataagcactgagttacttgtagagagtcccaccagactccgaaaaatggccaccaccatcagaagctaattttcattgttagatcatcatatacggtcaaaaaatatctaatttttatttttctcttatttttgtgagtctccttcacctataaaaggagagcttcattaggtcaaaactacccacaaggtgcgagcatctttctctaatttttctttctagaaactagagtttaaaaacctagcatttttttgtaaattcttgtgagaaataaaaactcgaagtagacgtagctccattacttatcacgacaaggggaataaactactataaattgtgtgtgtttctctaattttttttgcttacatccattattcatctcgtcaatctaataaactggtgctagctacttttcagcgtcaagtactaacattataacaatcttaatcataaattgacccttttgttttggagataaaaccctttgacaaattt

SEQ ID NO: 6122 - DNA, 729 bp, Cannabis sativa
catcgaatctttctcctgtagttacaataatatgtagtcaatacaagcatgtggaagaagaataaaaggaaaactcaatcatagcataaagagtccatgaaccttccaaagaaaattaaccaacacaaacccacaaaaaaaaaatgcaaatttcagcaaaacacaaagattttccgcagacgaaatgagatgcaataagtaggcaggaagttcatgcacacctcaggtgaaagaagataaatcattaatttccacaggccaaatcttgtgcaattagtaggtgggggagggcataaaaaatgcttttatgggaaaatcgtcaagattacaagcacaagttcataacccgtctattatacactaaatatacgaaaaatgataacacttgatgaccctaagtgaacaaagttcattcagtaaggagttcccttgttttcagtttgcagatattgacaacggggaagggctgatataacatggaatatatatatcatcgaaacatttcctaaacttacatccaccaaagatcatgtaagaggggtctaattggttctttaatctactcacacttacctcaccataaaacctttaacttgtaaacgaaacaagtttcaagatagagacacaagtacacatgataacacatacaaagaaatctgtatgtatgtggaaatagagagaagcaaactaggaacaaccttgagtaagaacagccactttaacagtctg

SEQ ID NO: 6123 - DNA, 822 bp, Cannabis sativa
ttgtctgctccacggactggttatctaatttcccgaaggctggaacgaagaatctttcgattcggcactctgatcatgcagcaattgttcttgatacgttattggattcggccccgttcaaggccccgttccgttatttggatgtctggaacagggacgatgattgtaagagggtcattcgggaggcttggcaacaggtgtactttggttaccaaagctttgtgctttgttccaagttaagaaataccgctgcttctctcgcaaaatggaacaaagagtgctttggcttgtgcaggagcaagttgactatgcttgaaaaatgtctctctgatgtgcaaagtcgggttccctccaaggataatcttgaattggagagtgctttgatgctggagattgaagaaatagaagcaaggcaagaagctatttggagacagaaatcaagagagttgtggctccaagatggggatcgtaattctcggtttttccatgcttcaatgatggtgagacgtaaaaagaatttcatatgggcggtctcagaggatgactctaattggatagaggatagaaatcaaatagtggagtattttagagccaaattcatcgaccttttcactccctctgaggacctgggagattgtgacttatcttcccttattgctccttccatctctgatgaggagaattcccaactgtgtgcgatcccttgtgaggaagaggttaaaagggttgtttgggagatgcctcagcttaaatccccggggcctgacggttttccggctaagttttataaatcgcactgggaggtggttgggcagcagacgg

SEQ ID NO: 6124 - DNA, 2007 bp, Cannabis sativa
aaaaaaaaaaaaaaaaaagctctcctagctagtaagccatgaaaaaaatttcaattaataataatattgtgctccaaagaaaaaatcatgtgccatctgaaactaaggacatatttaactgttgttttgttccaaaacatcagcattatcgttgatgatcacatggaaaaattaatatattaatatttgtgattctatttgaagtgttacttaacgtgtcaataatcctataataataatgtgaagagttgaaacaatcagccatttatttaaggaaagtaaggtaacatgcatacatagacagatgttattttatgtgaagtaaagctgctcatgtgactaggcaggccgtagactacatttataaaaagcaaacaaacaaaaaagatggggtagttaatttgaggagttttaagttggaaagggacaaaatatagtgcaccaacagaaaaaactatgcataagattgtgtctttgtttgtcagaactgaatgttcttaaatgaaagggagtaacattaccttattgtttatacaatagatgcatagatattaaaataaaataaaaataaccaattaagtatgttgggactcacatgcatgattctaatttgctccttttgtaattgcttagtctaacactctactaatacaagctacgtactactcatcgtaatatgacatttaatttttcaatcttgaagatctccttagtgggtccttggtgggcatgtgaagagaaggagatgatgtgtttgtgacatggaaaaaaacaaaatacataaaaggaaaccttttcctacggaagcaagaacaggatttctatatactattgtggatcttgtgcacaaaaatttaagatgaaaaagtattggtgttgacgttttcagactcataagagctagcctacataaggatatttataagattgttgatatttaatgtgaaaaaaagaccttgaaaatgaatgaaaatgttgttattaagaaaaatatctgatttcaaaaaagaaaaaaaaatatcaaatatttgtcgatacttgggaaagaaaataagatctttccaaattgtttgtgttggtaagtactcatggaaatttgatgatgtggaggaaaaaacaccaagtatatattatgcaatttttccatctcacttaaactatatacttacatcgtagatgtcatatatcactacccctctacctctaattaaatctagctaccatgttacttaactttttctatacttgatcaccatatataattgaaaaaagaaaaagaaaaataaaatgtacaaatcaagtgtagagccatttgaattataaatagcattgtttaattaaaatattttgctgacatggttaggtgttggaattgaaaaggagggtgtatgatatttctaaggtcttagtcttcaagggcctactgccgactcatccacacatcagcttaaaagatgagaggctaataaaaaagagtcctcatagaggggttgtgatgactgggttccacataagctaattaagcatttgaccaattaactcatcactctttactcttcattgcctcctcttatccttgcaactgcaatttcatatttaatatatgactcctatatttattgcaattccactatttttgtagcaataataataatgtgtcacacctacctcatgacaaaatgtgttataatatagtcctattcgttacaagtcattaatataatatatatggcacaccattattatactactacatgaagggtgattctctcgtgtaatctatgagaatggataatgtttttatttaatttgctaagagaacaaggtgattttttctttttaattcattaaaaaatgaaaataaaaaacttttaaggggtcttgaattcttacagaaaattgtggaagtttaaaggctatatttaagaagacaaatatcaattctttaaaaaagaaatgtcaaaacttaggcaagttgaggttttgtgggtcatagcaagttttgct

SEQ ID NO: 6125 - DNA, 1073 bp, Cannabis sativa
tttgactaaaaaattatttcgggtcttaaaacagataagggtgcatctatatatctatttcaaaggggtgcattatagaatttccccttattatttattttgaatgcttttcttttgatcgcacagtaatttctcaagtattttgaaacggttttcttctgatgatataattagttttcactcaaatttgttcagttatttaggtagatataatttaaattacattatatcaatttaaaaccttatatttacattatttgtagtttatttattattaaagtgtattagttatcgattattaaagttgtaaagttattgagtgatttaagttattaattatttgaagtagcttgggttcaggatctactgcttccatcaattgcattggacaagataagtgttctcatttttcacttaaaatgactattgttgctatttaccaatagtactgtttaattttaattatagtgaaaatttgttataaactttgtaataatgtttatttatttattataatttttatttattttcttactaatgtatttttttttgtttatctgcagttaaaacattatttctctttaagggagtcaatcttcacaacaagtacacgattctcacatttatactgctaagatttccctcctgcctagagttgttccttgctgggatttttcgtttcctttgtagagagtactgttgctgaagttgttgtcatttttcgttcattctttttctgagggtgtctctgattggggttatttttttttagatctattaggttcttgttatctatctttctggatgtatatcttctacatgtaatgcgaaattgtaatagcgcaacacatgagttagatatgcactacgaatggaaaacgaggtttcttggttagaagaaattcctcattatttaataaccagtgtattgtttgtctctcaagaataaattagttattatattaaaaaaaattaaaaaaaaaattaaaaaacccttatggagttggttattttaaaataattgacgccatagggaccttatggcgtccgttattatgacccgacaccataag

SEQ ID NO: 6126 - DNA, 849 bp, Cannabis sativa
cactcactgctcctctttctgtcctttttgcacttataccatttcctacctgtagaaaatcaactttcaataagttagacttcctttatgagcttttttatgttccagctgaaaataaaattacctccaagtctcttcctctcttaaatccatatcaatatttcaccaagactcctttctcttttactagatccattaaagcacttattaaaccatcattcaaagctttaaaaaatacattcacgcctcaaaatttagccaataccaacttgcactaacaacagaagttcaatttgtaactcttgaaaactcaaatcaacaagtatcataatataacactaatagtttgataaatataggagcatcaatattattaaacaagatatttaatagtattaatataagaaaaaatgtgtgaataataatcataaaatgatatatattttaatacttggtgattaaatttattaaaaaaaaatactagtcagatagtttataagagttttaaaagttaaatataataaatagtaacaacataaattatatatacatacatcaaatagtaattaagtaattacgtgttgtttggtgtagtaatagggatgtttttactgatattctttcttatttggtcaagaattcaaatcagtctctcataggagctttcgagctgcatacctatgacctaattaagagagcatgaagtataaaactcgtatagttaatacgtgatttttgagattgtttgagctactaatgggtggagaaaggattttcaccctatgaatttttttaagaaaaaaaaaagtagtaactaagtgaagtaattatgattgatcacgtttatta

SEQ ID NO: 6127 - DNA, 651 bp, Cannabis sativa
ggcaagactttacatatcactttaccatcaactaccttctcacgaagagcttattcttttaaccctcgccaaactagattttaacttgcttcaacaactacatcaaaaggaattgaattatattacgaggttagtattttatgttgaactcgactgatgataagttattatatgaatttttttaaaaagaatgcataaaatcatatacaatatatatacatgaaaaatataaattagtacaaattaatatttttattctgtttttataaacaaatatatatatgtttatatatatataagtgattacttaatggttacaaccatgatgatcgctacattttctatgacatgtttgaacatgttagaaggtaaaaaaattatttttaaacatagatcaatgataattaactatatactttaaaataaattattttttaattaaaatatttaatacaatcttttttaataattaatatttttgaataattgtttttattttttatttataagaaaataaaataaaagcatattagattacagttaattaatttattaattatttgtaattaatttctaacctactcacaatcatttaatattgatctaacaactataaaaatgaatgtaatctttgttacatatttaataaaa

SEQ ID NO: 6128 - DNA, 1789 bp, Cannabis sativa
aaaaaaaaaaaaaaaaagcttatcataacaactaagtcaaatgggatatatatcatgtgtaaaagtaatgaaactgtataatatttagaaaataataaaattattcataaaaaatatttaggattttgttaaaaattaagtaatatacaaaacttaattaattgttgctgtttctaaaattcaaatacttgtttggcaaaaaagaatctcaaagattgtcaaacaatgaataattcaagggttacattattaattgataaataataaagaagatatagttttaccaacagggattacattattaattaataaattattaacaaagttagtagtgtccaacacctcttataggtaacgtcctacaattggttatcgatattctgtaaaaactattttcttaaagtatatgagacttcatacttaattacaccaataacaatatgatacactaagaataaaaagcgtatgagtcaccaatgatgccttttatgaattctcattattacatatttgatcacgattcatgaatcatacccaccaaaaactttgaaagaaaaaatttgaaaacacacatcattattaatgatcataaattgtaacaaattgacatctcaaaaaagaaaattaattttttttaagaacgacgatgaagaaagaaggcaagcacagaaaaaaagacacccacaaaagtgagaacaaggagcaaaatgcctacgacacaaacggtcaacgacaatggagatttagtgtagcttctcttgaatttctcaaactttgcatgtaaacttgtcgttttgtactcattcacttgttcaataagcctcaagtaataaaaatcttttgcagtgatttcatccccaagtttttgaaacatgtcaacaatctctttttccttatcctcatagtaactcaaaataccccttttcctcaaatatgtcacatctttctccgaacgaataagacatcgcatgaggaaggcatacgacgttgtttgttgtgtgtcatcaaggtgagactcaagagcaatgaggttctttaatagctcttcaatacactcatggatttttagatgtgggattagaatggcaccgtgttcgaacttaacatcaagcaacaaactatgatatttccctttcttgaatttgatacccgctcttttaagctttcgagcatagtctaaattagggtttgagttctggttggagttagaatattgatgatcatcataaccgtgatcttttggtatcacttttggatgtattgggatgatacaacgtcttacaagatcaagtaaatgatacccttcttggttaaatttctctttgagaaaattaaagtctcccgggaccatatttttgaaatacctcgaagctaattcattaaaggacatagtacattgtggagggattggtacaatgtggaacatttgttgaataacaaacaacgggatttggttctctaacaaaaccatgtcacgcctcaaatcgaagaggtatccacgagttgtgaataaggcgtcgtttcgacgtctaagacccttaatggaaaacttaagaaaaagctctatgagaaagcaagaatcgaggagcatgatttggacaaaatcattgctacttaggtttataggttcaccatagcagtttctagctctatgttcggattctcttagtgccttaacacaactatctaagctttcttctaagttgggctttctattgagaagagcagccaagtatttccacttgtgatcttccatttgtttcaattttggtttcccattgtggaatgg

SEQ ID NO: 6129 - DNA, 975 bp, Cannabis sativa
tttaatacaattgaacgttttttattgaattgctatacagtatatcacctgacacttctgatggaaattctcacatttatattttgtgattcttatatggactttgttaacgcagtttttcgccaacgaatctaaaaaaattgtaaacgagcgaaatgaacacaaataaatgtcgatcaaagtaaatcagtttatggaatgaaatttggtaatgacgcacaagcaatgttatagtagttcacccccttttagcagtaataggctagcccacttagagtattattgatcttaaggcttgacaagagttttccaaagttatgttctccaagaattcaatcctcaagtaagtttttagaatgagagagtaagaatgaattttagtccctttgacaagtaacttccccactccccctttatataggtttacacagtaggttttaaagtcccttaacccaacatatatctttttccaactatggttggattaagtttaaattataaaataatatttcaaaacaaatatctaaagtgtctagctcgaaaggttgttcatgtcaaattggtatgttggtcacatcatgttgctcatgtcatgttggtcacgtcatacttgtgaggtgagacatcttggtgcaacagagcaccttggaatgggttcgacgtgatgaagtcaggcgaatctcgaggtgataggacaacgtggttcaaccatgaggactccaccatgagggagatgttttaacatcgtggttcagctatgaggacctcaaccatgggggaggtaatttggcccacatggtgtcatgtcgagatggagccaaacatgaagaatcacaattgttttaccaagaacatgttacagaagacactaaagttgttctatggcatagaagactaggacatattagtaaaaggggcttacaactcatgagtgaatagaaattgcttggcaaggataagataactaaagttgat

SEQ ID NO: 6130 - DNA, 892 bp, Cannabis sativa
tgtttctttttactagctattcaagtattaatgtatagtttaattatatatatgtatagtttgattgtgacttgtttctatttatttgaggtagttttgtataatggtaaataggcaagagaagtgatctattttgttcacatggctaagtatttcaagttttttgaaatctttatattaatataaattgttttactagttctttcatactatcttattagtggggtgctagtatcttattactagccaaagggtagctttggctagttatacttaaaaaaaatttggtttttagttttttagtaatgttgagctagtgaattgagttgtgagttaaactctaaagtggtggttggttagaaggaatgaaaatataggaataggaataggaatatgaatgagaataagaatatgaatgaaattgaataaaatttaaaatgcataaaaaagattgataaaaaatcattaatttttgctcatgtaatattggaatggttttttcttccatttcaaaatgaaatattattctaccaaaatgatagaaatgacattctataattagaatgatatttcaatactttaaaatactaccaaacaaagaaatggaatgacaattatttttctttctattcctttccatttcattacctccaaccaaatacgtaccacctaagtttgtatattaattttattttgaaaattttcattctaatataagttttatttttttgttttgtgttgggatattttattttcagtttcgctagctctgacgacaactattaataatagaaagatatttttcaatatgctgagagtgttgtttgaaattgttataattttattgttcaaaatttcaggagcagttttgttcttcatggttcgccctaag

SEQ ID NO: 6131 - DNA, 605 bp, Cannabis sativa
gagaaaaatttccaccaattatatgtgtgtcatttataatataatataatttaattaagacaataaaaataataagtataattcaaatagttagttgtatgggtgtctgttttgttttataagtatacaactaactattttgatctttatattttataccctaaattattcaatgcacagaatgtctactatatgatgtacatcatcatataaaataattagaatataatttctctgccaaaaatagaaaatattcctacactaactttcaccaaaaaagctccctatataataaatatgtttgctcatatttccaaatctcattccctgattggatcaggcaatggattaatcctccattcttatctcagtcaccataacaattacaaaaatacaaagtaataaatccgatcacatggtataattaatcagccaaactattagtagagatggaagttaggcaattaatgtacatggaatgcgattcttaccccattcttgctacttatttatgctctcatctccatttcatccatgtctaataaccagcatgcaggtaaaaaaatacacatcgattatggaaaacccatcaaatatctattaaa

SEQ ID NO: 6132 - DNA, 543 bp, Cannabis sativa
tattgggggttttgccaccattttatcttaaaactttaaatagagtttgtatttaatttttttccaaaatttataatgttttttattttcatataactttactcattattttttttttttctttttaacttttatttccaaataccatatggtattttcttttcatactttatattaatcatttaattttttttataatgatattttttattaagataaattatatatgacaattatataataaaaaataataatatattatttaataaaaagtaactagttatataactgaatatactaactatataactaaatacatgtgttttgtacataacttaaacatactatatatttatatatatttttatgtagtgttgttatcattctctttagtgatggtgatgatttagtgctattccttcctcctatatcgtcgaggttccatatttttaatcttcatggatatttttggcaggttttgttggtttcacgattgtataataagatttaggggttttgttatttttacactttaaaacagtt

SEQ ID NO: 6133 - DNA, 771 bp, Cannabis sativa
ggttgctcgatttataatattcataaaatatttttagtatctttgtttcagtgttaatgtttaattatgtatcatttgtttttcagggagtgcatcaccctagaccgttgtctgctatgagtccggggtacattaacagactttatccaaacaagctatacggtcagtatagcaacgccattagatctggcatgggatttggatatggatacgattcacgaccaaaccaacgaacatggttagctgttgatggtaagtacaagccaagggggcgaaatggtggctactatggatatggtaacgagaacatggacggcttaaatgaattgaacagagggcctagagccaagggttccaagaaccaaaaggagtttgctgcaccccctactcttgcagttaagggtcaaaacttgccaacaacagttacaaatgacaaggagaaggacaagactgttggtgttcctgaccgtgaacaatacaacaaggcagatttctcagaggaatatgctgatgccaagtgtttcattataaagtcttacagtgaggatgatgttcacaagagtatcaagtatagtgtttgggcaagtactcctaatggtaacaagaagcttcatgctgcatacatggaggctcaggagaagcctggcagctgccctgtattcctctttttctcggtgagcaaattcgatctgtatgcttatttgttcggtttctcaatattactatgtatttctgtctaattaactgtttttctctgaactttttataggt

SEQ ID NO: 6134 - DNA, 726 bp, Cannabis sativa
gcaggggctatggccggccagctccttggcgatccaaatgctgcaactcacaactcgactccccctgtgcctgcacatgagtagacacatcttattagtatcttatgtttattactttttttcatattagttttagtttcatgttcgtgtatgtcctattggccttatactttcaaacattacttacttttggcattaaggctttcatgttcttgcttttggcctataggcactctatttttaaacactacttttgtttagccttaaacccttttactatggacatatactgactaagaggtcttgaatccaggctatcatcttacgctttgacatgtaagtatctagatttacttttttatgccaagagaagtactgcactgacttacctttcaattttcccttatattacgctttaaatttttctacataagttctcaatgatagttctatgcttgtatggtgtgggtgccccctatgtgagaatgaagacttacggtctcttagtcacttgcaattcatgaaggtttatagaccttgcctgggatttttcttggaaggctatcaggtatatgcatgtggaactgagaaaagaatagcttaaagaagttatcttgttagcaagttgtttagacataatattttttactgaaatattgtttttattcatcaattggtccttaaaatgtgttttagttgtggaacttacattaattaattctataa

SEQ ID NO: 6135 - DNA, 1027 bp, Cannabis sativa
tgtattagatattgagcattttatacctattttgattacattgattcataaattctactagaatttaagttttttttttaaagtataaaaaatataattgtagtaattatattaattttaggcaaattattaaaaaaaattataattatcccatttaaattatataaatagaatatttaaaaaaatatatatagaatataattttaaaagtaaatataatgacactttggaagggtggctataatctttagagtctgacaacgtgggactttaaaagtctatagcgacgcatagtaagaatctctaaagagttttagtgatccacactaaagggtcactaaatattaatttcccaatcatctatattagctagtgacacgcactaaaaactatgtttactttgccccttcagataaactagcatatatatatgtatgcaattttagtggaatatgagatatatatggggtgataaggtagtaaagattttaagagatgctttaatgcttagaaaatgtcacaaataggaagtgataaatattgaggtatgtttattgttattcaatactctaaataaaattattaatagtgggatgtttatgaacattaattgtgtttattatgattgataatagaatgtttatagtatttaaatttaacactatatatatatatatttatagaaggagctttcacttacaagtgtgaacacatattttagtacgactgtgaataagtactttaatttaaatggaatattaggaggaataaattgaaagttttcagctataacatgaaaattaattttattaaaagacttcaatagattgttattcctacttgtttaaattaattaccactttaattttagttagtcttttagaattcataacaaattaattataactatttctatataacaactcccgcacccactatgattatattattattaatatcattcaaattcagatggcattcgcatgtatatgtattcgtatatatactcagcgcgtttttggtttga

SEQ ID NO: 6136 - DNA, 780 bp, Cannabis sativa
accacctaccagcaattcagtaatctcacaccgtggttgtttctcctttgacttatccacaagtacaaagtgattgtccaagtcgatagttaagtcgattccgttagcattccaaaggtttcgatagtgactactatttcccttaaaggacgactcccttcttttcttcttgagactttttgaattaacccctaccctctcaagtgacaccggggttctacctctttttgaagaagccgatggagtcaagcagggatcacttccttttcttggtcttcctcttttccttttttggagatttccttcattagaaccaggagagaatctaacgatcttgtccccctcttccgagttctgagccttaagttcagttactgcttgcaattttccttcttcttcaacatgtgttggaagggctccaggaatcattaaaaacccatatgtggccttccttttcttaggcccacgttctatttcagcacacttaaaatcctcaatctcaaggattgggttaaataacgtgggctctctatgaaacttatctatagttacggacccagtcaaaggttcaaaggctctggcccaacacaatcttgagggccattctaggggttgggcttgcggcccaagaaaggagtttaagtactgcccaatttgaaattttctttgtaaggtgaagttttctctttcttcaacggctccatagggcgtatgtccaggagaggaattcatgtcagcagtcgaggaagggttcagagcttgttttccttttccaggtaa

SEQ ID NO: 6137 - DNA, 546 bp, Cannabis sativa
aatcttttaacagattaattattaatatgaccataccttttctaatggagattggatactggaactacaaataaattattaaaaaataatgataaaaagaaaatagactaaatactcctcacaaatttaattctcaaatacaatataaatatatattaaattagaccatcaattttctccagctaaagactaataaaataaatacagggaaaaaattaatacaacaataaaaaattagtgcggacatgttatctagctagcattagattaatatgtttgaaagctaatatctcattaagatttgataatatttgtttgattatggttagttcgaccaacaaattcttttggaaccaaacacttctcctctgagtacaatctctcttgaacaatgggagattgttaacacctcaagctctttcaccttcaacacttcttctttacccatcttctgtttcagtatacaaatattccattaattaatcaaactttcattcatagaaaagaaaaagttattatagtgagaaatagtaatgttaagcagca

SEQ ID NO: 6138 - DNA, 1201 bp, Cannabis sativa
tttttatttatataatttgatgatgagtaaattatcttaatatattcgaattaaaaagataattatatttgttcgaaaaagtttgattaataattatatttttattagaaagataaatatttaaaattatcttaatcttaaatatcgatttaagctatataattataaaatttcaacatcataattcaaataaaaatagtattaattaaatcctaatcctaatcgaattatatatatgattaaaatcacagaatttcccacctatatataaaccaatgctcgtattcacttctatatctttcgaacccaccaattctataagttctctaaagtctgattaacctttttgctcataactaatttttctcctctgagctcttagtgaattaagtcttaataataacaataataatcattattattattataagtatggaaatccaaaattggagtaaacgaattagtgtgattctaggttcgtccctttgtgtgatttttcttttgtggatgctcttgtgttcatcatcaactacttcatcacagaccaacaccatccggcctataaggttattaattttacagtaataaattaatatctttatttttttacgtaacatttactattattattattcctgtaacgtaagcttattcatacgtacgtacgttaattaatagttttatttattttattctttattccaaagttatttaagtttccgttattaatatattttgggatgcttttgctaattactaaaaatagatgtaacgatacatctttcttttcatgtttgtgttatctgcatagttttatttctaaaaaaagaataataagttcagccagtgtaatgttaatatcatgaaattttttgaaaaaaaatccaaattacttatcacaaaaaaattatatatatttatataaaattagaattataaaatatcaaaaatatgaagagagatattgatatctacccatgtttaaggattccatcttagaatttctttctacattttctttactaattactaacttatgtttatatatacattttctttactaattactaacttatgtttattatatggtattgatcattacagaaaagttttagaaagctctattagaggtagggaactattaagttcctcatcagcacctaggattattcatactactcaaagacacaaaaaggtaaat

SEQ ID NO: 6139 - DNA, 1209 bp, Cannabis sativa
  modified_base (360)..(368): a, c, t, g, unknown or other
  modified_base (557)..(577): a, c, t, g, unknown or other
tcaacagcttgggccaggtaggctaacttgcacgagaatttaccactactttctaaagttcaaatccatccatcatctctctggccagatggattgcccccttctagaattacaaaaacagtcttcttatcaaagagattgtttaatttttggatattccaaccgccattgtctatgagaagcgcagccaccttattgaaccattagcacgagggctaaaatatttcttatgtcatcaagtattcttattaatacttgcaccataaagtgtaccttttagtatttttatagggtgcatggaaaatttccacttttaaaatacaatatacgtacgtacacacattattattattattattnnnnnnnnnattattattattattattgcttaattgtatacatacacattatctttattcgaaaaatgtaacatttattcaatttctctcttttatttgtaaaagattttatataaagcgaaaatcattttctcttttacttcgtctaatccaatcgtggtgtagccccaagggaatcataataataataataataannnnnnnnnnnnnnnnnnnnntaataataataataataacaatcagtcaactcgtgaccaaacaaaattttgaaaaatttatatattaaaatacaataaaataatcattttactttattgacaaatactattgttctcattattatgttgggtggggaagtggggactgaactacttgagaggtttattttcaagtcgcaagtgacaactaattttgtgcctccacataaattgtacaaattaatcactacaaattaaaaataatatatcatgattgatacaaattattaaaacctcacatattttagttttataaatattaaaaaaaaggataaccactcatgtcacaaatggttgtggtaccttaagcctaatatcaatatattatcccatttctaaatagtacattattactttatgttaatatatagggaaatttgattttctgtacataaaaaatcttaaaaaaatttccctaaatgcatacttaataatattagtcatatatgaccatattcctaatatcacacaaatactcctcccatttgaaaaaaattaaaaactcaaatcatccatccatggctgcctcatcccgaccatctctctccctctcgctgatcacgacttcaacgcccggccaccgacgactaccc

SEQ ID NO: 6140 - DNA, 1078 bp, Cannabis sativa
tttacgagatattggcgataaaactacacgaactttatgttttgtaacacttaatcacataaatttaatttttgacggcaaaatttattgaaccttattatattttattctttacactttcgtttaaaaatctaagttaattgtcacagtagactgattgtgtatttatggtaaatttttagtggtccacataattttaattattttaatattttcaaaaataatttcaaaattatataaataaaaaataattgaatcaataaattttaagaaaattaccccactttaattatttttttttttaaaaaatttatggtttgagtttctaaggtagtttctccaataatttctatgtggattgctatatggattttagttgcgatttaggttgttccgttagttgcaataggggtttccgtgtagaatttcataaaagtacaaaaaaaaactgtattaaagtgtaaaaatcaaaaagcacttaaattttatttatttatttatttttctttctttttatttttcttcttcttttcttctagaactatcgagtagggttgaatattgggcgagttgacttggtttcgggttttaaaaattgtactcggacccgacccgtgatatggttcggatttgtgaatttcgggctcgcagtttgcgggtttgcgagttcgggttgactgagttggtccggtcaacgagttgaccgggttaggtatatttatcttaattgcgtatacttacaataaatttaccgaacataattactgttaaatctgttaatgacacatcagcaaaggtttgcttaatatggctgaactaacaccacattttacaattcttattattttctaagggagtgcaacaattaatagcacacaaaataagaacctataaaaggattggcaaatcttacataatattagatgaaaatgtaaaaatcattttagtattttatagaaaaacattgaaaagtacaataatgacttgtaacttctactatcagccaaatatttaacacttgaactctactaaaatatctcacataaagtggaattcacatgtcaaactatgagattag

SEQ ID NO: 6141 - DNA, 663 bp, Cannabis sativa
cagccatgaatgaagatttagaaatcccttttcaagagaatgaggtagctgttgttgtcaaagatatggttcctacaaaagcaccaggtagtgatggtcttccggcacttttttctatcaaaaattttggttcaaacttaaaaaagatgttgtggcagtttgtctgaatattctgcataatagtgctgacattattagattgaatgatacaattattgtgttgatttcgaaagttgataagccaaagaaagttgaagactttagacccatcaatctttgtaatgccatttacaaaaatagttttgaagtgcttaactaatcggctacggtctacattgggggaggtcatttcagattctctaagtgtgtttgttaagggaagactcattcatgataatgctatcatcgagtttgagggccttcacactatgagaaagaattggttcaagaatggatctaaattggctcttaagttagttatggccaaggcatatgataggatggaatagaggtttattgatactatgatgagatgcttgaggtattcaaatgtttgggtggaaaagattatggcatgtgtcacctcagttagtttttctttttttattaatgggaaagtgataggaaaggtgactccgtaacgaggaataagacaaggggatc

SEQ ID NO: 6142 - DNA, 578 bp, Cannabis sativa
aaagagatatgtattacttaggtattgaaattataaaggtttttttcttcttttttattcttctaatcaaccatttataaaccaatcatcaacattttattttcaaatataaatttcattaaaaaaaataaaaaatataatatatattaattttttataaaaaccagtatatatattattctcataccggccggaagatattgtggtggtggcagtcaaaggttgggctccaatcgacgacaacgacgacgacgtgtgaccacctaggactccgaaccaacgaagagaagaaggagaagagaagagaagagaaaggatgggctagctcgtgtcgtgcgacagagaatggagagggctgtggtgccgtcgtcgttgacaaagaagagaagggggctgggtcacgtcgtcatcgacagagaagagaagagaagggggttgtgctagagagagaggggggttgcgaagagagagtgggctgagctaggttttgctgaaaaatagaattggggggaaatataattaactatataaaaaaaataggggtatactcgacggacggttttaaaccgtcgggtata

SEQ ID NO: 6143 - DNA, 571 bp, Cannabis sativa
tatcaaattgaactttttgaagacttttgccataaatttcacattaattaaatatgatttcacaattaatggtcctatttttagtttgaaatttattgtttacttcactcttccttactagacacccatttgtgttttctctattagattttatgaaaatttggttataaaatgtgcctcctaattgtgtacctaacccataaaatataattagtgaagtggttcgttggacttgggtgggtgtcaccataattttgtcagaaagttagaacttagtgctatatttcattaggtatataaaacgttgggcacatgagtattagttttttttttcctatttataattaattattttcgttttcataaattccctttatgtaattcatctttaattcatgttaatacaatgtatttgtatatttgtcaaaatttgatgttttcttaaaaataattttgatgtttatttttaacgtatttttaaagagatgataaatttaataaataattccacaatatttttattaatcaatttgtatattacagcaacaaaaaacaaaatctaagagaactc

SEQ ID NO: 6144 - DNA, 878 bp, Cannabis sativa
gattttcaattcttctgatccgtacaagcgtgtgaggggcataattcaggctgttaggcattacaatgatccccatgtgcttgtggaaacgagcactggtttggctgatgccatggctggtctgaacctcaatgaggataggattgaacagttttaagtttaaaccatggttgtctctttgaggtttatatactttacttagtgaagagttgctttgcttgtttttgggtatcagagctagttttattgtatcagttgtacttcaaatctgatcttaaacttgctttttatataatgttgaagcatagatgagtgagaataatattctggttttgttcataaaatcttgggtattaatcttgttctcttataattgacttaaagtaccaaacttttttagttcttctgtcaaaagatttcattttttcacttgctacaatctagtgtgattgattttagttcacgtgatttgaaaatgatatcgaaagaatctagtgaaaggagacaagaatcttttagtttaacaaaaaatggagtgttttgtatgtgtatcagcttaaaaaaaaggacaaataatatttaataaaaagtgtaaggagagaaaaaacagagaggtatgattatttccatgttatctgaagtgtttgatgtctctgcattatgcttgttgtgcatatgagatctggtctctgaaataatttccctgaatgaatctatcttccatattactcagcatatgggtcaccattcctaatcaataatggccaacatggtaattgagtgattctactcatagtacaaaaaccttgctttaaaataacaacagcagaattacatgttgagattcctaacaattatttatcttctatagttttagg

SEQ ID NO: 6145 - DNA, 2131 bp, Cannabis sativa
aggattagaactattttatcccagtgtccaaacacctctcctcagctctcgcttcactctgtcacacacgaacacgaagccgcccctcacttttccattttcttctccgcttcttgccctagtattcctcggcgtcgctcctcctactcacggtggtagtttgaagctctctgctccgacatagctctcaacggaagcttctctcctttctctgttccgtttttttgggtattggtccatctcaatctccatctcagttccagctttatttttatagcttgatgtcgtttatgaatggcagctctctgttttggttactacttcttaggattgaacaacaaaacactaacgagagtgctctctgtttgttttaggggatttgtgtattgtttatgttgttgttgttgttttttcaagcggggaaatttgaattgataatggccttcttactgttcgacgaaatgcttaagagagacttgtgtaattgctttgtgaattaattatatgacttgttgagtctgtaaacgtgagatttttagagttgcctgcttaatgtttgatgaaatgcgtttatctgagactctttctttcctagtttgctttgtgaattggtttctttcgtgatagtcattacttctctatcttgagatttgaggtttagtagaagaaatttcccaccttcatccaatgtgttgggaagtctcctaccaggtttttcctgcaattattttttctcctaggctgattggctgaaataaaccaatttagctgtaacactgtattaggaactaaggcatttagttttgcaagatttgatattacctagttgatgatttaatggctacattgtgacactaattgcttttggaacttaacagatttgaaacaaaatggatgatagtctctatgatgagttcgggaactatataggacctgagattgagtctgacctagagagtgatagggatgatgatgaagatcttccagatagtaggcctggggaagatgctgcggcatcagatggtgaagatgctgctgctgcttccaatgggtggttgactgcctccaatgatattgatatggataatcaaattgtccttgctgaggacaagaagtactatcctactgcagaggaggtttatggtgaagatgttgagacattggttatggatgaggacgaccaacctctcgaacaaccaattatcaaacctgtcagaaatatcaaatttgaagttggggtgaaggattcttcaacttatgtgtcgacacaattccttgttggtctaatgtcgaacccaactcttgtacgaaatgtagcacttgttgggcatttgcagcatgggaagacagtcttcatggatatgttgattgagcaaactcaccatatgtcaacgtttgattcacatagtgagaaacatacgagatacactgatacaagaattgatgagcaagagagaaggatatcaatcaaagcagttccaatgacccttgttctcgaggatagcaattctaaatcctacctctgtaatatcatggacacccctggtcatgtcaatttctctgatgaaatgactgctgccttgagacttgctgatagtgctgtcttgattgtggatgctgcagaaggagtcatggtaagtccctgtgtctctcttcttagttctcaacttctcagtaaaacaaaagtgaaaaaaatgatactcttttaaaatctctgtctcactactacagtattaaatcttttcttttttatctaaattttacacaattgccaacatgacatgttttcatatttaaaatgcccacccaatgactttgtgaagaggagactggattttttacattttgcaatgaactttggacttatttgaggagttggttattattgtgctataaccactaaatttttttggaagaaaaggccactatagaataatcttttccattgtagaaacaatgaaaacattgattttttaaattattatttttaaagccattttgttcatatttatgcacaggtaaatacagagagggctatccgtcatgcaatccaagaccgcctgcctattgtagttgtaattaacaaggtgaatttttatttattcaatgttcgggcttctcatattcatat

SEQ ID NO: 6146 - DNA, 1410 bp, Cannabis sativa
actttcataataatcatattaatatttacaattatgaagattaattattaaggtgcatcacataatgtgtcaaaaaaaaaaaagaatcacaattaaatttgtcaaaaccattattaaagaatataagcaagcttcatcttataatatattcagagtcgtctttaggtaattagaccagaactgttgctaagatctttcaattcaaaagacctcttgatttctttattttaagattatttttaacattagcctataaaccctcaaaataaataataaatataagatttgaggtattatcattaatttaaccaaaaaaaaaacactctagatctaatgatgtaactattgtttttaataatataatttggcatgctatatgcttgtgtattgtgtttgaagcaaataattcacaagtaataaaaaaattatttattattattgtttaattttaatataaaaatatacagtgaaaatgtgggaccagctgaagaggatttgcagccacaagaggtggagaaaatgggccccccaaaaaaaaaaactacaaatgtctaatttcccaattactttacaattatttagttatttaaagaaatttttagttttttttttttctttgaaaattttgaatactttaaaaagtaagtttaaacattgttttaaagtaatttgtagtgtaaataatttttgattatagataaatatttaagtttagtgtttatagtaatattatttaaattatagttttaaaatttttgtagatagtcaaaatcactatccaattttcatttacttattaattaattttttatagtaataataattaaattatattttcaaaatttcagtcattttttcaagtgtcatttttttattaatcatgaactgtcacgtaactattaatttgacacttaacgatcaagtactaatagaaatttcgaaaatataatttagtttagatatttatctgtaactgagagttaaatttaaatatgtataccgcaaattactctttcttatcataaacacaacaaaattataaaattaattttcagcacaattaattaattattataaattttagaaagaattacttatgactctaaataagtataccataaataatcgtatgcaattgtagtataaatatttaagtttaactctcggttgtaaataaatttttaagtttaatttttggcgataaaaaaaatttataatctggatcaatgagaaaccgtcaaatgataatttacttaacatttaacaactaaataaatttaattatttatttataacagtcaaatttaaatatttatagcgcaaattactcatttaataaataataaaagagaactactctgtgtttatgtgttagagaaagtggtaaattatgattgcaggcgatgtgtt

SEQ ID NO: 6147 - DNA, 904 bp, Cannabis sativa
tgtttagtatttttgtatgtgttaatattgatagtggtttaattaaatattgagtctcatatagtttcatataataacttttaggaaatatcagtagccaatgataaagtaacatgtttataggtggcaaatactattaatgtctaataataatgctaaaaaatacatagtatacatcttaaagaattgtttaggtacatttttttttcttttggtttcctgaaaaaagtttgtctatttctttattattattatcatcacggaggttgtagttttttaagactatttgtaattttttttaaaaaaaaattatagtttacaatatcgaaaaataaaatttaaataattagttactatgcgtataagaaaaattagaataatttgaaaaattaataaattattttaaatgaatacaatcctaaaaaaaataaaaaaaaaatactatttttttttttattttgaatgtcaaaacaaataaaaaatatactacaactaatatttagagattatgttgtaaaattgctttaaaagatttaaacaatataaaaataatgtaaaattgccttaaaattagtgtgttcctctttaactaattcctcaaaatttaatttaattttaaatatttatgaaaaaaataaaaaattcttatccaacggttgttattgttcaaatgtgtggccctacttatctattggatgacattaaacatggcaacaagcctactagagccatcctaccattctctttaaagctactttaataaaaattaaaattaaaataaatataaacaatttaaaaacaaaaatacaaaaattgttacttgatccatatcttagattttattgagagagtatatagtaagtatattaactaattgagaaagaaatatcccaaccaatttttt

SEQ ID NO: 6148 - DNA, 1693 bp, Cannabis sativa
tatatataaaaaaaaaatatatacatatataagaaataaaacaatcataatatatttgtctttttttttttggtcagatgaacaaagcatgatattattaattcaatttcatagttagaaattgaagttgaatttggtattttcaatggattacgttgatcggttgtatcagtgcttcaagtgcggcatttctactcctggtaatttctctttcttatcatcctttcattcaatctattaatcaatatgtttttcattttcaatcatcaatgtcatttagagattctgattgttagggcgaaagggtcttagaaattcattctcgtttgtgtggttttctcttatgtgctttcaatttcagaatctgctgttggagagagaaaggcaagtaaaagaaagttgaggcatggggtttctaattctacacgcccatctattctttctccagaatcacaatctcaaaaacccaagaaacgatccaaaatacaatcttccattgacaaagtatttacttgtgattgcttcttaattcaattattttatgtatgctctattcatttctgtaatccactgatgtaatttttattttgttttcctctttggttcagtgtggttcggcgacaagcgaggagaagcagatttcacctgtcgtattctatggttcaccgcatggtgtgcctccaaaacgaccgtcacggttgttgttgcgattgttgaatgaaattcgtgtggatctttttgaacatagtaaatcgagctcaaggtgtttcttttattttatatattctcctccttttaaatatcattgttactgatatctctacttctgttaagtgattcacatttcagtgagatgtaacttgggttttcctgtgtgtgtttggtagagaaatatggtctacatttccgaggcaggaggaagcaatgaagtttgccaaggggcatgaccatgctcgtcttttcagttaccaagatcattttaatgggcaaagaaggttccttgtttcaacttatatggaattctggaaaaggttgtctttatagtcagtttatgttaaagagtgaaaaaaaaaatattgttgtgtatatattttggaaattttctgaacatgcttctgtgtgttatgtgtttacaaagttcagatacaagaatatggactcgaagtttcgccaccattatgaagtgattcaggaggtgaacatctactgatactctcaaatcaaccacccttggttttcgcttgctaaaggttttaggtgttgctttcagggtctgccatgccatctttactttgacttggagttcagtaggagagagaatgcagaaaaagatggagatgaaatggttgatcttctgatatcggttattttggaagccttgcgtgataaattctcacttgaaggaagtagagaatggatagtagagcttgattcttctactgatggtatgattatctaggagatgtataatgtacggtccttgttcagtttggaaatctttgtattagcatatttatgattatgcaacaaacaaattttccatttgtgcttatgactttattgtgttatttatatgatttctaaacatcgttctctttcaaagattaattataaatagtgttttgaattgattgctgctatgtatctatttgcagggaagttctctcgacatttaatcattcgcataccaaag

SEQ ID NO: 6149 - DNA, 694 bp, Cannabis sativa
attattattattattattcgtttttcgaaagctacttaattaattacagttaatggtctacaaattattaatacttattataattatagtaaagtttatgtctattttcaaaaaattcaaataaaagttacaaagagtacttactacttataaattttctaccttctatctctttttattttttaagagtctacctcctatctcttattatagttatagtttatttatatctacatggcatatgctatatataaatttatcactaagattatgttacagaattataaagctaattaataattttttttcttaaattttaatgtgtatcaaattattatatttatagttttttttcactcaaattatgttccttaactatttaagttattaaaaaaaattcaaactattatacgattgttagatttaagaattttcatctaattttactaataaaaatctaatgtggatgaaagttcacagaacataatgcggtatatgtcaaagttcagaaaacacgaaatggtagacatcaaaagtttaaaaaacacgatttgatagatggacaatcgttgtctaataaaattgaatagaatttgatagaatatcttgaatccaacaatcagttcaataattgagaatttttttttttcattctatcatattataaagtatcatatatatctattctatataa

SEQ ID NO: 6150 - DNA, 762 bp, Cannabis sativa
ttgtttaacgaatgtgttaagagtgatgatactagtcaagccgagtgtgttaagagtctaataatatactatccttgtactcaaagttaattttttttctaataaatttgttttcatagttaaaaaaaaaattatacttttattttttacagttgaaaatgtattaaaaattcaataatgtattaaaatagtaaatttacttaaacaaatttatattttctttcaaaataaaagatacatcaaacttataatatccacaaactcaaatcttaatccctaaaggttacagtttttcttaatcttttttatattttatggttttacttttgtttctatttttaagttacagattaaaataaatagttcctatttacattttcttcgtctacctagtgtccctcttctacttttttttactattccattttttgctatttcaattctttttaaaccccacaacttaggtcttacatacctatttttaaaaaatatttagttttcgaaaaactcgccaaatacatacttttagagaagatttgttttttttaaaaaaaaaacaataattttgtgatgaccttcaactaataatattagacttgattagcttaaaattgttgattatgctctttgagccaaatctatatacctattaatgatattttttgtccattttttttataaaaaacaaacatactaaatatagtgtattgtaactgtgccattacagttctttgtttttatattattattatgggtaaatac

SEQ ID NO: 6151 - DNA, 1050 bp, Cannabis sativa
taaataatatgagccaagtttctgtcaatgagaaagacaagtcatgaagagagattaaaacatataataaaaaagaagatggcgtgtgaattatggctcttatctttcacaggaaggtccaaaagtagtagtgcagatgatcccaaaagctattccattttccaacatgaaattccctgtttcccaccatgagaggcttgcctgaggtaaggtcaaaagccctctaaaaagatttcatggagacattgctgaattccaaggtcatgaaggaatgaactatttggcaatgtataactaagtctcagaacaaaacatatatacctgcaaaaaagggtgaatatagtatcagcaaagccattcccagctgccccattccaaggattacagtcctgcagtttccacaactcaaaacaaatatttgtaagcaaggagaaacctatgcagtgcagttcataaacaactcaactatattcacaagttatatatcttaataaagaaatgaaaagagaatctttaagaacaataaagaatgaaatgaacttggtaggttaaataaaaataatatttattaataaataatccccagtcaatggaacccttgaaaactagaataactagaatccataaggacatcaaatgcaaaagcaaatgaggccctaaggatccatatttttaggtaaattatcttttggttgactagattgactctgtggatcaatatatggtgtttcatcagctgatgaccacttgttaagttctgatcctcctacttgcaatgaacctaaatcccagatatctaatggcagctctggcatttcatagctgactggagtagccaacaacaaatcactgccaccacttgacataccagcaccggtatcaagacccatgctccatatgtcctcttgttttatgatgctttccattcctgtagatgagagttctggaaaacttttctccttcattaaatcctctggaaaagagacataataatcaggattaagctcttgttttgggctcagaataccctttcctttgaaaaaatgatct

SEQ ID NO: 6152 - DNA, 558 bp, Cannabis sativa
ttccccacaaatgtgctaattttatatgaaagtactgtgtgtacgtatagtattcactatatggtatttatacatgaatggttacatttgcataagtaagtaatggacattaattcttattgtgtattagtggtgtccgacgcattttataggtagattggttaacgatattctttaaattttattttttttaagttatataagactcaatatttaattacaccaatagtgatataatactgaggaaaatgctagttaccagtggtgtatttctcgttagagaattgctaaaagacaccacctaccatctttttatgtgtcattatcgttagtggtctaattaaatatcaagttctatatagcttaatataataacttttaaaaaatttcactaaccaatcgcgcgcaaagtgacatacctaaaggtgctaaggactactaatttccaataacaatattgttctctttaataattacttgtatatgtgtagacaagggggagaccaattgcatgttgacattttgaagcacttaaccctagctagctattatactatt

SEQ ID NO: 6153 - DNA, 1362 bp, Cannabis sativa
acctctttaaattattcacgtatagttttgtttttaaatatcttttttaattaatattaaaaattgaattgaaatccaattacctttgaagcttaattaaattagatagaattatgatttttcaagttttaattactaaataaatcaaattacattagaataatataaaaaattaaattagatcgaatactcactcttacaattttctttattgatcaacagctagatcgatcgatcacattacaaattctaacaaatatcaaaagggtctatatatatagaatagtagcttgatgtctttatttattattgtcagcagtcaatatatagctttcaattccattgacccttatatataaaaataattaatttcatcatataatatattattcatatatattaaatatgtttttttcgatctatctatctatttgtatttctaaataattttaatgtatactaaatgtattagcactacttcatcttctcgtcaacttatattgcatagaatattattatagtatccaaatccaaacccatatgatttaacaaataattaataaattatatatttaattattttatttttataatttaaatttgaggagtgttattatcgttcttttattataattatctcttagttaactttcgtgtttaaaaatacatacttgaaatatattttcttatagtggtattcgttgtagttacaacattatcattcatctaaatttttaaaatattttaaataatttacagtacttaaaatatgtttaaaattttctaaacacatattaaaatattaaaaattttattttcgatactgtacaccatttggaatttttttaaaaaaatttacagaaataatattataattataatgaataaaaaaattaaaaaaaaatatataatgaaatttcggatcatgtaattataaaaattaactaaaaaattgtaataaaattcttttcaaatttaaatttttatatatatatatatatataagatgattctggacactctatttgcataaggtgcagtagtagttacagttattacatatttatatatataaatgttaatctatagcaacctgggttttggacttttcaacatgttacaaacgttataataatatacatttatagttaattgtttttgttatccaattaaaacaaactatgatcttatccttaatttttatgcatgtttattataaatatgtgcttgtatgtgctcatcataaaccacccaataccgactgttacattttatttatttaaaaacaaatttgtcttcgtttttcactttaattattttacatgtaaattattaatgatataaaatgtttttaaatattag

SEQ ID NO: 6154 - DNA, 2533 bp, Cannabis sativa
  modified_base (1982)..(1987): a, c, t, g, unknown or other
gtactacatcctgtaacctgccaaaagtcaaccaaacacccataacccatcaacaacattccattgctcttctctttagatgaagtggaattgtttaaaaagtgctggaacaagttctataagaaataaaatctatcaaaaatctttagaagtacaaggacagttaaattgaaaaagtttccttgattataggccacagctatatagttttacataatagttgaattattcaaaaaatattgtgaaacatctcttccaattgctcacaagttttaggatctgaaatacaaacatttactgaattaactagaacacactaaaaaccaactagctaaaataattagaacctaaaagatgtttcggatcagagaactgtttgtccaaaccatgtatgtcatcatttcagtggtaatcataattatatttatcaattttaaaataatggattcattggtgtccaaacattaagtaggaatgcaaattggtatctaaaagaacaaagaagcagaagaaaggaaacaaaaaatgcactatactcggcacttgcacatgtcttaattaaaactagccaaaacaataatgtatttcagtttaaatacctgacaatgttcccatgctgcatttctttcaagagagaaatctctcgtatagctgtacttggcactccctcgtcttcttgctccagacgaatcttcttcaaagctatagtttcattagtaacacgatcacgggccttgtaaaccacaccataggttccttcaccaatcttctcaactttttcgtactacacataaacaaacattaccaatcagagcaaaattaagaaaaaagactaatttaaaataaaaactacagaagatgagagatagagaatcaaccactaacctggtccatagtcaagatcaggttgcaactatgcttattttgtaagtaatgaatcctaaaagatagaaaacaatcagaatgttgattttaaacacaagtgtcttccctttcaaacagtttatatatgccacatagcagatatatgtgagtttattatctgtatacaaaacataagtacaataacatggaaactgatccgaattcatacataaatgtaatgaaacatatcataatatgcagtccaacaaaattcttcaaaaatgtaaatatcaaatactaaccttcatataaagcctatggagtcattcaatacagagcatggagatgttgaaaccatggtgaaatcctttttgctagtagcaacctgatttatccctgtaacaaatacaaatcagaatcaacataattcacattcaagacattccaaaactaaaaatcaatagattttagttgactttagtcactttactgattatttttccccaatattagttgacacactattccagcccgcactctttctaattaatgcaaatttagaagagataatggccgtggctccttgttacacctcttagcagtctaaatatcattcttaaatgtggaatccaataattattcatcaattaagataacaggatcccacataattatggatccatgtttactttttagactcattcttcttcttcttcttcttttttcttagcagagtaaagtttctcacttctaaatgtagaatcccattatattcattaattaagataacaggatcccacataattatggatccatggtcttctttttagatccattcctctttttttttttaactatttttaatcttaattacttgatgaagaaataccacacctaaaaaccacacttgatttggtcaatcagtttcagtaaaaaagcagatatatacataatgggccaaaaattaaaataaataaatttgctcaatttgaccaagaatgtaagatctcacttcatcaaataaacacataaaagtaacattatcatcaagaattaatatcttctttttctccaactatttcttcctaatcagctatatctataaatatatatatatnnnnnnatatatatatatataaatgttaactgaatcatatcaacaactaaagaagaaaacatacctgtgataggaatggattgtgaatagaaagaagtaagaagcacgcgctgcagcagaagctctgtccacaagttcagatgaaatgtgagtacatatgtatatatatacaaacaaatacacatcatgtatataaaatgtatataaatataggtgcagagagagacgatacctgaagtgcgagtgagtggccgtgccgattgagcggcggttgacgacggatcagtgtgtgcagacagcaaacatgggtggaaatggaaattgaacaaaaattagtgtgctcattttatgatgatcttatctatttggtcttagggtttttttttttctttttcttttctattaaatgattttttattttttttgatagtttattatgatttttttttcgccttaaattgcttcggtctgtgtgaaacgacaacaaaaagttttgaacttttggaagtagagaatacagtactatatactagtctttattgattagttttg

SEQ ID NO: 6155 - DNA, 2178 bp, Cannabis sativa
ttcttcatgaaccttagttgccttgtgaagatcaacctttcgttattcaactcacccttgtttgcaatctaatgaccattgaaggtgggaattggaggacttgtttgaggatagagataagaagctcatattagacatttctctgaatattgcacaagactttgacaaaatgacttggacctaagaagctttaggtttatattctatcaaaagtgcatataaactgcttcagaaattacatggcaggtgggagtctaatgataatgctcataccgggccaacttttggaagctgaaaattcatcctaaggggaagaatctggtttggcgttcagaaaagagagtgcctgcccactttggagtagctgagatcaaagagagttgatgtttgagctcttgattatcatgaaaataacttaagggtctggaccatcactaaaattatcatgaaagggcatttatgctacaatatcatctgccaacatcataatgtttaattcaggtaacacatcgactgccaacatctctgcatttgtttctggaatgaaagtcccaacttcactatgagtatcctcaatagtacttggtaaaggattaggatcgatacaaatattcttcttcaccaaagacacaaataggggaatagattcatttgacttcttcgcaatcatagacaaatataaacttagacgcttatcattttttataacttctggtctatatgttagctttttcatgtacttataattcacttttaatttcaaatcatactacactttgtcaacctcgagttcttcgtacaaaagctcaactaaatgtgagtaggttatgtttgtatcaatctcgaatgtcaaattttctgcttcattgaaaatctattctctaccttcacactcataaataccattatacatcaaagacacaaacatagttaaccttgtcatccacaacaaaaacaaaattctaaaaaataaaaacaaaaacacaacataaagaaataattgctaaacatgtgtaatatcggacaactatcaaacacaattgggctgtaatcatactcaaataattatatataaaacaataacccatcatacctacatcagacaaaccattggtctatatcagacacataaccttaaccactaaactaaacaaactatcagatcccctatcatacctatatcaggcaccatcaagacattacccctaacctttgaactgaacacactgtcggacccctattgtacttatattgggcatcattggacttaacaaaaaaaacccaaaaaccataaaatcgtagaattttccaagaacaacaatttccacaaccaattcagtaaaaaaacaccaacatctcacagatcaaatatttaaacaacattctaaaatatatataacaaccaacaacaaaaagaaacaaaaaacactaattatccatagattcctgtagatgtttcctatgattaccctcagcttagcgtctacttcattccacctccaattcgtgcttggtgcaacaaaaattttcacttttgagcaagattttagtgatatttagtaaagagaatgaaaggttgggggagatggtggagttgtggtggtgagaaaatagaaataagagaacataagtgatgttatgttatgagagagatattttaggaacaaaatgtaaaagttagcctacattatttatggtattgtacatgaattttagttatcaattttatcctaacgtaatcatagaaaatcaaaagagcttttacacgttcaagctatacctagttatgattagaaatggtatcaccatataattgacaacaaaacacacaacaaatgaaaaatgaaaaaagaataaaaacaataatagatcacaaatgaattcatatgataattaagaataaaattaattttaaaatagaaaatgtagaataatgaactctccatagcacttttattaatcttttctttttttttcacaagagagaacaaaaaaaatattatattttaataatattgagaaaccaatattttgagggaaaatggtacaaagagaatatgtcaagttcaatagtaaaaatactttgaataaattgttaatttggtgatctcaacaagcttgagaaagaaggaaaaatacaaaaaaatcacaatcttcagatttttttttttaaataaa

SEQ ID NO: 6156 - DNA, 2201 bp, Cannabis sativa
tatattctttcaaatctgcttttagcaatttagtacccattgttaaatttgattaaagataaaagttatagtgtagatattgatattgatatcatttggtttacaaagtgtgtaaaacccatgttcatgaattacagtgtagtgttattattattattattaactattattttattactgttgcaatatgttgtttgtatgtgtaactggttttggaaatcaattttgaatgttcacaatacaaggatcagctttttcccaaagaagctttcctgggtttaaaaagctgtatttatatttgttgtctctcgtaagactcatcacactcaccttgtactgcaattaatccctactactcatgtttttttctaatgcaaattggaattttattaatttgctaaatcagtcaaaagacaagattgtaattcaataagaacatctctcccattgaaaactcgatctggaaaagaatatgatgctctaacaaagttgtgcgcaatcatattagtagatcgtttaataaaaagcaaagaaacattgtttgaaatagatagaagctttcgacagtccatcaccactctcctaagaggcgaaaccatggtgatgttacttcgaatagcttggacaattgagagacaatcggactcgagttcaacattatgtcattcatgatccttgattgaacttagcgcctctttaatggctaaagcttcaaccatgtctggtgccagtaccactgccaaagaactaaaagaagaaaaaaaaaacagagcactcaaacccaatacgaactttgcatgtcagaagacaagacaccatgacttacaatttatactttaggtcatttaatcacttgtggtgggttttttagtcggggaagaaaggttcagattttatgactgaatttttaaaactagaatctaatatctctaatcccaaccgtatttgaagaggagtagaaagattagaagcttgaacgcattagaacttaaccctacccgtgatctgaaaaagaagaagagaagaagttaaaaacccattagacccataaccgtagatgagaggtgcaactgtagcaagaagaagatttgaaaaacctgaaaacccttcaaatttctagatctaatccccctactactcatgttaggttttgacttttgagggatgtaacaaacttatcttattatattcattatttatttttaaataataaagtatagtaaaatattactctggtggtggatgatgtagtctcctttcgatccaatttaattagatattaaaatttaatataatactaatgcaactaaaaatttaaaataactaaacaacaacactgttaattataaaatagatcaaaacatataaaattaaatacacaaaacaattaaatattataattcaacaaaagaaattcactaaaaatattattaaaatataattatatattatttttatttttttattatataaaaataaatataaacatattttttaatatatataaatgtaagtggatttgatcggtttttaaattttgagattgacatctcataatcgatttaatcccattagaatttaacttttagcatccagtttaatccaattatatttagattctttattatgtctagtgtggttcatggagcctcactctcacaagtcacaatcacttattttgcattttcttccgaaaagttcctgctatgttctataaaactgttttcactttttaattttttaattgagaattattatttttttttttaaaaaaatcacattcaatatttttttaaactttttttttttcttaatcaatattttggactccggccaggtccagactcaaatccccttcgaccaggcccaaatttaaatccccctccacgactctggtgctgaatcttgcctctaacccgagccaaatctgactccgaatctagacccgacttaaataaaaataaaaataaactttactgaacacacttttgttttcttttttttaaattgaaaaacaaaagtagttacaaaatgcatttttattttttaaaaatagatttttaaaaacaaaaatttatttttattttgtgattaaaaatttagaaaacttagctaaagtaaccttttttttttattattgactttagtcaacaaaatattcctctctttcaggcgcgaaattaaataaggcaggccgcagg

SEQ ID NO: 6157 - DNA, 711 bp, Cannabis sativa
taaattatgaattgtcaatttgaccttcatttaattattttttttataggagtcctatatacaattaaaattttaatcaaaggtgttttgtaatttcaaataaaatattatcattccaatatagtataaacacatcaaggagaatactttttattttgatattgattccgggaaatcaagcaaataactttctcttattctgattcatcaatcagattgatgattttatccacatatctggagaagtgagacgtgacccctcaaggcggcccactaaagtactcgacccatcaactaatccataaaaatgaacaagacgacttatctcccgaatggatgcagattcagacacatgtccgagaatgccaagctcccgaaagtatagttccactctaattaaattcgaaggataatgtaatgttgggaacccaacatggatacccccaagggtcattcaggagttgtagctgaaagggttatccataatggtctaaccttcttgatatcgcctacgtggtacgcctctaacataatccctaaggaatctagtgacttgtacctatgtcagattcaagaatggctaaaggatggttacctgtttgtgcattgcacccataatctgacattccctttctccacaacggtacacaccagttgtcatcgtcaataataccatgtactgtaaaccatattactctttaaaattgggcc

SEQ ID NO: 6158 - DNA, 1063 bp, Cannabis sativa
gttattatattcaaaaaaaaaaaagaagctattataagaggttttttacactgattaaaatgaaaacatgaatgacatatacttgttatttttcaaatattaacttattaaaagtcagacaaaaaatgtatttgattatgtaaagctacaatacattagcttatcaaaatgcttcaaaaaatgaaccactgttagttttaggttccatcttttaatcaccaatccttctgcatgtcattctttcggcacgtgccttctatctaggctattctgttgttgctggaattacaagaaaaaaataaaataatatgcttttgttttcatttgagatattgattaatatgattcatcgctataaattcttcaacattaatgtgttcctaacaaaataatttatgaatttaataaatataaactgttatgttcaatgttcaatcacttctttcaaggctaaattacagactaaatataaaagtaaagagctaaaataaaatgtgctgaaaaataaagtaaaaggttgttgtgatgaatagatctctaaaccattataagattgatgtttcttgcataactacaaggatcgtgaggctatgatggagaattgtttacatatagaattaagagagataatcaaattgttatcctagaagttggtatgcatgctcttgtaggtgacacgtactctaccatcagacctgggcagaagaaagagcttcatgaatcagccgcctaagatgtttctaaaccggcaaaaatatcaaacaagctaaatgcattttgccgcacggcttcaagatgtgtaaacctggtcgaaggaaaatagtatgaatctcgtacaagacgactagaggaaaatgcatgtcataaatataatcaatagtagtctttgtttgattatataattaatacccagtcaaaagggaatcccgattatatttcctttacttgaggaagaggagttggttccttgaattagtgggatgacagcttgaggagtttgaatctaattttgaacatcctctataaataatagatcagctctactgaaaaaggatttgaaatt

SEQ ID NO: 6159 - DNA, 1158 bp, Cannabis sativa
atataatagatattatgtgcaaactatgttttatatcatttataaaataagaatatgtttaatcatttaatttatttttaattataatctttttcttacataaattaagaaataaaataataattaaaaaaaattgcaaaagcacgcatgtgcctctctcactagtatatatagaaaattgctaaaaattattagtgtctaacaccctttttatactgttattagtgtaattaaatatttaattttaaataaatagcttttaaaaaatataattaatcaattataaaattactattaaaagatattcaataatgatggtcgtatatataatatatgcatgcacttattgtaagagtttggtggaataattatgttattattattatgaccaaagaaaatatatatagttgtgtagttgtaagagtccatatttatctcatgttgtatttggtttgtaagtgacaaaaagttggtgaggttgagaaaattaaacgaggcaagctggcttcaatggtcgtcctttcaacaaaagctttagactttacttgcttttatattttcaaaaagataattgcacaaagaaaattatttattattcgcaaaaacaaaataattaaaaaaagactttgattaattttacataatttagtcaatcggccataccaactatagttctactcagaggccaaatgcctcttcaatttactccatttatataatatatatcttttgaattttatagtgcaaactttatcaatagtctctaaatttatttagaattttgaatctgatacagttcaataaaaaaaatacaagtacatttttaaaaatacaagaacaacagcaccaatattttgtcttattgtgcatttaaattaatagcataaaaatgtcatattaatctatttttctaaaaataatattacgtggtgaaaatttctttcttttctttaatagtttagataattttaagaactacgtattagttatagaaattttatatacctcatctaagagcaaggcagacgcaccttaggagtagaggaggccttggcccccctaaacatttttaagtatatgtgtatgctcacctttacattatataaaaataaaataatgtgaagatatagaaacaattgcacatatcaacattaagta

SEQ ID NO: 6160 - DNA, 1355 bp, Cannabis sativa
cggagaaaactacttgtggagaaatttgataaaaggtagtatattgttgtataaaactttttaaaaaaatacaatataaaagtaatttatatcgtatgacaatataaaagtaataaaattagaaaagtcaatattctatgtaattttcctttacaaaatattttttttattatttatttatttgataatttatgcacataaaaaaggatacatacaaaatcttgacacaagtttcactacaagaaaagaaacttttatgttgctcccaaaaccccaactttacccttacaagatattaagagccacatgtcgcctttaaaatatcgctcctaacactttgtccctactactccttagtagaagcaacaaaaaatttcccttaaatgtgagcattagagacgacaaaaatcatccctaaaaatataaaaattgcccattagtgaaatctacttataagatttaagggacttttagggaccacttatacttttttagtagcaacttgttgcccctaatagtatacaataaatttttgtaaaaaaaacttttaatttttaattaattaatataatattaaaatttataagaaaaactaaaatatttaaatttattaaattataacaaactatattagtcttacatcgtgcatgtcacaataatattataatatcttctttccatatccttttcctcgtcttaatgctgtgatgtttttattgtggcatggtcagcattagtgccatcagccataaatacagcgacatttggagctgggtacaaagatgatttgaagactaaaattgtgcaatttaagacaaaaagattgattgagattagctaaatatagatatacacttatatttgtgaacaaaactatgctagcaacaagagattatcatcgctttcttaaaaaacaaattccaaatggagcattttagctctgaaggcatattgacatctagcaaagcttgcactttagtgttttcttccctagaatttccaaatggctcatataattagtcccttaacaccaaaacacaacataaacaaattttgttgttattttcgaagaccaaataaatattgaaagaaacaacaccctactttttcattctattagaatattgggcttccacttcttctaaaacaagtttatcattggttggacctgaaaatagatttaaaatgttactaaatatagatttgtaagaaataaataatcttaaaatatagataagaatgtaacatacatcttggaacatcatcatcgagatcacttgcatcattctctcaaaacagactcagaacatctgaatggaaataaataactaattagtaagaaaatgtttgatact

SEQ ID NO: 6161 - DNA, 804 bp, Cannabis sativa
aatatttgcatgaaatgtctttgaggttttaaaatttctaaaattagcttatatttccaattcaccccgcccttcttagaaacatatcttgggctaataagttattctctcaagtggttgacagattctctcaatcggttataacatataaatatgtgtaactgaattcacttatattatttaatcaaataattcaatataatttaataaaaaaattaaatttaaataattaattaaataaaacatttattgagtttgtttaaatatacagcataacgaaattctatacagtttttgaaataatagaattttttacgagacttatatgaaggcctaaaaatagatttacgagtaaacatttttctctctatcaataaagaaatagttcttgctcatatgttgatatttaatcaagaacatcatatagactattatcttactagcctacactagtctttgcatgtggtggaaggtcttgaagatcaatgtgagttttatcattatcgttccgaaaatacaacatacgaaaggactcaaggataccctgataagcttcgagagccaattgttcttttcaactatttactttttctttaatatatatatatatatatacatataataatcttggacatatggtacaataattattagaaataactcttttgctgaatatttgatttagttccataaaaccaacattttgatggtgccaaaattaagcctgttggtatcaaagcgtgcaactcttatctgttttggtaaacaaaattaaaactgtaataagaagtagaatttatattc

SEQ ID NO: 6162 - DNA, 647 bp, Cannabis sativa
ataacagcggcagggttcttgccgttgttcttctggaaatgaacaagtcctctagggaaagcaaatacatctcccttcttgatagtcttggagatcaaaacattggcggtggtgatgaaaccaacgtctaattcaccttcaagaacgaaaacaatctcggtggcgcgtgggtgagtgtgtggtgggttaatacctccgggagcgtagtcaatacgcgccatagagactcctagtgtgttaaggcctggaatgttctggacgttggctccggtgaccttggacttgaaagtgttgttggtcgcacctggattggctaatccggcgaaggagaaatcatcggcgcttacgttggccttgcaagggaatccattaactttcacagctgttttcaatgatcaaaaatcaccaaacaaattcaaaaccaactttacagttgttcaatttcaactttattgttgattaattaactaattatagttgtaagtaagtaactaattagtatataaaaagaaaaattcttaccagagttgagatcggcgacgcaaacatcttggaggagttcgggatcggcgaaggaggtggcgaagaatgaggcgaatgtcaacacgagaagagtcatgagagtcgccattatagagagagagaga

SEQ ID NO: 6163 - DNA, 576 bp, Cannabis sativa
tttgatagttgacttggtaagtatgtcaatgtgtacatgtatatacatatttatataaaaatctataatagtgactcatcattaatttttattatttacatatatgaaaaaaattattaattttgtcattatgtttatatgaatatccctttatgtattttggtaaatgactatttataaatttatcaacaaagaaaaagatatatatgcttatattattatttaaagaactaatttcaataatatatattaattatatttatgtagataccagcagataggtggtaaatgcaatgattttggggatggtatttggtgaaaatggaatgatttatcatgttggaagctccatcaaaaatcctatttatgtttctcaagcttatgattatgtgtataattatttcactgaaaatccactttttgatcataaagaagaaaagccaattatagtaaccaaagtcaaacttttccaacatattttcactctaaacatctacatggccattcgattcctcctacctttgaaggtaatgatttaatcattattatatgattattattattgaaaattttaca

SEQ ID NO: 6164 - DNA, 1718 bp, Cannabis sativa
cttgaagagggtggttggggaggtataaagtccatcagaacttggaaacgcctcgatgaccaacgcctaaccaccatagacagccaggaactttggagtaagagttcttcctagtaagttttcactatatgacatttactcaagtgttcagttcaacagtaccttatgctttaatatatagtaacaatattatttcattggagtcaatcttcttgcacagtaacatagttcatatgttgttcctttcataattcatatgcttaatctcctaattaataacatttttataaggagataataacttatatatatgaattgtgatctcttaatctatatataatactaaaagaaccttttggtcatagtgacattgtgaaggttttcaatataggaagctttaaccaaaagcaaataatgattcattttgtcctttctcttgaattgtttttttttttttcttttaatttgattttggtcttccatgaacaggtagttgaagaaagaaccagatacctctgcctaagaatggtgtacacacatctttaaattaaaactataggaggcaaataataatcatactttaccaaaaataatattgtattgatgtgtatgtagctatatgattgttggtcataaacacattgttgtccaaaatattaattacttccaatcactacatatatatccaagttcttgtttttatatcattgttttgtatatttaaaatataaaatataaatgaaaagagcaaataagctaagaaaagattcttagacttagaatctagtattttaaaaaattaaaattaatcacagtaaattttgattttatgtataaaatgttgcaactaaaagtagagacaccaacaacaacgttgacgtagaataacaatgaataagaattagcttgagaatcgtcgcgtttgtttagaggaataaaaatataaaagaatgaaaatgaaaataagaatagaaatagaattaaatttaaaatatatgaaaaaaattgataagaaaaatattaaatttattcacatcatgcattgaaatagttttttttattattttttattttaaagtaaaataattatccatcaaaatagtggatagttcattcaattaaaatgatattttaatatattaatatgtaagaccatctccaatgggacatgtaaaaattgtgctatattaagcacaaaaagtaattttgtggtaaatttacaccaaattttagctttgtcttccaaagcacaattgtaaaattttgatgtaaaatttaatatctaattaatattttattaaaaaaataaaatctaatgactttgtaatcaattttattataaatatttcataatttaatgtgatagttaaatatactaataaaataatagaaatgacataaatgtaaatgaaaaagtaatgcatttattgtgatgtaaattttacatcatagtaaatattgtgccaaatttgacacaaaatttgctatgtgccaaatttacatcactttttaaaacaccattgaagcacattttttgttaaatgaactatattttagctttttaccacttatttatacttccattggagatgctctaaccaaacaaaaaaatataataaaaatttattcatttcttttctattttattttattacctctaactaaactaaacaccattttatataagttttttactactcccaaacgtttataagttc

SEQ ID NO: 6165 - DNA, 1288 bp, Cannabis sativa
gttctcaaggctttcggttttgacagttggttccgtggcttaatcagggaatgcatttcttctgtgagtttccaggtcctggttaatggtgggctaacaaagatgtttacgccaggcagggggctgaggcaaggcgaccctttgtcgccttttttgttcatcatttgctctgagattctttctcgtctgattatgaaaaaggagaacttgggtttgattacgggctatagagtctctcccaactgcccatccatttcccacctcatgtatgctgacgacacagtcttttttatgaaatcggatattggggagattaatcaatttcaagaggcgctgaatcaatattgtaattggtcgggacagagaattaatgttaacaagtcaaaaattctcttgtctaaaaactgtgagatgaatgtgggggtggcaatctcggatagcttaggctttgacataatgaatggagatgaaactttcctgggcaatccgctgtttgttagtggaaacagaacgaaagacttccaatttatcattgataatgtcaggaatcggatggaaggttggagggcaaagctcctatcttaagcggcaaggactgttctaatcaagaatgtgatctctgctatccctattaattctatgtcagtctcctttcttccaaagaccatcacagactcattggatgctctggttaggaggttctagtggaagggatctatggatgggggccgatatctctctttgatgaattgggatacgatctgcaaacccaagggctgtgggggtttagggattcaaaaatttcgggacatcaacttctgccttttagccaaactgggttggcgtgtggctcaaaacaataataacatctggtgtaagaccctgatgggaaaatactgcagttatagaagcttctgggctagatctatccctcggggagcatcttatgttgcccgaggaatatggaaaacgagggaattcattaaggagaatggagtttggttaattgggaagaactcttctgtagagataatgcattgctcttggtcttgctctgatggagtggttatatgaccctcggatataaatccgcagatagatacagggacgatggtctgtgatcttttaggtggcgacttgagccactgggatcaatctcttgtggggagaatgtttaaaccagcaactgcggaagtcatatccagatgtaacattgaggagctccccgagaacgattccttagtgtggaagtctgccccgaatggtgaattctctcttaagagggtgt

SEQ ID NO: 6166 - DNA, 1272 bp, Cannabis sativa
  modified_base (710)..(723): a, c, t, g, unknown or other
cgcccgataaagctaagtatgttggacccgacctgccaatggggaacaagtttttgagacagccgagttttatgggttgggtctacgcaaattgactaagtcctggtcaaacctgatataaatattcaactctatttcattcgtcgtgcgtctacattgtgacaatcaatcaactctctacattgctcaaactgctctcttaatttttctatttcattttttatggtaaatattattttagaccttatgctttgtaaaagttattaattgaaccctctattttactaaatgacaaaatggaccttgtattttctaaaattgtacaaataggatcctgagctcaattttcaacattttttttttaatataaccaactttactacaatttttaatacgaatagatactaaaaatgtaaccagttctgtcataacatctctatattagattattattaagttttattttgataaaaaattagttcatggtcctatctgtacaattttgaaaaatacaaggtttattttgtcaattaacaaaatagagggtctaattaataacttttgcaaaacatagggtctaaaatggtatttattttttattttttaaaaagtttacaatttctacaaaatataatgcaccccttaaaatggatgtattgatgtaccctctacttatttcggcatacaaaaaaaatttttagtctaatttnnnnnnnnnnnnnntacgttatagctatttaagatatactacaaaattttaagaaacttgtaataatttacaatataaaaaataatgttcaaatagtctattttacacgtgtataaaataaaatagtcatgcatgcaacacactacttgaacgcaattttcagcgtgttaaactttttcaaatttcttaaaattttggaggatgtcttaaataagtataatttacaagatcatgagaaaaaatttgactaaaaaattatttcaaatactaaaacagacaaaaatgtatctatatatcccttttaagggaaagcattataaaatttccatatatttttaacacttagatgaaggtcttaattttacattacaaagaattgaaatttcccgccacagcctaaacacattcacaaaactttggcgcattttatcaaacatcctataccaatcagctttatataaattcaatcaaatctaatccaacggtcacaaatccaaactgactccacacgcggatcgcaatctaatccaacggtcctgataacacaactcaacatctataca

SEQ ID NO: 6167 - DNA, 1764 bp, Cannabis sativa
ataacgtcatccttgatcaataattgatacaattatatgaataaacaagttggggtatgtatatatagtttctttatttagatttaataattttagattctcttattattattttatatgtagtgcacagcggtaaccaatatctcaactgcaagtgaaaatgatggttaatgtatattgttatatgaaaaatgttaaattaattaattatattgtattcttatttgtatttgtataattaataattaattattaataagtcatacatatttttatttaataattattacagatcattattaataacaatcatttgtaggatgtcacctaatcttgtaatggcattgagcattattttgcctaataattaatgaggctctatatatgtatctatacatatatatttatgtataatatatgagttttatacaaaaatttcataccgctattaatataataaagtaatgatttatattttttaatttaataattattatacaaaaccgttaaccacaaattatggtgtggtgttaattgttaagcataccttgatactaagcacctccaatggagaaactcaatttagtgttaaatcaacaccaaaaaactattatcttaacaatattttttttttcaattccaaccacaacactaaaaattacactaaattttatattctctattatttattattttattaatatatatataataagaatattttaatactaaatatatataattatttagtttttcctcttaaaattattatttaattattaaaaacttttttttaaaaaatagtgtggtctatagtgcccacctaaatttggtgggacactgtagataaagtcatttatgagtatggttttagtgttggagtaaatatagtgtgaaactaaactatatttagtactttagaatccggtcggagatgacctaatagcaagagaaatgctaaaaggtactagtggtgtctaaaatcctccaacatgtaatattgctacaattaaatatcagatttcatatataatttaatgtattaacttttatagaattttctctaactaatcttaaatcgtagtgtaaaattaattcgaccctaggtcttaacaaactcattgagatattttcaaaataaaatatagtatttttgaaaaatactaaaaaatatgtgtatttctaaaacaatttttttgtttttgacctctagtgaatcttaggttggcgcttaacccgtcttaattcaagctcaaccctacataggtaaaactaagttatagcaatgctctaataacaatattggggatcgattttgtcccgttatgccaaaatagggaatacaattcttgattgtactgtagtcgttggattaaattggggcatgatctaagggctggggttaaagtaagagtagttaggggggaaaaatggtaaccggttggtattttaatttaaaataattattttttaaaaactgacaacgattgattaatatactgacagttaccatttttcaaaatacactaaatatttgtcttttattcttcttcgtgagttcatttgtattagggcagagtcattccttcttcttcttcacatttccttcttcacatttcttcacatttccttcttcttcttcaattataacgtgggacctacttgccgtacaacgaattccaatccgtgattcacacttttgggcacaaaatcgttcgcctagcaatattactcaaatataaagtatataataataataataat

SEQ ID NO: 6168 - DNA, 679 bp, Cannabis sativa
cagttgaacaaccctgagtttcttcatattgtatcaagctagagaaagcctcaacacaaaagaggaacaggaacggggatagtggatctccttgcctcagccctcgttatggtttgaacaaccccatcacctctccattaagaaggaaggagaagctaactgatgtgacacaagccataattttctatacccacacctctacatagccaagctttaacatcatagcactaatgaagcgccactcctttctgtcatatgctttggccatatctaatctcaacgctacctgtgatccattctagaatctattcttcctcatacaatctaacccctcatagccaatgatagcgttatcatgaattagtctccctttgacaaagccgctttgagaatctgaaatcaccaatccaagagattggctaagtctatttgccaaacacttcgaaactattttatatattacattacataagttgattggctaaaactccaccttttttggattatccactttctagatgagagcaattagagtatcattcagactttcgattttagccccctcatttagaatagacaagcacacttcaattacactctgttgtactgtatctcaaaatttctgatagaataaagctagtagaccatccccctaatgcctttgtaggtaacatttctg

SEQ ID NO: 6169 - DNA, 2181 bp, Cannabis sativa
aagttgggccaacagaggatttcagttttaccagatgaataattacaatataagggcaaggtttgtataccaacaggcgaaggtatcaaacagaagattctaaatgagtctaatagtataccatattaagtacatctggaaacaaccaagatgtatcgcgatgtaaagccctatattgttgggcagatatgaaagatgacattgtggagtatgtgtcagatgtccaagttttcaacaagtcaaggcagagcgtcagaaaccactagtagtattttaacctctgaagatatttgagtggaaatgggaagaagtaggcatagactttgtggttgtatcaccaagaatagtagggttttatgattttatctgggtaaactgggtaattggggttaaatatacgaagtcagcacagtttctttaatagtgcggactatgtatacggtggatgaatgcgctaatctatatgttaaggaagaagtttaactctgtgatgctccaaagttaattattcttaaaatttacatccaagttctgggaaagtctgcaatgagcagtgggtactaagttatattttggtatagtttttcacccttagactgatggtcattctgagagaattactaagatatctgaggatatgctacgagcatatgtattagattttaagggttcctgaaaaaagcatctcccgctaattgagtcttcatataataacagttatcagagtactgttgatgtagtacagtaaaaaatgctttatggacgaaaattttgttcacccattcattggaatgaagtcagtgaacggaggaaccttgaacctgatgcggtctaaggaacgagtaaggccatagaaaggatttgagtttgtatgtttgctttatagagtggacgaaagagctatgctgatccaaagtgtagagatattaaattccaagttgggaattttatctttcttcaggtgtttccaatgaagggaactcggaaattgggaagaaaggaaagttaagtcccagatttattggtccgtttgagtttttagaaaggggaggttaggtagcttattagctagccatactccatgccttacctggagttcacaatttatatttcaatgtttcagaatgatgaggcaggtacgatttgtataccgagttacaaaaatatggaacttcaaatagacttgtcatatgaggaatagtcgattcaattttttgaacaagaaaagtgaaattactacgaaacaaagattatatcgttagctaaaaatactgtgaatgaacagcaagattaaaggcgactagggaatcaatgttgcagtagcgggaacagtatcccgagttgtttagataacttttgaggacgaaatttctataaggaggggatagttgtaatatcctagaaaatataatgattttttaattgggcatattttattaaatatgtgattaagtgggcattagaataggattataatcatacttaaactaattacgagttaattagtgaaatacgattaaaggaacaaataaagtgtaatttattaactacggagattttattggattaagagggtatagtagatactatttttgaaataaaatattttcgagcccaacagccgtggaattttgacagagtggtcaaagatgtcacgacaatataagataaattgaattggaatggaattggaatttataccagactagtttagaattttaagttgtcagtttggcgagattaattagaaaatgaccataatgccgttaagttatgttttagcttagtgtgtggtgaaggggtagaatagtcatttcataagttaaatgttattttgtcttatttgggtgattagagctgaaacttaggattaatatttatttttattttattttcttaagttagtaaattggaagataagaagaaaaacataaagattagaaaacctctcaagcgttctctctctctcctcttttcgaccattgaagaacactagaggaaatcaagttttcatctcaatttagctcagttcttgcaagaaatctatacatgttgctgtcgaaaatcttgaggtaagtttttcttctagtttttagtaaattcaaggtttagattgagtttttttgtgatttcggggctgtgtgattagcttaagtacagagcttgttctaggtttaattt

SEQ ID NO: 6170 - DNA, 1321 bp, Cannabis sativa
tgcctctatgtagggtgggttatctttactttcttatcggaagttttcaacttctatcctgacccctgaagccagtgaaggtgcatttccctctgatctgttgtccgctaagcctgtgctagaatctgaccgaaagataggtatgaagaagatttgaaaccattgcatacttgaatctcttatctgcaacattttaatctagtagaaaatgtaattagattattactagaggttatataggtgatagcttggggtacatttttatagctgttgatttataactaaatgtcattgttgacttttgctcttatcctttacatgatttgagtatacaaacaagattttgtcactttcttgtgtttaggctgtacaattttgtttgtatgtctactgatgttgtgtatctctgtttaggactttatcaggaccttataattcctgtgacaaattttcataatgaagacaagggcttcatggttttggatggtgaagtctttgatgtccctatcaggaaggacattattcatcgagttgtactatggcaacttgcgaaacgacaacaggtgctgatcaaactgtaatgatgcttgaagcatgttgtgagaagtattattggtatcaatattaccatattatatgtatatccaagatttaaagctacaagaaattttgaaatgtacaacattagctttctttttaacaacccacatgctgcaaagtgttctttatataactagtctgcattccagcagaaggaatggactgattggtgctgacaagattgtaagtaaaatgtttaagttcttttggattgaatgatatgcagggaacgcattcaacaaaaactatcagtgaggtcagtggaactgggagaaagccatggagacaaaagggtactggtcgtgcaagacatggaacattgcgtggcccccaggtacattgttaaagaatttttatattattgttcctttatgactttttcaaacacagtgatgacattgtaaatgggtaacagtttcggggaggtgctataatgcatgggcctaagccacgaagtcacgctattaagttgaacaagaaggtccgaaggctagggctaaagattgctctcactgcccgtgcagcagagggaaaggtgactctctatctctatctctctctctctcttttctcaatgtaaaacaattagcttctgtcttcctctgtttataatgtgttctgaagtttatttgtgatattgtaagcaaataaaaacaaggctagtagaactctggactgcaggtggtctgattttgttcaattaatgcattttgttttcaat

SEQ ID NO: 6171 - DNA, 1216 bp, Cannabis sativa
aattaagttaaaatgatgatacatctaatttttttatttaaattagaatagtagttgtattttattttataacatatttcgaaattttaatttaactttaataatagagattattattttttaaattaattttttaaatgaattccgtacaaaaaaatctatttaaataaattggagaacataaatttatggttctcttattctaaaagaataataatattatatataaattttgaaataagaaagaataataatattcataaatataaaattatttaggctaatttggatttttgtatcctaaactttgacatgtaccaaatcatgcctactgaacttttcaggtcgttaaatttttttttctgaactattgagattattagatttaaggacttttgtccaattttactaaaaaaattccggtgcgtataaaaatttaaggggcacaatttggtacatgttaaaatttaaagtttggagtgcatgatttagtacatgaaaatcgtcacattagaaaattgaatgaaactagacagaagtctttaaacttaacaatttcagtaattcagagagaatttttaatgacttaacaaattgaggggataaaaatcctaattaattaaacaattatttaacctgttagttgttactttttttaatagactgttagttgtaatttataaatattaattagttgggataagtatatataatgttagacaatttttttgttagttttctttagggttaaatattaattaagccttggttaaacattgattgtgcgtgggcaccaatctaagagacgtatttgataggcgatttgcgtacaggatttaaatatgtgtgaatatcctacacgtgtaatctttcttcgaacgagatagttataaaaatacacatattatcttaaaatattaaatttttttattttctttatcatccacataaaatttaacacattttcttttaaacagcttaaaaaattgctcactatggtcccacgtaattaaattttataattatatatattatctcaaaaaaaattgattattgacaaagtaacttttttcaaaaaaaaaaaagagtaaataatgtcacatagggcgctatagcttattttggacaataatgttgctaaagttggtttgaaatgttgaccaaatgcacatgtggcaaagactagaggtgcacattgggtggatttggtcgggtt

SEQ ID NO: 6172 - DNA, 823 bp, Cannabis sativa
aataataataaattagaaaagaaaggtttatcctatctgttagtacagagtacagagtgcaaaaggaagaagaaccaagctcagctccaacgtcccatatccatggccacagctattctatctctctcttcaacttcacctcttaccagaccaaccccttcttctccattcaaggtactctctgtttcctgtctctgttgtaacctttcatggcttcaaaatctgatcttttgtttatcgtgttacagggaaatgttgggaatttgaagtcaaacccatctcaaattcagtttctcagactcaaactagacaatttccggagagagagaaaacaactggtggttgtgaataaggcagcagctcggacccaagccctgatttcatcggagaacaatgttcggttccgactcgataatttgggtcctcaacctggttcgaggaagaaaggaaagagaaaaggaaggggtatagctgctggacaaggaaacagctgtgggtttggtatgaggggtcagaaatctcgctctggtccgggaattcggcgaggctttgagggtggtcaaatgcccctttatcgtcgaatccctaaattgagaggaattgctggaggtatagctttacttctattttctaatgtttaattgatttgggcaattgtagaattgaattgaattatatactgttgttgttgtgtatgtgttttcatcagttcattcttgagaataggaaagttaaaggttggagctttagtcaaattgatagtgtttgagtttgaatagttgttatcccctttgtgttattattttaaagactctgcattata

SEQ ID NO: 6173 - DNA, 915 bp, Cannabis sativa
tttttttttatgctgtctctatgtttcaggttctatacttcaaaacaacgaaacactttttgggttatggtcgtcgtcttttccgaatggccccgattcatcaccatctcgaactatgtgggatcaaagaaccgttaattgtggccggtgcctacgttatatcatcctcgttggcgttgtttgccgggtatttgggccttatttctgcctaggatttttagatctttgcctaccacacctttgtagttagttaatttgagccacacaaagaaaaagagaaaagaaaaaaaagtttagttaggaatacgtttcaatttcagtcatttaaatttctaaggtgagcaatcaattgttatacattatatgccaattttgagatgaaaataagtgaatatacaaatgtcacatataatatcttgacattgaataagtgtgttaaacaatcaaatgaaatctgtttaaaaaaaaaaaatcaaaatcaaaataaaacattatcatttatattctcacgaaatatactctgtttcacagtaaataatttaattaaaaccaccttcaaagccaaaaaaaaaaaaaaaaaaactcatctgaaaaaattccctagcaattgtatatgttctcaagaacaaactttattgtaattaatttctgctaaaatatgagagtgagtataaattcagcaagaggatgaactataacaataattttcttaaattaataggagaaagttgaaaagaatccataggagaaactataaattttatttttatatgaattatgagtttgattttggtgttattcatggaatataaatatatatatattttaatttaatgttttatgaaagttgtgtaatttaggttcaatccttgatagaattgtagatatataaaagtcgaaatttttacatgacat

SEQ ID NO: 6174 - DNA, 1219 bp, Cannabis sativa
aacactgagctttgactaaatctcaaggcttccaatactctttgcacttcttgaccttccatgccacaattgttgacttagattcattatatttaaaaggatagtggcagtgaaagaaaaattcaaggaattcatgccatattaacgagatttcatcacaaataaccttattggatgcaaaaatagtacttcaagatctattacgtgtataaagccttttgatcttcatggtgtgagaaataagacaaggattctctacaataatactgtgtagaataattgaaaaggatgcatgtaacacaacttgttagtgtgtttaaaataatcgcaccaacgccatatatgctacctaattattaacatataataatacgttttaaaagaaaaaaaaaaacaaaaaataatatttttagaacgcatttcacaaaataaaataaaagaaaacttacataaatgtataattaataggatttatataaataatggtaaatttaaagtacatactttgaaaatgttattttggtatatctcttatttttgtttcgatattcactagaatttttggttattttttatgatgatgtacgttgtatttatatattttttagaaagttctcattcatactgctaaaaataagattcatttattttgttacacgtgtgattgttttttcttatgcgtgtggtaaataattgtcttaaatttattttcaatactttaaattgtttggaatttttttaaaaattttaagtggacttcaataaatatcacacgtacgattatgaaaaaatatagaataaaatattttcttgaatgaaacgcatataagtggtctactagaaataatatttatataactatatatatgcatgtttataaaatattcttcaatttattaaaacaaatattactttaactactaattatatttatattattgattatacaggtggcagaacagttgatgactttacatgaagaatgttctcataaatagttatgtgggacaatatcaatcattaatagattattaggataaatttaaaagctagagaaaattaatttatgttatttttttatgaacagaatattaattattattaaaaacaatctaattattctctccgaattttatgcattattcaaagatagacaaatatatattacttattccatgtcagtttattaatattcttatgataccatcaaatcattttg

SEQ ID NO: 6175 - DNA, 628 bp, Cannabis sativa
ttttttttttttttttttaatcctcaacacaagaaaagctttcctactaccgcagcagtcacctgcggcggaggctcgagcatcttgccgacggtccgttctttgatagtcacaggcggagccaaagttttgatttattttgtgtttgttcttaagatttttttggatcaaatgagaatttgtgaattttagtttgtattttctgattagttttaggatttcaattttccttttattttattttaatgttggaatctgccaaaaatttcttcatttttgtattttttttactgctctgaaactaaccttgctgttgaaatataatattgatatttgtatttttcttgctattgaaatataatgggcggagtggcggtggaagacatttgggcggagtttccgctgccggcttcgggatcgatgttgtttgtgggagctttgagatcgatgcagttggtgaagttttgtcattaagtggtccatttttggaaactatttttccatttggagaatctgagattgggcttagcgtttttaaatatggatgaatgagattgaagaagaagagatccagtttgaggttgtaggtggtctccattgaggttttttttggtaattaaagtgtact

SEQ ID NO: 6176 - DNA, 697 bp, Cannabis sativa
acccaacaacaactccttcacggctcacttaacgcctttagcttgctgcttgaaaaattggcataccttgtaagatgactttgtcatgatattggcaaggttatattccatgtgtacttgatcttgacttacgtggacatgccacgtcaggtggaaaaattttgggataacacgcgctaataattaatcaatacatggacaatgccaacaaaatatttaatgtccaaggaacttccgaaacatcccaaagaaaaatacaattagggcaagcttagttaatgtaccaggatacaatctcaaatccgaattggggtaacatacctctgtagctcccaagcagttaaaggcttgagggtaaatgttatctgtgattctggattggtgacacagggaccatctcagaggcccatcacagatgtagggctcattacccactccatagaatataagccatcagtctagttgctgagaataggaaaatttggagagttggtctggttctaacatcactctttagtgatgaatctagacaacaagtctcacatagagacttcacacttaaaggacaaacaacatctatatccaagaaggatgtcctcatgtactactacaaaaaagtgtgttttcgtctgtcaatgctcaaaaccaacgtaaaataaaccatagtaaaaaattttcgtcagtttggaactgacaa

SEQ ID NO: 6177 - DNA, 1798 bp, Cannabis sativa
ctcttccatagtacagtaaatctataatgctagccaaaaaatttaattacggttatgtatgtatatatatagttttacataaaagttttcatatatataggtacaattatgaagatttttttttatgatttttcttaattaataaattcatttgtatattataaagctaataaaaaattaaaaatgagagaattaaggagagaatagaaaaggctatttagaatgatttgagagtgcacgacctcatacttctcctttatatacactacaagaattttccatattaccggcggagacatctgcaggtattaattacataaactgctggtattaattattacgggcagaatctgccggtaattatccaccagtattaatttgtcgctaataatgagtattaccggccaaaacagactttcgccggtaataatactaataccagcagattaacagcggtagagtccgccggtattactatctgcgcttttacacgctgacacattaataccggcggaccacatttagtgtcccgccggtattaatattttttatatataaaaaaagattttattatttttaatatttatataataaaaataattttaattatatataataattattttataaatatattattaattaaaatttaaatttaagaaaccaaatattaatattaatttgtccataacaatatacactattatcttaaataaaattataaaattgccttaaaataaactttaaaacataaaaatttacataaattatcaatgttcacatcagtaaatttcataataatctacattcgagctaactctaaaagcctcgacaaagtatataatatttataactttttttaaaatatatatataatatttataactttaaaacatgtataattattttatgaacaggtgagtaggtaattcaactcaagccatgtgattattatcttatgctaattgttaactatattatattcatccattttaatatcatttgttctaaatttaacacaacatataatattgtatacaatattgtgttatatttagttcacaataaattttattttttatttattataatgctaataattattataattcatttacttttatataattttaactttttttatttactatattatcattatttaaatattaaaaatataaaaaataataatcttttatattttcaataaaataataaataatgatcaataataactaatattttttttacttattttacattttgtgccttagaatacattataaataatggatcaaatatatagcataaatttactttagcacaaatttaacatctagcattagaaattttcaaacaaaaataattaaattattatataaacatatgggacaatgtagaagatttctttttaatatgtaatataggaaaagcccattaaataaataattcaaaaaatgaaaaagaaaaagaaaagtagagaaattgacacatgatcataatcaaatcccgtggttccaaatttgaataaaaaatgcaaacaaaaaataaataaataaaataagttcaagcctttcggaaaaaataaatagaaaataagcaatgtcaacattcaacagtcaacccttttgaaaataaggagtactctagcttgcttgttagttcagttgtttttcttctccaagttttttttttcttgaaacaacaaccaaaattagtcatacgtacacacagacacacacaataaagaaagaaactataactaataattcctctaaacacaataccattttcactt

SEQ ID NO: 6178 - DNA, 1307 bp, Cannabis sativa
aaacaaatcaaacctcttgtcctgacaaaaaataaaaacaaatcaaacctattgaaattgcaaatagaaaggaaaaaaaaaaaaaaaggagaattttatttccaactgactaagtctcaaacaaaagaaacaaaatgtccaatacacttcatttgtcttacaatttatttttcttttttcatggaaattgtacgtatagaatcattgtgtaataataataatagtaataataggatcatatttatggttggaaagaagtaagattcctagctagaataccctcaaaagtaatgcctggtccaaaagccagaaccaaaccccattcattctgctcttcctgggcaaggccaaggccatggccatggccagagccaccctgctgcttcttcttcatcatcatcatcatctttgagctctcttcaatcatatactccaaaacatacacaatagtattactactggcattcccataatccatcaaagcccttctacttgcaaccaatttctccggcaccaaatcaagccgtttctctatcctattcagtatagccggtcctccaggatgaacagcccaaaacatcttattatagtactctttatcaaatccaaccacttccattaatttctcacaaaacccttcaacattatcttcgatcacttggggaagctccctatcgagcttgaagctgatcccctcttcagtcaatcttccatcaatggctttgtcagttccaggtaagaattcctgtgcagccgcatgaagctcgaacagaggcttctctatacccaagtcagggtccgacccgataatcatggctccagcaccatctccgaacagagcaacgccaaccaaatcgtacggcctatctgggctgggaggtttgtagccaataattgtggtttccgaagtggcgagaagaacacggctacctgggttgttctcggcaatgtctttagcgacccggagaccggcaacgcctccggagcagccggcaaagttgagcatgagtctctgggtgtgtcggttgaggccgagtccggcggctaagtagaggtcgccaccggggagtctgacttcgctggatgagacgtagaccaagtgggttatgtgggaaattggtcgaccccattggttgatgcaggattgggaagcttctatggccatctctgttacggcgtcgttgcaaatgtcgagcctttgtttgacggtgggttttccttcgagagcaagctctgggtattttcttaggatctcctccgacattactacgtacctggttttcactgtcgttgttttgcctgtaaaa

SEQ ID NO: 6179 - DNA, 654 bp, Cannabis sativa
cctaaagactgacttaaccagaagaaggggcctggacaaacagtatgtcccaccagctatccagccatgtatctacatccaggatccagttcaaagagatcctaacgtcacacatgtcagtcaaaaggctaaagcagttcatctatttgtgcaagcacaattggaccaacttggtacaaggcttgaccggccaaaaaatcactgatctcgaacttgactgggcacgcagatcacccttcttccctaaaattgaagtccttgaactacccgcaaagttcaagatgctaacctggaagatgtatatggggaaatatgatcccttatcacatctgaaatatttcaaaatgcagatggatctgcaaagggtacgaggtgatgttcgatgtagaatattccctgctacacttgtagaagccacccagtagtggtactttaggctgcctctagggaggtttaattcgtggaatgctttctctcaaaattccacgcatagttttcttcctcttgtcaactcccctcgcatctagaagacctggtcgaggtaaaatagatgctaggggaagctctcagagcttatctaagtagatctatgatagaggctaccaaagttaaggggttaaccaaaaaaggaaggctagcagccatactgggggg

SEQ ID NO: 6180 - DNA, 866 bp, Cannabis sativa
tttataatcattaattaaatattaaaaaattaatatttcctacttttccacttctttgtttgatttttttttaattctctctaccttcctaaaataaatgaaattattaatagaaaaaaaaaattatttatggaattattgttaaggaagttaaacatagttaaaaaaaactaacaaactatttttttaataaaaactattttaaagattaaaaattaagaaaatgtatatttatctttttatataaaattttcattttatttttccctactgcttattatgtttgtcatatttacacgttaatagatattagtatatatttttccaattcatctttgcgtactgcttgttatgtttctgatttctaatttatctttacctattgatttttccaaaaatctttgcctactaatttttccaataataacataagtttgtgtctcctaataataaaaaacacattaatatacatgtaagtttattagtttacaatgataaattaaaatttttgacttcataatttaataaaataataagttagtatttttaattagtttttaaaaataatttataattttttcatattattggttgtaattattatttctaattttataaaagataaatataattttttttaaaaaaaaaatattgttggtaacatgttataaaaggttattaaattattatattaataatttttttttagtatccattaagggttccatatatatattttaagaaaactgatatatagttgaatatatgaaacaatatcaaattcaaactaattgatttttttcgaaagatttgccatacatatacgcaattgttaatataagtatatttattagctctcactacaa

SEQ ID NO: 6181 - DNA, 1948 bp, Cannabis sativa
aagtccctttctattgcaattcagttagttctgctctgttatgctttacgatgatatgaaattattcactttatacagattttggatttgtatcctttcctcctcagtaaacatctgctttagttcatttctcattggagtgtgaatttttttttctgccattactgaattttcagatggttttaatccctctttttctatgttcatgagctaattgtatatacttgagtttgtaggagaaccagtggccctgttagacgagctaagggtggttggactccacaggaggtttttattattctctttacttgttcatttgaatttgcttaaggacttccatgtttatgtctataggtgactaattgaagactagcttatcgagcagaacgtttcatacttaccttttgttacatgttcaattggcaacaggatgaaacattaaggagtgctgttgcagcatttaatgggaagagttggaagaaaataggtttttttattattattattatttttattttcgttttattcttaaaaattagtgttttagttttcaggacacggtttgaaatatgacttttaatgtacgaccatgtatggaaataaatctgatattattaagtcaaaacaatgtttgccaagatatacattaataatcctacttatgttatattgaaatagttgcactagaagtttattgtgtagagctgtagtgcagacaccgagtatcaagcttcgacgagcagttgccaacatataacttaaaggaagaaaaatacttgggctttttagttaaattacttcaatatttgtcatttcttgaattaccttatacttaaaaactgatatatttgaatgtcaagaatttttattcaaccatgtcattcaagtcaaagctagctgcagatcacatagaagagagagtggcagacatattatacttgcattgcagatggaaatttctaggattttttgataccctgaacctctttggttacactctgattgcattaatgcagcttgttgatatttggacatttttatgcagccgagttttttaatgatagatcagaagtgcaatgtttgcacagatggcagaaggtccttaatcctgatcttgtcaaaggtccttggactccagaggttgctacctgataatgctcttactctcctgttcatgttgttcatcatgcaagaatattaattacgagatatcatttttttggttgtaggaggataaaaaaattactgaacttgtcagtaaatatggggcgacaaaatggtcattgatagccaagtctttgcctggtcgtattggaaaacaatgccgggagaggtagacactccttagaagttgttacttttcccattacttctgtttcttagttcggtgatgtttttctagtgttatcaacttgggatttatgtacttatgtaataatgctttatgttatgatttcttgctatcatagatttgttcactgttgttctgatggtttcattttttattgtattgaatagcttatttatcttaaaagctctttttctgatgcatcaggtggcacaatcatttgaatccggaaattagaaaagatgcatggacaatagctgaggaattatctctcatgcatgcccatcagatacatgggaacaagtgggctgaaatagctaaggttttacctggaaggtaattattgtttgatctaggtgtttcattaaggcaatatctcaattgtgagggctgaaatagctaaggtttcacctggaaggtaattattgtctgatctaggtgtttcattaaggcaaatatctcaattgtgaggactgaaatagctaaggtttcacctggaaggtaattattgtttgatctaggtgtttcattaaagtttcacctggaaggtaattgtgagaactaccaagtaaggtgttgtgattctcttgatcttgtata

SEQ ID NO: 6182 - DNA, 719 bp, Cannabis sativa
atattaaaaatagggacgatggatcctactaataaagacaaaatgatattcttaaaatttttcataatatatatagggcaattatagtaaaagtattatttttgtccctacaagtaagaacatatgcttttagtattaagaaaaaattataatttataattatatatataatagagtctatgttatagttttaactcttttattatattattcattaacataaaaattggtaaatggtatataatttgtatccatttactaactacaattcatcactttacttatttcatcatgttaaaatcgaataaaatgtaataaaaagattacgttactgtaaaatttatatttcaaaaaatattattaataaattatatactataaaaggcacaacttactagtataaaaaattgaggaagcaaaaatactaataattaaaaaataaataagtagtgtgtaacttaatttgaatcttgggttttttttttttttttgacaaataacaaatttttcattaaaaaaaatcaagagtgtttagtatatcgtaagaaatgaaatttttttcatctagactagtttactatccactctaagtgcgtgtacaattaactcatacgcagttaaattaaccgaacgacatacataaatgagagacgccttaaaaaaactgaacaagagactaaaaatagtgaattgctaaaaggtatcattgtgcataacac

SEQ ID NO: 6183 - DNA, 520 bp, Cannabis sativa
agctagctagtagttttagagagagctttgcttatatcccaaaatattaaaaaggtggggatgagttgtagttgtagctgtagttgtggttctcattattaaaaattgaatcataaataactactactagtagtggtacaatagtaccatagatagactagtttctaacctctaccactttttctaacttaccttgtaaggctttatatgtattccaatccaaatctctattacaatattccataattttcatatatataatatctatggtccccggttgttatactaactgaaacaaaaaatgagaaaaaaagaaaggttcttctcaacggctatagcaatttgattgtgatgttgactaaccatttgaaaaaatggtagagggagatccatgagaattaatgtctttattttcaagtttgttaattgttgtgattctactttaaagctattgaagctccacttttcgatttatcatgtagtgtgtgtacacaaattttcttttggaaaggtaaaataa

SEQ ID NO: 6184 - DNA, 636 bp, Cannabis sativa
gtgcatagtagagaataacatcatgcggttttggattggtaccatgacgttctttgttcctttccatccaaatactccaaagaatggttgcaaattgctcaattctaactgatgaccaagtaggggacaaatgaagtagaaaactcttttagattcatgttttgcgtaagtagctcttggatggcgaaatcagtggacaaccacacttttttagctctttcgcaaaagaataaagcatgtgtaaccatttctatacctctgctgcataaagaacagttagtcgaatctaatatatgccaagtatggagtgtgttagcaacagggggataatcgtggatagcacgctataagaaaatacaaaatttagatggaattttcaaagcccagaattttttccaccacagttgtgattgcagatcactgacagtgggttgatgttcttcaagtgttgttgctaaattataacttgatttgactgagtaaagaccattcgattcatgatgccatatcaacttgtcttgttgttcaaagagagttaaaggtataccttggatttttatgacatctaaattcagaaaaagggtctgtagcaattcatgatcccattgcctattgtccagaataagatctgagact

SEQ ID NO: 6185 - DNA, 603 bp, Cannabis sativa
aatcaaaccttaattctaagctaaatatccattaaaaacagttcctaaattagccaatatatcccagacccaaaatcatcaaacatccttataaaacttaactttgagccattaaaattacaaagaagatgaagaaaacttacccccctaattctaggcttgactacaagcaagaatttggatagaaaagatgatgaagaacttgggttttcttctattatttgactttaagaaatttcctacagcttctactatctaacttatctaaccaaattaggaactcaaataaaacaaaacacgaaaaaacaaaattcatttatttaaaatttggcaaattaccattttccctcacaacaagcacaacattaaactaagtcctatgtgtaattcggtcattaataaataacctgcttaaccccataatttccaaccattacatatatctcctgataccactaaaatacatactaataccgttgtaatatttctcgccaattaatcgaatttctaatgttgtcggacttgaaaatattttaattcacatatagcatatacattaatctctgtaaaataagcttatttctcatatttaacctagtaaaa

SEQ ID NO: 6186 - DNA, 1638 bp, Cannabis sativa
atcaatcaatataaattcataatagcacttagctacaatttaatttaaagattaattatatatttgaaattttataatgaaaatattattttagacactcttgcaatatcgtcaaacaagttacttataaattgtatagtacctcatccaaaagaactttcgtgacgttgaataagtaacatgtaattttttgcagttagagaattctctttctctatctctttgtgtatctctttatctctctaattacaactcacatctctaactaacatgatcctaaaaatataaatatataaaactagtaataccaactaactaacattaacagaaaaaaccaaataagggaaacaagaaataaaacagttacatccacaactaacacactgaaatcaattatggtagcatgaacatgtggcaaagttggctaagagaatgagctgactcaataatttcaacctcagatcaaattttcatgcaagttctggcacgttgtttcttacattgtcccatcattccttctgaacatggcatttctaattccatctattggacaagctcagacattaccaaatatcactttgccatatttttggactctcaggtctcttatctaagttttattgtttgccatgttgaaggtgatcctgaatcaatgatccactcattcttatgaggcacttcatttgtgaccaatggttctgttgcagactgtcccatgaacacctctccatcttcacaatgctctccataattggctgttgtttcttgttctttattgttttgattgtcaattctttgccctccaggccttccctttagttcataacaatattttttttatgtgacatattttatcatagtgatatcatttacaaatggttctagctaggacccctagattgagaccttcctctttccttgacgctctaacttcttcctcttcttttgggtggatgatgtcccttgtgttgatctcttcctctcgagtactaagcctctgagttgcttcttgaaacctttcctcactgttttagggacatgtccttcgagtaaatggcacttataatatcttcaagaattaatgtgtccttcgaggtgatgatagtgtctttaaactggtcatattgagctagtaaggaattctacaagtaaatttccttgtattcttcctcgatcttcacttcaagctgtcaagaacaattgtgtaatggtgaagtggtaaaaattgagattattctctctaagaaagattaactttaaaggttaactttatactgattaaaagaaatgaatgaagaagatcatcgcgaatttgaatatttgtatccattatatttagcttcattaaacaatggaaatcctaatggtattgatgctactatttattttattgaaccagaatttagtaacggagaggaagctttccaatactattattctttgtacaagaatgtgaatgcaaaaaaatgggtggaattgtgaagaggaagcgtgagtacgactataattatagttggaaacgtgaatgcaaaaaaatgggtggaattgtgaagaggtggcgtaaaagaagaagggcttataaacgtaacaacatctttaggggttggcgaaatcagggtttccaccggaaatgtgttg

SEQ ID NO: 6187 - DNA, 539 bp, Cannabis sativa
gagatgccctaaggaagatatatatttctttattatcattattttatagaaatataaatttagtgtatattttaataatgtttatttgatattttatattttatcaaaatataaacttactaccttaaatttgataactaaaattttataaatataattaaattatcccaaattatgtggatttttattcaattataattacaggtcgactctaaattaaaacaggtcaaaccgagaatctaaccagctcataggtcctaaaaaatctttaaaacatacataattttttagcattattattggacaaacaccttctaaatgtgtcactttgtaattaattagcgatacttcctaaaagttattatattaaactatatgagactcgatatttaatttcaccaatatcaatattgactcatagaatagtactacacactaacatctttttaacatttctgtatttatttttttagtaatttttaaaaatatcacatattattagaaaaagactcaataattattactttctcaataaaatt

SEQ ID NO: 6188 - DNA, 741 bp, Cannabis sativa
aaaatgaaccttaattcacttctagaagcattatctttattaccagcctcttatatactgtcttacagtgaagacgaaatttcggttgacgagtaatgtattatatttaatagacagtgaaagctgatataataccaaaaactttcttctggaaaagttcagaatattttggtatcactatctctgcaaaacaacatttatgtttttacaagtgtcctgtgtaaagtataattataatacagaaggaatgggtttctttgtattaactttccttactgatgaatcaattcaacactttaattttggtgcatcatgcattatgatatactattttcattcatgggactaccagcccatgttaagtccaacgccaactaccttctacctatgttggtgaccccactttttgttttttattaaaatgtctataaactaaccaattagaaaagaaaaaaaaaaaaaaatttactgcccagcagcagagccatggcccatgttccttatcattgaaaagtcaaaaaaaaattttggactcccaaattcatagcaacaccattggacttacaatcccatcagttgaccacatatagacatatttgtaaaagtaattaattaaattttttgtttgttaaataataatttaaattatgtatttttaaaaatggtacaaaatttaaattcaattattcttaatattttttttaagaaaagataacgaacctgaagttattttctagttgg

SEQ ID NO: 6189 - DNA, 1112 bp, Cannabis sativa
agaatttcagatcgtcacaagcactggctctcaggattccttgaagagacggggggaattgatcttagatttaaaggttgtaagttcacttggcagaacaatcgtttttcgggaggcttaatcagggaaaggttggatagaggtattggttcaatggattgggtagctaattttattgaagccggagtcatcaattttccaatatatatgtccgatcatgcaccaatactccttgactcttgtttgtttgcaaggagaagatttatcccttttagattttttgaggcatggaatcagatggaatcgtgtaaggaaattatcaagaatgcctggtctggaactgatgatatgcctattaaaaagctacttcgcaaccttgatcttacccgtagtgcacttcaaaagtggaagaagaataaggtaggagatattgatgactcaatctccaaccttgaatcaaaactctcctggattcaaagccagccgatcacagagactgaagtaagagaggaagtgttgattaaaaagcaattatcagaggcgtgggctctaaaggaaaatatgtggcgtcaaaagtctagagagctgtggctaagactaggggatcggaattcaagattttttcaagttgctgcttcagttcggagacgacgtaaccacatttgggaactccgtgatggaaatgggaagctttgggggaatcattttgcgattgctaacattgcaaatcagtattttgaaactctcttctcctcaggtaatcctgaaattccttctgagttaaacgaattgtttgagaaaaaggttgataatgttgcaaacgaccttttgatgacaactcccccgttggaggaaattaaggaaacggtattcagcctacaccctcttaaggctcctggtccggacggattctcggggtcgtttttccggtgtaattgggatattgttggttctggagttgtggctgcggtgcaaagcatttttcaaagaggagaacttaatcctaatttgaattattcctttatatgtctcattcccaaggtggctaatcctgaccgtatggagcaatttagaccaattagtttatgtaatttcacttacaaggtggtggc

SEQ ID NO: 6190 - DNA, 947 bp, Cannabis sativa
gcttggtgttccatctgaagcagtgtgagtatttattcaatttttatactcttcttggtatgtaattagtttcttccctgacatcagaaaaactatgattcttatcatagttaattaatagaattggcccacaaacattacagaaataaaatagtttttagtgattttttttttcatctaatttctgccttctgatatagacataactttagaactaagacttggaagagctggcctacaaaactacagaaaataatttagtttttttgtaataagattatgttatatattccaaaagaatgaaaacttaatgtttgaggaaacttaaatttgtatagttatgtcaaagaagaaatggatgaatttgctttacacttgctggtgctatctcatgtgtacgtaattcccaggctgaaacgagagtgtgaaaggcagatagagcatggtttaatgataatcaatatagaaaatgtggttgacatatttcaactaccattactttgtgtcgaccacaagctaacatgtttgaatatttttaaactcaagctaacatattttgggcaaatttgatgtaatcttaagtgttaattcaaataaaaaaaataaaaattaataagtatttatctaatggaatgttccacttagatttttctgtttttttttttttttttttaaaaaaaaatatgaatttgaattaaaggaatgcacgtgtatattaaataaatataaatatacatgtgtttcctatttaaaagttatttgaattttattcaaattattgttaatttttttttaagaagctgtatatttttagttatgcttataaatatcatcatgaattaaggaaacagttttaatttgaaaagcttttatacgcattctttatatctaggactctgaagcttcttggttattcttctcttgctctctctttctccctgtgcaag

SEQ ID NO: 6191 - DNA, 1080 bp, Cannabis sativa
ataataataataataatagagagtcacgtgtaatatcacgaaaacttaattatagtaagtaaatcatattttattaaatatggagtaatatgtgtattaaagggatatatgagtgttgactgggatttttggcaactaatggttagagatgtatgaaagatttaatggaagttaagagaaaagatttttaggtgattggggcattaatgagtcttagttcacgagtctttatatttatgagagtatttattacagagctttcacttggtcgattcccatttcattttatcattagagtatatataggctcataatagtggtgaaaagtcgttattgtcatacttgtttgcaccatacttgacacaattttctaaatccgactcaggcataattgcctactttgtgatgggttttaggttatctataggtgtttggtggaatgtgatttatcccttatttatgacttggcggctcattatgcagtcactgattgatgcctgggggctcgtacaattaatttgggatgatgggcttttacccttaaacacgttagtcagagtaaggcgtctgatattcttccccatgatgcatgaaatgtgtatacactattatactcctttagtgacatcatctttcactactcctctcgttccatcctccagttacatctcactcgcagaaaagatcaaacgagggatgcttgcggactagctgggtactcccggagatgactagtctttcattactttacttcgggggtaattagggtgatgtgtctcgtacccctgagtcctattgtcacatggcatactcctatactgccacctattttgggagaaatcctagacaacatttatcccaagtccttttttataatttttacaaaatgggacttgcgatgtgcctcctaaagcgatgacgtcacattacgcgtgcctattttaaatactactcattatttccctcattttttaggaaaccattttgattttagtcgattctaatgttattaattacgggatgttagagggactttcgagtggtgcaactgttcttttggttttgtccacatgctaaccg

SEQ ID NO: 6192 - DNA, 1326 bp, Cannabis sativa
tatcatacgccttttgaagatctaagttgatcatacaattggccttggttgatttcctcccatagtgccttatgagatcttgacaaatcataatattatgggcaataaaccttccttagatgaatcgaccttggtttgaggcaactaaatccggcataatacttttgagcctgctacaaatgagcttagtagcaaccttataaagtacattgcaacaaggaattgggcgatagtcacttaccaaatttgggcacttactcttgggaataagagtgaggactgtagagtttatttctttcagtaattggccagaatgatggaagtctaagattgcatcagcaacatcatctcccacaagctcccaattgtcttgataaaaatagctgctgtagccatctggacctggagctttgcctcctggaatgctaaaaattgcccgtttcacatcttcctttgtgtatttagctaacagtatatatgcatgtgtatcaataatggtggcaccgttctgcattattttggtagatacccgtgttctcccctccatgctagaacccagttggctttgataatagtcaagaaaagtttttgttataccattagaatcttccactcaaactccttctgcattaaccactgataagatcttgttctggttccttctttcttgaatactgaagtggaaaagagcagaattttcatctccatcctttatccaagccattctcgatttctggtgcaagaatgagcagtaatttttgtgtacatcagcatatatcttcctagaatcagcctcctgctcctgtaaaactttactcaatggatctttttggagtctagtttaacaatcgattagatcttgcctggctttaacatcagctgcttgaatgtcagaaaagtaacatctgtttagctctttgaatgcagatttaagagcttttaacttggtaacagcctggtacatttttgtgccctgcacatgttgattccaaactgtcgagataatctactgaaagttaggatgggaagaccacatcctaaaatacttgaagagcttccttccactctccaaagaagggtgtatagaaaccactgcaggtgtgtgatcaaacaagccttctgtgagaaagatagcttctgcagttggcaataattccatccagggttcattagccaagactctatcgatcttggaataaattctatcatctgcattctgcttattactccacgtaaaaaaacttccctagtatttaatgtcttcaaggtgacaattagaaacacaatttgcaaaagcactcaaattaccatgccttactctttcac

SEQ ID NO: 6193 - DNA, 771 bp, Cannabis sativa
caaagcttagataatatacaatgaaaaacagacaatgatttgtatatgaaatacaataaatatatatattgatatacataatcttattgtaggaaacttctaccatggtagtcttctaaaaaaaattgactatcggtacaccttatagcagacagacaatctgtcgttttctataaaaaattctaacaccatttgcagttaattttcgtgaaagacactatttgcatagttaattttcgatgtcctaaattatttaaaatttctaaatattagtaggatatctataactaacaccatcatgtaaaacaattaggtttagaactatccaaatactaaaaacacaaagaatacaccagtaatctttttgtaggggactaaacaaaatatttctattattatataaatgatatgtatacagtcaagaagacaatgtagacctgaggaatatgataaacgttgtactgattagtgatcaattcctgacaagttatgataaatatagcttgttatgtctttttttttctatgattaacatatagaaagttatgtcataagacaactcttggaactaattttccgaaaaatttcttactatcaaagattaaaattggcacttattttaattattgttattaatatagagaacaccaattaaaaagtttttttaaaaaagccgttttcacataatatgcaataatttttttttttaaattttacaaaatcttattatcactaaaaacgggcaccttttcccccactttatcaaaatgt

SEQ ID NO: 6194 - DNA, 974 bp, Cannabis sativa
tgaactcatcaaattaattaaagtatatgagactatgtttatagtaatagcttagttgctcttttcttatggaatgttaattttatagtacatatagctagtacttagtccttaaatcatcaaagaaaatgacaatcaaacgaagaaaaaaacaagtagttacgtaattaaagagagaccacaccaaagtaaatataaaattgaaaggccaatttcattcaaataaatttaatttagtttctaactaattaaataataaatatctctttattagggcccaaacaaataatttgcagtatctttaaaatattaaattaacattttttggccgcataaataatgattatgctatctaaagctataacaaaaatggcatgtaatgtgtgaaagcttttttactatgttttacttttagttactttcgaaacattcacactgtaataagtatatttgattagaagagtatttttacagcattaataaaaaaggtttagaatgattacaaataaatttatatataaatatatataggataactttaatgacaatttgtagaagattaggtaataattaagcccagttggaagggttaatttatagttagttaagacttaaattggggtcaatatcactaacatacttaccatgtaagtaaagggtgtcccaagactggctagcaataagcaatctttactgcccaacttttctttctaagatttcttcaaaattttcaataatatttattttaaaacattaacattagtaaaaatataataatattaaaatcaacaataataatccttacaaaaaaaaaagaaaaaaaaattaacaataataaatacctcaagttacggcgcatatatgcaaactgacaaaatgtatatatataaatcttgttttcttctcttctcttctgttttgtttctattgttcacattattatatgactaattaacttttacttaattttttgc

SEQ ID NO: 6195 - DNA, 1825 bp, Cannabis sativa
gaaagtcgcgtctcggcatacttttcatcatttacctaatcaaactccccaccaccgtgatcactcctcttcctccgccattgtcacccccacggcttcaactgcaactcttcctcatcttgaccctcacgctcaccataatgccgccaaatacggtgttatggatgagatgatgaaacatcctgagcaacagcagcctgcgaagctagtccggatgtactcggctacgcagccgatggactacgctttaaaggaaactagtccttttctgggcggcggaagagttgtcggcggtcgcgtggttcgtggcggagacaagacctccagcacttacgatctagtcgagagaatgtattttctgtacgtgagagttgggaaggctcgtgagcttccggctatggacattacggggagtttagatccgtttgtcgaagtcaagatcggaaactataaagggataacgaaacattttgataagaaacaaaatccggaatggaatcaggttttcgcattctcgaaggacagaatgcaagcttcggtacttgaagttgtggtgaaagataaagatttagtcaaagacgatttcgttggtattgtgagatttgatattaacgaaatcccactccgagttcctcctgatagtcctttggctccggaatggtacagacttgaggataagaaaggggagaaaatcaaaggtgagcttatgttagctgtttggatcgggactcaagcagacgaatcattttctgacgcgtggcattccgatgctgctactcccattgattattcctcctcagccgtttcctccacgattcgttccaaagtctatcattccccaagactttggtacgttcgagtcaaggtaatcgaagctcacgatttgattccaactgaaaggaatcgctttcccgatgcttatgtaaaagtccaaatcggtcaccaagttctcaaaacgaagccgtttcaagctcggacacttaatgccctttggaatgaggatatgctgtttgtagcctcggagcccttcgaggaccatttggtaattacggttgaggaccgagtcggtccaggaaaggatgagattattgggagagtcatcttaccgttgaatgtcattgacagacgcgccgatgaccgtccgattcattctcggtggtttaatctcgagaaggcggttgctgttgatattgatcaactgaagagagagaaattctcgagccgaatccacctccgagtttgccttgacggcggttaccacgtgctcgacgagtcaactcactacagcagcgatcttcgtcccacggcgaaacagctgtggaagccaccgatcggagttttggaactcggtatcttgaacgcttcggggctccacccgatgaaaacccgagagggaagaggaacatcagatacctactgtgtagccaaatacggtcataaatggatcaggacccgaacattggtggatcatttaaatccgaaatacaacgaacagtacacgtgggaggtattcgacccggccaccgttctaactatcggagtcttcgacaacagccagatcagcaacgaaaaagacggacccaaaaaggatttgaaaataggtaaagtcaggatccgaatctctactcttgaaacgggtcggatctacacccattcgtacccgttactggtactacacccgactggggtcaagaaaatgggcgagctccacttagccatccgattctcttgcacaaatttcgttaacatgctttacgcctactcaaaaccgttactccccaaaatgcattacgtcagacccttcagcgttatgcagctcgactta

SEQ ID NO: 6196 - DNA, 710 bp, Cannabis sativa
gtgcatcaatgtgcatgttaactcacacaatatataacatttttctttttcaagtttctgtaatatatatgtatatatacatatataattagcatatgacactaataatcttcatcttttccaaggccatagctagtgggtgtgggtttatataaaatatcttagtttagtggctaagagttggccctttctgtgttctttaaaaatatgtggtacatacagatatttgtttgtcctttttctagtatattgtcacctttaaataaaaggcaaacaaacgtttttttttcttcactatattacaaaagagactgaataaaagggtttctaaacaaattttgaaggtatgtgtttagctataattagctagggcatggcatctattcatgtcaccaaagagccaagcattagaggccccagtagtttcatttcacaatttttccaattggatgtttatatcaccaatctcaagtcaagtccataaccaaaatccactttcatgcttcaagtgctcaaaaggcacattacaaataattagagtttaattaaagaaacttttcatgaatggccaattttttaattctttaaaattgtgaaatatcataaataggacaaaacatattattattggaaaatattattttttttttgaacatttttacctataacaaccagttttgcagcccgccggtttgtacaatatacttatg

SEQ ID NO: 6197 - DNA, 703 bp, Cannabis sativa
atttacagcactattcactactcagtagtaatcaataaatcataaaggtttgtaaaccaaaataccaaatatttactatttgtagcatttaaattcctaaagaaaaacactgaaaagtgtagcatttaaataaccaaatattgtggtttattatcataaatatataattatattaaagtgagtacatattaacatattgttaaagtaaatcttgagcactgatccttatattagcttgtatggaatactcttattaattcgatgtttagaaatgtagtatttatattaaaatataaaatgttatgtattgaatatgatcagtcttagtttctatttgtttcaattagaaattgagaatcatccaagcaagtctgcaagcaaaggtttccttctatttgggccaagtttgcaagcaaagtttttaaccttaagttcagtcactacataactaaaaaaaaaaaaaaaaaccttaagagtttttataagaaacttaaaatattaacaaaaaaattgcttcgactaacttatttacaatgacaatgtgccatgtgagcatagaaataccagattccaatatttgatactaaaatcttaagaaaaaagtagaacatcttgcttctcaattttttcttttattattatttttttggtaatataatactccgtgtgattggtttgagatttgaaaactgttttatgtttt

SEQ ID NO: 6198 - DNA, 1841 bp, Cannabis sativa
tgatgatttcaattttatgataacctcacttctaaattgcaaaggtggaaagcgaaatctctctcaaaggtagggagggccacccttatcaaatcaatgggtctctccctgtccatttatgccatgcaaactacaaagctatcaaatagattgggctcaagaattgatgaaatggttcgtgacttctggtggggttttgagaaaggcaatcatgggttgcacctgaaagcttggaataaattgtatctgcccaaatctcgtggaggtctgggcttttggaaaactagagagatgaacctagccttcttggctaaatggggttagaatttattaataggaagtcagtctctttgttgtaggattttagaagccaagtatttgaaagggaagggaatcctaaagtgccgatacaaggatttagattcttggttctggaaaaatgtgatcttaaggaaaagagcctgtgaagtggtgtcagacggtgaagatactagtatttgagaggatccttgggtggcccatgggaaggattttctcccaaaatctaatggatcctcaacttttggttttactaaagtagttgaactattagtagaagatggggattgggacacccaaaagttgaactgcctgtttgaaaaagataccatctctaccatcttgaaaagcggaagacctgctggtcatggagaggataaatgggtctggactaaagagagtagtgggcgtttctcttgcaaatcggtctatcttttgcaagctttgcatagggcccctcagtgtgaagttgctccgtcgttttggaataagctctggaatagtaaaattatggaacgccataaggtcctttggtggagcattaatgccctcccaattcaatctgttattcacaaaaagttttatattgatgatgtgagttaccctatttgttgggttgaggaagaatctatagaatatttgttcctcaagtgtgatttggctttccatctgtggcgatccttgctgtggggtattttccctgtttcaggtacatgtatccgcacgtgggacagtgtcaaatttatctgaaatctaaattctaaaggagtaaatgcggatgaggtctttttgtatgcttcgattgttgttgatactatttggagggtccgcaatgataagatacacaataataatctagataatgtaaagcgctgtatcgactatattcatcactcttttgcagattatagagcttccctccttcctactcctactccaattttggtggaagcctgtcgtcctccccctcatgattgtattaaactgaaatgtgatgtaaaagcgggtttgaaaagcatgagtattgtggtagtagctagaaaccatgaaggctaggtggcttgggtaagcaagacaaagttggacttttctgatgccctttgtggagaggtgactgcgtgttgtttggccctagacaaggctaaagaaaaaggatgcatgttcattattgtggagagcgactcaagggcagtgataaattctttcaatgggaaggagactcgatgggaagttgagaattactctttattttgtaatagtctttctccttattttgtgggtcgatcatgtaattttgttgtccataatatggcaaagtgggcctttaaccacaatcagtatgactgcttatttgtatcctttatctcagtaaacattttgtgtaataactgtgatgtctaacttttatctatgcacgaatcattttctttcaaaaaaccgactaaatcgaccaatgtacacaaccattagtacgagccaaaatttataacaaaaataaattccttctagaatttggaattcat

SEQ ID NO: 6199 - DNA, 843 bp, Cannabis sativa
atggtgaattctctcttaagagggtgtactgggatctccttggccccagagctcgtcaagataagatgtgtatgagactttggcgctctcctattcatgatcgccttaaacatttcatgtggaaatgtgctacaaactgcctccccttcagtgctagattgggcagtattttcggacatccgtgtggaaaatgctacctatgtaacactaataattcagaccatgcgactcactttttctccctatgctctgttacgaagcgactttgggggtcaggtaaatggcaactaatgatcgagaatgtccctcttcacttcggtgaggaggtgataaaatggatgcttgatcctgggaacttggtaggggcgtgcgaccccaggaacccaaaggtggaatttatgctctatgctgcagtgctgtaccataatctatggttcgtcaggaatgacatcttccacaaaaagacacaatggcgctttgaagaaatgaagaaaagggtggataccgactttaataaccattggaaatgccttgtgactgctaaggaggaatcccctctcgtcaatgctttgcctagggtaagtaggggagttccaagaagtggcagaattcgggtgaatgtcgatttcacgactgggaatggtgttggggcagttggagtggtggtgagggatgatggaggcaacatccttgccttattcgccactaaaacgagctatgactcagttatcgagggggagctttgggcggtcttctggggagtgaatgcacttttgaagatggaagttcctactgcggatttgttctcggactgtcaggtgttggttttggctcttaaggggg

SEQ ID NO: 6200 - DNA, 1700 bp, Cannabis sativa
tcgactgaggggctaatacaattcaacaaagtcagcctaaaaattctaatatgagacactgtgatcttgctgtgattgtgcaagatacatatcgggattgagaaaaagttaaagctccttttagatttctcgatgcatggactcgtgacccaggatacttgaaagtggtggaggaactgtaggggcaaacagttttagggtaccacaattttatcctatgtactaaactaaagttgattgcctatgcacttaagaagtggaatttagagtgcataggttgttagaaaaaatccttgtggaggttcaaattagaccccctctcagtcatatttggagcttgaaagctccttgatgctagagatttatgagattgaaataagacgagaatctatatgaaaacaaaagtcaagggaattgtggcataaggagggtgattgtaattccaggtttttccatgcctcaatagttgtaagacgcaaaagaaatttcatatgagtggtgattgatgatgaagttaattggattgaaggtcagaatcttatttaggcgagtttttgaatcacccaatccaactatagattcagagttctttgggttaagtcaaccttgtatttctcgggaagataatgaattactagggactgttccttcgttggaagagattaggaaggtggtttggtcgcttctccctctcaaagtacatggttcagatggtttccaagttaaattctacaaatattattggtgtgagttggggagtcaagtgtgcgcttttgtcacataattcttccgcgctggcaagtttgttaaagaggtaaatagaacatttttggtgcttatccctaaaatatcaggagccaaatgtttcaacaactactggcctattagcttgtgcaatgtgagctataagatcattgcaaagctacttgctaataggttgtgtaaggtacttgacaaacttatttctcctcgctaattggcttttgtcaaagggaggtgaattgcaaaaaactccattattgctcattaaattatccacaactttaagaggaaacaaggaagggtggcctttgttagcctcaaatgtgatatgtctaaggcgtatgactgtcttgaatggtgctttttagggaaagctttggatggctttgggtttgatgctcagttttgagggttaatcaaacattgtgctatcactgtgagtttttaggttcttttaaatggcgggccaacaaaaacattttatctaggtcgggggttgagatagggagaccctctctcactgtacttatttattttatgctcggagttcctatctcatatgttgagtttgaaagaaaatcaagggaaaattagcagcatcaaactgaaatgggccatctattactcacctaatgtatgctgatgatacatttatctttgttagtgcttattgtttaaaaaatttgttatgttttatgtgttagtatgctttcattcaggaagagtattttctatgctcttttgttttgtttctaaacttcatgcaaatttttatcttataaaatattttgtcaatcaaaatgtcaaatggagagattgttaattctatttttggcatctttagattgacaaaaatattttataatttgttttttaatttcagctgagttgtattatttatttccatatatttatatttgattgattgatttatataa

SEQ ID NO: 6201 - DNA, 1707 bp, Cannabis sativa
tacttaataatccccattatcaataggcggagaaaaacgagcttcgcgaagaaaaactcgtactaaaatcagataaagaaaagatggagctgcaattgaaatccatggcaatgccacattctggatatatgcaggctcatccagctgctgctgcatatcaaaataagatggcggtttttccaggctatagtctagttccaatgtggaactatttaccaccggctactcgtgatacatctcgtgatcacgagctgaggcccccggccgcttagtttctcaacttcaaacactccaacaaggtctttgttttttacattacctttcttgtcttaacaatttatctcaacttttattgtgttcttctcaagacatgtaaatatcactactgtctcaatttgcctcatattttttttaatcaattcaatggggtggcaaatttagtgaaaatggctaggaatgtaatgatgatgacatgggattttctaataaattgttgttgttgttgttgttcttatccactcttttgccatttttcatgcatttatttcatcttttgttttaagcttagtgacctaaacaatagtatatatatttatataaattaagtacacttgtaaatttgggattattttttttctccttgtagaaccttacaagatgagactgaattgaataataatttatacttttagaagctattaatattgtttgttattggttattaggtcatttattttttaaaaaataatttgttatattatgcttttgtgaattagaaagccataatttgaatgtgaaaaataatatttggcccacacactaacacaataaacaatggtttgtcttcatcacaaaagttcaagggtaaattacaatacccaccccaaaataaaaaattaaaaatattttttaaataaaataattgtaatataagtacttaaagttgagtttataaccaatataaacttaataatttttttagtaacataaaataagtatttaatgttggtaaaattataatttttatctaattttatcgttacggattctgttagtattttaaagaggatatatgtaagacttaaattctaaattagtgattttggctaaatatatgtattattaattatttataaaaactaagtctggttacaaatttaagacactaaagaagtttgtaatgacaaaatcggattaaaattataattttactaatatttgatacttatgtcttataaattttaaaattttaagtctatgctacttataaacttttaaattttaagtagttatgcgactgtttattcattttagttttaaatatgcagtttgtaaaaataatatagtcccttctttcttcttcttcaatggccaaccatctcttactcactcaactctgtctttctttcactactactgacaatatcgacatatgctggccaaatgtgtttgttggttgtttaaaccctaatctctagtttcgtactcatcatcgtcggttgttgtgggcgaaaaatattatgtttcgctcatattttttacataagctaacactatgtttggtgagaaagacggaaagagggattgacaaactagaaagggaagagaggaagaatgaaagaaaagaaagtaaccatctcttattttgttgagtgtattgcgaggaagagaatgtatagatctattttttatgtttggttttttttt

SEQ ID NO: 6202 - DNA, 2115 bp, Cannabis sativa
aaaggtttttaggttttttaagtttggtagcagaaaaacaaatttaaaattataatttgggcctttttttttggggctcaaaaagcccatttcactttcaaaatttgaggcttacgcctcttacgcctcaacacctcatgcctcaattcagcgcctcacccattaaggcgtacgcctctcttctccttagcaaggcgcacgccttggtacaatctttaaacgcctcaacttgaggcgcgcctcaaaaacgcctttttaaacattgagatattctttctattttgttacatgaaccaaaacaacagatgctagttcagagcatgaaactcgagggaacaatttggaatgaccataagaaatggtatatagaagaataaattcttgagtaaaaaggactcatgtttataatatactgttttagagcatgcttatggaataatatcacgaatcacaccaattgaagctaaatgcccatgttccattccctatgtagtcatgtccacgcacgaatatgaaaaacaaatatgctgaatttccaagaagaattattggagtttgaccacttaataaactctcctaaaatcattatttttcctttatcaaaaaacccaacaacacccaaactctgtgcaatgatagtgaagcagaaaaaaataccaaccctaaagtgaacagtgagctcgctatagtgagcttctgtgcttgttctctcccgccatgaacattccacccacagagttgaggcatttacttttgcaataataagttgtagaaaataagttggattttgtcatcaatactcaagccatattcctcatattcttttcttgaacggtgtaaccgacatcgcttccaagggtatctctctcaaggcgaaacctcaaaacatcagacaattatggggtttcttgggacttacaagttattaccgtaaatttgtgaaagattacagtgagatggcttagcctttgacaaagcattcaaagaaagacgaatttggatggaatgacgtagctacttttgtgtttgaagctcataatcaagctatgactatggttcctatgcttactcttcttgattttgaaaggccatttgcgatggtaacacgtgcatcttggtatggtatgggggctgtgttgatgcaagagcaaaggcctatggctttttacgcacaagttagactgaagccgatctatgaaaaagaattaatggctatagtttttgttacttagaaatggtggccttattagggaggagatttgtggtgcgtacggataacaaaagtttaaaatttctataggagcagaacgtattatcactttggagtactagaggtggatggttaaattgatggggtgcaattttgaaattcagtacaaaccaggggctggaaacagagtggcagatgcgttatcacgggtcaattaaccttggaactaaaaaatttgctagtgtcccaaggaattgattggagtgttgtgcaacaagaaatcgaacaagatgtctctctctaatattgtttctgctttgcaaaaaggactcaacgggcagtaggttacacactagatcatggatagttgttattgttaggcgaagataaaacattcaagagaattgaatctgatttttattgggtgggcatgagaaaaatggtggaggattgggtgcgagagtgtgatgtttgttaaagaaataagtttctgactatgtccctagtaagttgctacaacctataggccttgcaaacattggtttgggaagatttgactatggacttcattgagggtcttcctaggtctcaagggatggatatcatcttagtggttgttgataagttaagtataggtctcaagggatggataccatcttagtggttgttgataagttaagtatgttcatttcattcctttaaaacatccttttactgctcgttcagtggttgaagttttcttgaaggaagtggttcgacttcatgggattccatgatcaatcatctccgatagggacaaggttttcatgagccatttttggctggagcttttcaagctccaaggaacagagctccgtcatagtaccgcttatcaccctcagacgtgaaaagccacgatcttgggg

SEQ ID NO: 6203 - DNA, 1204 bp, Cannabis sativa
agaatagtcatcttattatatgaacttttaataagtggtgatgagtttataatataaataagtaataaattaaatttgagtaaccctatacaaaggtagtattctacaattaagccaatttgataatcttgaaatgtatgtatgatatttttgcctaataggatttttgttcttaaatttttatggaaatgtacatgcggtcgaaaaattacgacaattcattgagatataatatgatgcaagtgaatatttgcgacaagaaatgaatcctaattttcggatgactgatccttttaatccaattcatatgatgtccttttcgagaactataggaaatgcatctcaagtacaccaattagtaggtatgaatcatgttttcaaactttttaagctgttaaatttttttctgaattattaatattgttagatttaagaatttttgtacatgttaaaattcaagagatataatttagtagatttaaaagttttgaggtacgattttgtaaatagataattgtcacattagtaaaattaaatagaattggataaaatttcttgaatcaaacaattttaatagttcaagtaaaaattttaacgggctaaaaagtttaaaaaatataatttagtacatgttaaaatttaaagataaaaattttaattagcttaatatttttttaatgttaattttaaaagaataaaagaaaacagataaaaagagaatgttgaagaaattgagataatatatacaacgcggtttgtggtttcttaaattggattttggtccctttcaaaaaaaaaaattagggtttgatccttttggatttggataatttagttttcaactctctttttgttatccatcacaatcaatattactaattttaacttcttctctttaactctttctattatttattattattagcaaaaacaaacaaagtgttataattaccaaccactacatttattaattaatttatcccattttacatgtatatcaatcaagtcccaaaatttataaaattggcttatgtgcaaccctagaaattatttgttttaccattttaagaattggaatatatgtcatatatatatattttcaaaaagaaaaagtataccagaaaatggaatcaaaatattttcccttttcttttaacaaagtttggaactaaaatgttttgtaagtaaggaattgaaatttgga

SEQ ID NO: 6204 - DNA, 1334 bp, Cannabis sativa
aaaaaattttaaaaaattttaatttatatcttttttttataattgtgtatgttgctgctatatatttaggattacttataaatttttaaaaagaaaataaatattttatagtgttaaacataaagttcaaatattttgttacacacatggcacaagaactattttttcttatatgcatgataaacaactatttaaattatatttttgagaaaattttctagtgattctaaataaatacaacgtatggatcataaaaaaataattaaaaggattttttttagatgtcaaaggtctacaataacactttttaaaaagatgtattacataaattttcaataatatatatttaatttactaaaaaaaatactagctatatgcataagtgaaattttttctttatggtgtttgtgttcaaaaatcatttgaacatttattaaatatcactatattttttataatggaggagggaatttgaatcaaattaaatcactatatttaaaaacgtacctatatatatatatagggttattctatagtaggtcctttagctttttcctcgtagcatagggtaataaattagaccaatcacaaactaaagaacataaactgtactgaaattatggtggagtgtctgtatcttatttatatatttaatactttttgtttttgatgtgatatatttaatactttaatcaattaaatatgcagtactatttagcacttgttttcattgagggaaattaatatctagaaattcatactatttcaataaaaagttgatgaagaaacaagaatctcataattaataaatttatataaatctcattcaaaaaaaaaaaaaattatataaatcttttattaaatacactaaaatctactcaattaaaatgcaccctacgtctatatttccattaaatataaaagcaatggccaaaaaaatttccctatgagtagagaatttatactaagttctactataagtttaccctatatatagggattatttatagtggggctcgggcagcttgtttttaccttattgtataaggaaattttttaaccaattatgaaatagtgactttccgtttcactgtaatacaataaactatattgtaggaaattagtttatttattttatcattttaatgaataattattttatttttcttttgaagttcaattttaaaaagtaaattattagagcagagaagattaaaataaacaattcttaaatgtgcgcctcttgtacaattttttttttttcatattttgcttataaatttaaacatttaaatctaaaaagcacgttgttaattttttgaaaataaaaaagg

SEQ ID NO: 6205 - DNA, 1388 bp, Cannabis sativa
tatatatatatagtgtgaaatcaacaattgataggtacaaaaaggcatcctctgatacttctaatactggatcagtttctgaagttaatgcccaggtaattattatttatttaattatttcatttcactacaattattgcactattaataaataattaaaattatcacattaatataagattaaaattattgaaacgttttgctagaaaccaatgagctcagtgtgacacattaattatacatataaaaataaatattataccattgttatatacaatattattatgtactatatattaattatatttatatgaattaatcaaattgatcttataaaaaaaaatcagttctatcagcaagaagctgcaaaattacgtggtcaaattgagtctttgcagaaaggaatcaggtatatatttatatatatcatataattattgtatatatatatatatatgaattaattatataattaatgaatatttgttacagagagttgcttggtgagtgtatagacagtgcaaaaccaagagatcttaaaaatctggagagtaaattagagagaggaattagcagaattcgatccaaaaaggtcttaatcttcttcattaattcttaaatttacataataattattaattattttcatcactttaattaattaatattaacattacatatgtgtaattaattgttttattttttttcacagaatgagctactctttgctgaaattgagtacatgcagaaaagggtaatttatataaatatatatatcaattaattttttattattaattactggattttgtttcataattattggatcaatttttttttttgagtaaatcaaaaaaaaaaaaaaagttcattactaacaaattgattgtaaaacacaacactttttaaaaagatttgaaaatgaaaactctttacgatgtcccaaattttcgggttataactacgtaaactattacatccataaattgatttttttttttctacattttctaaaatccaactttcaaacatagccttatggcttcgtaaacacctcttattgatgtagcaatctaaaaataaatgggctattgattcttcatgagagccgcacatcaaacagttaggtcaaaacaatcgttgcttcgtttttagacgttgcaaaattgctagccacaaaatgaagctatgtttgagtgtttaacctctcccaaacttcaacatatcaatcgactcgaggttgtcaagaatacaagtgtattcacttgtgacaacctattgagagttagcaatattttgaatctatccttgaaagccacaattgttttccaataccaactactttacacgagagcaatatacacccactaatatgagtctttgagata

SEQ ID NO: 6206 - DNA, 1402 bp, Cannabis sativa
aacaccccgagcaaaaactggtttggaggctaaaaccaaaaattttcccctgctagaaaaattggttgaccagttttataacacctataaaacatattaatcggtttttcagctagcagaaacgaaaaaaattggttttcaccccaaaaccacacaaatctcctccaaacttgctcaaacttcccacaacagtacaataccataaatataatgtattcgaagcactaattcacagcaattcatccattaactcaaaattgaacactcaagtgaaattaaattcaaaaattctcaactaaaccaaacctaactaaacagcccctaaaatcccaatctgaattcctacaaaccctaaaacaaacctaaaaacataatctaatcttaatttaacatcacagtcccaaatttctagaactctaacccaaacctaaatttaaacttataaaatccttaaatattcacaaagaaggcttacctcaaagcttgaacagtccctaagccttgataaactagctgaaatttgacaattggagaagaaaatcccttggttgcaccctcacttagggttcgggcaaggagaaaggaaaagagagagagttgagtgctatccttatctaactcatcactaacttatattattaagtctttaattaaataaatctaaacttccagctaataaaccaagtaataataagctagaaataaaccttaaatgacccttttacccctcacaaggttctctcaacctaaaataaatcttaggggtattttggtaattctaaccaactgccacaccaataacctaaaattctaaactagtccggaatgcttccaacacaatccatagtttattttcgtgacatatccaatcactccgccgagttcccatggtcattgggcccaaaaatattttattccaaaaatggtatccacgatactcatatattccattaaaatctccgtaattaataaattacgctttatttaatcatttaatgtattcactctaattagtctaagtaagatcataatcttacttcattactaaaataattacatatttaataaaatatgtctaagtaaatagcatattatttttcgggatattacaacaatccccttcttatagaaattttgtccccaaaatttacctgaaaagttcgggatacagctcccgcatctgcgactctaattcccaagtcgcttcttcaatctttctatttctccacatcactttaactagcggaatagtcctgttccggaatactttttccttcctgtccagaatctatactggttgttcttcatatgacaggtcagtttgaagctcaatatcttcataacttaatacatgagttgtatcagatacacattttcgaagcatcaagacgtgaacacgtta

SEQ ID NO: 6207 - DNA, 734 bp, Cannabis sativa
gcttacgtgtcattttctatacctatatatatacctctatataaatgaacagccaaacatactaattaaacccaaccatcaaaacaaaaacacaaactctctcttttgttcatagatcacctccatcaaccttaatttgcttgaagctttagaaatggagaataagattgttatgagcaaagtagtcttgttttgcttcttattcttttatttcactacaactccagctacttctcaggaagtcggtaagttaatttgtgagaaatattaaaagacgctaatagtgatttaacatcttttaacatattatatcgtcattagtataatttcatattagatctgtacttaaggtccacttaattcaaagatttaaattataattattttattaattttaaaaatattatattttttcgaaataaaagtaaaaaatgtttttttttactatgatctattaaatttcagagtcagccctacttgtactaatgatgtaattataagtaatgtaaatatttgatatgaatagaggatacaagggagtttgcttatgaatcatggagcgtgagaggaccaacaagatggggaatgattcgaccagagtggagaatgtgcaacaatggcacaatgcaatctccaattgagcttttggaccaaagagttaggcttgtcacttctcttggcaggcttaagactcgttacacaccttccaatgcaacccttcgaaacagaggtca

SEQ ID NO: 6208 - DNA, 917 bp, Cannabis sativa
ttatcgatttttatgaacaccgtcaggtggaagtgacctcaccgccaagctaactaaagcgaaaattgacttggaggccgagcgaaaagtggtcacggaacaagaaaccaagaggaaggtggagctggaagccaagcaaaaaatagaagtggaattggaggctcgaaagaaggccgaagaagacacagtcatccaatgaataagttgaagaggagctagccacgaccaagccccaaggagaagaagaattggttggtgctcttgtagctactattcacttgctttcgaaaaaagatcaaaaaaattgaaagaatgaagacttcttccaccaatgaggctgaagagttcgaatctgaaacagggcttccgattgtggaaccaattaatgaaccttctgttctggcttttgatacaaaactgcctcaaacgacaccaaaaccaaaaccaaccaaaactaattatatattgaaaataagagattaaaaaatatacatctcaaaatttaagataaaaacctccaaaaattaatgtatattatatagttgattatatttttgtttgtgggtttagtaattttaccaatctaaataaatttatttacttcccttgtttattatttcacttcaagtttatctttttttcccctccaaatataacacattttttagatatatattaattaaataaatgtatttaattaaatgttatactagtagagatattttggtaattctcgaattagagtattctagtaaatttatatttatatcttaaaaacaattcttatgtattttatcttttttttttaatatacattatttattcgtgaaaagatattattttactttaaatttaattagatatttaaataagtgaacaattaataccaattaaaaaatatcaaaatataaaataaa

SEQ ID NO: 6209 - DNA, 1527 bp, Cannabis sativa
ctgttgagattcaacaaatggctgtacatcatcaacaagccaaggatccttaaggatactaatttgtgaactattgccaactaatcttctagctccagcctgaaccagtatttgggattccaaaacacttctccatatatagcttggattacttcctaaagttgcagaaaggaagttaccgtttgcataatatcttgttttaaatattttcccaaccaaactatcctcacaagtaaggttaaagtcacaaaaatcacgaaaccccatccctcccctactcttgtgcatcgaaagcttatcccaactcaaccaatgtatgcctttgttgctatttgatcgccaccaaaatttacttattgctcgtttaatatcttggcaaataccaactggaataaggaatacattcatagtgtatgcaaggagagcttgaaccacagacttgatgaggactttttttcccgctcttgaaagaaacttgttatcccagctttgaattctcttttgaactttatctctcaaatagctaaagatcacctttttataagtacttgctacgctcatccgcttcgtgaatgcccaatctttgaaaaagtgtatgcctcattgtttgagaagtgttactgctgtaaaaaatagtggacttctcaaagtttacccgctgccctgatgcattagcaaaactctccaaagtttactaatgtaagaaactttctcatttgtagatttataatacaaaaaactatcatccgcaaaaagcatatgcgacaccataggatcaccattttccactctacacccatgtaaccatttcctttctttatacctttttaatgagagctgagaaaccttcagcacaaattagagaaaggtatggcgagattggatctccttgccaaagtcctctactaggaacaattgtgcctaaagtgtagccactactcactatattgtattgcactgtggataggcaaccatagataagacgaacccaattgccagtaaatcccgaccgagtaagcattgcacaaagaaaatgctaatccactctatcatatgctttactcatgtctaatttcaatgccatatagccatctttaccaactttcttccttttgagatagtgcaatatctcaaaagaaatcattatgttatccgtaatcaacctccctggaatgaacgcactttgattgatcgaaataatctctgaaagcaatcctttcatcctagtcgcgatgactttagtgataactttggaaataacattacacaaagaaatgggtcccaactcacacatctgatcaggtttctttttctttagaatcaacacaatattagtattttgcatacactcaggcatctcctctgtttgaaagaagttcttaactgagcttatcatatcactccaaacaatactctagtatttttgaaagaatttaggattcataccattcgggccaggagacttgttggggtgcattcggaataccgcatctttaacttcttagtcaacaatgggtcgaataagac

SEQ ID NO: 6210 - DNA, 2486 bp, Cannabis sativa
aaacaagttttttgtggtatttttgaaagtatcagtatccatatcttctctttgaatttgcaaaggcccagtattatcaaactgaccagcattgactccatcacaattctccataatggtcctatcttgcacctcttcatctatgttgttatgcaaaatgttttctggcccaggcccattagcattaagaagttcggtccgtctcctcttagtatccaacacctaaatacttgtttccttatttaaattatttggccctatgaccgtatcattaccattcagattgcccattatttcttggtcaactacaacctcattctccttcatttgaggcaaaacattagctaccaaactaggactcttctctctcccagtagctggctggtgtgatgacgctcccacattaacaggaggataacgattttgccatgattgcctcccataattattgttgatcggattcttagtaatggccgtagatccctccccagctgtggagtgctctgaaaaaatcattccgccggctctagatacagctccgggccttaaccatttctctccgattgcataatttttccttcgtggagcagctttcaagtccaaggtgtaaggcttcttgatctgatccaaaggtgtatgaaacagttgttcgcaaaaacgctccgaatgcccaaggatgccacaaatgaaacagaaagtggataggctctcatacttaaaattcgcatagcaatatactcctccttgcttctcaacctttttcctccgttttagtggacagtcgatattaatcttcactcgaactcgaagataatctcgccacactccaatgaaattgttcggatcagctttaatgaaagttcccacaaaattgcccaagtcacgtacaacacgctccaacataaaaccagttgataaattgtgtatttgcacccagaaatccaacttattcaatgtgactgttcgtggattctcgccttgtttcaatcgttcaaaaatcagggggacacgatcaaatgtccatgggctcccttcgattactcgttcaatatctacttcatggtagaattgaaacagaaatagattattagaaagttctttgacatacatacctctgcctggttgccatagcgtagccatcttattttgcattgcttgaaaattcacacttctattagtcaagaatcggcccactaagcaccatctatcgtcaatctctgtcaagtcatcattctccccagcataaatcagactatcttcttcctcatcttctattctaaaattcgcatactgctcctcaatattaggctctgactgattacccggctccatgacaaatctcaaaagtttattcggacatacacaaacaaaagagaacttttagagagaatatcttaccatgtcaaaagacaagacttgtgttatagttttttaattaataataattatgataataataattcaattaaataatgtgactttatttttttttataaaatattaacatattaatcaactaatattttttttcttttaatatatcaaatataaaatttatttttcataacataaataaaaaatttctaagctaccgcgcgaagcgcggtatcgttgcctagtagtaatataaatagaatggaataaaatttaaaatgtataaaaaaaaaattattaaaattttttcttattaaattggaataacctttccttccttttaaaaatggaatagtcattacatcaaaatagtggaaagaacattccattggaatgtcattccaataatttaaaatgcaaccaaataaatgaatgaaataaaaattgtttccattatatttcattacctccaatcaaacgacacccagttaaaattacatatttttttatatttatatttgtataatatatattatgattttgtgcagttattgtctaaataattgttgttatttaaatatatatatataagtataaaaaatatcatatatattttttgactgaaaattttaaactttattagacttcaagattttggatcagactctaaacttaaatgacaatccagatttaatctagcaactttagcaaacgtataaattattacatttattgatcatttaacaaaaaaaataacaacattatattatgaacattttatatttaaagacagtattatgtatatattttaagcttcattattatgaacattttattataaaaaaattatttactccatttaaaatatgattcttttttactgtagcgttatagtattttataatcaattaataacttaataacttaaaggtgttaattgaaccatgtaaaatatgatatcaacactaaaatatgtacaaatatataatttcaagctgcaaattggttttgaatcttggatgcaaatttattaagtaaaggagacctaacttctccatgaatatgcatacccatatttgataagatgagtaatctattgaacataaaagata

SEQ ID NO: 6211 - DNA, 1058 bp, Cannabis sativa
aaccaccgagtcatacaaacttgctggcaacatcgtaaaagtcgtccccgaatccaccgccatcccaccattacccttcctatccactctcttgagaaacgccggggccggaatattcctttttccgacggttattccggcgagtccgacagagtataaatacggatgtttgggattttccaacatgttcgtgtaagtaaagtcagcttttttatcaccaattctcttctcttcttcatcataacggcctagaatgagcggactcggtcgccggactttctctggattaaaagaatgggaaactaaacagtaagagaaatggtttccgagctgaggtgatacggtggctaactgagccggtaaagaaagcaagccacggccaaagccggcgactccaatgggttcgccgagagccgtgtgggcacaaccaaaggtgaagtctttaagcaccaacgccggagaagacgaagtgggcaccgttaaactgagcttatgaagctgagcaacgaagctgccatcggcgtaagcatagtaaaaaggtggacaagagaaagaagaacaatcagaaatctcaatggtttcaagtgggcatttagccatggcacagagatcggaagaagagtgggaattatgtacggcggtacaagacggagacttgcatttaacggtggagtttttgggtattttcggcggcggaaaagttgcagagggttcgtatttaccttcacagagtatacattcgaatggagaacaggggaaccaaacgaggtcgcttccggtgtccatgtagagagaaattggttgaggtgggtttgttccgatggttaaagagagcgtgtaatcacttcccggtgaaagagggagagagacttggtgactgtggcggtggtggtgacgcgctaaggagcgagtggtggttgatttaaggaggttgtgagttgtgttgaattgggttttggatagagaatgtgttaatggaaaaagaagtgtttttgaaattgaaatggagaagaagagagtcaaacagagcaaaaacagagcttttgatgaagccatga

SEQ ID NO: 6212 - DNA, 842 bp, Cannabis sativa
tttttaaaaattaaaaaatacaaaatatcaaaatatagttttcagttttttaaaataattttttttgtctaacatattatattttacatttttgcttacatacccagaccttggactcggatctgggaccccaattccgactcggaccatgactcacactcggaccccgactcgaacttggacccagacctagaccctagacccggaccccgaaattagcacgtagtttgggttggggtctgagtctgggtctaggttcaggtcggggtccaggctcgggtctacatccagggtctggtccggagtttgatgggtacatttatggtatggtgtagaatatgaattttttttagtaaaaaaaaatctaaaaatagttttaaaaaacttaagtcaaataccattaaatttttaaaatgataaaactatttccttttttcatttttgaaaacacaattctgaaaactaaaaactaaaaacttaatcaaacaacctctaagtctccacagtagatggtttttcccaaagctaaagggatagcattcacatagtttgattcaataactacgtttttcaaatcaagttgcaaaatgagcaatacgagtgttcacagattgatttggtctagatttttaattttttttcaagccaaacctgcataacggttttttaaaaattcaaaatcaaacaagaccaattaaatgatcaaaccaaacgaaaccaatttactcaaaaacatattggtttggttcaaaaccataatttgtattttgtagttgctccaaatttttttaacaataaattttcattttttcgataacttttctacttttagttagtttata

SEQ ID NO: 6213 - DNA, 869 bp, Cannabis sativa
aaaaaaaaaaaaaacaacaaattataacgtgagcaaaataacaaattacaatctatatatagcatattatatagattatattatatcattatattacaatgaaattttaaatttatcaatgattcactacatcacgtgtcttagaaataaataagctatttttgttttagagaaattgcctcatatggggaagaagataaaaatattgaatataaataaagaatgtccttttcaaaaaaataaaaagaagaagaagaagcaaatttggattggataggttaggaacatcaaactcaaaattacatcaacatgtcaaaatatatatgcagaataagtatggagaaatcatcaaactcttgtctacacatatcaatgtatccttggtttattagagcatctctagtagtaaaattttagaagaaccttggtaaggtagacatattatggggtaaaatattgaaatgttatgttgtagcattaatgttattcattattttttttaataaaaaattaaagctaaaaagttattatagctaaaaattaggatatatattaaataataatgtgtgaaattataattataacatttttaaatagtgttatacattgaagtgttcttaattagaagtaacagtgccaaaaacaatgtggaagaaagataaaataaaatattatatttttaattgataagtaaatttttagcatccttaaacgatgctaccattggagatgtcacattcataatcacacccatgaccaaatccaaagtggagtatttaaaccgcttctcaaatctcataactttctatccaatcatctttccccaatggaaggtcttccttctggggtttgagaccactcattatgtt

SEQ ID NO: 6214 - DNA, 514 bp, Cannabis sativa
gtcaacaattgggcatcaatgaagctgacgcaagcagcttttatttgggacttccgtgtttggttggtcgaaccaaaaatgttatcttgggtttttgaaggacaagatgcagaaaagagtgcagcagtgggaaggtcgttttctatcaaaagctgggaaggagataatcttaaaaaccatagcacaagctctcccaagctttgctatgtctgtcttcttgttacccgttgagacttgcaaatcgatggagggtattatgagcaaattttggtggaaatcatcaaaacaaaatcaatgagtaagttaggcaagctggacaaaacttagcaagcataaagatgcaggaggtttggactttagagacttgagagactataatttagcaatgcttagcatggagattgataacttatgactcattcataatatcaagagtttataaagcaaggtattacccccaagactcttttttcacagcctcccttggatgtaatccaagttttatttggaagag

SEQ ID NO: 6215 - DNA, 2512 bp, Cannabis sativa
ttatttttattattattttttatcaaaggcttctttgtgtcaaatatttatatttttatatatatattatataactaagatttaaggccataattacacatttttcaataatttactaaacactacaagaaatttaactattacaggcacactcatgcgtccgcaaaagtagtgcttggaaactttttccaaacgctaaaaatttcgtcctcacgcgcctataattgtgcgactgtgaaaattcgtgcggacgcattaactgtacgcacattacaattgaagagaattggagatctcatctataatattattatgtatatatactaggacacctttgaatatcaacacaaattaacactcccatttcacatatagattactttctcaatatacaatttcctttctattcattaaaatttcatgtaaaatactttactaggttaattagaatattcataaggtattttatcgaattttttgaggtcctatatattttttcaagcaaagctcttcgtattaatgcctattgtatggtcctggctaaataatccacaccatattatgttgctgaaaaatataaacaaaaataatgaacactagtactcgattcatatttttcatattactagtgtagtttcgcgtgctaaagcacgaaatatatgaattatatgcatattaaattaaatttactcttaaatattttaataatttcaaaaaagatcttttaaaaaacttaaaatctaaataagttaataattttcttttatttttaaaatataatgtatgtatttatattttatgggcaataaacataattctcgtttaaacttaatttattacttaatttttttttctttgcataagttaagagtctatattattcctcaaaaaaaaaattatattattatatcatgctaatttttggcataatatctcatatagctccacttatattaattagtatataattctttggtaattggatttgatatgtaagattacttatttaatacaatatatatcttgtttcaaatatttaaatatataatgttaataaatctataatataaattatatttttttggctacaattattataataatattttttaaatattaaaatcaaatttatttgagtttacttaatttttaatctctatttgatttcaattatttgaattatactaaatttaaatatatgatatattaatatttgaatatgatggaaaagatgttacatctatataagctcaatataatatatgagtaatttattgaaggagaaaaaaaaaacaaccttttaaatatatgatatgttaatatttaaatatgatagaaaagttgttacatctatataagctcaatatgatatatgagtaattcattgaaggagaaaaaataaatcaaaatattttgtaatttgtttgtattgttatatgtatctttaaaaaggatatatgtgtaatttaataagaagaagcccaaaatattgtggcttttatttaagttatagatatagagtatagattctcttgaattctaacttaacatataatcatattttacatcattatttaataaaaataactattacttaaaacttagatgataagagcataatgctctttactttattctaagctattcttaacaactatgggtaagatggccataaaccaatacccagcataaccctgatattataattatttataaatcttactccactaattctaagatattaaactgtatccaaataacataattggccaaattatcaatttttactattaccgagcataaaattgaaaatactaaaattcataaataaatggcatgcatgtcacatttggaatctaataaaatctccataattgaaaaattataacactaatgcctatttttaacaacaggacttattttttgctaatgcacatattatcataaataataagtaaatcaataatattctgctaatttatgtgtctaaatatatggtcattacaataataataataataaccataacaataaagagacacaagatgtcattaactaaaatataaaataaaaataaaagctaggaggtactaatgccatcactagagaaaatagattgatcaagagtataggagacaaaactgcactcagttaccaaatacgtaggaggcacaatgtaatgcctgatttgtgtcgtttaccacaacaaatttactaatttttatttctatattactaattattatagtataacggtaaatacaggtcgatcccacaaggactattatcaatttattattcaaaatttagtaacaagaattaaaaagggggttttaattatgaagattaaataacataaataaaaaaatagaatgagatactatgatattcaataaatagttgaaggttaatcttcaccctcaacaatcatccttaattcttagtaatgaatgttatttcaaatttctaatcaaactataaatcccgaagataacgctaaagcagtcaatta

SEQ ID NO: 6216 - DNA, 583 bp, Cannabis sativa
aatatttatatagagatatatgaaatatatagtacctgtggtctttacagtccactcatctacattgcactgaaaatgattccagctgttccaactgcatataataaattatataaatataaataaataataatatatatataaaaaaaattgaaattatagaaaaaaaaaattgtatgaaaattaagattaatattattaccccattggaggtgtacgagcaactccattagagatgagaaactgagtataattattttgatattcatcattatcataattagctttacatatattaattataattaataatattataccaaaaacactaacaacaataaacctcattatatatatatatatatttaaattattttcttaatttccaaagatcaaactctctctatatatatagctagtgaacttagtaatagatatatataaattgaggatgaagatgaagatgaagatgaagaagaatctatgagaagaagaaaatggaccccattggtgtgatgttgtagttgttggttggaagacaagatcttttactataaaattttgctttaaatgctgtcttttt

SEQ ID NO: 6217 - DNA, 1752 bp, Cannabis sativa
ttctctatatcttaaggaatcattaaaaaaaaaaggtgatgtaggtttttaggcaaatatattgttatacactcttttcattcaaatcacaacactaaaaattatactaaaaaaatattattatattagtttctactatcccataaatcaattcttaaactttatatacataaataatataattagttgaataaaaaagattttagggataataagtgccactacataaatgtagtccactgcatatatattggacgaatagtgttgggttggagtagaaattagactattctcaaatttgatgctatgttggagatggccttaggaccataaaataatttaaatcatcggtggtgatagcataataaaaactgggattgtttattagaccacatctaatgttatttttagacatatctagatctaatttaattatacattgaggtctcgtttaatatactgtattgtattgtaatgtattatattgtattagtaatatttaatacaatactatctttagtatttacttgtattaatagattgtgtaaaattatactatatttttaatacactcgaccccaacaccgactacgggtcaggtcccgagttcaggttcaggtcccgagtctgggtctcaagtccaggatcgaggttcgggtcccgtgttcgggttcgggttgggctccgggtcccgagtccgagttgagtttcgggaccgagattgggttcgggtccgtatcgggatccgagtcccgattctgggttgaggtccgggttcagatccgagtctgggtccgggttcaggtttgggtctgggtttcaggttcggttatgggtcccaacccgggcccgaggtctgggtcccaagtcttaggtcagagtccgggtccaggtccaggtccaggtctgggtttggttcttgggtctaggtccgggtaggggttcgaactgagtcccgggtccgaattgaagattggggttgaccccgaattcttagtaaatattatagtacaagctaatactgaccatttgttatgtattaaagaatataacttaccttgtattaaaaaattgtggtcgtaataattaatacaatacattgctttatccaaatataatattatttattatttaatacaattatacagcgtaccaaacgagccataaatgttagattttaccatgcgatttgatccaattaatttcagttatccaattgatccaacttccattggatgttaggtttaatcggttctatctattgaatgtattttatatatatttattgatttaattttggtttattcaatattttagacctaattttttttatcagatctaatccatccaatattttaagtccagtactatatattagattggtttggatccatgtaatccatgaaaaaaagagaaaaattttaatgttaattttcatatatacatatatatatatttttggacaatataacaatataaaatctaattactcatcaaaactaactgaaaatactaattagttcgattagatgttggatgtattggatttttggacacgaaatctaacattcaatgcaatccaattggatattagaaaaataatatccaattcgattcgatcacaattagatatgtaatatttcgattgtaattggatttaatcgatttatttcgggccctagtaaaaattgacctataaataatttggatcccttgaagagtgtcggttgtctcagtagggaagaatcgtac

SEQ ID NO: 6218 - DNA, 862 bp, Cannabis sativa
tcctggtcaaataataataagtaacgttgtttagtagtaatgtgttttgtaaaaattatcaatttgactttttgttttgtaaaataataaattggaccttgtattttcaaaatagtaccttgtgcttaattttcgatgattttatatatatatatatatataactaacttgaaaataatttttaacacaaacagatacagaaaatatacttagttttgtcattacaactttagattttgtcattattaacttttattttgacaaaaaattagttcagatactattttaaaaaaatacagggtgtctaatttgtcatttaacaaaacagaaaagaaagttcaatcgataaaataaattttattttacaaaacataaagtctaaaataatatttacttttatatcaaaggtaattgcataaaaagttacttcaatacaattatatattattttacattttacatgttataatatcctgtaacgtccccgctttaagcttactcggtatttccccttacggatcacgagactactgactgtcacatatccaatcttatattttttatattaaaattttaaaatcttcacataatataaaaatatataatcactccattttaattttatttacaaagcttcgccttctataatagcaatagttttcgtgactaaatccttatttgacacactcttagagacaacttttatcagatcgacgatgaaggtatcttcttcacgaattatacgaaaattcattccgagctatgaaacgaaacaagttcatttcgaaaatggaggttaattttcaaaaataaatcatcaaaagaatatcattaaactcttcaccaactcattgtgaaaatg

SEQ ID NO: 6219 - DNA, 1121 bp, Cannabis sativa
taattaataattacttaaaaattaaaataattgcttcctcaagtcaaatcaataatttgattaattcaaaatatttataaatagaaacaactataaatcacaccccataaaaatgggtataacatatacaatgatccaccaattacaaacaaaattagttaaaaacaacttacaagacaaaaataactaaatcaccccaataacaaaattctatataaagttgagaaagaaaccaaaaagaaaattaaacacaaaactcaaaagataaaagatgatgaagatgaatagggtagtgtttgtggctattgtgcttagcataatgttagttgtgaacgaggcggcctcagggccgtctaaaagatcatcggcggataagaatgataataacaacacaaagaaatttattaacccaggggtgttggacccatgtcaaaagccgggaggaccgcacaagggttgttctgacccgaacgctaagcgtaccccatccaatgaatataatcgcggttgcttcaacgatgatcgttgtcgtcattgatgtcatctttcatcatcaaattttaaaagaaaaaaaatatatatatatgtccaccatatatattgtttttatatagtgttttctatttttacatgtgattatgattatctatcgtactatatgtatttatatatatttttgttttgtagcaatgaataacttcattaaaaaaaattataataatttatatatatatatattaatatgcatcatttgatggtaattatcttaaatctttaatttgaaagagtgtttatatggtgagataatgatgtatatatttctaattttctattgtgttattgaaaaatttcattatatttttcacaactctgaaacctctaatttagacgagactactcattttcttttaaaacttataatttctattgtgtgtgtaatattttgatgcgtataatcattattcattgctattaaaaaagatggataatttttatttttatagtttttaaagtataatttgtcaaaatatgaatttttctcaaaaaaaaagtttattttatgagaaaattttagaaaaaaaattagaaaggtatgggcaaaaaaaaaaaaaaaacagcat

SEQ ID NO: 6220 - DNA, 563 bp, Cannabis sativa
aatatatatatttttaataatgttatattaaaataaataaaaatggaacaagttcacacggtgtacatgtcgttattcacttttcaagtactcatgtttaagcccccatgagaggcaagtgccccaaattttggggcatgttaaattcacatccctaataaaaatacgtaatatgtattattgtatatacaatattaattaaaattctttttaaaaaaacttgtgtgcctattttgttcatgtgtgaataatttatgagatctatattacacttatagctaacctataataatgtgattgaaatcattaattaagaaaaaaatatttaaaaaggaaaaaataatattaataacaattaaaatcaattacacttttaagaaattgtaaaaggtatcaattatacttaacaccagtcatatataattattagtacaataaaatatcaaattaatatatacataataattttttttttataaaatatcattagctatttttaaagcattaccttcaaggagggatttacaggagttccttcctaaatttttttattatatatatat

SEQ ID NO: 6221 - DNA, 1200 bp, Cannabis sativa
ttctaggccttgatattgcaactttcatatttaatttgtggaagaatcgccttgagtttccttaaatggttcagtatttcaacccaccaataccaagaacacacctttaaaagcaaaacctctttaagaagctttgtgtttctcttttaaaatctatttacagttggccatctagatataaatgtttccacactaatacacgactcggtagctcacctctcttctacccattatcttatagatgaaccgaaacaaattctgggaaggtgaatactagataaacgacaacttgcttcagttccttttgaagataacactgtctagacttcctcttcttctttgtttggtgaatcatcatttttatctatcaagacatacttaaagagtgaattcagtggctcttgaaaagaggaaatctatcaacaccacttttacactatcactattggtggtgaggcatatgatcgacacatcttcgagcttgagcaaggttggaggcaatgcttgccgaagagctagatataccaagtccaagcatacataaatgatactttccctgttgctagacttgcacggtcaaatactagcccttttctagtcgaactagatgttactgttgccaaacaaaacactaaaccacctaaacccagaagaaggaggatggcttgtaaaaagcagacaactcaactgatgactaagcagcgcacatggtgactaatacaaatgctggggatcctgaagtctaggtgttaatgctaaaaattgggaaaatctaattcgtttaataagcgacagcgacaaacaaaaaaaaaactaaagagagaacacaataatttatagtagttcatttctcatatcgcgatggtaatgaagcaacgtttactttgagcttttataataataaaaagcaaatttcttacaagagagcttgagaaaaaataactgaggaaagcttcacctcacaatttctaaagagaaaaacacgtgaggagagacaagctctaaccttatagaaagaattgagattatgaaaaatagctagaggagctcttcttttatagaaaaggaggtccaattacataataataaaattatggaaaaatttgtcgaaatttgctaggaaatcgctgctcaactcacgactcgattttagggattaaaatgtcaaaatcatgagaaaggttttacacaagcttagat

SEQ ID NO: 6222 - DNA, 1241 bp, Cannabis sativa
ccaatatgaaatatatagattaacttgaaaatatatgcataaaagattttctgattttttttggtacaatttaccacacaagaataaatcataatttgtttgtaaaaattgaactcttatttcaccttttatcatcaaaataataataaaaaaattaatccaattccatgaatattattatttaaaatttacaattgtcaatttcaccaaatatatagatatagtgacacgctttgtgtgtagctgttacctttagatgggactgtaaaaggatacagtaatggacattgagaaactctaaaaggttgtaacacgtaatgcagggtcattaaataatatttttttagtcgcgcacattagtgacgtgcattgaagagtcactaaaagcatttagagtccctctaagtgggtaattgaagctcatttttgtagtagtattactgcaagggtttgctaacatagttgtgataagaggaaatggattgttgtcagggttattgtatgagatagagttagaaacatggatgttgtaagtgttgctaacataattgttgtatgaaattgaattgttgtataattttatttttgaatgaagttaagtttcttagagggttgctaacattattgttgtatgagagttgctaagattgagttgttttaaaggttgctaatatgattattgtacaagattaaattgctaacaagattattataagaattgccaacatagttgttatcatgtatgatattgagttgtactagatatttttaacatggatatcatataagattcagttgttgtaagggttgttatatgtatattgtattttggtttcattatatcatattgtatgtattgggttgcttaaagatacatgaaagttgaaatgggttgtatttgattgcatttggctatattaaaaagtaaaaatggtaaatattctcatataatagaaattactatatagaaatggtaaaggcaccataaaatggttttataattaaattaaatacatgttatgatatcatacttacaaaaataaatgtggataaatcattaaaatattattttgttaacctatagcaactttaaatgaattatgcaatgtgcctttgtgtgtttcttttttattatgatcatataagtaagcttattaataatatgagatttttcaaaataccaattttttttatgtaaattagaatattaatctttgtttctaatattttattttattatt

SEQ ID NO: 6223 - DNA, 1164 bp, Cannabis sativa
ataagtgagcaaggcgtactacagctatattagaaaagatattattaattagtttaaatagtagttaatggtccaaggtatgcataaatgaccattgcagtttgtagattgtactgaagtagtaaacttgggtatctaaatggttgatggttggtttgatttttttcttctaacatattataattatacatttatctatatattataaatttgtctatgacagcacaattatgctgtggctttaaataacgttggagtggctaggccacaaatacaatttttttcgaccaatattgtcggtagcttttttatgattgtataaagaaagtggtctcgtaatttattttgaattaatatataaaataaagacaaaaggagtttatctgctaggatagtaatcctgctgtgatgtttggaagatatgaaaaaacaaatatttaactaaaattttggactctattgccaatatatagttgcaaataattaaaggtgaataacacaaaagttaatcattattgaaacaacaatttaattagataattgttacattccggttttctttttcttttttggctttatttgtagttccaataaccatataaccgtatataataaatgtcaacgcagtaaaagaatgtttgtttttcttcttttgtactaataaaaagaaaaagaaaaaagaaaacaaaacatgtagtttgagcttggaatatgaacagtataatagtaaatgtaattaaatttttgacagataatctatctatatctactctacaaaaccttttgtttggcacaatatatgtacgtttttctcatttattaatttaggcattcaaagctttgagcctcatatagtgtgtagtatatactatacttttaataaactatttattattattattacaccatttttttttaaaaaaaaaaaacaattatttttccttatcttatcttttacctattgtttggttgctaaatattagcgtctgtcaaaaagttcacctatggctatctatactctatttttttcagagaagaaaagaagaacaaaaaattagggcattctctcctttggatcagttcttattacgatgttgtatatatataccctacgtattatgacctttttccccttgaaaaaatatataaatctttttttttttt

SEQ ID NO: 6224 - DNA, 5267 bp, Cannabis sativa
ttttttttttttttttggaattggtggggtgctttgccgtgggtagagaggagagaaagggaagaggagagaagataagagaagaaggagaagtgaagcattttttcagataattattaaaaataatagaacagaagctcaaatttctcttttagcatttgctttgtaaatattccttcaagtaaaagcaagaatcaccatttattgggaatatagataaattctacgtaacatgtatatatataattcggaaatatcaattacatctaaagttggcttgggcaataaaaacatgctttcagaaccaagtactactagcttttaaatcaccaagctccaaaatttatatctccacatccaaaatcatggtgggtgaaaagggctgtactaaaccaaaagcaattcaacacaggctcggatgatatggaaccatggaactggttggttgagttgtggaagtggaagtggaacgacaacgttgagtagttcccatcccattcccactggataaactcccaagaaacgctcttttaaactttaatgctcgtcttgcttttccatgtcttgcatttcaacaggttcagggaaaatctcactagacaatcttttgttggaagatgagtgatcattaccaccactgccctgagaccccactctactagactgtttgaagctgctgaaattctctctgttcccatagcccggtacagcagcaatatcagatgacgagctgtgcctccagcttccgaagaaggcagcactccaagacaaccgagatgatgttgtccgcagtctcgcagagctggaaccctccattctcactaccttcaaagggttctccaatgctttgagaatgtgtttcatgagggggcgttttgatggcttcgggtttaagcatgatcttgctacaattgccatggcccatacctcttccaagagatcttcatcaacaatcagagatggatcaaggatcttgtttatgagttctttgtcatacatactgatgttacgcactgtattgtccaaccaatcttttgtggtggcatcgtctgttttgctgatgccaagcttaccagtcacgagctcaagtaaaacctttccaaaactgtaaacatcttgagtgcaaattgctaaagaagaggctgtccattacaaagaaaaaaggaaacaaagttcacattattgatttgaaaatgaaagatgaaatgcttatgagcaagtagtttgtttttgtcatctcatttgagtatgacgataaagaagttcagacaaagtaaagatactcaccagaagggccaggctcagatgttctgcaaaataacaagtaaatgtaatttgtgagtccacgattgtgtattagaagcttagtgaaaccatacaagtacttaagatgaaataagtctaacaatgttcaccacaaccaaaaaatagagtaagggtcagcttaaaagacttactgttgcttcctcaataacctgttgagaaccttttggttagcatccccttcttggatatggacctcactcaagcttccgattcgcacctcatatttatcatctagaagaatactacttgcttgaatatccctttaatcatggaaagtaaattatactgttagtacttgaggagtggaaaatgcagacaagaatcatgttcttccactttttaaaaatgtataatccaacactatatattataaatatcgactgaaaaagataaaccaccaacaagaatatatactcaacaacttcagcaatacttgttacctaccattgacaattatatcatgaaagttttttcattaaagaaaaaatagatcatatattaaagtatgcaataaagttcttgactaaatcaacgaattcagaattcagaagcagagagcgaaaatgtaggcatacctatgaacaaaggggggactgcattcatggtgtaggtaaacaagaaattccgcagctcctattgcaatctttaaccttgtaatccaatccatggattgtaacccatcatctcccaaactcacaatactgtgcaacgaattgcccaaatctccatttggcatgtacttgtaaaccaaaaacttctcgttctcattctccaagcagtgtcccaatagtgggactagtcttgtatgggaagctttgcggaagaactccaattccatcatatatgattcgttcttgcaagaactcaagtccaccttcttaataactaccggggttccttctaaaagccctttaaacaggattccggagtgtccatgcttgatgagatttgtgtcactaaaatcatcagtgaagtggacaatctgctcgtaagtaaacgactctcccagacctgaaaggtatactagatctttaggaaatgaagggttggctctttctgatacaggctctgcatttgcaacccctctttcacttccaacgttcttattgcgacattttagcaacactacgagaaccaatactagaagcacaatgaagccaaatccaccaaatactccaaccagtatgaatatcagtctatttctgctcttcaattctaactcttggggacttgttggttttgggatcccaggattttcaaaaattaagttcctctcagcatagaagtttgtacaatcctgcaaatttctctgattcggcaactgtaggcaattttttgaaagattagcattattacctgaactttcatatacctttccttggaaataattaccagacaaatcaaagaaacgcaattgccagagtgaagaagtcaaatttccatataaaaagttgtttgagaggttgaaagtggcattcttcgtactgaaatttgagctcggaatttgcagagctccagtaaaattgtttccagataaatcaagtaactgcaagttgggaatagaccagagtgaaccaggaagagcaccatcgagtttattgtcactcagaaccacaacccgcagctgagaaaggcttgaaaacaagccctttggcaatggaccctctagaccattagcactaatatcaataaccctcaagctcctcaaacccgtgaattctttaggaaatgacccagtaaaaaaattcttgctacaatttagctcaacaagtcgagaaagtttattcaactgaacaggtatagaagcggtaagactattatcagaagtacttaaaaactcaagtctcgagaggttacctaaacctgatggaatcgacccagaaaagaaatttgaggagaggtcaagagtagtaagatttcgaagtgaggtaaactcgaacggaatcgacccggtgagagaattacgggaaagattaagaactgatagctctgataattgccccattgaagaagggatgctaccggaaaggctattatcagagagatccaaggaacgaagattgatcaaaccgccaagcgactgaggtattggaccaataatcaaacacgaccggaggtcgagcacctcaagtacattaaggctttcgccaaacaagtcgggtataggcccaggaagcaaaaacccggacgcgttgaaagaagtaaggagagtcaaattggctaggccatcgacggcgaactggggttggcgtcggcctttctgggttcgccggagtcccgagacagtaagcccaacgactcgaccattttggttgcactggactccgggccaactacacggattgacctttataggccaatctcttcctctaagcccaagtgacgaccggaggccaagtaacgccgaccactcagctctggagcttaacctcacttgctgagctaaaccccactgaataaaaaaggcaaaaagaaaaaccgtgaaaaaacaaacttgagctttcatggctacttctgatgatattcagctgaagttcatatacgaagctttcatttcatcttcttgacttcacaaccttagtttagagtctcacactacagaaaatgggattctctttggggcaatgaacccaaaggaagaaactttttctttttttctctttggttgggtttccgagaaattctaagctccaatcacgagcttcaattttgcatgcttcgttcctcctctcgaaacacacaacccaatagcagaaacgacaccggaacaagaattatgtatctatattaaatattgtatacaaatatatacaatcttttactctgaaataatcttaattagagctcagtatagatgtggacattgagatggcacggggtttgaagaagaaggtaaaacaataaatgaagacaataacaaccatggccaactgcatgaactgtttttctctgcaggacaccggagctattaatgaacctggaactgggagctttcttcagtctcgcaattattattttgggatgtgtttttgcaattgctgctggtgcggtggtggtggtgaatggtgaatggtgatggtgtagtgttgggaatatctaataagttttttcttacagaaatgtcgagatcacaatgttgtaccgctatcggtacattttaatattaggtcctattaaaactttatataaattaatatgtaaatatatgaaagatttatgaaaagcagaataaaaagaattactcttttgagcttggggagcataacttatatttacaagtgatataatattaattaatttttagaatattttaataattaattttttaaaaaaataagtaataaatatttgataaatcaaaatttgaatataattaaaatatttatagttaattaattatgtattttataaattcaaacaaatctaatatttgatctatcacacaaaatatttacatcagtcccacatatttttattaaataaataatataataaattattaggtgacacgttggtagggtgttgaacactaaataacaatgttctttttcttatgggttcttccttggtgtttcttgaacccaatgttgacctattctttgctctatttaaggcgataagctttcatgtttaattagagataaatgttaaaagctaccaaccgatattagtataattcagtattagatactaaataatttaatttaaatttctaatcatttataaagcagcaatatgtgatgatattaggcacatattgtaactagcttaaagtaagccgcctcaaccgaaatttcaatctttgaaaggaaaacaaggacaactctagcataaaacaaaatttgaaaagttattaaaaattgtagggcccctttgtacccacatttgaattttgatgattttctttttttctcttaaattaaaatattgggttttctatt

SEQ ID NO: 6225 - DNA, 785 bp, Cannabis sativa
  modified_base (545)..(545): a, c, t, g, unknown or other
catggactaccatcaatgacggcttgaacgtcaagttcatggtaaaattgaaaaagatacttatttgtatcgaattccttaatataaaaacccttcctcggttgccaaagagacgtcatcatatgccgcatagcatcaaaatccaacgttctacccgtcaaaaacttccccactagacaccatcaatcatcaaaggccacctcctctccctcattatcaccaccaatcaaaatcccttcctcctcctcctccaagtttatctaggcatattcttcattcaaatcaaattatgcatgactactagaagcaatgataaaacttcaaccaaacacagactaacaaagacaaacaatacaccaaaacggctaccaatgacaaaacatacgataacaagtcagaagactagacatgagatgccattttttttaatcaaatatatattaagttgactaaaaatatatttagtcacaacaaattgtaatttttctgactaatacttttaaccacggactttttagtcataacataggaatgataatttatanttagtcacaatttttttactttttgtcataagttttgttgtgactaaaagtaaaaaaaaaattgtagtggttagaattagttctacttacccatgatgaaagctagtacgaccctatagtaataaatttttataatttctagccaccatccatctatagtagctttggcccccttcgaacaatggttgcgtctacattaattttgatactatgtgtaagacctctctctctctctctctc

SEQ ID NO: 6226 - DNA, 522 bp, Cannabis sativa
aaattcagagacccaaatccattcttaaggcaaatgatgagaaaattagggatcacctcgtaaaagttagcaaagatgaattttctagtcgctataggtaatttttgcaagagataattgcgggtaaacgtcactacttgcgagaagcagcttggcctgaatcatcaaaattaattgatattcccttagcgagaccattgtttttacctccattcactgtttctttttcatagggtgacttagattttaaaattatggcttagaaagcacgcaaatcaaagactccttaagaccctacagtcacctttgaggctgaattgattgagtctagagtcaaatctataggatcttatgttggcgaagtatcaaaatcatgttgtattaaatatgaacaaggatgctaagtcaaatttgtcgttgtaggggaattcagttgtttttctcctgaacgagtgatttgagaaaaagactgtagtaccagtaagccatctaggataggcgcttagagccttgagcatataa

SEQ ID NO: 6227 - DNA, 833 bp, Cannabis sativa
gaatatcatacaaatgcagtggtataacaaccaaaaaattccgaattaaatatttcagaattgctaatttttctcaaaaattcagaaaattgggtgttgactctttattcttgaatacacacaaaatctggaagtcaaaatatcttgatatttccaacatgccttttataagacatcacttctgaatttcagaaaaaagagaaacatttgatttgttctatagtttatgttggttttcatgtcatcaaatctcaaagctttaacataatgctccactactcagcaaaatatacttcatatttactacatacatatatagttaaatatatagaggaaaacagtgataaagtggccttctaatattctgatattaaattacttaacttctcactatggacattggttaccaaattcatctcacaaagggggatcatgacaatgcggacatatgctttttaagttctactcttatgatataggttacgcttatattttttcatatgcaatacatatataaatatatatttatatcaaacaatgaccaaatcaggaaaatgaaggtacctgtaggcccaccaacataaaccacaagtaagggctttgggagaggtgcaaattcatcatgccatgtactggctgcactacgaagagcagtagaatcaatttgatgtaaagctcccactgtgaggacctgtatgcaaagtgggtaaggtcaattacagtatccaaaattattaaaaaaattctctagaagttaagagcaggatagaaaaataaaccacgaataaaatccattatgaaggcgtgatactcaccacatgcttgtcaggggg

SEQ ID NO: 6228 - DNA, 871 bp, Cannabis sativa
acaaacaaaaagggcttcaaattagttgagtagactaataatgaaaacacaattacaccacacataacaatggtgtccttcacatattttttcatttaaatattttagagatagttcaatcacggtaccagcagcagtgctttggtagagagtttcctcaaaaagaatgacaccactgaggcattcaaggcctccaggagtggtgaaaaggagctcacgaagagcacgcctgttggactcgacattctctacattgatgctagaaagacgcttgccaatggtaccagttgactcatcagcggcaagaataccctttccaggggtaccgatgtaagcagcgttggcaatgagctcatctgcaaagtaagcaagatttagatcaaatgaaacataagttcacctataaaagctaataagagacaattcaaacacttagatacataaatttcaaatttctacatacacaatgctcctaatcaaaatatacaaaccaacaaattcaattgcttggatgcataaaattccatccttatacatacttatgctcctcctaatcaacacacaaaaccaaaccagaaacaacataaaccacacatgagttctgcatcagggcaccaaacttttagtgcttttgaaaatttaattttgtacataatttaaaaatataaactttgacaaaaattcaacttaaaaacgtaaaccagatgtatttgcgattgattgtgcataaaaccaaattgaaaggggaaaaaaattacaaattgaagatctacgagctcttttatttttctattttgctctctgttttggataaaaatatattactttcaggttgatcaccaaaactttaatatgaaattcaggatctgca

SEQ ID NO: 6229 - DNA, 732 bp, Cannabis sativa
ctgtacaaacaaatccaactacttatgaaccaactataacacaagatgatccctcatgctcgacctcccatgctaataaacctgttgattcacatcatagtctctctgaataggttattggcagtgtgcaacctgttaacactacttctgctcccatcgaaattttagtccctattgttaatattgcactagcaccaccttctggtcaaacagaagttcaaacttccattgctttttctacacaagttgagcacagtcactcacaacctaatcttcctgctaatataaccaatcaacaggccaaacacaaaatgcaaactcgatccaaggcaagtatttacaagcctaaaacatttattgtttccaaactcccttagtcatttcagcaagcatttttgtacggtcattggaataatgtaatgtcgaaagagatttttgctctaaagaaaaacaagacttggactcttgttggactttttgcaggaagacaaactatagggtgaaagtaggtttatagaatcaaggaaaatgttgatggttcagttaacaagttcaaggcaaggcttgttgccaatggctttcaccaacaacatgagtttgatttcactgaaacatttagtctaatggtcaaaccagtcacaataagagttgtgctaactcttgctctgagcataggttggtgtgttagacaattggatgtgaataatatattttttgaatggtgatttacaa

SEQ ID NO: 6230 - DNA, 845 bp, Cannabis sativa
tataagttaaattttataccacaatatatatacgacttttttatttattattttactacacattaatataattaataattttttatatttttatgagttaaattttttatttaagcttacattaatttttcttaattttatcaaaatttaggttgattggattttttttttattgtgttaatatatagcccaattgttagtgattgtggactttttagttaactgaaagactttgaagaacagacctactccaactaaaattatatatctaactctcttctctaactctatagatatatattatcttattacagttgtatacttttgataatcaaatagaaattaaaaatgcttctgatttagagatctagaaatgaagacttagttgatagtattgtgctatcaaattaaggtaattgctatggactaatcaggaatatatccctaattcttatacattattattgtgttatatattatatacaaattgtatcttgggttatttaattttctaatatgtggaatcagattgctaattgtatatgatttaggacctataatttatataacaattgatattgtatctaattacatattacttttgtaattattatatgttaaaaaatttcaatttttaatcttaaactataggagttttattcttcatgaaattctctttcttttgatatattatttatataaaattgttgattatttaatttgtgagaattttaagtttaaagtttaaagtttgtgtgagattatattatgacatttattttgagttttttaattttactgattataaactaaaattaattgtgcatatatcattaactattact

SEQ ID NO: 6231 - DNA, 1030 bp, Cannabis sativa
catcatcttattattatgcactattttgttcctcctaaacaaaattcgtcacataatcaccaaagtcagttcacaagatacaatcagtaaagggtccaaaacttgtggataaaatcataaaaatcatgacaaacaatgagtgggggtctcacaaagagatatcactaagtttacgacattctgctaaagaagagcatccccatagagcatgatgggtcaattctaactgagtatcacaaatagggcatacttcatctgtcagtaaatcgtgctttgtaaggttgcatttggtaggaatccaatcgaaagagatttgccaagtgaacatcttcaccttaggagaaagattaagagaccaatatttttttcaccacccaaagaacccaaatgaagaagacgggcgaccaacccacaggttgcgaacaacaaaccaataaccactcttgacagtataaaaactaaatttttcataaccccagatcaattcccaagttggtacaaatggccaaggaatagagagaaccgtcgcaacctcatcatgaacaaaaagaccacgaacaagctccaaatcccaaatccccgaatcagatctaagttgagaaattgtacttccttcacataatagattaggtgacagaacaaagaaattagacagtatcaagacccacccgtcttcatacatttttacatctaactcgtttctaactctctaaatagctccaacatcaagcaattccttcctccataagatgttcttctagagaaagaaacttttcttaggcttaaccatagttccaaaagttttttcaagtgatagaagcctttcaaaaccctagtatatcaagggttttcaaatcatcataaagtctccacgcttgtttagctaacatagcttggttaaaaatgtataaatccctaaattccattctaccatcttccttatgccatcaaagtttctcctaggtataccagtgcatcttttgtttggtgtcatcatcaccccattagaatctggcacttatgccatgga

SEQ ID NO: 6232 - DNA, 979 bp, Cannabis sativa
tagtaatggtgatcagttaaggattttcaagggtttattttatttttaaaccaaatgtgatcacattttcttttgtatgcataaaccaaacacttatcttttgtgttagaaaacttcaaatgcagttttacatatgtataaccatatcagaagcctacgaaatctgaatattttcctttttctaatatgtgtgtatgcttttttttcttttgaaatcaacatatgtatgtatgctctgagatcaacttaattattaaaaaaaattgttgacagtataacatctctcttatataagatttttatttgattatgtatcatacatttacttatttttcaaagtctaataaatcaagaagaaacctaatttatttatgtatcatgtattaatttattttctgaaacctaatgaatcaaagaggaacataaaaacatttatgaagaatttggccgttaaaaactatttttttttattaaggtttctattctcttctttaataatgcatttcacattgacttatacttttaaagtcaatcaaagagaaagataaaaggtggtggattggaagttggaacaatagagaaaatgattgtttcactatttgttgtttttcactcttttttattatgtttaaaatccattcttaagggaaagtggtgaaatggaggaaatattgaataattttacgatgcatttcttaacatttttagttgttttggcattcgaaataatttttagtcaatttttttttctcataattatgtacgctatagttattaagacatgttgcaaaattttaaaatattcagaaaaatttaaaaagtgtagaaataaatagaaagttcatcaatgcatccgcttttaaaaggtgcacggtaaaagcaccctatttaatttatgaaataataataataataacctttttggttcaacagacataattcaaaaatgaacttcttattatatgtttgcttagaaata

SEQ ID NO: 6233 - DNA, 640 bp, Cannabis sativa
aggccctacccttatccgtcatctcggcggccggccgaagtcactttcaagaatttcgaataatcaagccgtgggtacagatatcagggacgtgcatggtactgttggtagtggtgcggcctcaacgggtacgaatgatgaacgtataaatgccaagacacctggcatgaatgcaaaggagacaactgtaaagttggttggtgggtttaatatggaaaacgtggctcatcccatgaataatttgggcagaaatcctgatgataatagggtcattttaagtatgatgcccaatgtgggcccggtggtggcccaaatacttgaaataccccataatgagatttgcaagtccagaactccccatattcacccgagcccactattatttctgggccgctaattgatcctttggggaaagtgactaatatccctcacaatgaaggcaagcccatttcaaaagaaaccaattggtttcattctacagatgtgtctgtgctcagggaatcgggttctaagaaaagaaaggcagtgggaaatgtttctcctattctgattcaggcagacgactctgtcactggcgacaatgaagtttcaaagacaagggaagtgggaggcactttctccattggttcttcatcgcctg

SEQ ID NO: 6234 - DNA, 1007 bp, Cannabis sativa
tgtctttgattgttacatggcttgaggaaatggtccctcttggcattttactggtttttatggtgccccggctgctcaaaatcgccaccttacctggacccttttggaacgtttaaaagatgttgcacctttgctaccatggatagtaattggagactttaatgaaattctttccaatcacaataaatcgggtggtgctttgcgtaatgaggctcaaatggatatgttccgacatgtgcttgatcgctgcaatctacatgatcaagactttgaaggagaccagttcacgtggattaaagggagacattctaccgatgcgatcaaagaacggtcggattggtgttttgttaacactgtggtgtgagacttttcaaccgatttttactaaacaccttgattactatcattctgatcaccgtgcacttgctgcccaaattttgccaattaattctccaaaccagcagcagtctaagcgcaccaggttttgtttcgagaagctgtggttgcaagaagatgaagctactgaattgattcaacagaactggcatcaagactcacatgaaaatgttgctatggtcttcctcaacaatctcacaaggtgtgccaactcccttcaaatttggcaccagcaaaagtttggaagctttaagaaaaaaatcaaacatgctcagaagaatgttgcagccttgaataattctacagaccgttctccaactgctatccaaaatctaaaacaccatgaaaatgtgttagatgagttgttagatcaagaggaaacgtattggcaacagcgatccagagtggactggctgcaaaatggcgatcaaaacaccaagtttttccacgcttatgcatcatctagaagacaacataacaaaataaagtctctggtaaatggtcaaggtactgctgtccattcaaaacaaggcatgactgacataatcacatcttattttaatgatttgttctcggctactgatgtacatcctgaagcattgcttcatacg

SEQ ID NO: 6235 - DNA, 1136 bp, Cannabis sativa
tttcttcgactatgtatctttttagggtccctaattcacggaggataaactgagactttttccattaaattcaatgtgtcatgtcttgcataaaacacgaataacacttgtatatgtcgggatcagcttcgttgtgtgtatggcatcatgaaacaaatcaatatatatgtggagcacttggtgcataagagcattgtcgatttatctcatttagctacatcttatgttttaggccatggcttgctcattattaacttatgtcaaaggaatagggtccctgaagataaatttgatgcacccaggaaaatccaaggccccattacactgatttatatgagtaagtttcctgatcccactcctcatcctttgcctgctgccacccctcctaaaatgtccaaacgcactaaaagtgatgtgcatgtagaagacaaagtagttgctatagaattgggttctcatcaagaagctggaggtagagggaaggtagcccctatgcctagtgggagtaatggcctagatccttacatacagtaccttattgtccagaattaatacatgatttaagctcagcaaggaatgaatgccaattttaaaaattatatggattttagacatgaggattagcttattcaagtggattagttgaatgaattagttcaacagttttttcccatactctttgtagtacactctgtactagtggtcccaccgccacctcctctgcgatactaaagtggcatcagtaagttctcttcctttgtactttcatatcacattggggataatgtgcaactaaagttttggacagggcttttaaatttttttaaatcttttgttattttgtgttgtttgtagtgtttgtttttagtaaattgttaagctattaattttgtctattgctggttcattgtcacttgtgaaaatgaatttgttaaaaatatatgcttagtttaactgttttggagtttaattgcgatgtttgtagaaaattaagaatatatttttgcaaatgtaaaatttttgaattttattttatatgcttgactagggttagaggtatgttaaattggaattggatagaagttgcattatttggcctatgaggaaaaatgcttaaggacacatgctttgaaaaa

SEQ ID NO: 6236 - DNA, 573 bp, Cannabis sativa
  modified_base (263)..(273): a, c, t, g, unknown or other
tccgggtctgggattcgggtcgaggtctgagatctgggtctagggtttggatccggggtttaggtctaggtccaaggtccaggcttcgggtccaggtctaggtttaggtcctgcgagatctaggtccgggtctggggttcggggtccaacatctaggtataggtttgagtttggcgtctaatttcgggttcgggtctggggttgaggtccaggtatgggtccagtatccgagatccgagtccaggtttgggtcctagtccggnnnnnnnnnnnggtcaaggtttgggatctgggtccgtgtcgaggttggggtcgaggtccaggtctggggtttagggtctgcgtgagtgtccagagtcggtgttcgggtccaagttcaagtctgattctgggtttagactccgtgtatgtgagcataaatattaaatataatatgttagacaaaaaaaattgttttttaaaattgaaaataatattttgaagttttttgtttctagttttttttaaactgtttttcttttataaaactaaaaatcaatacaaatgttaaggattagagacaaaagccaagcc

SEQ ID NO: 6237 - DNA, 739 bp, Cannabis sativa
agaaagttgactacatttcggtgaaggaaactgtttaggaatcacttcgaggagatcctaatgaggtgaaagagaccatcgtggtcataactactgaagaggccttgaaagttgtgaaggccaatgaataatggcttgctgattggaagagcactttctagaagatttgagtgaagctaaatggctcactatttgcttcagggatgtagtcccaaatgagggtgctttgagagcaaatacttcttgtagtggtgaagcaccctttcatataattagggctccctccttagcagacatagataatactgatcaagggggatttgactcatattttttaaatatagatccagttagatatccttgcagtgattttatagataaagcagattgcatcataaggagtcccaactattttgttccactagcgcaccatcatgttagagtggacatacttagtaaaatttactcccagggttctttcagcacgagactaacttaggtcgagagaatatttgtcttttggctagaagaaaagtcaattatgctaagataaacagtttgaatccttctagcaaattttctgatagcttgtatctgtaattatatatatgacatactctaacatgatgtatttttttatttatttattgcagagcaaccgttacattccaaatgggtttgcctaacaatttcctggatgccatcaacactatgacgaagtccgtgaggtggccacgga

SEQ ID NO: 6238 - DNA, 602 bp, Cannabis sativa
gtagagtcctcctagaccgatcaacatgtctctcctgtctagtttgctagggtttttcttgttactaccttgatcactggctttgcatgcaagtctacgtacaaagccaggttgattaggtttagtgggaaatggggttcgaatggttggagctgaaggagtggtggtcatcaccagcgggtgagtgagagacagggaagccatagctattagctatatagtgattttggtttggtttatggtgcaagactgaacggcatgcactgcgtctttataagggcttcatgaagttttttttttttccttacttcctaagtgggtggagttttaatacgtgggttttgtaagtaggaaaattatttatatgtattaattaccagtgggcgagcccctaccaggcatgggctgctttaattttattttatttatatattgacaaaatatagcataattaataaaataggaaaaaatctcttctattaataattagtctaaaaagtattttagattaacaaaaataggaaaaattataaatatatacattttaataaataaaattcaaagtagttgttcactccaaatccaaaatcactactacgtac

SEQ ID NO: 6239 - DNA, 866 bp, Cannabis sativa
agagaacatcattttgatgttttcggttttttgttttttttaatccaggtttttaaaaagatttttaaaaatttaaccaaacactatcaattagttttttttaaaaaaaatattttcagtttttaaaaattaaaaatagtttttaatctacaaagccaaacaagctccaagtctcccgcaagaccagagcagggcaagggaaaaaagaagcatgcaaatctgcaaaagaggtacaaacagagtcaatacacttcttcacatcagcagaacagtttcctttatactgtaaattactcttatattttgattaagttttaatttaattatttttttattttttcagcaacataagaaattacaattacatggatgggcatgtcagaatattatccaccatctcatgatctaatttatgaaaagcctaagagatgtcttaattcttactaatggatcataaaggtaaagaaatttttttgacaaagttagggagcaaaataattttattcattaataaaaattttaagttttactaattgataaattgttaaggaggcatatgacaacactaatatgagtacaattatataaagtgacaaagtttaaaagaaaaataattttttatttttttgaaacttaattatattaactcatagactaagactcattaacgcctcaaccacataaaaatcattgttacattttcttcaatttattcttcttttatccttaatttatctcttaattagtttctaaaaatctcggtaaacatgtagattttatccattaatgtgaatcactttcatttcttttgttgatttttgtcctatcctttgaagttgtatccatattatttttgttgctaagtt

SEQ ID NO: 6240 - DNA, 874 bp, Cannabis sativa
tttgtgtttactacagaaagatggcagtagctcagattatagcagttatcttgatgcaaaggtaggctgccgacgtttatataacattatcggttaatcattgatgatatcgacgacacattgtctttatggggctagctcattggttggttggacgactgtcccgaaagctgtgatttttttttcaatattttaccattttgaaactttgttctggttgaattgcagggtgatgctgatatctttttccctaccgattttttgcttttggaaaatatcgagcattactgttctggatggcagagaccgaacaaaggtgaatcgtccaagcaagggaaaaaaaggcgaacaatcatagtaagttaaatttcgatatgaagaagttcagtctttcttgtttgtttgttttataatgcaatgcatacttggtaagataacaagtcattagttctaatcttttcttcataacaaaaaagttgctttggtttcatacataggcagttggataatcaattgcttaaatgttttgtattatgtgtttgtagctcgatacctcttcgtttatggaagagtttggattgccctcgaagacgagaaccaaagacggatacaacccgcttttggatgatttcaagaacactaaattctaccttagtgtccctacacataacacaaaatagacaattatgattcatgctcaattgacacttatttttggaaaatatggttacttgggtttttggagatttctattttaatgaggtgggattcgatacaatttcgatactaaactaggaaaccgaagtacaaataagtgagttgctttgttttttttttgtaagtacacagatcttttgatactgataaagagcat

SEQ ID NO: 6241 - DNA, 599 bp, Cannabis sativa
taggacttttggactgcttttaacagatgggtatatatattgtcatcggtctctaagaccgacgttttgtaaaactaggtagaataggcattagagaaaaaatgtaagtaaaatattttaaacactcacttatttttattagcaaccgttttcaaaaaaaattaatttaagtactcataaggataattatttttgtaataatgatgtatataaaaatatatatatattttttggatttgtattgttttgatttttctatgtatatgaatataatttattggtttgcttttttagctatagctagctgttgcttccaactgccttcataaaaataatattgtccaacttgtattttatgattatgatatgtattatttatatgtcatctagtgtaagtggcattttataatggaccatatattatataaaattatataaatatatatcatgaagtccaactagtcacctataatatttgtcaattatatataaatataataatacatataataaactatatattataatatatataatggttttgtatatatgccactctttttaattattttctatccagatatttgaaaatgatgtat

SEQ ID NO: 6242 - DNA, 1476 bp, Cannabis sativa
aagaaactgcatggcttaaaaaatgtttgtctttattttgttgggtatttgaaactattggatgaacatctttattttaccctcataagttgcgaaagaaattgataaactctacaaaattttcctttgagtctctttgatttcactaatttttgtaaagccacagactttcactaatttttgtaaagccacgggtttctttgctaataagtcaaagtcttctatttattttggaggcatcactatagagactaaaaggcatatgttggatattgtaagtatggaagagtgtttatttggaaattattaacaagattcaaaagaagctagatggctgagaaagtcgtcatctctcttttgtaggaagagctcatctcattcattctgttttgttgagtattcgaaactattggatgaacatcttcaatttattcaagaaagttgcgaaggaaattgataaactctacagaattttcctatggggtagctctggtactcgaagcaaacttcatttagcctcctgggaaaaagtctgtttacccaaagactttggcgttattgggtttagagaaggcaaaaaatggaatgtagctcttatggccaagtacatatgggtgttgtctactaaaaaagattgtctttggataagatgggtgaatgcaatttttatgaagaacgaagagttttggtcttgttgtccaagtaaagatactagttggtacttcaggaagtttattaatcttaaagataagatcaacaaacaagagctaattgaggcgggaaagacaagtgttttcaaggctaagaatttctacaactccctcctctcagattcaaaattctcctaccataaagatgtttggcacaagttcaaagtccctaaacaccactttatcttatggcagactcttaatgagaacttgctctcactcgagattcattggcaagaactattcaggtggattcttctctttgcctggtttgtattgaggttcaagagtctcattctcatctattttttgattgtattttctctaagaaagtattcttgaaatcacttgtttgttggattggtcattttgattggcccttgaatcttgatgcttggttgaacagattgaatggcccccgaaatggtctaattgaagctataacttcaactgtggctgcggctattgtttataacatttggtgtaataggaacaagtgtgtctttaaatgtgtgtggggttcaatcaaggccattagttccatgattaagcttagcttaaaagctagagttagctgctgtaatttttctaagtttaaagctagaaagaaagatgtaattttcttgataaacaattattaaggttgtgtgggtttcaactctattttgtatcttatttggtgattgtttgaataaaaatttcttccatgattcaataaatatatatattaagcaaataccaataaaaaaaaactatttagtgacaa

SEQ ID NO: 6243 - DNA, 1873 bp, Cannabis sativa
ttttttacactacactttttaggattttgcctcttaatttttttccgttaaaaaatcctcgcggtctatgaaaattgtaatttttcctttcatttattttttgagattatttattgatgtagctataaatcaaagtatattgtgggaaattttaactaatgtgtggaatcaaattaacttaaaatgaatcaataaataattagcaatgacaaaatcaactaaacacaattcaagaattggaagaataataaagtataatagagacgataaaatcataaataaacaatacaagagaatcttaaaatcaacaccaagaattatactagtttaagtctgataaattgatttgatctatgactctactacaattttagaacaccaacaaaacttcttttattgattgagcaagaacacaagtataattcatttaagagtggttctttgtttggattctctcaagatattttctctctaacactctttcttgagaagcttctcttttacaaaattcaagacctcttttttctctatacctattacttttctctcactacctctcaatcaaaactctctcaaagaacttgcatactctctgcttctggtgtttagtgttgttgttatgtctcaaatgacgagaatgattgtatatatagatcgaggatatgaatcccaaagatggtagcttcaaacaactaagtagttaattcggttaagacttagacggtttaactggttccttacaatgagatctccaagttagctcttggcactgagctctctccgtacatgtatcacacttcttggacaggcgtctcaaactcattaagcacaatttagaaggacgtcccggataggcacaaggcctattggaacagactccaaaaccccttcttggaggaaccagctagccttctgaaatcctttccaaacgacgaccaacttttcacaagacttattccggatggacaagctagccttcgggaactccttttcggacgacgactaactttcatgaagatttaacttgaaatattttcatttaaaagaactataccacatatgttattatagtagaagaatttatttaactaattttagctaatttaaactaagtataatgaccttaaacatttaaacattaactcttaaattatagatacataatctcatattttattgttagatactgtttatactattattttttgtttggattcttgaattacattaaccataagagagccttatatcaaagaaactgtttgtaaaaaggttaattaggattttaaccccgcaaattttgacatatactaaattatgccccttgaaattttttggccgttaaaaatttctcctaaactattgaagttattggatttaaggacttttgtcaaaattcatttaattttactaattcaataattatccatgtactaaatcatgctctcgaactttgatatttaccaaatcatacccttcgaattttgacatgtgccaaatcatgtctcctaatctttcatacttatcttactaaaattagaccaaaaattttaaatttaacaattttaatgatttaggaaaaaattgtaacgttcttcaaattttaaaaaatataatttagtacatgtaaaagttcaaggaacaaaaatcttaattaacgttgtaaaataaaccgaatgcaattaaatggataaatttacaattatttccaaaatctaggataaattgtttcacaaaaaagaacaattcaaaagagaaatcctttcataatttgggtaacaaaatccaatttattcaaatattgatattttatagtgtcagtttggaaacacttattattataatccaaatgtatgtagagagagagagagag

SEQ ID NO: 6244 - DNA, 551 bp, Cannabis sativa
atgaatttctagttaattttttcttttcaaataacacattaaaaaataaaaacataataatgaccgattcatagtatcaattatttctgtgatttgtaattgctggcatggatctatcatagggggatatattctttttatgaatacgtggtgcagcctattttaacgcttaacttttatttttaaattattgtaaggaaagtaagaagataataaagaccaatattggcgtcttatatatagttttaacctacgaagtgaatctagtgatgtgtaataaatatatatatatttttatatatattccactttttaggttaaaaagaaaaaaagctgaattattatagttacaaaaagttaaaagcttgatttttattggcaggttttggagttagggattgtggtacattctgtcatcatagggatatctttgggtgcttcggagagtcccaaaaccataagacctctagtagctgctttgactttccaccaattttttgaaggcatgggacttggtggttgcatagctcaggtacgtctatactaatttc

SEQ ID NO: 6245 - DNA, 1056 bp, Cannabis sativa
ctctagagaagaaaaggtcatccaacttgcttcctatacgtgtctggctggccaacctaacaaggttttctgtacggttttgcacgtggattgaggattggactacgaattagggcctaacagcccaataagatagcttgaaaatatccatgtttaagggcattttagtcttttgtaattaactaatttaatatacaaatatctaaggattttaattgtaaattagggtttaggctctcctatataaatgtcttaactctgacttagaaaacgtaagtctcattctagccaccaagtgataaagttctaagcctaagtctctaagtctgataactctctcttcctcactctctctcacacgcccatacaagcattcttaacacttgagatttgccatccttgattcttattttgtatccttaagggagctgtatcagatcccacatatagtgatttgaatagtattatccctcggtatcaatacaactaaaaggggagtaggtcattacctgctatctaaggaggccgaacctctataaaattttgtgtgttctttactttataattctaattgtgtaacacgtggcaaacatcaaattcatacaattttcttgtcggttgatcactttttgaagtgttcaagtataaaatcatttaagtgacttttatgtgtatgaataatatttcatattcattaccattaattccaaataaattatttaataagtataaatattctttatatagttttcaatataccaattaatttattttttggtttgattttttgaattaagtatcaaaatattctcacaatgaatgtggcatatatactgatatagtatttcacctataagtaccaatccccgagctcctcactcgttctgtgaaaaataacaaatttcatctaaagagagtttaaagagattggaagcccgattacccacactaattagtttccttttctttttcagatccaaagctcgtgtgaaattgaagctcaaagaattaatagttgaaactattccgatcctttatatcatatatatatatata

SEQ ID NO: 6246 - DNA, 1510 bp, Cannabis sativa
tgttcgaatttgggtttgtcatacttcttattcttctttatcatattgttgattgaggtaaactggagttgatcagagttcattgggttttctttggttttgttatttttgggataagtctctttcttcttccttgattattcagaccgaccaagaaagttttcttctttctatatgtcgagtcgatacaaaatagttttgtgggcatagttaattcggcggttttaaaaattaggggttccccctcttaggatttatcgcattaaaggacattattggtccctcagttttgttttctttttctccattgaccaaatttcttggcaaaaatgagggttagttttgtcaattgaggtctacttttgtttaattttatatttgaatatttggttgatgtatcttttatgagattattgcggaagagtatttgaacacaagcggtggtttttgtattgatatgctttctagggttaatttggaggagaagatgatggttggaatagtgaagaaccagtcatctcattggtggtggcttgaccatcagaacacctcaaaccgctctccatggcttcaatccactcttgcaggtgctccttctcttaccttttctacagtttttctctgtcttttattatttgagtacttttgaagttaggcttttgattcttgaccgttgtgagctcttttatagcttttcaaactttaggttttatttgggtctattttaaggttccattaataagattagaagggggaagaaagtttggaggaagggttaaacacacaaactagtgaagtgttgttattttgtttttgttatatgatatttgaaatgacccaccatggatatattaaaatgttttgaactgaagactaccacttattagtacttagtagaaaccccggtataataaaaagtgaaggttttgggtaatcaatccaaaaaggtgggtttctcatgtgggtgcctagttttgtcttttggatcatactcaatttaccccatgtggggtaagggaaggttcctctattgttgctcatttcaattacattatgatatctttttatggcaacaatttatgtgttctggattaaaccattcattctacttatgttatacaaaaactggttcttgccttcttaagacacattttttttattatttaattttctgtacatagtaaagtttggaatacaaaaatatagtgatcccattatttatctttgcgagttattccatctccatgagtctttattggatatgtagtttttggtggtacatattaagtgaagggggttattgcatagacatattcaactaactacattgagaaaaataattgacgatgaggaagtgtaacggggcttaggagggccctttgatattttgaggatgtactgtactgcatattatttcttgattttggaacaggaaagaaatttgtggtcagcgttataatgattacatgtagtgaaatagaaaagctcagtagtactagtattataatgg

SEQ ID NO: 6247 - DNA, 939 bp, Cannabis sativa
attattagtggctatttaatagcaacgaactattagctaacgggagatttccactgctaatagcctatagcagcaaaattggggtttattagtggcggacactaataaagggatatgttgtacagcgcaccaagttaaatgtcaacctaggtgcctgttgcacaggagtgccaacctgggcgcctcccaaggttttctcccaccaaattattttcgtttgttgttcaatagcatttgtatcttcatctttgatgaaaacaaaaggaaatgaaggggaaaaatctttagaatatacgtcagagtgccttaggttgacatacgtcaagttaggcgcccagtcttaggaattcgtctcattgatgcctaatcttctttctggtggaaagtgcacacgtaaattttgtttcgtctaattaatttgcatgtgcgttactcactgaacttgagtcagtgccctagcgcccatgtcaatctggacgcctagagtttgtttccttcattcacatgtcgaagtgatattaagccataaataaaagtgatattaccatttcttttcccatttatattaattaattgagtagtgaaccatagagatacaaatgatgaactaaagaaatccacctctcattgaaccctaagcgtggcattataccacaaataaaaatctacttgtaagccttgaacatatatattcgcatttagagcaagataaccctaatatttgcttttcttgactcaactcgatatcgtaaaccttgaacatatatttatgttatataaatttggccaaaagaagccattaatttattttattttagctaatttaatagtctctgtttatatttaaaaaatttaaaataattcttttgttaatttttacaaaatctactaattaaataacattttaatcaaatccatttttagaacactataaaaaat

SEQ ID NO: 6248 - DNA, 860 bp, Cannabis sativa
aagttaggtggtattggttttcgaaaaggcatgcaataaaatatagcgttgatggcgaagtttttgatctccaataaacaagactgcctttgggtgagatggatcaactccatctatcttaagaagcaaaacatttggagcattcctatcaagcaatgagtgagttggtattttaagaagctgctgagactcagacaaattacgataaagcttcgttgaggcaagctaaaaagtgaggaagattttggattaagcagttttatacctctcttgttgttgctcaaaaagttgtttatgttgaagctctgtggaacaaactcctagtgtccaaacataaatttgtatattggcaagtttttaactctcatctacttaccaaagatcatttgagcctataatgactatcccttttgttttatgccctgtctgcgacactgaaaatgaaactcacaaccaccttttcatgaattgtatcttttccaagaaagtctttaggaaaattagcagctggctgggtattcatcagtggccaaattccttctcggagcttcagcaatggtatttgaactctactagtgatttgaagaatcaaattagaaatgttgttttatctgcaactttgtattttgtttaaagaacaggagcaagtgtgtttttcaatctctttgttgttcggctaaaagtaataactttttaagatgaagaatgttgttaaatgtagagtgctgagaatgggtcctcataaacacagaacccttttcttttaagcagccacattgattggtttctttcacacaaacaatgaattccacttgtgtgtgtatttgtgatttgtcacaactcacagtcaagtcaagata

SEQ ID NO: 6249 - DNA, 835 bp, Cannabis sativa
cataaaatttataattatcttgtaattggtatgtaagaaaaaagaaaaaatgaggataggattttacccatttaacaaaacagctgtatcaaacactccatggcctctatgaaccatgtgatcatcaattggaatcatcatcatgattggatcaacaatgattccaccaaaaatgcttgaatacatagctgggtatggttgtttcttcactaagctccatttctcatttagttttgcaagtaactatttcattttcaaaaataacaaaaaaagaaagcttttagtaatacaccatttttatttacatatatataacataatcattaaagccaaacaaaaagaaaaaaacaatcacctcttttgatgattgaaacacatgaacttcaagctcattcccattttcaacctccatggattccttcaaaataagcattaattgaactaattaaggttacaaatcttcttaattcactctcacaaatgataaataaaaataaaatgaaaacacaattagaatttaatgttaccaaattttttgatatatcactagatgagagatgcaaaaatttcaaatggtgaatgaaacttttgttgtaatgatagtttatatagaaatatatcttatgttattttttattttattaatttttggttgaggacaaaaacatttaggtgtgggactaattaaagataaaataaaaattaattattttggatagagtgaaaatagcaaatatgattcccctctttgtttgagtgcatatggttcttggtatttgtcaccatctttttaactttgatgcttcattaattattattatttggagtgataata

SEQ ID NO: 6250 - DNA, 823 bp, Cannabis sativa
ggcataaaacccaacatgatgttacaaacgatgtgtacaagatggggttatgtgcattttttttgaaggtattttattgtcacgagctgagtgtgtatatatctatatagatatgctgaaattagtaaaaaatgtagacaatttctttaaatatccttggggcttcctttcttattagaagtcgttgtcttccataactcaaaatatgcagtagcttaggtaaaactacatggataaggtcttaggtaagaaagataagatgaagaagaaatccaagaaggaggaaaaagttactcaaccagaagcaaagtataatatgtacggatatgcactaaccttagaggtcatgcaagatgtggggaaaaagtatggccagtgcaaaggaactatattccctcgaatgttgaactggagcatccccaattcagttgcaaaacacgatgtgaggcaacctgatgtggttgcgctatttgagaaaagggtatatgaatctttctctatttatcattgttgtttagatgtctatttcgctataagtattatttgtgtttattgtggactattgtagttgttgtgcgataattatgcgatatttgtgcgatatttttttatgtttatgcaatatatgcttaagtttgtgcaaacattttcttttttagcgatttacatattattttgagcgacatttgtgtgatatgtgtgcaatttacaacataatatttgtgtgcgtattttagtgatttacattatattttgagcgacattgtgcgatatatgggcgatttaacctaacattgtacacgagtttttttttttttttttt

SEQ ID NO: 6251 - DNA, 917 bp, Cannabis sativa
agaagtacgagtgaagtggcaggatagcccctgctcagcatggggaccagaccacaccatctagttcttaggaggggaatgttctaggtattcttcacctggcgagtcaatgtcaagccccccaaccaaatttttggccacgagattctttaaccttgcatgagtcagtgtagataagggaatacccaagtagcctctggctcccctctttggggcaaaggcactggggctgccaattcctccttagcatgatcagtcccagcataggatggcagcccatcttcatttagaggctccctagcatcattgtaccccctaagaggttttttgtaataacatcacagtctttgactagcctccgggccggtcatgccctttttttaagctcagtaggcctttcagcctactcaacatgcatcttagcttagttggcttgtgcaacccatcctattaccatcagtttagcaaggtggggtcaattgaaggagctgcgcaataggtctactttgtcctggtcaaatttggatcctgattggtgtaccgtgcaactatcacgaaaatgttaactttagatggtttcttcagaaaggaggatctacgtccctctagcagggtgtttgggacacctggtcgaacaatgtatgtccaagaagctagaagaaattttttccaaccccagtttagctcccaaatggatcgaccatagttttctcttccaatccattcagtgtggtggtggtgttggatttcttattcaggagaaccactgttgacttctaagtcaaaaaaactgcttgaagagctgtttgttgaatcactagatgaagaaccatttgcgtggagtgcgagatgatctttaaagagaaggttgagaagatctacgtctatccagtgttcacctcaccaatagtcgcgca

SEQ ID NO: 6252 - DNA, 1249 bp, Cannabis sativa
acacatacaagggcatttaaactatttcacacataacacatactcaaataactttcagattatccacacataaatataatgccaataattaatcccatggagggctaatcactggaatcgattatatcaatagacactgcagtaaaactcagtaaatttaattctataattgttaagagttcaattctatattattagtggagtaataatggaattaataaacaatgattatttggttgatgagactcaataaataatttagtttattggagcttagaattattagtccatgatccccaaattaccaccttaaaacactatcaagggataaagagtagtataatatcgttcgaaaaaatctattttgaattagttaaatagtaattatttatttttgtaataaataaataatttttcaaattaattaaataggaaaaagacaaaaaaaattagtacaaaatttgtcaagataagatttgttaagacaaaaattgtgatgacaaaagacaacatctttgtcctaaacaagacaaggtagatgcctagcataaagcctgtccctatggagtttgtctttttgagttaattaattcaattaggtatatatttgaatttaaaaagttgttaagatattctctctcaagtagttgagaaattctctcataaatatcactaacaaaatttggttatagatatttatttatttaaataattaaatatgatttaattaaaggatttttaactactataaataaaaacctgatttgagaattcaaaacacttctttgacattataatttttgaaattaagagagaaaaagaaaagaattttttctctcaattgttcttactcatgtgctgagaactcaagatcaactctatacactttatcctaatagctcacagtatttcttgtgtgtggtggatcaatttagaagacactagtgtgagttcaaattgcatcatcgggattaagatatataatatgcgagaagttttaaggatacccgaatagtcttcaagaggtatattctaaacttattatttttatattttgatttaatgtacacacatctagagatctattaagatatggtacaatggtaattagtagcacaaaacccttctgttgcgtatataatttcgtaccataaaaaccaataaatctaagattccacgggcatggaacgcggaccacctatgttgatactatcactaaacagggggtgttcgaatcctttttattttt

SEQ ID NO: 6253 - DNA, 1179 bp, Cannabis sativa
tacaatagatttttctttcaatatttaaataactataaatttacttttctttttatgtggtagtatacatttctaaatatatgttaaggtattttattttatttgtttttttttaataaattttgaataaattttaatattgaatataaaattaaaataatttgttatatgtatctgttttattttatacacgtattaaattgattgtttaaattttattttaggcactataatttttataaaattctcaaaaattaattgaatattttaaatagctacaatatatattattatataaaaataaaataaaataaaactagaactatatatatttttgataacatgaaaaaatatattatgttttaaggatgcattttagaaacattatataatatttctttattattattgttagtttattctttaaaagttttccatcccatgttagaaaaactctatcatttacaagtgatgaacattttcaaaagatcacaatggacataccttgttttgataagacaaatagggtttgccccattatgagtttgtttacataaataatttttaaaaataaacaatgagtgaatgatgggcctagggttgtagtttgtgaatagataatatgattttattattattattatgtgtcattgtatgcatggccaattagtgatgggtttcttttggtagagaatcttggtagccaaaaaagagttagaaaaagtctagcaaaaggggttgaacaaccttagtattttatcccttaagaaaaagaaaaaaaaaacctatacacatacaactaataataataaagatttaaagtgtgaagataaaagaaatatttttttgaataaaaaattttttcatctctcccttttgggacaaaggatggtggtcacacttgttctcctagatagtaacaagagtattcctttttaggtaggcctatatgtaaaatgtaattagaattaagtatgatttagagtaataatgagatttggtatgtgtgtttaatttttaattaagtaatgtcacactaatttgatgtaattgagatatacactcatcaattatgataatttcatgagaattggtataattacacaaaatattattattaattactatttatgtataattattaactttattgccaaacttaaaaattgaaaattatat

SEQ ID NO: 6254 - DNA, 789 bp, Cannabis sativa
attgaaaaaaaaataatgttaaagcggctgagaaagtaaaaaaaaaatggaaaaagattatacctgctcagataccatgaaaaggttgactaattatatttttcgaatatcaaatacacaaaatatatagtagagagccaaaaactatcatatacaaatcatctaaataaaataatattaatgtaataatcctaatttatagtgaatagattaatatgctacgtaagttaattgatactaattgatatgtatataaatatatacatgaatagaaaataataactattgataggaattgatcttattgttatatttttaatttttaaaattgtgtttttaagagagaataaaaaatatttttttgtcattttaaaaatttaatggtgtttggcacaaattttttaaaactatttataatttttttcttactaaaaaattaatatattttaacgctggtcctaggattcgagtatgtaagcaaaaatataaaatataatatgttagacagaaaaaattgtttttgaaaattaaagataatattttgatgttttctgttttttaattttttaaaactcaatttttagaaaattgttcttaaaaaattttaccaaacaacctctattagttgttaaaaactgtttttatttttaaaaactaaaaaagttttaagttatgaagtcaaacaactagtttagtacaacattggatcattcagattttcggtaaagtaccaatcaactaactatcgagatggtttcagcaaaaaatggagatcatctatctactgag

SEQ ID NO: 6255 - DNA, 503 bp, Cannabis sativa
tagtagtatggtactatagtttagcacttttgagaaaattagtttccaatgatgtactaacagtaaccggttatgttctttgagtgatacatcatcattgcatattaatgaaaatttcaaaaaaaattctaaaaaaatgttaaatatggatcatgttaaaaattatgcaaacttggcatattatattgtgtcgaatttgacatacaataatataatttttaattataattttgtcattgattattaatgatatataattacaatgttatcatttactattttttaaatattcaattcatgaacgtcaatactattttactttttgtcatactttatatcgtaaaatattgttgtgcattcaatattaaatatagcattggttcacaaattaaagtagagtttatgaggtattgtcactaaagttttagattgagagatagttattaggaagtgtaaagaaccaaagattatagatttaacccccaatcaatatcaatcaatca

SEQ ID NO: 6256 - DNA, 1056 bp, Cannabis sativa
acatcttcatagactcccttaccaataaaaacaaactgggttccttcattaacaagtaataaattagtcttatttgttgttgggatgtgttttattttaattattaatgggcagaagactatgaagaggaaggagaagaaccagagtcatagtttccaatcgtgtagtgtgtagaatcatgagattggtcccctccactcctccaaccacatggccacaccaataaacactaactgagctggttttagtaacgcgcagtagactgtagaccacccccaaatattgtcctctctgtcattttggtgttttttttttaattatattttttttttaccaaacgacactgccacgagaacttacctgcgctgaatgctcatcttcggtctcacttcagtcttctattaatagctcttcattaaatagcaaagaacccatcgtttcattccattttataattgttcaaatataatataaatatttcaatattttgtttttgtgtggttgttacatgaaacttatttcccgatcctgcttgcccagcttgggcctctctctatttgtccaatttatattagttatttgttctttatgcagttttatcgttctaccaatcatttaaatacccaatacagagctccggctaccggtcccgctggcggtggagtttcaaacggaggtgggaaaacagtcggtaggtggctcaaggacaggagggagaaaaagaaagaagaaaccagagcccagaacgcccagctccatgccgccgtttccgtagctggagtcgccgccgcagtggccgccatagctgcagccaccgcagcctcatctgggtccgggaaagatgagcagagggctaagacagacatggccgtggcctctgcagctaccttagtcgctgctcaatgcgtagaggcagccgaggccatgggcgccgagcgggaatacctcgcctcggtcgttagctcagccgttaacgtacgttctgccggcgatatcatgactttaaccgccggcgcggctactggtgagaatcgtatattttgagttttggaatta

SEQ ID NO: 6257 - DNA, 751 bp, Cannabis sativa
tttgcatcaaaggcgcctaagggctcccatcttataatttgctactgttttattgtgttgttgagtttggagtactcagttctcatcattatatcatttgacatttattagaaaccaatcaaatagtcatagacgccagaactttgttcaaaaagatttttgtgtttcttttttcgaaactaggattcccgcctgaccctacaatatttaaggaccaaaaatctatagcaattgcaatgtgggtacttagaaatggactcgagccttagactttgtgggagcaaaccacatgcctgaccctttgagttactcttcttgggtactttgttcaaaagattcttatgcataagatgtacacactatttaggttttcttcatgttttattttatcccatatgcaatcccttctttttacaacccactcaaaagaaaaaattggtttggtcaaaacattagtaactaggaaggttctaaattgataacaccaatgctaaactttggtcaaggtggaatatgcttcgtctagcttgtttgattttcgaagcctacgcaaatcacaaaaatatagtggtctacagcattgatttctctccgaatttagagtaagtacatagaatgacaatctcaaaagaaataataaccgataaatcaggaaaaatcatttaatttaatagtattcatggattatcaaaaccatgttgcatgttaattctcttatcacatatacttttcatattgaacaaattaagat

SEQ ID NO: 6258 - DNA, 605 bp, Cannabis sativa
gccccagaagaattcccccctgattatttccgatacatcaaaacatacacgcacatatacatataatactaataaggaaagctagtcgcaaaacgacagatatgaaatatgaaatgatgataaccatatatatatatatatattattattatacgtataacatacgatgatctcggcgatgactttaggttggcggaggggcttgagaagaaaggcaaggaagcggctgaggatgaggatcaaagtggtttgaagtatcaacagagggaaggcatagtgtaagggattgtccccttgccacactccattcgaagccgttttgatggaagttatgttcaccgccatgctactcgcgcacttgtaataatcagttagagttatatttatataatataaaactaatattattgttgtgagtcgaattttctttgttaagaaagggtcttcgttaccatttatgtataggggtcatgtggctatatatatatacatacatcatacatcgatagtaaaagtaaaatatatatagtcatgatcaatgtgttataaaaagagttagaaagggtgtgatttgagttaatgataagactatatattaatttatt

SEQ ID NO: 6259 - DNA, 511 bp, Cannabis sativa
tatatatatatgtatagtgtgtgtgagtgggtgtgtatatagagtgtatatagatagatattggatatgggtttttgtgggaaacaagatggaagaagattatagaagaaaaaactgatcttgtatatttattattgttgggtgtgggtttttctttctagagacaaaagtttgaattgaagaagaaaaaaatgccgataaagagtataatacatgatatgaggatgtcaaggtcgcagagggtagtgcaggacgtgtcgtcagctgcggcggtggtggtggatgggttgagccagagttgttgggcgaatatgcctcaggagctacttagagaggtgcttatgagaattgaagcgtctgagaccgcctggccgccgagaaagaacgtcgtcgcctgtgccggagtttgccggagctggagactgattactaaggagatcgttaagactcctgaactttctggaaccttgacctttcccatctctgttaaacaggtttgttttctgttttt

SEQ ID NO: 6260 - DNA, 903 bp, Cannabis sativa
ttttaaaagctgcttttcacttctgcaacctcaaaaatacttttgctactaattacaggaagaactttctgataagctgaaagcaaaaagtagaaactcaaccaaacatgatttatatttaaatttgtagcacttaaatataagtaatgaaaatacttaaattgtaaataatgtccttaatgtttatattgatgaattaatatatttttcttcaataataatgattagcagtttataaatcatagtataagtaattgtgttttataaagaaaatgaaggtggatgttgaaaattgttcaaaatgccaatagaagagaagaaaaagctatggtagagacctggagaagtagaaggctttggacacttttatttttaatgaagaacaaaagcttaattggtaagatatttctctttaccttaccacatgccttgaggaaccctaacttatttcccaaactccctccttctttgaggtttatttatttattttttttatttaattccttaacaattacatatttgaatattatcattttgcatttttgaacaaaattaatgcttcttctatagttgtacatcaaattttgatgcacaataaatattatattttagctacagtgttttcgttgatcattaatgatagcttttaatgtacaaattataaggtaaatactattttattggccactctcattctctattgtatcttgtaactatgaggagctttcatgtgattggttcacctcaatctgcattccttcctgtagtgtgttcgaaaaatttcaagaatgaacttgatcttcatagccatttcctattccttaaacacaacatttttgcttatcaagcatttcttgtgtcctcgttcaaggcaccacagtttgtagcccttgactccctctg

SEQ ID NO: 6261 - DNA, 1267 bp, Cannabis sativa
aatccaatcgaatcgacccctctctcagtcttatatataaatatgattttatagaataaaataatggttttttttttatgggaagttcagtggtaaagtaacccacgtggaagagagtggagtggactagttggaagaagatgaagaagaagaggacgaagcataaagctttgatttttgagtctcaaactgaaacttccaaaaacacttttgtttgtttaattcaattcaattgaatattttggtaatgttttttttttttttatataattatggaattgggaatggtcttttcattacattattatctttaatttatgtattttcatttcaactttgcctttattcattatttctataaataataattaaaaaataatattaattgtattttttttggatctccaataacggcgtcgtctaaggtgaggagaatgggctttgacttttcttgtatttacttaagttataatctaagagtttttataaaaatattagattttaggtaaaagtttacgcttttactgttacatgatttttttttataaaaatattttttttatataaaataaccgtaaaataacaaaacagaacaattaaaataatagtcgaacagctaaaaaataaccgtaaaacaacagtgaaaacttaacgcagtacataataatatttttaaaaaacatattatttttgaaaaaaattcatacaaaaaaattagaaattttataaaaatcttataatttattgacagtcttaggcaatattggactaaagctcactaagcccacatttagggtcaatttcttttaattacataaatatattttttagtctttttaaaaaaataaatattttcaaattacacaaaaagaataaaaatagagttgaatggaattttaaatatttttaccgtttttaagattttatttacataaattatggtttttttatgcatttttttattgtactcttgttattttattgttagtttttttgtaatttataaattattttcttacgttattttgatgttgtaattctattattttcatgtggttttttttattgtttttataaaaaaatactgtaaatatttatatatatataaatctttgaacatgaaagtggaaaacttttactaaaaataattattccacataaattattaattgtaaagttaaattactcgttatattattatgttttttttcttttatttccccacatgagtttcactactagtggaggttgaaatttgaaaataaga

SEQ ID NO: 6262 - DNA, 1054 bp, Cannabis sativa
tattttcttatcaaattgaatttctgccaaagctttaaaatgtttgaaggctgctaaagcatttgatttatgcttaagagagtaaagcaaagtgtgtcaactaaagttatctagaaagtggatgtaaaccttagagtttgtatgagaaaaaattggttcaagtccccatatgtcagaatggataaattctaagacaatggaggctctacaatttgaattcttaaaggtcaaagcatgagccttaccaaattgacatgcatcacataataaaactctttcattcataacaaaccttacatcaactatttagaaacttgattcaaaatagaacttgaaggatgaccaaatctcctatgccagagatctgacatagggacaaacacattggttttatttggctatgactttgtagtagctccagtgaaagaaaagggttaatgagatttgtagagtgaattgtgtggctagatttgggaaaagttgatgtgtttagttggtatagaccatccttaagcactccttgtagaaacaccttctttgtcacctaatctttcacacaacaaacagtaggaaataatttaaatgacacattgttatctgtagtgagtcttgacacacttataataattttagatatttgtggaacaagtagtatgtctttgagaacaagagtcttagaactatcagtatttaacaagccagtaccaacatgagaaatgtttagctgattaccatcaccaatggttatcttttccttaccaccataggctgctttggagttcatctgtgtctcttcagcaatgagatggttgctcgcaccactattagcataccaactctcatcaatcaaagtttaaggtgtggctatgagagcattgagctgcttctctttaacctgatctgaggtggtagcaggttgttgtcccacgtaacaatcatcataatggttataggaaatcgtagttgagtgaccatacttgccacacacttggcgagctagttttgagcctcctccaaacctgccacctcgacctcgaccatgatagccacctct

SEQ ID NO: 6263 - DNA, 605 bp, Cannabis sativa
ctctttctctttctctctcctcaatggaagaagaagggaaatgtgaaggagaagaatgaagaacctcagtcatggctttacctttatttttttaacaaattaaaaaatgaaaaaagattagttttttattgaaagaaattgaaaaaagaaatgatttttattgttaaacagtgaaagattaacaaaccctttgaaggagaaagatggtttggattggatcaaatcaaagaatgagtctttttcttcaaagcttggtttttttttttaatggtcgtgagaatcattaactctcttttctttaaagaaaataattaaagaaaaaaaaccatttttttattgttttggagggttgaagaagcaaactatatcaacaaacatatatatacaaataaagtgaaaaaattaacaaataaaaattgatttggtgggattcaatcaattgaagttctttaggaaatttaagaaaaaaaagtgagtggtcaatatacttatattatgaatttaatattcttagattaatccaattacatccaatcaatttaatttatttgattttaatttaattgtattggattaagttgatgatccatatcgaaatttaatta

SEQ ID NO: 6264 - DNA, 841 bp, Cannabis sativa
tgatatgtagctccaaaaatgtgccaaatttatttcattaatgcttttttcctcttcattaatgcgttttatatcaattgaaagccatttaatttttatatatttatttaataatttttttaattttaatttctccaatacatttattataaagtttttctttaaagtatgacttgccaatttgtatttcatttttagtataatcttaaatatttatttacaatttcaccatttacgaataggcgtttggtatgaggtttagtaagtatttaagtaagtttcactttttaaatggtattgtaaatcctctcaaacttgagttttatattctttttaagtctactccctccaactctactctttccaattcaaattcacataacaaatattcgattaagtggcgtttggttggattgaatcaaaacataattagaataaatatgacattccaatattttaaaataaaactaaataaaaaaataaaataaaagttatttcttttcaattctattatattatattatttctaatcaaacgttatctgaaagttttggtttattgttcttcacaggagagtaaaatttttttttaatataatctaaaatcgcgattgggttttggactggactaggttgcagggttctctctctagtccaaatgaagacgaaattgaagagaaaaaattgaaaaagagaaaggtgaggagagagattgggatgagttgaaatgaagaacaatacaagagaaagaagacataggagaaagaaacaagttgtaaaattagaaattaagtttctattttagtgaaaaataaaattgtgaaaggaaaaaacactataaa

SEQ ID NO: 6265 - DNA, 945 bp, Cannabis sativa
ctacaaaataccctttttggaacactttttaagaacatgcatctaaatgtatatccttaaaagtccttctgaagttttaagaagtaacattgagtgtccttaaacaaatcatataaggacacacacttgtgtgttcttattaattatgtgagttattaaaaaaagtatgaaataaattgtaggtttcaagtaaatgtgttcccaacgggtccaataagaacattctttaaagagttttgagttacttttttagttctttttctcaattattaaaattaaataaaaattaaaaaagttatagttaaaacgattgtaaataaaaaaaacaaaaaaaacctctcagctccttttctgcccaaaattaacttgacctaacacttgttcttagtcacaaccaccttcctttgacgatgcgccttctgattacttcctttccgttgaggatgcctgcccttccgtcgaactcgcgctttcgccaccttgtctctctcatggccaactcgacccctctctaatggtgaataggcaccttatagtttctaaggtcaatacgccttgtgcttactaatctagttaaaaagattagtatataatttaaccagtaccttgtaatttttttcatcttactgtttcttgtttgtttatgagtatataataattgggtcttatatgttctggattcagtggtacgttttccacttagaattatcattagtcacccattagtttattgtttacctctttagtttattctttgaccattgttcttaatatgtttgttattttttaggttttgtaggcttattggggtgtctcgattgtatataatttctgagattatttcactccctggttagttttctcaatttcattagctatatgtgaaatatctctataagttgttatgctctttgttttcaaaataaataatgtgttgatctataa

SEQ ID NO: 6266 - DNA, 1774 bp, Cannabis sativa
atatcacattttctaattccattattaagtaattaggaaacaaactacgttttgcgtgcggttatattttgtttagtgataattaagttataaatttatatcaaattttgaattttgatactttttatataatatatttttttattttactcaaaaatataaattaataatctaagaaaaatcataataaaattctttaaacatgactatatttggaagatgaattttggtgagaaaaaaagagtagggaaactacataaaaaaaaagtgtagacaacaaaaataaataaataaattttttcaagtttgatatgaagatttttgtcgattggatgtttttctgtagaatttttctttccataccaaatatcagattattattttttattttttattttttttctacctttttcccacccttttctcttctcacaagaattcaacttgctgataaatttatatatagtttactcatcatacgtacgatttcgaaattattgtaattactgtatgtcactcgtagtcagttaaagtcgttattatcattgtatctcacttgtactcatcattatattcaaagtcgttttcatcacatatgtttagtatagtaaaaacaaattattaatacaataatataataactaaaaaaattaaattgcaataatatatattaaaaagaaaatgagaaaaaatatttaatactaaccaaaaaacaaaaaaaatataaaataccacacgctaacaaaatttgtggtatatatattattcttttgtttaaaatagcaaagtttttcttcctttttttccaaagtaaatataacaaaaattttgaattttaaacaaaacaaaaaaaaaaatatgttacacaaatttattttgaaaaataataagatgagttatgttgattgcgactgaacaatagcatcttaaagaaatcaataacagaagctcattgtagactacattatataaaagtatttcaatttatattttaaacttggagaagacaatggcctataagatatatacaaaaatattttataaattagtttaatactaataaagtaattaattattaaaatctttgataatattaataaatttcaccaaaataaaacactaaaaatggatatcataacgacactaaaaacgtgttccaaggatatgaaaattttacaaaagaactatatacaacgacaattcaaaatatgaaatcaagatacacagtagatacaattcaaaataactcctgacaactcggcacacaggtcggtggggtcactatgtacattgttggagaagactgtcacctcatggctgctctaactttttcttaaccttacctgcaccacagagcacccgtaagtcacaaagactaagcaaaaaaaagtaacaaagaagaatacatgaaataactaattacccattttactattataaaatgattaaacagtaatagtcaagagtggataatataaccaaccatatgcatgaaaataaaagctgatcatatattacattgcccaatcaggcaagtccgtgtcataatttggcatcatacataatgtcactgcatcacctaatcaagtgagcccgtgccacaacttggcaccaatgtatctcattgcctaatcagacgagcccgtgccatagcctggcactcacatgtcactgttgcctgtgcctaaacaagcatccccaataggaagaagcctaacaacaatttcagcttgtgccatagactggcacccacatgtcactgctgcccgtgcct

SEQ ID NO: 6267 - DNA, 850 bp, Cannabis sativa
tatgtatatagtagtcgacaaaatttaaaatggggttggagtacatgtgcattgcaactcataactcattatgatcactttcattaccctttctgtcccacacacgttccggtttgtcggtcactactccatcgaactgtcaattctattctttgttaatttaattttagtatttaaatacaatttatcactaatttaattttatagttacaatttaatattttttgtcacagatattgtaatcacaacgtagcaatagtgatttataattagtcacaatatttttaattttagttataaattttgttgtaactaaaagtaaaaattattatagtgtgaatatataatgtgttgtaatttgttttcacttatttatatgttattgatgagaggatcgacccaacctaattgaaaaacagcaataattttaacagctatcactacaaaaaaattagagttttagtcccaaccttttagtcataataaaaataatttgtgactaaatatgtgtttttgtcacaacttagtcacaataaattatttgtaataatttttcaattttataatttgtaaaaggtcacaatattgtgactaaaaatatatttagccacaactataaaatttcatgactaaaatctgtaactaattattatttagttactaatatcttaagttatcactaataactttcatttagccacaactatttattttgaaggctcgattagtcacaaccattacttaatttttttgtgactaaatgtattaaaataaaatttatatttacagtaacagttaaaagaaaaataccgtaaatcctagttcttatctctctctctctccctctctc

SEQ ID NO: 6268 - DNA, 728 bp, Cannabis sativa
ttttcgattctaaataaagcatttaacttgtttgtgttgtttttaacagaccaatttccatacagctgtagagcctttggatatttgcaaacagaggaatggtaaggttaaccaagctgatgagactaagaaagtagagagagctgtttatggagagcatttggttgggaaagtcctcacaaattttgtgttctaagatcagttgaagaagaagacatttgaacctattttgtctttctaaatcagttaagtaatccacctagaatccctaataaatacccagaaagggtaactcagattatcaatgaatgtacccaaatctgagtttcatgatcctattgtaagattaggcaaagggccatataaatgtacccaaatctatccatatctatattttaaaataaaggctgaatatcttggtagtcctgaaatttttcacttatgttgacataagtcattgtttttcacataatcttactatttaaaacattagggacaataacaacaatacccataccacattgtgtagcaataacataagatcttttacaacaagtaatcgagaataatattcaataattatccaaaattgatacaatcaacccctaaaaagaatatagattcaatcaatagattccaaaactcatacttaataacttaaacaatggtacagccatttcttcttttgttaatttctggcctagattctgtcatgcctctagcatgaa

SEQ ID NO: 6269 - DNA, 815 bp, Cannabis sativa
attagtaaaaaccaaaataacaatattgtttatacacaaacgtcataattttttttaacacatattaataaaataaatacattttttttaatataagaagcctaccttacccaatttgaagctttatatgtctagagctatacaaccacatatattctctagtatactttcaaatactaaaaacctctatctctctctacatctctctttctctctcttcccctaatgaaagagcaaatggtcaatcaagagtgggacttcacacctagctcttcttcatctctacaacaacccaagaataactccaaattgagaatgatttctagctctagtagtgatcatgatcatggtcattccaattataaagccaaaacgacaagtagtaccagtcttcttaacaacggggaaacgcagcacacgacgtcgtttcgaggagtcagaatgcgccaatggggaaaatgggtatcagagataagagagccaaagaaaaaatcccgaatttggctcggcactttcccaaccgccgaaatggccgcccgggctcacgacgtcgccgctctcgccatcaagggcagttctgcccacctcaacttcccggagattgcgccggagcttccccgtccggccagctcctcccccaaggacatccaagccgccgctgcaaaagccgccgcctattgtactaataatttatctgcaacgacgtcgtctagtgaagacggtaatctaacgttgtcgtcaccggatagctcaacgacacacgaaacgtcgtcgtttaattcgacttcgccgttattggcagataacgttgacgg

SEQ ID NO: 6270 - DNA, 1667 bp, Cannabis sativa
gctggccctctaaaattctgcccttatccccatcacaaccaaatgtaactaggaataagccatcagcatgttctgtgacagtcatagggaaacaacattgtgatgaccaaatgccagaaagggttttcataagagatggtcgattgtaaggtcggatagtatgaagtttgagaagaaggctaacaacggcagaggaagaagtagaggaactagcatcataagtgaatatggtattttcatcagaaggaaatactaaagcattcgacacagtattaaggaattcatccattttcaagacagaaaaaacccacagacacacatagaatagagaaagaaaacaaaggaagggataagaaaaccaatacctcaatcgcactatataaatgtaaaaccaaagccctctcaactgccttctcaaaagatccctggtcacatccctagcctccaccgtagtagcagcaatgatgaagaaggacctaataacttcagggtcccaagcgttcgcctccattttacaatctccaagggtgatatgatgttgggggagttgagaaatcagaattaattgcaaagaaaacaagaattgagggtcagaataaacagagaacaaagaaatataagagagagagagggataaatagttgtgcaaccataaatgagatgggatggttggtaatgataataatacacagagcaataaatgctctcattaatgcaaatataagggaagatacttctgtaagaaggaaaagaaaggtataaaccaccacttgactggtaagggtggacgagaaccaccatggacggaaccaaaagtgaacaggaaccacagtattgcatgcctgctagaaagctccagagagagagagagagagagagagagaaagcttaattttcaattatctgtaaatatggttattaaatgtcaactaaaactgttactgtgtacacatgacataattttattagcccaaattattttaataattttaatattataaaataataaataaataaaatatttattttcttttcttttaatcattagatttttatttttgaactaataaataaataaataatcaaaactgtaattctaaatcacaaatcattcatctctctcttctgctcttcactttctctctgaacagaacggttgacggcgccctcccatgactggtaatgaacccgatgtcgtccacccaagagctgaaacttcctcactctctctccatcatgtcgcccttaatcccccatcttcctcactttctcttcatctttccacgaaaacacatacctgcataacacctgaagctaggctgcatgatccctaaagaacaaaaaacctagatgcaaaagagattcacgagtgagaaaaagagattcggaggttttcagaatttgaggattttgggtttctgaggttcttgttttgagatttagatttgaatttttttgttctttattcagatctgaaattgtggtgtggtgtggtggtagtggtgattttttttttattttatttggttttttttttatgttatggcggtggcaatagtggtgtagtattgggataattgttgggtgcggtggtagtagtaacggtggtgataatggtgtcggttatggtggtagttaggagtttacatcggtcagtttggtcgggt

SEQ ID NO: 6271 - DNA, 548 bp, Cannabis sativa
aaattggtaagcaaacaacatttgtatgacatgtagaatctgcatcctgttatgttaggtgacctttccctggtcacagactcataggtgcagatattcttttagttttattttttttattatgactaatgcatggccttcttgtgccaatttcagtgacggaattatgtgaatatgctgcaaatgttgatattcctattgcaagagaatcaattcgtgcagttgggaaaatagcacttcagcagtatgatgtaaatgcaatagtggatcgacttcttcagtttctggagatggaaaaggactatgtgactgctgaagctctggtaagtttcatgcctatgcctgttagatactggattgagatctaactcaaatatttatcgtccgttattttgtggaatacattttcattgtcaacgaccttttttatttttcattaagtgggaaaaattaataataataaagtacaataaaagcatgatgtttgccaatatcagtgattagcctatttgatataagtttggaattctacgcaggtcctcgtaaaa

SEQ ID NO: 6272 - DNA, 553 bp, Cannabis sativa
tgagagaaatttggttccccatccttcagctcttttgcggactctttcttttaagtagccaaaaacctccgtcttattgcgagatatagtacttggaagccccagatatagactattagttcccacaatggtcatgccaagcctttgactaatattgttacgcattgccatggttgtattagtactgaaaaaatagaagatttggaaaaattaaccttctgtcctgatgcctcttcaaaagtactcaaaacttcctgaattcttgtcgtttcctctaatgttgccttacagtaaagatagctgtcatctgcaaacaacatgtgtgagatccgaggtgctccatttgcaactttagattttatgaaaaattacaaaataaaaaagttgtgattaaatcagggacatacaagtgtcccgtgatttattctaacgaagtagggatgaattaatggactcacaagtttgcaagtatttttaccattaatttttaaagttgtaaaaatctgcattaaacctaaattttaaaaactttgacgaaattttgtcttaagaa

SEQ ID NO: 6273 - DNA, 798 bp, Cannabis sativa
tgaagagaattaatatttacctattttcgttttcaaaagggaacattttccttctcttctcaaaaaccttattcactatatatatatatatacatgtatacatatatgtatctatacacacgtcttctataataatatgcagatgaaatgaaatggacaagaaatttcagtagtcagatcacagattaacacagtctgaagaagaacaagtttgctttctttagaggtactctacccattttccttttctctcatatattacatattatatattatatatatttttatatatgataaaaaattatttaccaatttcatgattctactactctatctacactatacatacacttaacaatttgtatatgtatatgtatttgtgtatatatatatacctatatatgtataggtgtatgggtataggatcctctttctttgtcacgtatgtatttagatagatagatgaatatatggatggatggatggattgattgatacatagtttcggattgtggtttgccctatcgataatacctctaatttcgatttcaattcttcaccaatttagggttttgttctttctttcaatcttcttcgatattgttctgagatgaacatcgaaacctatcaatttctgtaattaattcccactttcagacctttctttgtgattcgctctcttccgatcctttaactgaggatgccaaaccccaacgaacgcctattcctagacctttaccaccacacccagatgattttggaaccaaaggcatggaatccttttttaattagggtttc

SEQ ID NO: 6274 - DNA, 725 bp, Cannabis sativa
ggtgaaacatagcaacgaagtagacgaccttgccattattagtgcttttgtttgattgatcttgttgtggtgagatgagagactgtggtagtgatgagtggggttttatagaatgggaaatgggatttgggatattggacgtggtgatgcgttgatgagaagattgatgacatttttgttgtgttttgtgcatggttcttttgtagtatatgcatggccttacagctctttattgcttaacacataatagtttgtgtggcgttgaggttctgagaggagtgttgcatgcatattcataagttgtctgtttatgtgtcaagtttgccttgcttgattcctctctgactcatctagtctttatatatagacaaagacaaatttactataaggtgagtataatattaatgatgtagaggtatatttcatgttattttgtaatgtgtggaatttgataataaattagacaaattattctttaacatacattattttaaggctttatactcgccacagctagccgtggtgggaggctcttagtgtcattagggcaatcttaagttgaaatgaactttaagaaaataaaaatagtacttttattataaaaataaatagtatttttaaacataattaaaaatatatatttttaaaatatatttgtttatttagaccataaaatgaatagatcttaagtacactgcattaacttagggctgaccccccgagtg

SEQ ID NO: 6275 - DNA, 642 bp, Cannabis sativa
taatactctaagttccaatattacaaagtcaagaaccaatactctaatactctaaggttttattttttcgaaaccaatccgattgcaagggttcatagaccaaagttctccgtcagtcgtcgacagcgcgcagaggagaagcccgtccgttcgtcgtcaaccacgagcagtgcccgtcatcgccgtgagccctccaaagacggttgaaactcagccttcgtatacgcgagagagaaacccagccttcgaatatctgttgaaattgtccccgtcgcaccctcaccgtcctcgcaccgtcgccaccctcactgtcgtcgcaccgccgtcgtcaccgtcatcgtcgtcgcgagagaaggaaacgatagacccttctggaatctttattttctcatttagaagaatacatgttacataatattgtctttttctatatttatttatttattttgtctttacttaattactattacactaatttgtcatattgtgaataattcaatataaatttttacctaaaacaccatgaacaaatttgtgatgagaagtgtttttttttttcaaatgatatggtactattttttaatttcaattaataggataaatgatatgagcttatatttggggctgtttggtttgttttag

SEQ ID NO: 6276 - DNA, 609 bp, Cannabis sativa
tatatatatatattatatttatagctttaaatatattacacttttttctcaaaaaaaaaaaatatcacacttaaattaattaatatgatatatacaataaattatgaataaaaagaaataaaaaaacataaatatatttataagcattgccaaatatattcaaacaattataaccaacttcactgtacactcatcatcattatctctctagtttatacacattacacatgatattatacattatatatatagaagatttaaaagaaagaaaaaaaatatgttttaattttttgttttaaaaagaaaagatttgaggacacacaaaaatataaaaggtttaaaacaaacttgacttatcaatattattacatataaaatgatcatcatgggaagatatgtgatcaatgtcaatattattggtgttaatttgttcaaacctttctgatagaaaaaaaccatggaatgttccaagatttttcaacacacaaacttctgctgaaaatattgccttcacaggtttatgatctgacaattttgattcccctctactgtaaatatcttgctttaatccctctccataccaaattatccgatcacacctatttatat

SEQ ID NO: 6277 - DNA, 1777 bp, Cannabis sativa
aggtcggttggggtcggagaaacacgtggtcgggatgacgatgggtccgccgattgaggtaacaaataaagagagaaggaaggaatatgggtgggattgggggaggtcgcaggtgggagctaaggattgtggccttttcattttttttttgtgcctttttctggatattcatggttaaagaaaaacccaaagaaagaaaatgaagggggaagataaaagggggtcagggaagatgttagggtttttatataaagcaaacttttaggggcgacaaatgtcgcccctaatggttgcccctaataaataaagtgtgtcaaatcaaatttttagaggcgatttttgtggaccctaatgcaattagcgggaaaaatcccgcccaaacataacaaatatattttaatttcatttaggggcgacttaatagtatacaaattaaaaaaaaataataattagatttttttaggggcgacacattattgtcgtccctaatacccccattattagaggcgacttaatgtcgcctctaaattagtcgcccctaaagtcttgatttgttgtagtgatagtcaagagaccatctggataaaagcttgtagattgcaagtggataatgaaagtgaaggaagatattccaagggttgagaatatataagattcaaaccaagactagctttcctcaataaaagggagtagattacaatgacattttttcactggtggtcaaacaagcctctatgagagctacaatagccaaagctggtaagtgtgagcatgaaattcaataaatggatgttaaaacacttgtcctacatggaaacttgaagagaatatttatatgaggcaacctgaaggttttgaaagtagtgatccaaataaagtttgcttattgtagaatctctctacggcctaaaacatgcacgtagacaatggaacatcaagtttgatgaattcatgacaagaatcatattcaacaaaaatagctttaatccctgtgtctactcaaaaggtaagttatttctcttattgtatgtagatgacatatttttggttgggaaaaaggtgactaaaatagaggttataaagggtcttttgagcagtggatttgaaataaaagatctgggtgctactaagaagatactaggtatagaaatcacaaggcagaggcctgagaagatctgtctatcacagaagacttatttagaaaaggttggtttgacaaccggactaaatgtttctgaatagtctattccaggtgtttgatgataaccttttgctactaatctggacttgcacttggccagagtgccatcagcatttagctttaccctgtgaacccatttatttcccacaatgtgcatccctgatttgtaagggacaagagtccaagtcccatttcgaactaaggcaacaaactcgttgttcatagcactgtgccacttagggtcagctagagcctgtttcaaggaagttggttctttgggcaatagagattcgggtaaagggtatttggtggctaagtaggctttgggtttgtgaactccagatttggctcgagtctgcatttgatgagtatttgtaggtgctgtgttttgggagggaagtgaggtgtttggttcagtattgtgtagagtaggtggtggtatagtggttgttacaggccttgagagttctgtgggtggggcagggggtgtaatgtgtggagagacactggtggtatcttgtagtggctcagttggcattgttgcagctgtgtgttgctcaggaaaacaagaaacac

SEQ ID NO: 6278 - DNA, 1511 bp, Cannabis sativa
ttttacaacaacatgtgtggaaaacccattaaaataggaattagattaataaaataaataagtatctataaaaatattccagctgcatctaccctgataagcatatatagactagctatgagattgacgctggtcgggaaataccatttaccctatcccgatgttccaacttaatcttgaaataaattattttcatggaataattcactatggacaacataccaaggatggtgtcacttgtccagattttaaaatcacgtgtcacttagatatatgccacatcaccttgtgcagaatttgagataacaagcaaaaaaaattaacctttcgaaatttggacatcgtgcttgtagttatccatctcattagttgaaaaaaatttcctgcgttttccaatctaactatactttaaaacaataagcaatatagcaacaatgaaaaataagtattcaacacttttaacatgattatcacaaacaagacaactactattagagtgaattctcatatttcgtttcctttctcaggcatacaatttattggaagcaatgagccaatcgataattctatacttagccaccatggacgaatccacatagagatgatggggcagtctcccctttgaaaaacaattagaaaaagtatatatgtatttaattatttataacatatatttgtaattaaagataatatatataatcataatactatatttggtataatatttgttaagctaccttacttatataatagaggtcaatagttcaaatctcaacaaaaatatatttatctgttgttgttaggcaccacacatttattccaaacaacctcacccccaaaaaactctatcacaatcctaaataaggactttatataccatagcaatatggtagggaagtgttttgataactggtcaattgtttaagctttttttaacagtaataattttacgctaataccaactcacatcatgtggagctttataccctcacgaatcatgtgaaatagtattttacccttttttgtacttgaattacatcgatattgagttattttctatattacatgtatatttttataaattgtaatagcacaaagtgcacaactcacttctccaaattgatcagacaccctcggacaccatggccacccaaacatggtggaagatcatgatgtggactcaacctatttcctcaaaaatcaaacacttttttggcaagcttaccatgatatcctcctaatcaaccataatttgcataaaagaaagtctttgccttcaccaaaatgttgtcgttgccactactaaaatgagaccccactaaatgctctttttaggtgtttaactatttagaaggtatagaaattaacaaattttttttaaatttatatctaatcatgtctctctaacttgtatggacttacttcacttggatgatagcactttcacagctagcgactttcagttttttgcttgtttgatttgaaaattatggcattacaagaattaacat

SEQ ID NO: 6279 - DNA, 1131 bp, Cannabis sativa
  modified_base (499)..(500): a, c, t, g, unknown or other
taactaacactagagtactgactgtcttaactgtcgagaaaatagttaagtcagttgtatttacaactcaataacaaaaaatacacttaagtggattggtacacattccaagacaccgtttcttgctgcatagctgaatcccattccaacttgtaaatggacatcaaggtttctttataggaaccaagttcctcactatcaagttctgatatatttagagcatagaaaattaagtcagcatatccgaacttgtttggtggtttgatatctcttctttccctatctctagtcaactgatagtcttgatgatcttgaaacattgacacattgccttactaggcacctttttcttcttcattagctcattaaacgtgtcgagatggtactttgggtcagtgagaccatcatatagtgtcatctgtggctctttgatgtttagtgggagtggttccatttgaatctccctcgagagaggggattcttcatcaaactcctcatnntcattcaagtcccccttcgtagtgatagctatcttttgatgtaggtcttgtatttttgcctccaactccttcatccttttgctcattctttctcaagatttagcgagtggaacttgggtctttcgtgtggtttgcacatggctcgtggagggtactcctcttgtccgaacaatgtgtaacttaccactaaagctgtcagataaggccttctgcttatcttgcacttggtggggagtcataggtgaagtgccccctagcacgagaccacttgggtgaagtctcttacttaggctatggggtgtttccctcagcgaaatccccccatggtgggtaggcttgagttgtctcacttggcatgttaagcttttgtctcgtaatagactccttccgtgttcatctcctgtggtgctgttagtggctaacatggaatcacctttactagcatacatagttgagatcttgattcccactcggtggcttttgtgtagaaggtgtgaggcttgggctttgcctttgagtatgccactcaacactttatgcataccagtaacactagtttctaacctcttgttcttccaactgaggttgcttattttctccttgtaacagtaagcctatgagcttgaactca

SEQ ID NO: 6280 - DNA, 571 bp, Cannabis sativa
tcaaatctaatgacctaagtgtcggcacaaaatttatatgttacatattattatctatacatacatgtcacactctttctttcatgtgtatcttcacaataataataaaaataattcacaaaaacaaaattcaataataaatatgacagtcttcttccccaataacccatcacaatttcgatcccaccaccaacactccttttttcttttaaatattatttttaattacaatcgatggattgaattcaaaaatctaatatttaattgaactaattaaaatttttatttattaatgaaaaataaaatatttttttaatttaaatgagtaaataaatttcaatatatatgcatacataaaaattaggattaaaattttgtttttttccccttaaaatataaattttcttaaaaactattacctaataattaagaaaaatgttaatgtattaaaccgtcactatcgggatagaaagtgtattctcatcccgtttaacattcgagaacaaaaaataattcatttctcgccctattccccatctagaagaggaatttctatggaaaaattttgcat

SEQ ID NO: 6281 - DNA, 1625 bp, Cannabis sativa
aaataatttccaacagtaagaacttgctgtttttaaagaagaaaattgtgaccattgagctttactgagagtgtatggctgaagtaaataggaccatgagtaaatgtgctttatttcacgagttcgattccaggagttgttgatggattaggaatcgtttgagctgcttgaagatcagaggaggtagtgccagcacccttaatagttacattcgccattaatggaggaaaaaactctgataccatgtttgatctagtgttgtatctaactatgatgaacgacagaaaaaagagaaaagaggaagaagaaagacaaaaaaagattgagctgaaagaataacttcatattattatgagttagatacattgatatatatatatataaatatatatatatatatacaggctttacacaaagtaaatataactgtgtaactaattagccactaaccaactgtaataaacaatgtaactataaccaactaatctcctttacactccctaacacacacaactttataactaactaacagaaaaaggatagcctgtactaactaactaccttcactaatacactctaattaaaactttcatatgtagttatatcacaaatagagattataataacatataacttcatgattaataactagggttgattatattatattgtataacaaacgttgctcattttttaatgtgatgatgatacttcaatattataggttgcgcgcacattataattttaagattttttgtactaattaattagtaaattatagacaaataaataagtatatatttcactaaattatgaatcattaattagtaaattatccggatgagtttaccctatagtgaataaaatttaaaatgataaagaagttcacagtggaacaaaatatttgagtggtggtaaactactttgaatgaaaaagactacacatagaaaattaagacattttattaatttgtttgactatagggaggtggtttacattatgattttattaattttattaatttatgtttgagtgtaaaaataaaagttaattaattataataaaaataataagtttctataacacttcgtggagaaagtattgcccctcatgtcacttcatctttagataattatacgatcaaaatgatcatcaaagtaagggtatgcaattttcatatataataaaatcattctatatatgaaaattcttattaattagagcaaaaaataaaaatacgtacacgtgtgataattcctcactcatatcattcatgaaattaagaaccaacctaggagaatatgaatgatatatacatacatttatattgaaccctttaatcaataagcttatactttttatatttgaatatttatatgtatatgtatctagctaagtccatataaaaagattgagaaagagatagaaattcaataaaaaaagagtgagaaaatatgatgatgatgacgtgtaagaaagagagagagagaaggttatagagttgtggaaaaatgagaggcccgaaattgctagccttatattctctagctcttgttttggtctgtatttttgcataagccactgccttcccttccctcttattgcctcttaccttatcctatct

SEQ ID NO: 6282 - DNA, 972 bp, Cannabis sativa
  modified_base (170)..(173): a, c, t, g, unknown or other
atcaatattttgaatttcgactatattggactggcattggccctgttaccgaacgtgactcctcactcggattcggactcaatcttagatgtagacttcatttaaataaaatcaaaaaataaaaataaaaacaaattttatagagcatacttttattttttatttttaannnnaaaaaataaaaataattataaaaaacattttatttttaaaataaaaattttattattattttttttatgattaaaaaattaaaaaataaaaatattactaaacacgatcaaataagaaacccatatgcaattaattctctattctgtcaacaccattatgatatgggacaattgtgatatcacataattaggaaacatgataatcgtaactcatttatttaattcatgcttttttggagtcatgtctttgtgttgacatgacttatactaccaaccctaaaacaaataatatattttcaataattgctataatttagttcaatttcccaacgaaaatattcaagtagcgacaataataattaattattggtgtcaatatgataaatgcaatatgacgtacacatatccaaaactatttttatttaagataggttgcagctatcaaaaaataacttctcacagtagatattatatttatttatagtttataggtgcataaatactataaatatttaatatccaaacatataatttatgcaaacttaatacatatttattgacaaatattgataactaattatttttatttaaaataagtctcaataaatattaataactaattatttttatttaaaataggtgtgacatatcaaaaactaacttgccagtgtatgcatattattactaaaaattagtgttgaagaacacgtatgaagcagtactattcttggaaaaaaaaattataagtaacatcaatcaaaattactcacatattcgttaaataaaaaaaaaaaaaaaa

SEQ ID NO: 6283 - DNA, 1544 bp, Cannabis sativa
atatagcccacggttgagttgaatttagtgggggtcatagggagccgtggcctatggtttggtttgtacgtaggcctttttaactgaaaatttccctttaattattggatttggacccaaattcaaggctgagttgagacttgagagtgtactatggaccacggttatggttatggatgtacacaaatggccccattatccactagacaagactaggcactacaagtactagtagtgttgttgttacttgttaggcacaaattaaaacattactattaaatttaaattgaaatatgaatcacttaaaacatgtttgtgtttctaattggatttcactttttaaactaaaatattggtatgttaattctctcaaacgtatgagtttcatattctctccaagtctacttcctctaactctattctctctaacttaaactcacataacaaacactccattaagtagcgtttggttagaatgaatgaaatcataagtagaataagaattacattctgatactttaaaataaaaccaaataaaagacttacccggcttatccggcttattctctccaaccaaacaccaccttaaggacttatccggtttgtgtgatcgagttgtcaggagttgttttggactgaacctaatgtatatttggatttacttttgtatatagccattttgtaaatcttttgtaataggagatcgccgaaacaaatttttaacgatgtcattatgctcattgctatggttttattatagtgaggttttactattattacggatttgatgaaatagttaatctattattactaaactctcttctaaaaacacactcgtagcgttcctagaggttagagcgttacaaacaaggcttcatgtgaatcaagaacgttcttaacagaagtacgacttctataccacatgcactaagtactcgtcctatactaatgttggtagggctgaatcgcacctcaagtattgtaccacatgcactctgtactcgtcctactagtcttggtaacttgtgtcttatctcgtttctcaattcaagtgcattggtcaacctggatggaaagtcactcgctgaatggaggcctaatgtcacattacgcaaaacgggtaaataacttggtaaaatcttcttgggaacttaaacagaaaaatggaagtttccttaacgataaataacgtggtaatacgctaaatattaaggaaatataagatctgaggctcccaaaactgccgaaattggtgaactggattccaaaaatggtaaactattttttgggaatcttatttgggaaaatggtggactgcttttttgcagaaacctcaaagagcttcgattctatctccattataccccaaacttcatataactctctagaaaacctaattacatcccgacagtcatatttcaagtgattacagtaactaacatctacagaaatgaaaaacgacattgttaagccaagtttgagttcttgatgtaatcgtgttgagccaagtgattatagccaacaaaattaactcaaacgaactt

SEQ ID NO: 6284 - DNA, 1417 bp, Cannabis sativa
cccacaagttctaaacgagatgagacttattttggagtttggaaatagtcatttaataaggaatgatatgtcccactctctaatttctacttctaatgaatcatcccatccacacgtgcaacagttccattcggaatgatattgacaccaaaattttgatgaacaatgaggaagtacgattcaatcttctagtcatcctttatacatagaacacttgcccaacatttaacagactctcatgaggcacatttaacatagaactgctctctctgcatattttcttgagaaatgcataaatgtaatcaatggccaactttttgcagaagtttgactccctcctggccttgattattgtattccctaagatgtgaaccacaccagcatctttacagttattcaagaattgcaactcatcaatctcaatctggatattagcctgattggaataactaatatcatttgctcgttgtgatgaaccaacttcaatgatggactctattgatgaaactgaagaatccaccttggagatagatgagttgccattaaaatggttgtcacttgcctgttcatcttgctggtcgggctcactatagacatccgagtctgagcacccgtccattaaggaatcaagtcggacaaacagcataaggcagtcgaatagctttttctcaaaatcatagtctttcttatggacgtctctataaccatatcttgcaacacaacggaacatgtggaattcatttggtccaattcgctttataaggaacctctcttcttctggtactgtgtagacaggtaggtacttcacacagacaaatacaacaactgaatgaattgcaggcaaattggtgataaagtgtgagaaaatgcgaggcactccatgagctaggtcagtgtacactaatcctactccaggcacacgaacaagccctaaactagggccaagtccaagaatccatgccattgaaatcttgctatgcatctcaatctcatagcgtctcaaggtgccataatgccaaatatacatgatggcgaagaatactgcggatatcacgagaggaacccacccaccttgattaaccttgaggactacagcagagaagtaagtgcactccactgctaaggataagacagtgaagatcaagacaagaatccaatgacaacgccacactagtatcatcaccaaaatcatgagaaaggttgtcaccaacatgactatcacaactgctgtccctgttgtaagatgcagaattcatgaagttagtccctactccctacgtttttcaggaaagttgaaatgttagcaaggctttcaaatacaagacaaaacatcaaaattaagactactaagatgtgtatgtatattcgaccctgcctgaattagattttccaacaagttatgttctagtcacttcac

SEQ ID NO: 6285 - DNA, 715 bp, Cannabis sativa
tgagagctattgtgatggccttcgattttctctcaaattacaaggtgtttgttcatgcactgtcacataaaaagattctggattggagagtggcgttctatcctattgttaagctttgttccaagttttcaattcgtaatttcaagtctattggcagaattgatttaccaagccagaactggtgtttcaattcttacgaatgtccttgggaagggattttttccctgaatctcaagctcttcttctagttttaaagaacttaccgttctaaagaagaattatagctgcattttataagcccataatggtttagaaaataataaagcacaaatggaagaatgttcctcatagagtaagttattaaaagattaggtaattgtaaacgcaagcatcataattccaagcaattaccctcgacaacaacaaatagagtaagcttcattaattacttaagaagctctaaaaaaaaattaattgcaaaatccaaaatatacacgagaaagacctacagcagtccgtctaattttggtgttacaactcaagagtttgggacctaatttatccaaaaaaaaaaaaatctgacctaagattacacgcaacatttcaagagaaaaacgtgaaatacaactcaaaaagcagaaaaacataaattggttttaactacctgattttcttttacagagtgtattaacaattttaattaataaattaaaaa

SEQ ID NO: 6286 - DNA, 2280 bp, Cannabis sativa
gaataatttttggagtcaatagaattgaatctttttgttatttttctctgaaaaaccttatttttctattgaaatgctggcaaaattttattcccttgtctggaacccttatggttttggacaatgcataagctttgattgtttccttttattcttgtgctcccgattctactacttggaacaaatgctccctgatgattttttttttggatagtgaatcaggtggggacctcttccaagcagttatgggggaggattcccccttgcccttattatcttagttggtctgggtaaataactgcttggtaccttctttttcagcttccataatgtccgaacgagctcagcgtaaagtgacaaaagttgttgaaggagttgaggaggtggagcaagatcttgcttctaagttggtattgaattcatctccatggtaaattgatcagtacacaaacaaattctgaacctatgacaatctccggaagtatgaaacggagaggcctcgaaagtgttccaggactattctggaactagactatctgtcagaagcaaaaacctagccaatgtgctgaaggaggctttggtgtttggagatggggcgacgtagagatgggtgcccatcttccgttaagaatatgctactttgtagagttctgtgcagtggccggaatagctccataccaatttattcctcaagtgtactgtttgcttgttgggtggtacattttgtgcttctagaagaagatggagactccaactccagaagagatcctatatttttataagatcaaggcacatattataaggaaccataaagagaaagttggtctctataggatggaaaggcattccaatgatttattgtgtcccactagttctgtgcagtatgtgtatgacatccgcgactattgcttctacacctctagcttcccactgaaaagagtcctgactctcaccctcgactttagtattgcaagtaagtgtcactggtggtctagcccttcttttttttctttttggttttcaaattaactccagaactagaaacaaagcaagacttctacgattcattgtcagaggaagagttgcaagttggagaacttgtgactactaaaaatctccaggaggctggcctggtggctcctcatcagagcattgatagtctgacaatgaaggattcagtcagggatcttttccatggcgaccctagtgatgtaaaggaagccattgtcgttatcattgcagaagaggccttaaaggtcattaagtttgatgagaaatggttggaagattgacaccgtcaatactgggagaagctaagcaaagtagaagagctttctattcattttaaggatgctattcggaatgagggtactcctagagcgagtactttcaaaagtggtaagatgccattctgtgtagtcagggctccatctttggcaaacttatattgctttgaccaaagtggatttgacccttactttctgcgtttagatcaccgtagatatcccatcaataactatctggatagggtagatgacatcattaggagtccaaatcacttgattctaccaatgcatgaggtctgggtagataatcttataaaaatgttgtatcccgggttcttccaatacggaagccttttaggaagggaagatataactcaatttgctagtgggaaccctagttatgctaagataaatggtttggatcttacttgcatgttgtctttacccatattattataatgctttcaatattttctgtttgaactcattattttgtttttttccttttacagatcaattgctcacactccaaatgggtttagtgaacaagttcatttgcaccatccacaaaagatcggatgaagccagagaagccagatgtggtcatgacaagggaaaagttgtgcaacctttgatgttggagtgaaggaactaacacttccaaaatgactcttggaagctgttcaaaaggctctagatgctggaactaagaaattgacgcttccaacagaactcttgaaagcagttcaagaggctgcaacttcaagtactgttgcatgtcttcctaccgcctctatggcattgaatcccacttctcatggaaaagagtgaaattcccttggccataattcttacctaacacaatcctattaagattgttgatggtagtgaagatgaggatggtgacggagaagatgaaaaagaagacggagaaggatatgtctttgcctcgaggaagagagctagctccgagttgggtggagatagcaaaaga

SEQ ID NO: 6287 - DNA, 640 bp, Cannabis sativa
gtaacaaaattttggttcttctactgcataatatcaattcatctcctgtatataatcctacttgcctgttttgaatttgccattcctggttgatttctgccatccaaatctttccttaggagacattatagaatttatatcccgtagatgtagaaatgcttctgtttatatagtattcatttgtacgtgcatgaaatgccattttatgtttcagagagctgagactttgggaatagctgaatttccaatactgggtcgcatcagaagcagcagggttcgggtcaaagatactaccttctcttcaaggtaatatatctaaatatatatacatgtcatatataattgttactgataatgaataaatttgagcacgaggtaattggtcagtatagcacctgaaccttaggtagtttgggattttagtctcaaatttaaacatattgggcgctaactctttaatttcaggattattgtggaatccatgtcaagaagtaatttttttttactttgttgacagaaaagtgcctgcctactaaaactttcttatcatcttataactccttgtccttacaatttagcgccacaacagtcttcttcttccttttatgtgaattcgctgaagttatattattattttttt

SEQ ID NO: 6288 - DNA, 2201 bp, Cannabis sativa
tctcccataccttccattccaagtgtgtgaatctaatgcgtgcagccacagcacaggctctacgtaccagacattaccatacacaacctgatcattctcaatgcacacgtaatacattaaaaatctatattatatatgtaagactatatcttggggactagttaatattaatacttattatatataggataccattataatttatttagcttatatctcaaatattttcaatacttaaataattaccaactaataacatatgtaatgtgaccatcatttaatttgttgtgtattgcagtggtgatggttgttaatgttgttgttctactctggtcgatgagacttcaacggcgttagttaaatttattttccatttttagcataatatgtgtatgtatttatttttttgtaaatattattagattccaaataaaatattattataataacagtataattagatataaaaattattaaattattaatgatttatttattatttatagtaaaaaaaaaacaagttctgttttagaaaaatgtattagtgatataatttctcgattacaaaatttttattgaattctacgtgtgtcatacatattatatataattttggattttcatgttttatgcccgataataacagaaacctcacgtttgagccaatagtgtcactaaatacaatttagtatcttagaattagtggagctagatttatggatagttagaatatcaggattatgcagggtacttagttatgaccactttacccctagttatggaagataaatagtagtgaaataaaggacattttagacatttgccacttcagttatattatttttatctattttttagatgaatttttatagaataaaaagagttgtatcttgaatattaattattagaaaattacggtaatgtaaagattaatcaaaatgaatagatagacttcaaaccaaagtcacattctttctccatattctctccctctttcggccctagaataaccaaacaacaaacaaatttttcaacaaggatttcagatagatttttaccaaacagatttcaggctaatttctttaagattcaataaggatttcagatagattttgaagtgaaattgaatcttaagaccaaggtaagccctaagtctttcttctctttgtttttgaagggaaaagcttggttcacatgggtgtttttgtgaaattagttttgtacgaatttgatgatgatataaactttttttaaactgattttacgattgattaagattgattttagacgcttggagcaactgttgtagttagaacaaaggtttgagttttggaaactcaaagcttagtctttagtggtggatttttattcagggggtttttgatgctttgagtgttgaaatatctttaaaacatgatatattaaggtgttttagaaaggtcttgaatttattcactaaaaaggtccacaatttctacaagaaacggtgaaccatttactcaggcataaccctaataaacggtcaactgtatggggatttaggtaattggttggggtgttttttgggttctccaattttcatgttttctcgatatttataataatgtcatgctatttatcaatagtgaaacttctaattttgagtttaaatcctcgaaagtattttagcgagacacttaccactgttacgttaacgtgatttatggcctctgatcgtcgagtagtttttccactcaatttgaccagcacacccgattatgaaattgaggtaaaattagtataaatgatgcacatatgtacttgtttagcattcatgtttcaatttctatcagattaacatatcagggttttggtaaggtctacatagaattttaccgagataccaacatatatatgttaggcatttcaggaagtaccaaccaatgctaccaacactagtactttcgaggtgctgagtgcttgtgtattatggttggttgtgctttcagggagtacgaactagtgctactaccactagtactttcggggtactgagtgcatgtggtattatggctagttttacatataatatggattgatgctaccaaaactagtaattttgggatgccaattgcatctggtattatgttcaatcgtactatagttaagaacgttcgagactcatacgcgttggacacgagttaggatttgtaattaggtgt

SEQ ID NO: 6289 - DNA, 810 bp, Cannabis sativa
gtgacgaagcaaacaagttacctgacatttctcacggaatcattgtataccaaacgagcaaaacttttttgtacaagctgcaaagtttatatagcagatgaatacatactattagctcaaatattttggaatttttggtatgatttgaaatgagataaaaattttgataccgtagcttcatttcgtaatgtaacttaccttgttatacggagaatgaaaaacaaaatactcagcatcagagattgtgaagggtttgccctccaatttctcgtacctacaaaagtgagatagtaagatatctaaataatatgactaatagcagtctttaaaatgagatcaactaagtaaatttagtttggcaaacagaacttacttcttgcacagctgtttgtagcaagaatcaagagccacaagataacaagtttgtgaaagctttccgtcaacaacctaccaaaaaaaaacacaataaataagaaatctcaccatattaaacccgtgtttaacgatagatggaattattagaccatactgatagaataacacaaactgaatgagaagtaatcaacatctgaaaatgtgactgctctatatctgagacacatgaacccaaattggataaagaataattaccggatattcacttgcaaggtcaggcttgtaaaaatcatagacatgagacatatggctagctctgtatttgctttcaaaagcaattggagcatccggacctatcagcaaagcaatcgctgctgctccacccgttggccgtgctggcccttctgcatacacctggtaagcatccaagaagtt

SEQ ID NO: 6290 - DNA, 611 bp, Cannabis sativa
agagtgaactagaaaaagcaaactacatttatgaatacaactatatccctttaatagattttatgtagatgggccccacacacactcgctaacgtactactactttctcctcctcttttcaacattttttttttacaattaaccttaattaaatccaaccattaacaataactctttatataaatacttaattaaatactttattttatatataattatcattaaatataatcctaacatttaccaggcgagaatccaacacgagaattagccaagtcaaaattgacacgtgtcccctgttgctgaacattaccaattattgacaaagacgacgtcgttggtgcgaaagcgaaacagaacgttcccgacgaatctaccggaatcagataattcttcgccggtaacgtccacgatttcccaccggcgaacaaaaacgacaccgtcggaacacgcacagtcgataacgacgagaagtcgtaacacgtgtcgaacaacgccacaccattagtcgacctaagattcggagtaagcttcttgaactcgtcgcgtagtgactcgtagatctgagtccggagacgagtcacggcgggtccgcagtcgacgattacgcc

SEQ ID NO: 6291 - DNA, 957 bp, Cannabis sativa
ctcaaaataaaatgttgtagtcattgttcgaaaagaaaaagaagtaaaatgttgtagtagtaaacattctaatataatttttttcttaaaattgcaaacaaaaatgaaaaaggaaaaaattatccacaaggtttgtgtaagaaaatatccctcctttaaggaagaaaaaataataataataaaaacaaattcaagcagccgggtcgacccggttaggaaatggagggtacaagaagaagaagaagaagaaatatcagtagtatataaagcgaaaaatgtagtgagggaggagactaggtggaggtttacaaggccattcatttttagtatctcaaactcaagggccttatcccctctccctctgcatatttttaccttatccctctccaaaaccccaaccaaaaaacgcctcttctttcttcttccacaactttcatccaccattttggtcttcaaactcaaagctctaccaatatggcttctattatcggtgtctcttctatgtactcggcacccactctagtagagtcttacaggagagtctcgacttgtacttcaactgcttcaacggcttcttcctcttctactactattactactactgctactactacttctttgccatttcaggataagtctcactttggtagtgctttgagagcttatagcaagaaaggtgggtctcgactgggtgttagcttggttgcttctgccattgctacacccaattcggtactcagtgaagaggctttcaaagggcttggtgactttgaggaggattctctggatgttagtgacgaggatgagtatgagtctgaaggtgaggcgggttctgattcagtcgatggagatgagctcgctgtggccaagttgggtttgcctactcgccttgttgagaccttggagagacgtgggattactagcctttttcctattcaggttcaattcttcaccatt

SEQ ID NO: 6292 - DNA, 956 bp, Cannabis sativa
gtaaggtgtatgccttcaaattatttgggtaacatatgaatatgcaggctttggctcaaggagacaatttgtggccattgttatagggagttgcatatgccaaacaaccaaaattacaaagatgatcataggatggagatttgttgtgcaaaagcgtgtaagaggttttgcctttaagcaagatagaatgtgttctatttaaaagataaatcaaagttctcaccatgtaactccaatatataagggggatgttggattggaaagccaatgcccgagccacattaagaatatgttggtgtttcctttcaacaatagaattttgttgtggcctgttcacacaagaattataatgaaaattatctttgttagcaaaaaaaaaaaaaacttgttaaactaagctcctttgcgttgtttgttcttacagacttaatgtttaatttataatggacattgacaaaagtaaaaaaaaaattgaatgatgagagaagtttctgattttgcttttaacatatagatccaagtgtatcgcgaatgattatctacagtagttaagaaatacttataaccttcaatggactctaaacggtaaggaccctaaatgtccatatgtaacaggtcaaaaatatgaggggcaaagctggtgtgggaatgaaatagcagtttttttgttttgcaaaatgacatgcttcacaattaaaagaatgagtaagattagtgccaaaatgaaactttttattaattttgtttgtaactaatacagatgggtgaccaaggcgagtataccattagtgtttgtctgtattaacagtacaagtaagagaatgagatgcaggcttagacgggacttcttgttgaatgtaatatagattgcctagctgattagctatcccaatcatcaatgctaagaaagtttgtggatagaataagaattagtagtgaataacatgttgtgactg

SEQ ID NO: 6293 - DNA, 1780 bp, Cannabis sativa
tttgccaattggcacctcaagactagagtaatagaatagaacaacacatagaagagaagagagaaatgagtttggataaaagccacgtgagtacccaacccaacccaaactagagtgcttctttctttctttctttcttttgcgcgtggctcacacgctcacacgagagagcatactttttcttttcttttttttttttttctttttttcttttaatttaaaaacaaataatagcgtttaattttcgaagcttttcctctgtgtgattcaatctaaacaataaaactagtaataacaactatgagagagagtaacagaaacaaggtatggcttttcaatttttattttttatttttgtaaaatcttttggttcaccaagaaaatatcttcaatgcttcaaaagttcagagccctaaatcttacatagattattatattcgctattgttgttgttatggaatttgatgctgtccgattgtattagccaatttttaaaaaaaattaaattttaaattatatatttttaaagaaagtatatgcagcggcgttgaaatttagttaggttgtttaattattattattttaattttttttcggtgcattagggtttggtattatagctagcgcttcaattttgcgttgtcgccgatggacgctcgtgtcgggggcaagtttcggcttggccggaagatcggcagtggctcttttggagagatctatctaggtttgtgccttatatttatctatttttgaaattattgctattttttttattttattttatgtatttggctgaatgtggataatgggtgtcactgattttttttcgtgcaggtactaatatacagactaatgaagaggttgcgattaagcttgtaagttgtttgtttacgtaattctgtttgggagtaattctgttgtagtttcattggttgggttgtatactttgtttctgtgtgtgcacttgtgatttataattcgctggttatttgggtgtcaacactggaaacaagttcttattaaatgtaggattaattggtagatgttattcagctttaatttatctgggtattagactattagtagatacaaagaagaggtaatattgtcaaagcttttataagaatgtttctaaaaaggttagcttgagtggtcagccatgatatattgctccatgaggtttagtgtgtaaaagtttgccgtactctcctctctctcaatgattgtatagttgagggagaatgaatatcataaacgaaaaaaagcaatcaaaatgtctattgtaatgcagcaatatgtttgtctattaaatttgtggtttggtggtactttacttctaataattaatgctcatgtttttcttgttgtttatgtgtaggagaatgttaagacaaagcatcctcaattgctctacgaatcaaaattatacagaattctgcaaggaggaagtactgaattttccttttgcctatttttttattatagtaaatgaagttttatttgtatcattttaaagtgtcagttcttttatttttaattttttgcgtgacacagtcagttcttccttgttgatgttcgattgaatctctctcatattgactacttgtaatttgttgttacagcgggaattccgaatgtcaggtggtttggagttgaaggagagtataatgttttggtgatggatttgctgggtcctagtcttgaagatctctttaatttctgtagtaggaaactttctttaaagtcagttcttatgcttgctgatcaaatggttggtctt

SEQ ID NO: 6294 - DNA, 748 bp, Cannabis sativa
atcatcatcaccaaagaagattaagaagaatgtgtcattgaaaagttcaaaagattattatcatgatcataaggaagtgattatggattcttcttcttcttctaataataataataatgaattagtagttggtgatgttgaagctgttcaactaagtagaatgccttctttggatatggatattatttgggatgctcttttggtttctgattaattaactaattaatcatcataatattatgtctttgatcattttttttgatttatttataaaagattattgttattattattattattattaattactatgtggaatgcatcatttcaacacagctattctacactatgtgaaattcatattttagaaataaaagggaaaaaaaatacatattttttttttttggttgatgatgtttttttttttctttttttgtgagtttgggtattgaagtagtgagttggagttttattaatttccaaatttggaagagaatctaagcaatatatgtaatatgttatggtggagtgttaccaagttttgataaagagtggctatcacatcttcaaaaaaaaggtctattattatttggtgttaatattttaaattattagaaaagtaatctttgtcattctatttctatatggagaatttgttaaactaacaatataaaagtatagaatttgaaaaatagcttattatattttaggagcaaccattgtagttatttcataatttcttaattta

SEQ ID NO: 6295 - DNA, 946 bp, Cannabis sativa
ttgtttatgaaataagatggaaaactattatatataagatattggataatatttagaatactttaaatatataatttggtatttttgtggtcctagctaggtgcagggtagatttatataattaagtaattaagtagcttgaagtacgtgacccactttaaatttacttttaattttatggggtttttttttaacctttagtaaacaccgacaacagccatgcattcaattattgaattttcgactatatatgtataaaatttctcagaatatatatataccctcatacatgatgatttatatatataccaaatacgtatatatatatgatatatttgtgtatacgtacgatggcttaggttattttttgttatgagttgtagttgtatatatacaatttattttgtatgatattgtatatatttattttttattttataaaaagtctgaatatgtataatttatagtgatgaaaataaaatttaaaataatatattgcataaaaattaagcgcacacatatataattaattaattattgaatcatatttttaatactataaattatttataaatttttgaaaacgacaaaaataatacttactataattataatatacgctcatataaaaaaaaataagttataatttctccataaaataaaaacaataaagaggtatatatagaagcaaaaataatactattaaaaataacgtatatactcctatctgaaatatgcattgtattattatatgtaaccattgccaaaaaaacaaatcccctctttaaatattattaattatgcatttttgtggtaagtttataaatgcatgcatgactaaaccaattaactagaattgtatttaaattttttaattgaatacacacgtgatatatatcttttagctgtgacacatataacaatcaaaaaatttagttatagtata

SEQ ID NO: 6296 - DNA, 630 bp, Cannabis sativa
cggtgtgtgcaacaagctacatagagaagaaataaaaggtatcagatagaaaaagtaaagaatatgagtatacaattaatattataagaaattacccaattcttcaagacaacaaatttaacttataggcacataaaattctgaacatatacttcgctcatagctagattcctcttctcaagttggaaatgaactcaacaaggaataaatgcatggatattattaggaaaaaataatacaaaatttattggttttcccgactctcgggcaaagtattaccatcgatctctaaaaccaacacttattcgaccgttgcaaaacagagtagaataggaggcggtagaaaaatattgggaaattttttttcgattgtgcaaaactgtcaccaatattaaaagcagtataaccgactgtttgaaacagtcgctatactatatgcgatcgttaaaaattgtcaccagctatagtataagcaactgatttaaatagtcagctatacccttatatataaaaaaataattaaatattaaatgatttttcttcaaactgtaaatcacataatcttatgtatagctatatgtaataaattcttctgttaaatttttttatatatttaaatatataattctt

SEQ ID NO: 6297 - DNA, 794 bp, Cannabis sativa
atatatatatatatcaactagttgatttgtgttttgacagaagaagaagaagaagaagaaagagttgaggtggaaacgtgtgaagaaatataaaacagagagagaagcaggaaatgctggcatgtacatatgagaaataaactcattacaaaacttcttaaataggcaaccaaaaagggactcaaacagtcaaactcaataactctatagtactactacgacttgggaaagtaataatatataaaatataataatattaatgatttacatatatttttatattttaagcttttgtatttctctactctgttttgtttctgtacgtgcagttggttaatggtgaaagaagctggctgtacaaacaacaagtagttagagataacattattagtttagtcagaatatgtattgatttctgtctagatattaataattaataatctttttttgtcaacgggggcatctatctctttattattattaaaaagaaaattagaaaactttgtgtagagagttgataaaagagagcttagcatgactgagaaactccccatgatgcttcctatacatacatatacacatatttcatagtttataaggctataataaaagaaatattacatgtaacacggaaaaaggaaactataaactgaagaagcacgaggcagaattttgccattttttatggagatattatatatttacagagtcttctcttccctagatttgagaagatagaggtgcacagtatctgtctaccaaaacttaagtgtatttatataaatatatattta

SEQ ID NO: 6298 - DNA, 1460 bp, Cannabis sativa
ggctatagtgatgctgattgggccaactgtctcgacgataggagatccacatgtggctatgtcatgttcttaggatgcaacctcatatcttggtctgccaagaagcagcaggtggttgctaggtccagcactgagaacgaatttcgagctctagcaaatgatgctgctgaaattcgatggcttcaatctctgttaaaggaattgcatgttcctattgttaaaactcctatcttatgggttgataatcagtctgccacatctctagccgccaatcctgtgttccatgctcgttgcaagcatatagaaattgatctccacttcgttagagatcaaatattagcacatcaactagcagttcaatatgtgccttcgctggaccaggttgtagatattttaaccaaattgttaacaacagacagatttaactatctcaaaagcaaacttcaaatagcttcttcaccttttcgtttaaggggggatgttagccatacagttaaatccgttagttagttaactgaatcagttagtttgttttcttgtttctgttattttcagttgtttctttctttcatcttgtactgtactgaattcttctatataaataacagaacaaccaattgtttagttgagctttttttggcatttcaattctttctttcttctggtttttacatctggttttgtaccttttgcttgccaatgttcaaagcctcacaaaattaaacagccaagaatcaaatataggagtaggaaataaataacaaaggtccttctttgaataatattcaataatatagataataagacttgtaagagtagaaatctcgtccattaatttgtttcataaagcatggaatcagataaaaacaaataatttccgctttcaaacttaatattataaaactcaaaccagttagtctaagaatagcggatagagaaatttaccttgtcactggtgaagctgttattcgcaaagaagaagcaacaaacgaaggtcggtacttgcggtgtgagtttgagaagaagactgtcacaaggtatgattgacgacaaattaatcttcaaatttctaggattagggtttgttgggcttggctcatggctagagtggaagagaaaaaaaatttgtggatctgccaaatgaaaaagaagggtaagtagggtatgaattagtaagtagaattagtaagtagtggaatggaattataattccaccaaatgaaaaatgaaaaagcaattctgttagtttggggaaataagcattacaataattttcttttccaaaattgttatttccaaccaaacaaaagaatcaaactcattaatatttcattctattggtttctggtccattaccatatacattactcatatgttagacaaacatacaagcttttttttttttttgagacaatcacacgcacacaagttctgtcttgaagcttgatattctttgaggt

SEQ ID NO: 6299 - DNA, 633 bp, Cannabis sativa
gcaccacttaaatctaaaataaagtgaatatatagtgcaatgagaataattctctctccattgaactagcctcactctctttgattgtcagttaaagtagtttaacttttcacaaaactaagtatttttttagacttttatctcaagtgtgaaagttacattttatatacccttgtaaaaaaaaagactcatatcgactcattctatttcatacacactaaagcactctcattttataaaaaattcattaactttgtaaaaaattctaacacactattcctttaaaaaaaataataaaaaaaatcacaattgaaaaaaataaacaaaataggtaaccatctctcacacgtccattacaaccgtcaccctccatttatctagtaaattttctattccatgaacattattgattgatattgattgatcttatcttttggtttctataaattaaaaattcgatcaagttctgtaattaaaaaaactcgtacgatatatttgttcattttactaactttattgtttttgcttgcatttggaaggaaatctagattgtactttgagttatttatatatttgctttaaactgttgcttgatagaatgtaaataatgacaataacaaaaagccaaaaaaa

SEQ ID NO: 6300 - DNA, 988 bp, Cannabis sativa
ttgccgccatttaccctaattattgtttatattttattataaatagggcatatgtttataatagaaacatatgatttcctagtgctctttaataacaattctagtggtctttaatactgaatttagtagtgataaaagtaaaagtaataatagtatgtagctccaaaaatttggacatttgatttcctaaaatttgtctattttcattacgaaatttatactaaatgttaattttttttttcaaattttatatttatagtttgacaaaaaaaatttacatttatttatttttacttaattttttttcctttttctttttattattttttacaaagttttaaaaaaaattcttctttacattttttttttgtaattctctctcttctcaaattattttctttttctttatttattctatataaaatctgactatgtaatattatttttgatttaatggtattttttaatttttttaggttaaatttatcgaaatatcccaattaagaatattctttattaattttgtaatattaattcttgtttttacgattagtttgcatttcatttcttcttcttcagctcctctctctacatcactttcttatttccactaactattattatgcagatgacctcttcggagatcccacgctcattgaaaagttattccactttttgtttatcagaagccacacgaagtgtataaaaaatgagaagagaaagatatgttactccagttccaaagcaagcaccgaagcaacaagtaccatgtgaaatttgagtattgtcaacaaagttttactcccttgttgctttttcttgtgtatcagcaaatggaagagcaatgcatatcactaagtattctatcaccctatttggaggtatttttgtactttgttcattgaattagtatgcttgagtgagaatagatatttacttttttcctttgcagacatttagattctattaatctttttttttttttttt

SEQ ID NO: 6301 - DNA, 688 bp, Cannabis sativa
gagtggtggttggagtactctttccgaggacgcctccaccccttgtggcggaaaagcattgaggagatggaggatttgttcggatttgcaacaagttatcgttgcctttgcgatttacattctctaagaccaagttcatagtcttggataaaggagtgttctctgtctcatcatttcttctgcacaaaaaatagttatgaaacttcagtctaaagccttttattttcagtagaatctatactacattacagtctagagttccacaatcagagttttcgaaactgggctctatgcttaaccctacaatatagaatagaacctcagactttgtgggagaaaaccagatctagaccatttgagctactcctctaattcgtttagtctagttacagtgttaaccgaaattccatttagcacaaaggagctaatgaacactaatttcatttgaaaataggttctctgcttaaccctgcaatatgactttaagggagaaaaccgcatccaaaccattcgagttactcctctcattcatctagtctagttacagtcttaaaccaaaattccattatgcacaaaggagctaatgaatcaactgtgcatacacttagctttacagcatgaagtaaaacataactagataatgcgaagaagcttgaaggtatcgaatcatgcacaatatgaagtaaac

SEQ ID NO: 6302 - DNA, 1258 bp, Cannabis sativa
aggtattgcgctctacttaaaagctagtttgttattaacacaatagataatcattgagactagggctcttagtgtggtcgtttgaagataattaaaaacctttctagatttgagcatttgtcttagtttcatactttcttatgtcaaaccactaaattgcttacgttttattcattttatgagcgttttgtgaatattttatgaaattttatgaaaattaatgtgctaaataaaatatcaacctatcttaatatttgaatatattcttaatatatctagtactatatatagaatgtatatacaacatttaaatcatataaattttaattaattgcactaataataaattaaatgataacttccataatttgtaattaatgacagataatttttaaaaataaataatttaaataacaaattacttgatttgataaataaatataattattgtataacttaaaattttaaagtcaacacaattattaaaattacatgtctaaataaaattatgtaattaattaccaaattatatttttccaattttaatttatattaaataacatgtaaattataaatttatgtttctaaataaaaataaaaaattaaataaatacaatttattgatcaaactaacaaaaataaggaaattaattaatatttcaaataaatgaaaatttaattaaaaaattcaaaatttttcattttttttgaaaattctacttctgaaaatgacatgtcatttttcacggtatgtggaaaatgacttgttgtatgaactgttctccttcctctgtaatgggttgtcttgacccgattttctgcaagtaggtcaaacggacccgtttcaaaactcagcctaaaacaccgcttttgacactaattttcatgtttttcaacccaaattgatgaaaaatgaatatatgaagagattcaacacatttttaagctaaataaacatgttaaatttaattttaattttaaaaaaaataactctcattttacctacgtatacctagattcagaagctcaattttaatgtattttgaacctagttactcatgcataaacatgagaacaataacttaaggaattttaatgttattaatatgataaaaataaataaaatcaaaacttcaaaatcttaaaatacaaatgtgtattataagattattaatgtgttatataatttgaaaaataacttttaataatgaagatggcaaataaaaaaaaaattgccaaactagtacatcaaccaaaa

SEQ ID NO: 6303 - DNA, 1004 bp, Cannabis sativa
gaattacacttatactactcatgttcttattaattatgcgcttgttaacattacaaaatcttgcatgtcaggtattaaatgtacacaacatgtaaattaaaaacttgactttattaattttaatatttaatttaaacatctcttcagttgcatatcatttccccacaaacatcccacttttagttaaagtaacaaatttccttatgtagtctgtgtgaattccgctctgttaagtagatagctcgatactagattctttcttgtcttcagtaccaacaacaattgtagtgtgagttaactaacaacactgtcttgaacgtaacacgatcaaacatgcgataagtgttagtgtccacccaccacccaatctttagattcattattttttatgttttttttttcattaaacccattgtgataaataatggatcacttttgtaaatttgaaacctttttttagtgaggggtgtaagtgcaaggcctgctcttccttccatatccatggtccaataccaaaaagaagggagaaattactaattagagaaacaaaaatgagtgtgtcatcttagaattgtagagcaaataaatataatgagtgaagagaagtaattaggtgaagatgagcaaagatttggaaaaagttgagagagtgatgtttcactttcacattgaattcattcattcacgtacaatgtaatgtggtttttgagttttgatttggaaatactaaacaccacactactgttttgttttacactatcaatcaaattaaaatccagaaaatgagtgcatagacaaggcaattagatgtgatgtgggagtgtgtagggtacctaattaaagatttcttcgagttaattgtgccacaaattgatcaacagctaccatagcacgagatgcggatgccatagaaccatcatacctgtgattgattgagagagagtgagtcattcagaaactcaagagctgataaattgataatgcaatgcaatgcaatgaagtgt

SEQ ID NO: 6304 - DNA, 2758 bp, Cannabis sativa
tgttataacttttacagcaaagagggagctgtatagccatcttttaagtacataggttcccaagagttgagtaaattgtggggtctatattagctctttctcataatttaattgtacttttcttttaccattttttatctatccatttatccaatacaatagcccttttgcccttatgtcacaagtcatgaggtttatatttctgtttctggttggaattcaaagaagatctatgccttgaatttagtagataagcaattgagacagataaaaatttggtatgtacaaatttagttggttcacgagaagttgatatattccttaattatatagaaaatgctttttgtacatttacttactcctttcgaactccccaactatgtataacttatccaaccaaagaaaaaaaaaaaagtatgcaacttattacaaataaaaatcattataaaagtacacccaattgctagttttttttagtaaccaaaacttggctggctttcttgttaaaagcttaaggttataattaataggtgatggttagtaggtctaaaagagagataagagagctgtgtagttgggagctcattcaatgaaaaataatgtcatttagtgaatgatagccggtgatcacgttgctgtcatattcaggcctcttaaatgggtcccctaacctcatcatgtgaagagcttaagtcagagtcggtgtgtgagtgaggctgagacttctcaaataatcaaaatatatcaccactatataacaaggcttcaagcactccattctcttgtcccttaaccttaatattttataacaacaaggagtgagttttctcttctacactctctctattggtattatattctttacaattcccaatgcggattttagcactgttgtgcttttgggtgtctttggctttggtagttagcttttgctacggtgatgatgacaagacagttgaggtagttgggattggagaatgtgccgactgctctcagcataacttcgacacaaaacttgccttttcaggtatataatgtgtaacacaaaaatgtccaattgtattgtatgagtatcatgtcaagatcaacttcaatcttacatatccgaaaaatgagtacatatgatcttttttgagttggtctgtcaattaagcccatacatgaaaaaggtgtattttataattggtttgccatgcacacatataaaacatgtggcaaatgaagaataataatcttattaatttttctcattgttttgtcattttcaggtcttcgtgtaacaatagactgtaaaacaccaggtgggcacttcaaaacaagaggatcaggggagttagacgaagaaggaaagttcaaagtgtcactccctaaagacatcttagataaggaatcaaaacttaatgaagaatgctatgcacaactccatagttcatcatatggaccttgtcctgcccgtgatggcttagagtcctctaaaatactctcccaaaccattaaacccccttcaaccaatgacaacaatgatcataacaaacacacttttggactagctaagggaaaactcaagttctcacctataacatgcgcttcagcctttttttggcaccatttccacaaaaaacacccactttgtgctcctaaaacccctgaacaagccccccaaaagcccccaccagcaccagcgccaaagaaagaactccctactccttccccccaaaagaagccaaacccttcaaaagagaaagctccaaagaaagagccttgtcctccaaaagccaataaacctccaaagaaagaggtccccaagaagaagccttgtcctcccaaaccagaaataaagcctcttccaccaagtgttcctgtctataataaacctccaacaccagtttattacaagcccaaacacccttttttcaagcaccccttttacaagcaccctttctacaagcatcctttctttaagcatctcccacctttccctaagatcccttatcaccctcttttccctaagctcaagctccctcctttctttgaccatcccatgtttggaaaaatacctgccacccaacatccttagtgtcgttttgcttgtaattggggatgaagatatgtcgttttttggtggagcatgttctcttgttgttatcctaattaataaagattgccaagctccatatatatttttattttttaagaaaaaagtgacttaatgagagacatatagagttgggatgaagttttagggaataattgtgttgattttgattttcattatttagctggttcatttgtgtggagtcagattgttctttaattaattataattatattatatttgttgggggatctttttggttttgtttatgtaaaggtttaatgacaaatgcttatgaatttggaatcaattaatattgttattcttttttatttgcaatatataattaatattgttacctttttttctccaatcaatatctaaggattagtttacaaaaaaattacattttatgaatttacagtttttttttatattttattaaattttaatagatttcaatttttttcaataaaaatataaagtgttatttttctgttatttctaaaacaacgttgtttttacgttactattacgggaaagtaacgtaaaaacaatatttttttatacaaatgaaaaacctgtaaaaaacaaaatttattaaaaaaattataaaaatattttaaaaataacaattttctactaaaataacagcttctggtt

SEQ ID NO: 6305 - DNA, 1357 bp, Cannabis sativa
tttagaaaatattaataggtgctttaagatgaattcactacacatcactccgtatcaattgtatctctacttataatctgaatttttatatgatgatgtttattataattattaaagattattttatttttgagaatatgacattcagagttatgtgataggtaagagagatattgagtaagttgcataattttaaattgtttgggaatattttagttagttataacatatatgtaatatatatgtaatgatatattgaatttataataaaacatttgttttggtttatcggctaaactaatttatgtacatcttagaggtcaaaatttcaaatctcaacttagtttttttgtagtttatttatttattttttttaaaaaaaagattgtcttaagatttgaacccttaccaacaaaacttctatgtagtgtcttaactattaaaactaaccattttattgttattttttttttactttaaattatatttaataataatatgaacatagaagtttgtataaatttttaacatattatatcgtgtagaaaataaagtatattcttcctaacttacaaataaaaaaaagttcgccccctcaatttaaattcaaagtctgccactgtatgatattacacagttaaaaatacttaaatagattgataggtactaactatgtcaataatatgtatcttcttttcagtagctcattatttaaaagttccaaagttaagtatgttagaaaaacttgtgttggtttggcaggcttaaagcaggggcgttacagtatggctctgggattggtacgggctgaactagggtgcgagaactgtttaaatgaatttttatttttattttcaaaattaaaaagtacacggaattttgtagaataagttgaggaatttttaaaaataccgtattttatgttttatttataattttaccacttaaagcttttacttacaaaaatatacttgtaaagttttaaaattataaaaatacacttctctcaataaaaagtaaaaaaataactaaaaaacaaataactataaattaattataaataaattttaaaacaaccaaaaaaataacctcatgagttgtgacaaccataataaaactataaataaattatatatatatatgaaattattatttttaaaaaagaggtatttttataaataaacgaagatgctcttttttgtcgtgagtgctcaagaaagagaattccatctctaaggacgagccgcgtcggtggtggttattttcagggttaggaatgctcaggtaataaaatccattgcaggagatgctttttttttttgggattgtataatgtttttagaataattatcttttt

SEQ ID NO: 6306 - DNA, 1083 bp, Cannabis sativa
atatatataaatagaaaacctaagaaaagaattattatggtatatacctatcacaaacattcctttaaaaactaataataataataataataaacaaatataatttatttatggaatcccaatcccattatataaaagataaataaatatgacattaattcttaaattctcttattcttattattataataaaattatttaaattaatattttacataacagtgtttgtaccgacacagtacactgtacaaaaaagacaaaaacatcaccaataaattttttttttttttttgtaaagtttgaatctttcggtatgaaatgaaaaatatttaaaggggtttacaccttttagtagagtggtcactgtcattgacactcaaggcttaagagagagaaactagtgagagagagatatggaaggaagctcttctttagctcatggtgttgggattgagaaggaagaaggagataatcacaaggaaatgattgaaaatccaagtggggtttgtgagtttggaccatgatgatgatgaagaagaagaaagtaatgttctttcttctgggtttgttcctgggcctctgctttctctcaaggaacagattgagaaagacaaggttcatatttttcttcccatttttactattatttatttaataaaagggcttaatttcattgggtttttgaaatgtgtcttatgaggattttatatgataagcccagaaatgatatgtttgtttttgtttaagtcataaaattatttgattatttgattagagagtattatatatgagttcaaaggtttgtttatgttgttgagaaaccatatcagattaagctattttgttcttgttaaagatctaattactcagttttcttgttttcattcttttggacaaattattttctccattagtatcattttgttgttgatgatttaaatcttattatcaatcaatgttcaacattttgtaaatttgttcttctttggcattcaaagcaaaatcttttgctctttgtttgaataaagtttggttggagctaatggaatggaacagattcattttcattccattcatttgttt

SEQ ID NO: 6307 - DNA, 932 bp, Cannabis sativa
aaaggctttaaaattagaagagaagaagaaccaatggcgatagtccttgacgtttttccgggagttgaacatgacagttgttttgttgcccagatgagcttggagggagtaaaaaccatcattctgtctgtttcccttctttaggacacaaaagagttcacaaaaaaaataatattttggcagagcagggagcaggccaaccccttagagcataaaaaatgaataagcctgacaataggtggtatcaattggtacagagctagtcttacaaaaactaagaaatttataaagtaatcctgaagtggaagcatcgcgccagacatgagatgtgtttggctccattccccgaaccctccatagttgtggttagggatttctgtttctcgggccaagtggtgaaaaatgccctggtcccgaggcctaattccattctcgcccacaatggtccttaagtgatggaaataccccatgggcaagtgtaactccttagcttcccagttggtagcttgtgtacataaggtgtgatcgggactggaccctgcatcaccatatccagtggcaccacctagtgttgtgataccacatcttgagcaaaaattctgggcaagggcttcagggtttgacattctggtttgggagtgaagttttagaatttctttgtcaaaagtgctaaaaccgtgcttatggagatctttcaagacacacctcatttgaaaaggcaagaattaacccaacagttatcccacacattaaaccctaaataaaaagcgaatgggggttcccctaaccactgagaagaagccccctctggatgcaagcgaacccatgaacacaaattttatgtgctatacatcgggtgcaaactacaccatgaagaaaaaatggtgcataggacaaaaaagaaaaagggcaaatcccactagccctagtac

SEQ ID NO: 6308 - DNA, 929 bp, Cannabis sativa
gtttgatataactggtgatcaatttgatccaactagagatccaataaatgttcatcacaataaggtttgactcacccaacacattttgtgtttctttgagactggagatcctatagatgtaactaaatatcaaacacatgaatgcttctgaagatcaaatagaaattcatcatcacatctaacaccaacagattcaagtcaagaacaccaccgaattcaacactgccgacaaaactagaaaatccatcattgcaatcaattgttgtcaagaacaaagattcatcggccaaataccaagaagaataggttccaagacaagtttagggtagcagcactaggattttcttgcacctctatcttctattcttagtgtacattttatcttaagggagcatatattaagagttagagtctaggcgttagttagttttgttattccaattcttattgtaataactaggtagttcgttacatttagatattgcttttgttggtataatacataagggtgtgcatataaatatataaatactacattaattggatcagatcggatattgaatacggtgtctaaaaatctaatacatctaacatccaatcaaatttcttactattttcatttaatttgaatgagtaatttgattttatattgttatacataaatatatatatatatatatattaagtaagtttcctagtaataataatatgttctaaaaaaataataataagcatattgtgtgcgaacaacgaactttttgaatttctaattttaataccgtacattattttaattttccataaatttgcaagagagaggtgatctatgaatacagtatacactatacaccatcaaaatataggattataaatataatgttatggaactctcctatacgacatacatgataatatataatattgggaat

SEQ ID NO: 6309 - DNA, 848 bp, Cannabis sativa
atttatatgaattaaaattaattttaaattaaaataagtgtaagacccctgctaaataataaaattaataatatcacaccggaacagataacctggaaatctatagagcattcagtaaattatttcactctatagaagccatgcataattatcaaaccagactaagagaattaattacaacccatacaagacccaattagagagatagtatatttaatatacaaattacaaattaacaaacatatataataaatatatataagaatataattaatcaaatagatcttacatttccttctcttcatcccatttccttcttccatttcacctgtactcatcagaaacacatggtactggtgtattttattattcaagaaaaatagcaaaaatccaccccagaattgtaaaattatttacgtccaataggaccaataataataataataaataatttagctagtttgtgaaagagatatgacgagagacatcatcgtgagctccaatagtagtggttgtggttgtgttagactgacaccaagaatcatcatcagtgataaactgcatccatgaatcatctttgtcgtcgtcttgctcgatgcaagacgacgatgccataggaatgtcaggtgacatggtatcggattcattgataaatccgccatgtgaattatgtgatgttgagctctccattagtgatatgttattattgttggtgttgcattgtgctagtagttgttgttgttgttcttctacttccgaacatatcccgttcttcttgaacactcggcacaatgcgtatgaatcctgcattttattatatgcctatatatatgtcaggactaagtata

SEQ ID NO: 6310 - DNA, 542 bp, Cannabis sativa
ctgcactttggggtaagtattgctttgtccatcagatgttttcaaatatttctatgctcaattgttactggtacgaatatattctatgcaactccatttccttttttggtttcttagctgattgtattaatttttcatggcatgtcaagccaatggttttcctttcctttttcaattctgcaacacccgttgttctgtatcttttacaaaatgacataccttcaccgcgaatgattgaaagaatgagagcatatagaacaacataaacccttgtgaaatcgctattacagaaaccaataaacaattaacgaaacactgaggaatatatattagttagcttctactatatgtagtcttgggatattcattccgaaaaaaatagcttatctctaactaatttgagttataaacctgaggacacttagttcttgataaaaaaaaaagaaaagaaaaatctttctatataaataaacattatctgtagaatagtatagatggtgtacagttaaataacagataaaaactcttgctttgtaacaaac

SEQ ID NO: 6311 - DNA, 1006 bp, Cannabis sativa
ggggagtgacaatatacgatggtgtggtgcatagggaacatgttgttgcactagcaattgatgtggtagtgaggttcaatttcaacttaaggaggtggcagcggaacatgctgtcagattaacgatacaaaatgctacttctttctcctgggcgcaagtgcctaacaccctgcatgcattattatcaatcaacaggtttaatcctctttaacaattcaattcaaccaacaccacctagaatagtaagaattagataagacagaatatagaatatgagtttttgtttttggaaaatatatggagtattttaaaccatcagtttcctttgtttgaatatgactgaaaaaagtggtgccataaattttcaaggattcccttgacaccacctatgtacgacaacaacttattatgaaacaaatttcttaatctctgtcactcgaagcgaaagcctaggatttgccagattaaaaagaaaagagaaaaagagaagctaaggatttggctttaccttcacaacacaaattgtttcttaatcaccctcttgtgcattcatcattaatcctttaaatgcttccttctccctctgaaacaaaataagaaagataattattttgagataaatcactacttaaaaataaaaaaccatggacattgatttagtgaaaaattatatttttcttcataatatacagtaacttgatactacgcaaagattgttgatacttgagtataatattcccaaatcaaaactcaattacaagtgaaataatttatcagcggacaatgttcaaatgctagtttttaaatgttcataaaaaagcactgaaatagtaaatgaacaatccaaaaaattcacctcaattcaataaatatggtgctagcaccttcccgtggagtggacatacatttacttaataagaaatatagtttgacagattagttaagtctatacatttcaacttgtatcctgaaaaattggagcacctacatgcccaactggattttg

SEQ ID NO: 6312 - DNA, 1191 bp, Cannabis sativa
aaaaaaactaaaacttcaactcaaacgacataaagatatctataaactcacttataacaaacaaaattgtatagcagaacaaaatttgaagcttctctatgatcctcataagcatgtcagctttgagatgaaagaaaagtattacccttgttagatacgcaataaggatcgtccacaatccaagcaggtgattcttttgctttgtcagcttccacaaacacagttatctgatcaccaccactttataaagtgggtaatggtgaagctgcgtcagcaaatattgctatatatgtataggaaagagaggaggaattgtccaccaccagcgtgtgtgtgtgtgtctctctctctctcgagctttgctaattcaagttatcaattcagctgttccgacattaagctttcttaaaaacttttctctttttaggtggttgtcgcctttgcttttcgtctctcttcctcttcgcttgcctttgaattgatttgttcaccaatgaaggttgttctctcaatgcaaagctttttgcaacatgccccaggtgaagctttttcaccatgaagattttctttagctcgccacggtgagctgtgtatgcacgcacccatgagcaaaatgcgttctgcgccagagtcttcacatttggctgagaaaacatatcaaagatatgttactgcagagcaaaaacagatagacttggattctttttgaatcagacacctgctactactgggtttagatgagtcccttggtaaacttcttaaataaacaaaaccaagaaatgaaagcttgacccaactatttaagtcagcaatgattctcagcttaaaataaaagaaacgtgattacacagaatctgttaagtgaactagatattattgagacacgaacattcaaacataaaaaatcagatatacacgagaccaacttgcatacatccttacctgagatgagaatgcctcaagtgctttttgcaaaccagccacccaaggatgcaagtctacagatataaaactcctggcacgatgcttctcattgtggattgggaaactatccaacactttcgatagggggtactctgatagtgacacaccgtgtttctccaagtgatttaaatattccatttcaactggctgtaaaaagagtaaggagtctcctttttcgcccaaccgagcagttctccctaccctgca

SEQ ID NO: 6313 - DNA, 938 bp, Cannabis sativa
aaaaaaatatactacatttgggttttactaaaagaaaaatttattgtgtttaaagaacatattttagataaagaatgaattaataatgctcctgtgaaggacaacctattatcccgaaatgcattttctaggcatgtgggtcaattgtatcttcttccatgaatctgttaggttttttgggtccaaaattttagtcaacattagatttaataatgctcctgtgaaggacaatcgataattttcacaacttgtgggtctgattatgtaaatttggtttaattttattttaagagaaaaaaaaaaaaaaaactttcataccgaatgacaggtgaataaagccaagcaagcacaattttttcatttgacaaaatttaaagggtttgtggataatataatactacaccaatcacaatcaaacgtgaagatcactaccatacatacacacattatattattagtgcaagagaatagtaatagtacactagctagatatattgatatgttgtgttgtgaatgagcttttgccatgactttgattgttattactaatttttctttatttcttgtggtatggaaaatctctatcatcaacaacatcagtattcttcttctccacaacccaatggagaaaacttttcccagtacaacaaaaacgacgagtcgtttcttgtaccatattggcatttacctcttgatgatgaacatcacaacaaccatgtactagccacctcctctgctttccaattttgtgggtttccttcttcttcttcatcttctacttttccaaacgacagtagttttggaccagaagataaagctgctgctgcttccaaaagccatagccaagctgagaaacgacgtcgtgaccggatcaatgctcaactcaccactcttaggaaactaattcccaaatctgataaggtaaaattataataaaa

SEQ ID NO: 6314 - DNA, 911 bp, Cannabis sativa
aaaaaaaaaaaaactcttaaacgaataaagagtttatagaactgtataagttcttttattaaaagagatgagtataagaagatgaattcccttaatatatgaaatctttttggagatacataatttatatatatgtatagatatttatatatgtgatgaataaagttttagagaagatgagacaccgaccaagaacatatgtgattgtgcttttagggcacatgcattggttgttgcttctccactttcaataacccaatacatgctttctttgaccatatatatatatatatatgtatatatagcttgatgagaaagaatgttcttaatttattttttcctacttttaggaagaaattatgctgtaatgtccaacatttaattgattaattgtcttagataaatgtatcctaatttatgaatttaattaagcacttttttcatcaaataatatatgtaaattattacaactagctaccaacaaatgcggtttacactttaccttaattgtggggaaaatcaataataataatgaattattacctcttttgatataaaatttattattattattttgacaaaaaacttttaaaatctttttgtgtgttttgaatttgttttaatttttttgaaggagaatttgttttaatttgtacaactattttatatgaaaatttactactattctttgaactttttgtaaagacacaattgaaataaaaagaaaatatattcttatattttacatgcaacacgtgtttagttactatatgatgaacatgtgtacttacgtatataatatacataaatatgtgcattattaattaattaataatttcactttagccaacacaaattagctaggttattacaacacaaaattaattcaaattaacctaataattaactaa

SEQ ID NO: 6315 - DNA, 690 bp, Cannabis sativa
caaagcacatcacacaggcagacagcaaacagcgttaaatcaccatcactaaggtttgtccaccagatagcaaaatcccataccgaattccattgcagactgtctatccaaatgccccaaggactctgaaactatagacctttagtgaaattgcattgacagaaaagatgcaccgtcgattctttagaagctacacagaaagcacacttgttttcatcaggatccaagaatcctagtctctctttcacgggaagaatatcagactagattttctacaataaaagctttagtctagaatgcatttccatctttcacagtaccctccaaattttgttaggttcctgaaaacgaaagctttgactcattgagtaagtacacttcacaaagaatttacccgagtttgccgctttccaaaaaaagcacatcctcatcttcctccaacatcctgatacagagaatgctacgtgccatatcctcatcgaaacatgcccgaataaggtcaccaaccccctccttttctccagccaagaataagtcaaaaaccttgcaaaaagcgtgaacttgattatacttgaaactctccttaatctcctctatagtcttgtttgggatccaaggtctatcccagagatcaatatttccatttcctactaaatactcgacaccatccaaacaaatggggcgcacatt

SEQ ID NO: 6316 - DNA, 1085 bp, Cannabis sativa
ccgatgtaattacccacccctctgataactttttcggacatgaaaccaattgacaaattgtgtaattgaacccagagttccaaagtattcaaaggtatcgatcttggattaactccatgtgttacccgctccatgatcaaaggcgctcgatcgaaagtccatggactaccatcaataactcgttctatgtctacctcgtgataaaattgaaaaagaaatagattaggatctaattccttcacatacaagcctcgccccggctgccataacgatgctattttgttttgcatagcttgaaaatcgatagatcgatttgttaagaatctccccactaccaaccatctatcatcaatctctgccaacccatcctcccccgcctcaaacagcaatccctcctcgtcatcatcatcaatcgaaaaactggcataattctctgccaagttctgaaactgaggttgtctactatccattgatctcaatcaccaggaaatccacacgagaaacaaacaaaaccagactttagaaacaaaccgattacaccatgtcaaaatgacaagactgtaggaaaatctttactagcatactcttttgtttaggtcaagagtttgactctcactcggcctctcatttgtgagttattatacacagggccgatcttaaaatttaataaactataaaaaaaaattaaaatattattttaaaataaatattattattcgaaatcaataaatatatatatttaaaaggtgataaatttttttctcctaaattagatccaaataatccaaataacaacattaacctaaaattgttaggtttataaatcaaatcatttacctatcttcatttttctttcaaatatttcttgtcatcttaaatagtactattattttttcttaatgttatttactaataaaaccatattttctctctctcaaaagactaaacgtcttcttctatgctagggttttatcatgttttctcttctcttggctagggcgctactgctattcttgcaactcgaaagatataatatataagtgaatattattacagaaaactaatgatacctaacaccactgaat

SEQ ID NO: 6317 - DNA, 657 bp, Cannabis sativa
tgtcattatatacacgtgcctatccatatgaaaaaaaaaaatattgtcattatattataattaagaagatttgtttcataaaaaaaatatcaaattaaatattttaggataatttacctaaaaatactatatttaattataatcagagacacgaacaaaaatattgcctttcaaaaaattaaatgtattttttttaatttgataattataaaccaaaataataaaaaaacctccataaaattaaataaatattgtaagagtgattataatataagtataaatattttttaatgataaataagtcccacaaaacaaaaattctgagtcacttataattctaaattttttttattttaatataatagcattttatcataaaaaaaatttataattctagaactacgtatctaactattaaatattaaacaaatttccacaccgcaatccataattactttagggtggtgaatttttatttttatttttataaaaaaaataatttaaatatatcaataaaaaaatcacatcttaataatgaatagacatttaatactcaaatacttataaagttttaaaaatataacttaaatattattaccgctaaaaattaaatttaattatataattataacctgagagttaaactaatctatgcta

SEQ ID NO: 6318 - DNA, 525 bp, Cannabis sativa
tttttttttttttttttttttttttttttttgagaaagaacaactgttaagaaaaaacaataataaagttcttcccccctagctaatcaatccggtcctcccttattattcaccaaagaaagagaaagtcatttccaaactttttgtaatcacttattaattagataaacagttatacatttgtgtatatatatataggctttaaagagaagttatcattataatctctgtgcacgtttgtatgtcacctaaacaacaaacctgtctaacatcattttctctttaagttggatagtgaacatgttcaccatcattacttcacttattggttatcaactccggtcctttcttgtttgattgaagctaagtgtctgtacttaataaaattcatatataacaaataatagaatatttttgttgaaagaaaagttgcccaattctacccaaattataacttataaattttcctccataccaataaataaatttacatacatgttacactgctatttaaatatgctttag

SEQ ID NO: 6319 - DNA, 682 bp, Cannabis sativa
catcccggagttcccggagtcaacctaggtataaagctagggaaccctcccatgtcgactgctatgactcaggactactcaactctgagatgtcatcttttttgtaacgtgtcaaacattgatgtcccatgccagcatgaaatgtttctgggttaacacattatataaacacaaaattatttatcttcttctatttacaaataagagttttaaatataatgtgcatgacttacaaaacaaaatttatgcactcttaatggatattgcccatgaatgggtattataaggaaaatatgagtttctatgcttaattttactatctaataaaaaaaaattctttatatgatttaagttgttttatggcaccaagagagataaaaaaaaagttgaatttgagttagagagaaataaaataatgctaaatataaacttatttttgatagttttaaaagagagagatatttttttaattaaattgtattattaagcataaaaatattaatttttcatttttttatccgttattagattaaaatctcattttaaaaattaatatttttaaaattgataattaattatagttattttttaaaaattctaatcaattagtattatccattgaaaaatactatatatatgtataaaagttataataaagcactaacttgtgtgcattaaattt

SEQ ID NO: 6320 - DNA, 1061 bp, Cannabis sativa
ccacgatagtgtcctgccaggcaatcttggccagccatagacccacagaggaggcctagctacccaagatgtgcagggtttggcaggtcaaggcttgcaggacttggtaggtcaagggctacaggatctggtaggacatggactgcaggacctaacaagttactatagctctatctagaggaggccagactcgtggtgccggttatggtgactggattcaccacatctacagtgttcgttgggattgcagttatgactagaacctaagtgtataaacctacaatctctgggtcttgagggagacccaaagatgcagatggcgtgacaggaattcttcttgtgttaaccatggcttttgatcagatacggtatccacgctctcaatgaaagcaccaaactcttgagctcaaaaaatgatcaactgacagatgggtcgtatagatctaatgcttaccacatgttacacaaacaaaattaaaaagtaataaacatagagatttgttatagaggttcagccctttgtgatagcgggtaatgacctactcccttttggttgtatttatactgagggaaataccatccagatcactataggtggcatctgctttaacacccttagtattacaaagtatgaatcagtaggcagatatcagttgttgaacagcctagggtgtcggccagccttgggtgttggcgtgtgagagagatgaagacaagagagagagccctaatgggcgtgtataagagagagacttagagctatttggaggctaagtgatttagaggccacttagagaacttaggttttagctagaggtgaaagccttaatataagtggcataaaccctagatttataactgaaatcccttgaaaataggatagttagcttgatatttacaaaaaaccaaaattctcttagattctagatacttctcatcctgtttgttgggcttttagggcccaattcgcaacccattcttgttgtgcacgtgtaggagagtcttatggaacctacaatgcaattcttggctagccatggccttgtgctggctaggctggc

SEQ ID NO: 6321 - DNA, 1414 bp, Cannabis sativa
tgctgctgctgccgctgccttcttctccttttctttttccttcttctttttctttttctttgcagcagcagactctacattctcttcttcaccttccttttcacctaaatcatcaacaggaccagctgtttcaggttcaacctgaactttctcctcttgtgtaggagctgcagcctttggtattggaggtgcctcaccaagctcagcaagaattttatccaaatcatcctcttcttgttccgtccttcctcccttcttcttcttctttttattctttgaagttccagctacctcctggctcttattaactttagtcgattcatcagctccattattactatttccaacactcaatggttcagtttcagctgcatctgtaacttcattgccatcaccaacttcttcgttcaattgagaaaaaacactgttacctttctttttagaagatttcttcttacccgaaaatgctatgaccgaagcatcttcatccacaggcacatcttcatcaattccctcatcgagtagtactgcattgaatgaactaccaccacctttcttagcagccttagatgacttctttttcttaccagaaaaagcaatttgagcaaactcatcttcctcgtctttcttttcatcctcaggttcagcctcatcttcgagagcatcgaaaccagaggcagtaaacaaactaccacccttcttcccacccttagatgactttttcttcttccccataatctcaataggggcttcctcatcatcatcaaccacttccccatcattatcatcatcattgtcatcatcaatagcatcaaaaactgaggcagaaaacaaactattaccactctttttcgacggcttcttcttgccagaaagactcactacaggagcaacatcctcctcatcactctgaactgcatcctcctgtttatcatcatcatcatcttcaagcaacccaaaactcgaaccactaagcacactactattccctttaccctttttcgacttgcccttcttcttaccagcaaaaacaacttcacgatgatcatcttcatcatcattatcaacctcatccagcgccttttcttcatcattgcctttgggctcagaagccttggagccacccttcttacccttcttcttcccagtaatcacaaccttctcttcctgaacttcaggctcctcagaaacctcagttccaatagcgtactcgtcgtcatcaataagcaaacccttcttcttcgacttagcaccaccttgtgcagggttctcatcgtcccgagcattggccttcttccgacccatcgagagatttcaacgaattgagattcactccgtaaaggaaaacaaaaaacaaaacctaatttcaatatcagaaactataatcaaaaccaaaacaatagcattccatgaa

SEQ ID NO: 6322 - DNA, 732 bp, Cannabis sativa
cccagccgccgtgacggtaaacaccgcctggatcaggttcccgaagtagctatcgggcatgggcgggtcgacccgttttcggcaatcggcgaagacggtatacaccgtgtagtcctctggttttagctcacgtgcttgggtcacgtgtctccatatatgagcggagagagattggaaagtggtgaacggtttggaaccgtccgatggagggttgtttgcgttgaccgttgacttgatcttatcgacggcggcttcagagaacttgaatactctctctctgagttgtggctcggtgttgccatcaccgttggatgatgccttcgtgtctttggtatcaccgttggatgatgccttcgtgtctttggcatctccgttggatgaagcgcgtgggtctgagggtagggcgagatctagcttcacgcgcgcgtttcgtgctttggtgcgttctaagaacggtgggactgatatggtgtcggacccactgcagatctcggcccatgaactcatgaagtgccacgtggaggttccatctaggattgcgtggttgaaagcacacccgattgcagtcccgtcctttaatttggttacctgtgtccattattaccatcattaataaaaataaaccaactcgattaaaagcaaagcagtataaatttaagctccacattgctaattaatattatctattggtttggtcccatttttgtactttcgaaaattatatagcctaag

SEQ ID NO: 6323 - DNA, 1155 bp, Cannabis sativa
  modified_base (208)..(220): a, c, t, g, unknown or other
gggataggttcatgttgtggtatgatgttaaatattgatttttttttagtaaaaaaatctaaaaatagttttaagaaaatatctatcaaacaccattaaatttttaaaatgacaataaaatattttctattcttacttttaaatacacaatgataaaaactaaagacacaactaaacatattttaaattattctgaatttctcaaaannnnnnnnnnnnnatatcttaaataactacaacgtaaatgaaaaaaaaaattaaaataaaaaattctctcaattactcaaacagatagacttgtattgatggacccttttaaaattacatagcatccaaaaatatattgaaaatacttatgtgaaaattgcatattatatggattcttacaaaacttgtacaaaactatttttttatcgaatgaaattttttatgcgaaaaattattatatttatatatactggaaaaaacactataattgattatgcatctggttattttatgataactattaccgtaaattatttttcacgtttttatttagagaaatttatctggtatactaacttttgctatttttttacagaaaaaatactgaccggcggtattttattttctcataaaatatattttttttagaaaaggtatatattttaataaactttactaaaaacccacaaaaatcaaaattcccattgttatcttaaaaacgtgcatgcagtcaaaagtctactacaaactacaaaaagaatcgtgttttacagtactacctatacgaattaagatcccttttatattgtgttaaacttaaagtttattaaatatattaactaattttgttaacttggtttaatttttttataaataaaaaattaattgatgtgttaattttaattaatttaacatagtatgggacaccactttttaacgggagatattgattcctacctatcctcctctaactctatgtttggtgtaaagaaagatggaaggaaataataattttaacagaagaatgaaggagagtaaaaaatggtttgtttgttggagaataaaaagtacaaacgaaaaagaattttgaagagtaaaataataatgagtcctactactattcttccctcttaaatgaaagagaaaatgagagaaattttttgtaac

SEQ ID NO: 6324 - DNA, 626 bp, Cannabis sativa
agtagaaaagggttagttacatttatttttattcaatttggttataattccgctcctgaccaagaagtggatttgtctagttgaggagtgaaaatattcaaaatacccggctatgcatttttttatcaaaattaatgattattggatcaatgctttgtcgaatgtatgtattgtacgtgtagatcaaagatttttgctggaacagctcaagttatttttgcaatttttaatcaaaacctaaaattaaaatgcttaattcaactggtttacgctcttcttaatcagatgttaaatgaaaagagaaatgctacttgtttgtaaaatttcatttgttgaagctgaaaaatggtcaattctgtactttttgataagcgatggagaatgaaaaaataaaaataaagaatataataatttgtgggtagatcactttccatattgagatagtaatagatttatgtttacttagagcttttactgtcttaagaagctaattgtcttataagagaattgaagagaagttctaatcttgtagaaataatgaaaagtatgtataataatctgtggaacttcttcttttaaaagaaagggagagtttggtacgtgatgtttaattttttttttttttt

SEQ ID NO: 6325 - DNA, 1947 bp, Cannabis sativa
cccctctctcccccaacccacccccattctttatagttatatcagacctacttttgtacctcttgtttacccatttgatggcttattgataggttcgcttaaatggggttgcaacattcattggaattgttggtctcactgtagcttttgctgtcttggttgtccttctggtcaggtaaatcttcactagtctctgcctctctctcattttgtatttaataatagagttgatgtctgactgcataaattgcgctctgcagatacttcactgggcatacaaaaaatgtggatagtaatactagtcagtttattgcagggaagactaaaattggtgatgctgtagatggagccattaaaattattactgttgcggtaggcctattatgatcagacagatgtcattcatgtagatatgcgtgcatataatcacagatgttcactaatacacaagtttttgtaatgtgtttgacttacacttcattgttgcaggtcactattgttgtagttgcagttcctgaagggcttcctttggctgttactttaacgtaagtatgcctaccctatgtaaagtaacttcatggttttattataaatttattgttccaattcaatacatattactatctaccattaattgagaaactgagaacataaagtatttgtacagtagtttggtccatctccgttattttgttagtgttattgaaatggtgcctagcaatttggattggaaactgtatatttgttttgttgtaggtggttgatatggaacttgtcatagtttttctttttccttttcgtgaattattattagcatatttttttgcattcatttccatgttacgtgtatccttatatatttgcatctaatttttttattttgattgttgcatacagtcttgcatactcaatgaggaaaatgatggcagataaagccttggtatgggttgctctttttttttttttttttttaagaaaaagagaagaaattgttttttttgttcttcggtctttggtgtaatgggtataatggttgtaaagtgcaggttcgaaggctttcggcatgtgagacaatgggttctgcagaaaccatctgtagtgataagactggaaccttaactttaaatcaggtttgaaggtcttttttttttttatttttctgtgtgtagcgaaaatgtacaattttacataaggttctcgaccaattgaattagttgcctgtttagtataattttactctttctttatattgtgtgcaaacaaatatgcagacttgactgaaactctttttttccctggctggttatagatgactgttgttgaggcttatgttggtcgggagaaaattgctcctgctgataacaagtcacagttgtctccaatgctctcttctttactttttgaaggcattgctcaaaatgccaatggtggtgtttttgtacccaaggtatttagtatccattgcttattatctgccgtattgaatttaagtgaaatatgcttccaagttcataaaaaaagggactaaactaaaactaggaagatattctattcaatgtggtaatcttgattctatttttggtcaaaccaattttttgaagatctgaatgctctcattatacatgtaaaatctattaatttttattaattatatatgcaaaataatattaaaaaagcataattatttaagatagaaatatgatgcttagctttctttgattcaaactttataaacatagatttttgaataattattttagttttatttgttttgattaattataaagtttgttttattttaaattaagatgtggaaattcaaatccttaaaaattgtttactaaaatttcttaaaattgaaaactagaagtcatatttcactcacacccagaggacatcatagtattttctcttgcttattcactatgggtagttgtgcttatgttt

SEQ ID NO: 6326 - DNA, 1277 bp, Cannabis sativa
  modified_base (937)..(941): a, c, t, g, unknown or other
ttgataggggtcaaaattcgaataacaaggacaagttctagaaattcaattggagagaagttatcatcatcagtaatggcagccactgttctttcattgtctgtgaaggagatggttgatttcatccgatcagttaaagcatccatgggtgcacaagagaagttacaaaccagaaagaagaatacagaaaaaaactgaagaagaaaaactataactgctacagagcactcataatgggcacacactcttttattttttaatatcattttaattggaatgaaatggtgtttccttaaaaaaaaattacaatgaagaaattattcttataatctagaataggtcgaacttaaataaattaattaaattcttatgctataaatttggcataagtaaaattatatttgcatttatttttaatattctaaatgtaaaattttgcttagtactatagtaatataaataatatttaaagctttaatttttgttattttatttttataataaaaaaatattttatttttgtgagattttattttaagaaatttatgttaataaacctcaacaatctaatattttctagtgaaaaagaaaaaaaaaactatatattataaagatagaaaatgaaatttttaaataacataaatttttatataattataattatagtgacttagataataacatctatcattattattataattaaaatcttaataattaacatcaatttaaaatctgtaatttatcaaataattagcacaatttttttttaaccacagttatttttttctcacaacataacctcaattactttcctatttactgtactggtcccatataattttaatcatattcattttccgtatgtaataatcagaaaactcatcattgcattaaatatatatcatggtcattttcaatattattattattattnnnnntattattattattattattatgccggtccttgaagaataatcttcaatctggcgttgggatataattgggttctcggatagctttatcttctaatgaagtaatgattatatatgttgttcatttcataactttaaatatataatatatatatatatatagatacatatatttatagatattaaacaagacatgaattataaaaacaagaacaatttcccggcatgcatgaatgaattaataattcggtttgttacatatttctaagacacaagcatgccttagtgactcaattgggatgattatatgtattaatacaagtgatttttagtccctaa

SEQ ID NO: 6327 - DNA, 1083 bp, Cannabis sativa
aaaatatatatttaatttttttagcttacttttttatagacaactataatcactacaccttcactgtatattagagatgattattactttattggacaccttaacacaacatattaggttgtattttacaaataattatattttcttaatattatttattaaattaaaatatgtataattttttaagttaataacgatacatgtatcatattaaattaaatttaattattaattagtaatacaataatacaacattataagtataggacaaaactttattttccatatccttattaaatataataataacaaagaatgacaatggaagcattctcatcaactatatatagcttgttgttcaaaactagggagaattcttacatatttaaacttcaatgtcccaagaacatgttaaataaagtcgatgatgttaagatattactcaatatcttatataattaaacttataggtaattatctaaaagggatgtattgttgtattttttatttattttgatgttaaaaaaaattaatttaatttttaaaatttatttcacactcgtataaaattttaaaaaatatagaaatcaatgttaaaattatttattcacgcgtatttgaaataaaaaagtcacttgtacaacaaattgtttgaaccttttattttatgcattaaatttttttaaatttcttaaaattttatataatatcttaaataactaagacatacataataataataataaaaattagactaattttttgtgggataattacatcatatactgaaaatttcaacttttttacttttatattgttgggtggaatttttttcaaaaatactgtgtaaattttatattgtgtattgtgttaagtttttactgttgtttcactgttatttttagttgttctgttttgtgttctactattgttttataaaaatattgtatttttgaaaaatttccttataatagtatttttgtaaaaattaatcaaaatttcatgtaaaaatttctattttttttagatacccgaatgagatactatgcacccactaaaatgttttagtgatgataataaatt

SEQ ID NO: 6328 - DNA, 704 bp, Cannabis sativa
agccactagtcaagatttcataagatacacaaatttgtagtataatatatttttcggtttcaaaatagtgacacacgatatacatgagtgattggtaacaaaggcatgactaagaaatgttgcgtcttttctttttagaatgagcacaagtactctccctctaatatgtaagcaagtggtgccataatttattttttagaagaaaaaatattaacaaaattaaaaatcttaagacagagccttgtcataaaaaaagaatgataaggagatgtcattaatgaattacgatgagagtactcaagctacttaatcacttgagactatctcaagtggccataaaagagtgcatgtgtatcttgaaagttctgggttcaagtcctaagttatacaatataatatatacgcttaaatccaaaaaaaaaaaaaaaagagtactaaggctaccaaactttatgtccttcctccactaatgctagctcggctaaagagtgagtaacattattatccaacctagaacaatgaataaattgaacgtcaaaaaaatcattaaaaatccaaatgatatctctaatattagaacctaaatgggagtcatcacaacgcttaggctttaaaacattaaccatagaaggacattcagattttaaaatcaaactcaaataacccaaatgcttacatggttaaagctctttgagaattgaaat

SEQ ID NO: 6329 - DNA, 815 bp, Cannabis sativa
ccccacaatctaacctctgtttccatcaccaaaagtcacaactccttcctttccttcttggtaattcaccaacatattcttgtttccagtcatgtgtcgagaacatccactgtcaaagtatcattgacgttcatgaaaagtagatagtgagatgtgagcaaccaatccaaaatctgttgcattgttggattttggtttccagtcacttcgagtccttttctcattaactcgatttgattgtcgaaatctattaggacgattgatcatagctttcaaatatgtctgcaacttgtacatctgggtctaatgtgtactcttatgttgcaataatgacaatgggaaaaaacctctccttctgaaccttaccatctaagaaggtcctccttccttcaaacttcaacttggtaggtccagatgaggcattgacctgtttagtcgaatcagggagtttagagtttgaagtgagttgaggtgaattaccaactcccttgtatttattgcttttagatgtagagggatcctcaattaccaaattatccactttcttgtatagcatcttatactcgaatgttctatctccataagatttttctaattgtaatgtttggttagtggcagtagttcccggggaattaactcgagtgctttcttggctctcacaaggtccgcagtaagtttgtagatttcattctcattttcatcaagttgtctggtgagctttttcacagtgtcatccaatttagctttctcagattctagctgttgcttagcacaattaaagacatttaatatgtttggacatgtattgtcattgt

SEQ ID NO: 6330 - DNA, 641 bp, Cannabis sativa
ctcctaaatagttacaacatacacggttataaaaagaattaaactaaaaaactttctagactctgaaacatataagaggtctaacaaaaaactcttcaatctaaaacaaaaatttcctaaattatatatatggaacgcccaaaaatttgtctattaataaaagaagacaacttatctttttagtttttgaaatgttgtgttggacatgagaataagaaatacaaagcaactagacaataaacttaaatattcaaagaagtaactcctaattcatgttatttccatctttacaagaaaaccttttaaaaaagtatatatagtaacaaatcaaagaaagtggaatggaaacaaatttaaaatagaaaatatcatccaccattatggattatatatgtgttttgtaaaaattatgaattagatattattgatctgttttgttaaataataaaattagattctttattttttaaaattatataaaatagtacctgattcggactcaggctctcacctcgaccccgagccaaaccccagactcaatcctggttccagaccctgaatcccgactgtgctaggcccgacccaactcgaacaatttctaaatattatagtacaagactacaagctaatacaaataattt

SEQ ID NO: 6331 - DNA, 1358 bp, Cannabis sativa
ttgattactgtgattttgatttgttgacactttacaaggctaattacgtgtttcaaatattttgatttggatatatattattattagttagagaataagatttattttatttagaaaaagatatggtttgttttccctttatttatttagttatttaatttgggaacgtaatatatatgatggaatcttacaataatattatagatacacaaacctataattattataactacttttaattattaattgataaacttttcttaaaaaccagaattgtatcacatgatttggtagacaagaaatgagggcattcgagtccctattcataggagattccaaatattgtagatatatagactactatatataaaataaagtattttactttaattttctacctaattaatctcaaatgtttttataatccaagatctagttttggactagatttatgtttatatttataagctgaacagattgatatggtatgatctacctagccggtcactctaaacctaatccgaaattaatgtttctagaatccaaaattcatgtaatataaacatttaaaattatatgaattattaaaaatttgtcacgtatattaggaatgttgtacatatttactgttcaattaatagatgtgagatttaaaaatttttactgttaacaaattaatttatgtgattaaatataacaaattgtttaattaaagtagttctttcccaatattcaaaaagaaaataataattcgatggaagtaagagagattttttatttttttttatataaagaaagaagaagacaaaagttttattttattattattattgataatgaagaagagaaaagttggaagtagagaagtagttaatatgagtatgtaaatgcgtatggatcgtgtttattcaagtctacttctctttgatttgggttaaaattaattgcgatgtcaaagtcgaaagtggcactatgtgtgctgtggtgattgcgagagattatactaagtctatcttgtgggtggtgacaaacaaactttacttctctgactcgttcattagggaagcgagggctctttgttaaccatagagatggtgatctcattgtatcattcttttattttggtggagagtgattctgagattgtgatcaagaacataaaaggagatgactctaattaagggattgaaaactatacaagacaatgcaagtttctctccacttttatgactagttgtaattttttttttattactaaaaatcgtaattttgcaggccataatgtgactaaatgtgcttttactaagagcatctccacggagtcggtatatatcatatataccgtgaattttggtcca

SEQ ID NO: 6332 - DNA, 563 bp, Cannabis sativa
taaatttcctacctgtagtctcaatcacaatatgatcaaatttccctttcttcctctccaccaactctgatatcatccttacaagatcacccctcacagtgcagcaaaggcaaccgttattcaacataacaatatcttcagccccagtagtttttgcagcgactaaagaaccatcaatgtctacctcaccaaactgcaaaaccaatgaaatttgacacattctaattcacccttaaacatctactaccgccacaaaaaccagattggatcaacctcttacctcattctcaataactgcaattttcttcccatgttccttagtcaatatatgattaagcaatgttgtctgtaaaatttcacacaataaccgtattactgataatgccaaaactttcaatatttgggtagaaattaagaaattttcctgctttaagacaagaaaaagaccatatacctttccagagcccaagaaaccggtgattatggtggccgggatcctattatcgggtggaattttcgtagtgacgtcggaggtatcgctctcctgcgaggtggtggtgagg

SEQ ID NO: 6333 - DNA, 590 bp, Cannabis sativa
ataataataataataatagatatgaagaaacttaaaatcaataacctaatatttattaagaatatattgaaggagagtgacttaataaccaatagaactatgaagtagtttaagcataatataaattatttttattgcttgtaatcaattagaaaagccatttttcttttataatacgactttcaagcaatatttattacataaaaacaaaattgggatttttttcgtagttacccaaaaaaaaaaaaaaaagaaaaattatgattttaatgaaaaatatattctttacatttttaaataaatatgtaaaaatataaatgtcattttcatattattttgtaagattatttttgtaatttgaacattatttttgggttgtttttacattagaataattacacatagtactattttttgtaaaaaaattagattaattaggatttttaatctctcaactttgacatgtatcaaatcatgttccttaatttgattcaaattatggatcgtaagcatgtgcttgagggtggtccttaggtctttaagcattgcctacttacgtttaaaggacatgatgacgtattggatccggc

SEQ ID NO: 6334 - DNA, 1036 bp, Cannabis sativa
tacaatccatcaatacacttacttgtaaaaatgaattggttcgttgagtataaattaagtgccaaacaaaaactcaaattgactagaaagctattccattcaattttaacagattggcaacaatagcaaaggttcccatttctctgttgaaagaacttaacctcaattaatttgtgtggtgaattaaactcctatccaatagatattcttttttttttcttttttctttttctgaaagtcaatagatagatattctttttattgatttattctggggtttatcttccaaatgattttcatggttggtaattattgagtggtccaatatttataagaatagggtgtggctgataaaaccagaatgtagcaaacagtgacaattgtaacaactctaaaatggatcaacatcagtcagatatctttaagttgaaagcaaggttcatagaaacaaactgataaaattctctgcttgaagaattctatgtacaaaattgaagaaaaatggcctttgctcaactcttcttcttcttcttcttcttcatcatcatcgatcctcaccaaccctcctttagcatccgttccttctccaaaatatacattccttctttatatttttggcttggttcataagccttctcctaaaagcaaatatcagaatcagtaaacagcagacttagtatcaacaaagatccccacctcaccaaccactatgtaaataaggtacaacaaatttgacacgaatgtaaatagttagtgataacaacaaataactagatagcttgcttgtcctaacccagaaaaattaaacaacaggtaaccagggttcaagattcaaaataagatgtcaattacagaacaagagtccattttacaacttatctttagagcataacaattacttcattgtagactactttgaacgttcattaaacgaagcaaagcattaaaaattactccaaattaccaataaaaagtaacatatacaactaggcggatccagaataaaagttgaggggtgtttttttttttttttttt

SEQ ID NO: 6335 - DNA, 542 bp, Cannabis sativa
aacataatcgtcaatgttgtttaatacaattttaaaacctagttcactcttagttatctctttaattttctcaatgtaacttctctctctactgtgtctatcttctctgttatgtctcttaattttatcttgttgaaatgagtagaattgatctctttatataaaccattggaccaattaagcttgctttttgacagttgagttcgttaactaattgaattttggttggggtttaagaaataatttcacaattttcttcgatctttgtcctctcaatttttaaacgttgtagaaattcacttctaattgaaattaccaaaatgcacttgtgagctttttgtcaacaaaatcataaggaatggtaatgtggcttgacaggatatcagaacaatggaaaatggtcaggcaagactatacaaggaaaaattatttgggaatgttaagggtacaaattcagttagagaatggttaggcaagttagttaagattcaaactgtttcagttagaattagttggcttgtaaatttcttgttttgtactct

SEQ ID NO: 6336 - DNA, 581 bp, Cannabis sativa
ataataataaattttcagtacaacctaaaatgctttttttattagtatttttgaacccttaacctttataacatgtgtgagatagcctaaccaacatgtcaaaattattattatatttatatttatcacatttaattacaaatatatgttgtaactaactaaaatacatatatatttttttttccaaaaatatttttcaagagaggcgactgcccccctcgcctctatgtgggtccgtccatgcgttcggagactcttctcttaccattatgaaataaaacatactgagctaataaatcttcttaaaataaaacctgttttattagattaggaaaattgtgttttgtgaattctttttgatcatttttcagttttagttacttttgttcagctcatcatctttgttcataaaaagaccatgttattgtctcgagtgcaaattgcatgatgaactacgtcgtatttacatacattggacaatcaaaatattgtcaattgtttagatgaagactccctcaccattcaccaaaaaaaaagcatctttcttttaaataaacatcgatgatattcatatatgtact

SEQ ID NO: 6337 - DNA, 551 bp, Cannabis sativa
gctgctgctgcaagtgcagttccagtatttggactatgtggactccttggagatggaggttccgactgataaacattaaacacaataattttacttctcatgaagagaaaatatcagagacaaccagtgacaaagccagtattaaaacaatataggggccattttatttttataagattataaatatataataaatatagtgcatgataataccagtaaagacaacaatgttttcagcacttgaaaaaattaaaatcaagttctttttatgcggtttacattatagttgtagtaaacatcccacccaatttcgaaaaattctgaacaatttacaatatcaaaaatagagtttaaacattcagttgtacgcttgctttgtttgtttttgtatgaacctgttttcgacactaaaaattattctaaattttttgaaaaattagtcgagtgtctgctataattataatattcacagtcataagaaagtttgaattaaaaatagagacatccctagagatatccctatggccacccactttccccctagctcaact

SEQ ID NO: 6338 - DNA, 877 bp, Cannabis sativa
tttgggctatactatagtctatattctgtaaagaaaaaagagacgtttggattttgaatttcgaaaaaaaggtaaaaggtcaaacatatttaataaatgaaagtaactacctataacggatatatatctatttatttatttaattaaaggcgctccatctctcttaattttaaaaactttactctatttctgtagaattaatgttacaggatcaacccaccagattacataaaaatattttttattttttgaggtaaaaattgggtgtctaatttaattggaaattataatttgattatagttttgaaaaaaaagaatacaaaaaaatacagaagggagtataataattgtataattgtaattatggagtttatttttctatgaacaaaaaggttactaatttgtaatacaactattttgatcaaatcgtacgaatttataaccatgcattataattctgtaacaatatttacaaactaaataaaaacaaacaagaaaatatttgttaaaaattattatagaatttttgtaaagtttacttttttttttttttttttttatatataattaattgcaaatgtcgatggaaatttataaatgatatttaattttgaaaaatgaccaaatgcttaggtgactatatacttcatttgttgaattggctaaaataataaacattagaaagactctcagttgatttaaaaataaagaatgatcagttatatagtgctaaatacgaattatttaatagtgattgaaactattcctaacctgattttttaaatgtattgaacatttggtgaaactaatgcacaaaactacacatacactgacaagattcctgtatctagagtgtgaagacaaagtaacaactgtc

SEQ ID NO: 6339 - DNA, 597 bp, Cannabis sativa
accttaagtgagtgaagagtgtgttgattgacctattttccaagaaataagttgttaagatgaatctgaacatttacctctctacgaactctctagtcgggcatcttgtctgtgagatggctctttggttgctcagaatgctggccagtatactccgtctagcacatgcctgatgttggacgactttatctggtctatactgtcgaccaacatcttctacagaaccttatcaagggtctcacttccattagacttcttctatacctgccacatgtcacatcatcttatgccacatcattaaggtgatttttgagataatacaatttatttcacactcgtataaaattaaagagtcgcgagtgtaataaactgtttaaagcctattttcggtgtgttaaatttttttaaaattttgcaaaatattttaaataattacaacatacacgactatgaaaaaaatttaaaattaaaaaatctcttggataataaaatagatagagaatgtatcagtgcatcatctgttcccgtcgccgctgtagcgttataaacattattgttactcttgcctccgtcgggataaatctaaccccttcctct

SEQ ID NO: 6340 - DNA, 1815 bp, Cannabis sativa
  modified_base (1035)..(1035): a, c, t, g, unknown or other
  modified_base (1544)..(1544): a, c, t, g, unknown or other
ttttttttttttttttttttttttttttgattaaaagatatttaagttataaaaagattggtgcctaaattctcagtttacctttttatacaatttaaattgtacctttattattttttttggcgaaaatagttaaggactaatttgcaataaaagagaaacatatagaattattgtcgccccctaaaaaaataatactttaaatactacaattatatcttaaataattacaatatatattaatatataaaaatattaaattataatttttttacgtgtcagcagaggcaaaacacacattcttaccataaaactgccctatacatatagtagagactaaagaaagagatatgctaaagtacatttttatttaatgtacctaatatagtaaatgtcagttcacataatatcgagtcttgtatacattttaatttaataagtaatatagaaattgctaaccgctcataaaacattatactacatattttgtagtgttagacaagtaaaggtggtgcctaagatcatctccaatagttacattaatttggtataaaatttataccaatttaatgtaaaatcttttactttttggtacaacaactctaataatttacatcaaatattatactaaataaataaattttacttaaaagatctcccattttatattatttactttaataacccaatataactaatttatgaaatattaagaattatatcatagatactagtaagaatttaaaatcttaaaataatttaatcaaataaaatattagaaaagtctataatgcacccccttaaaagagatgtaccgatacatctctatctattttagtgtccaaaataattttttagtcaaattttttctcatggtcatgtaaattgtagttatttaagacattctgtaaaattttaagaaatttgaaaaaatttaatgcgctaaaaactgcgttcaaatagtgtgttgtacatgtgactattttattttatacgcgtataaactagaatgtttgaacattattttctatattntaaattattccgaatttctcaaaattttgtagaatatcttaaataactatatataacgtacatgaatatgaaaaaaaaaaattctggatgccgatataagtagatggtgcatcagtacttccctttttaggaggtgcattgtagaatcaccctaaaatatttattaaatcaattaaacactacactttttttaaaaaaatattattgaagatcctaatatacgggatcattttcaaaataaacaaaaaaaaattatgccaaaaagagctcactaatagtatcaagcatctcaagtattaagattctcaatatacttaaagtccatatagttaatattttgatattgtttaaggttaagatgcacaagtaattaatttgactattaaattattattttactttacgttgttttttttagttttatgacttagtgttatgttgtttttattttattagtgttagtattttttttattgttattttatatttttaaatatgttagtgttttnaattaattattatttttgtgataaattttaatttaagaattaaatataaaattatattttaaaataaaataaaataatggttagaatgtaaaaatgagtataaattcaaaatctaatactattaatgataaataatttggtacatatgtgcacataaataaatatgtataaaaacaactcagtgacacagtacttttcagctaattacataaacaagactcatacattggatcaaacacgtcacttggatttagtgtttttatgctatttt

SEQ ID NO: 6341 - DNA, 632 bp, Cannabis sativa
tcttacttgactatctttcactaacacgtctaccagtatcatattatctttcatatacatgtagcacacatctacttttagttcatacacaagagggtctatatccaacttttcatacaaaatgtcatgtatcttttgtaaagtagtgtcaacctcaaacattaacatcttactttttgggttattgaatatccaattgaaaccttcaacttctcaagcctcatcatacaatacaatcacaaatacagttgaatctgcaaaaaaaagaattagttaaggaaaaatatgtggagaaatatcgtaggtgatgtcgcaacaagtcgtaaatcatgttagcaactacagtgccaaaaatcacatgacgataaatgtccttctctacttcaccaacatataattctaaaactattgacacatatcacaaataatgtcgataaacatgtaggtagaaagcataagttggcctttgtcgtaaatttagtcactacatgtcactacgtgtcgtaaaaattcttccttaaccttcaacctaggcatcgctagatatcgctaaaacataaaaaataaaccaaaaatgcagatttcagacagctcgagtttcaagaacaagacaactaaaataaaagaatgat

SEQ ID NO: 6342 - DNA, 599 bp, Cannabis sativa
tagggcacaaaacccaacaggacgttgctgcctacttcgagatgtgcctaactcagctcatgccgaagagcattaaatatttgtcggcgatgtttgtgctgtacagggagcttggttggcctccgtctactccttatgagattgaatacttttttgagttgaagtctagaccgaagcagagcacgtccaactatttttatttcagccagcttggtcaccaatggctaggtgacaccaattgcaagcccatgtcaaaagttggcaagtatgccaaaaaatactttatggcacaagcccttcatggaattgtgcaccacgagtttcagttggtgctgctcttcaaatgttttatccctactttggagataagggataaagcgaatcatatcctttctttgtcagctaaacagagaaatattatttggttgaccaatgtggtcaacttatggatgcatggcttgtatcccctgctcctgaagttgtaagagtgccaactactggtgtggcctgccgtagagatcgacaaggtcctagcttggatgatgaagaagaacctttgtctcatattatacagtatctagagaggagagagagggctc

SEQ ID NO: 6343 - DNA, 1099 bp, Cannabis sativa
attagaccaagcatcttaactattttcattagagttctcactccattacaatgctattacaattactattacatcaattaaaaaaatattagtaatggtgttgcgtgttatacaccaccttgtgtgatgatgttggcatcatcgtcgtggtgcaatgctctaaaactaacttgaaaattgaacaaaaattaacacatttgaaattgcataccaatttattcttcactcaatactatattaagctttccagattcattttttaaatcatataccaatttgtatttttttgtcaaattaataaaataatcacaaaccaactaataaaaggagtgatagacattgtcacgtcttaaattcatattaaaattgtaatgactttttattgattagcacttctaaattccatcaaacgtgctaactcatctactatattgtgtaaataaatttgtatttttgtaaaaaaaactagatctgtcctttagcaacaaaaatacactaaaaataattttttcttaagaaaaattgcagtataaatacatatgtagtttaatttaatgcctatataaattacctttataaaaaaaaagaatttttctattttaagttaaaattacttaaaataaataattatatcatcccaaagaaaaataaatacttatactatttattaattacaaaaataatatttataaagtttttttattacaaaaatacaatgaagagataaattttaggtgcaaaaggagaaagtgagatatacatgtggataggataggtgagtaggattcacacgcgagtgggaagggtaaaatcatttactgatgcacgtagaactgcagaatcagaatgtggcaggggctctgcagttgccacatggcagtgtggacgaagtgagcttgggcgtgtagggctattttttcttaatgcaacagttatacaaaaataactaattagcaacacaaaaataacttaaaaacaatcaaacttcaaaacaaatttatgaaatattaacatattgtattatacaattaaaatttataaataacacaacaacattatacaagaaccactaatttttttttttgaaactacgagaacc

SEQ ID NO: 6344 - DNA, 1088 bp, Cannabis sativa
ataataataagtaaatgctgtaaaaagctccaaacaaatttgagggcagtgtctcacttttaccaataatcccaagaaaaataagattttaatactttacttgccaaaagttaattacacaagtaatggtgacatccattcatttattcaatatacatctttacattcttattgtaatcaaatattcacaaatggaacagtaagattaggcaaagtattcaactttctctatgtatatatgtatatatataaatatacaggcttattttttaaaaccaaggcaggaatgaactcaaaaccaatccacattttctgttgaaactttggcttgcttctttggcttttggtatctattgttctcatattttgatttaactataagaccgtacagtaaatctgcttcagctgaacaatcataaggcatgttcatgatgctacaaaatcacacacaaaaataaagaaaaataaggtcgaaaaacactccatgagctagcaactgcagaaatctgaattagcaagttttcgtgctgagaaactagattgtattaacggataataagcggggaagatatgattacctgtcaagtaactcctctaggataattctctgggaaggtgtaacgtaatgaatacaacttctcgggcactgaccaacggcaagctgaacttggtaatcttcaccgtgtcctgattttggaacagtaatggggtgagagtgattacgttttcttttgaagttaatcagtcaatttgatttcatgtgtaggtttatatgttaattatggttgttgttgtatttgaatacctaaatactattctgttatatatttttaatggattactggtttgtctcaaatgttttggtgatatgggttttatatcagtgttggagttcacaaattattcattttcatgacatgagaagaaatctgggctctcaaaattcgaaaatggcatttcgaaattacaaaaaatagtagtcagtttttgatcttttaatgggggaaaatgttctttgctttgaattttaaattcatattcattctaaattttgattttttttaaaaaactatataatcttctaaaaa

SEQ ID NO: 6345 - DNA, 1202 bp, Cannabis sativa
tggttgcacctaaactgtctgcttttgaaaagaaaatgacttttccacatttcttcatgccaaaatctcattactttttgaatttatgcataggattgagtttattgggccactggaaattcatggaaagtttggtagtttacagaggaagcaaatcactcttgttgatgatgacggtgtcaaaattaagtttcttttatggggtgagcaagttctacttgctaatcttttcaggtgaactcttgaacatgtcatgtttttcaaaactaagatattagaatcttttgttaacacgtgtgagaaatgttctatttattttcagcattggaagtatgcttggactggatagaccctacatagctagttctcaagagagtgtcattgaagaaagtaatgaactttgtcttgaatatggcagtgcaacacagttgtttttggtgccttttattcaacatgaagaacaagtaagtcgtgttttttttttttttgttgatgtttaatcaataatttgagatataaagttagtttatattttgctcaggtgtgtgtcacattgacgcaaaattggtgtcaaggaacagggcttttgagtacgttagatctcactccaggtccaaaagtttcccaagtttcattgcctcgtgattcacaagggtcccttgactttagttgttatcctttccaagtgagttatttttatcttctattctacattcttcactaagatcttaatgggtgtgctcatgatgccatctcattaatctcttgaatatagttttcttcaatatatctggatgtaattacgacccgaccatcattttctggttgctactatcttatctttagtttagtactatagtatctcttcggtaagttgtaaagagtgtcaatcagttcaaaaggagtcattttttgaactatggtatatcttcagtaagctgtaaatggtgttaaccagtgaaaaacaatgatctttgagtaagattgacatttcttacatgtcataagttttgcagccatttgttacggatctccacgacaagatgacaggcatcagtctctatggtgttgttaccaatattatgaaggacagaaataccacaaaagctatattctctctaaggattcaggatacttctggaacaatttgggcaaaactacattttacaaaatcttggtattgctgtttaattaatgctaca

SEQ ID NO: 6346 - DNA, 651 bp, Cannabis sativa
taatattcaattaaataatgacctctacaaaagggcacaaacattcaacttgtgcacttgactcatcatggtcatcatttatctctttttaatatgagaaatgttaaaatttagtagtggttagcacttctccataatatattactattagtgtaattaaatatcaaattttatataatttaagataatatcgttaactaattattgagcactatctgtaaatatagtactatatacactagtgtctatattacaatactgttttaatattgatatacaaataagttttgctactcttaaaaaaaaaaaaaaaaaagccctacaactcttaattatgtcatgctattatcaggctcagcccaagctaatttgaaaaaattaatttttacggaattctatatagaaattcttattgcaactagcactgcaacttaaatcccaacaaaaaatcgtatagaaacccctattgcaactaacgctagctccaaccactttagaaacctaaaatgtaaatttgaaaaaataaaaaatagtttaaaaatagtatataaagtaattcccaaaaatttatagttaaatttattttttgtatatagtagtaaaagtttaagatatagtttttgaaactatatataatttgacatgagttta

SEQ ID NO: 6347 - DNA, 1345 bp, Cannabis sativa
gattacgaacactgacaaaagcaaaagaaggataacttccatcccgacattttgatgctttgaaaaataaagcttattctgcaatgacgtgagcaacaacattaaaaatcgtaggactataaaattagcctgcaaagtcacaagtttccttctccttgttgataccgtgctacatgttctttagatatccattgagcgagccatcagatgagagttaaacttcaaaagttaatgacattattattattattacatgttttgacaagtactatttgtgtttggctgctcatatttctttcagagttctggacatacgtagagaaatctttcacatggactgatctaccttcgaaatttcccacaaaatatgttcagtttcctgtaagtagccattgcttcttagttggagatgagcttttgtctttcctgtgtctgaagttcctatgatcttttcaggtatttatcgcttccgtccattcaaactatgtcgactgcaatagatggctcggtgattttgtcctctcaaaggtatctgcgttacactcactgtttgaacatttagtaaataactcaaatttgtatattcttaaatagaatcgccaatactggagaatgtttcgaaatttcttaaaaatattgttgaaaatgaaattattcatgatattgatttgctcattaatgccatgcagtatgaatttgactggtgcttcggtttgttttaaaatttcagagtgtggacaatgaaattgtgttgtgggaacctaaaatgaaggaccagtcacctggggaggtaagaatttttgtttcttattgctatacccattccccgatttcttctgattacgagatttacccgacattatgtgttcagggatcggttgacatccttcaaaaatacccagttcctgagtgtgatatttggttcatcaaattctcttgtgattttcactataccgctgctgctataggtaacacctttagacgccatgtgtatcggaatattatctgtatttcaatatatctgagtccaacttcaattcctattatctaccaggtaatcgagaaggaaagatctatgtttgggaactccaatctagccccccagttctaactgcaaggtcagttttcggtttgcctttattttttgaagttaagttgctattagaaggtgcaaattctgtatctaaaacgctctttcataatatggcgcttctcttaggctgtctcatgctcaatcgaaatctccaataagacagacagcggtgtccttcgatggaaggtgcctactttcgcttgatttattattagcctcattcatatacaccatacactgacataccctttt

SEQ ID NO: 6348 - DNA, 824 bp, Cannabis sativa
tgaattgattgaattgagctttgaaggtttaaatttgtgtttgaaatgtttgattgcgaaattcgttctttgatgttcttggaaatgtgtgtgatgtttgaattgagttttgaaggtttagttttgtgtttcaaaatgtttgattgattgtgaaattcattcttgtgtggattgttgatgataatattgagttgatgttcttgaaaatgtgtgtgatatgtttgaattgattgaattgagttttgaaggtttaatttcgtgtttgaaatgtttgattgattgtgaaattcattctttaatttgagtgttttttcttgattctttttgtggatttagttgatgatattttgagttgatgttcttggaaatgtgtgtgatgtttgaattgagttttgaaagttcaatttcgtgctcacaatgtttgatcaaaaaataaaaaattgtttgaaattgtgaaaatccattctttgatgtgaatgttgtttgttacttctttttgtagactgttgatgttattgaaaatgtgtgaaatttgaattgattgaaatgaattttgaaggttcaattttgtgttcaaaaagtttgattgtgaaattcattctgtgagtgtttttttcttgattgaaaatgtgtgtgatgtttgaattgattgaattgagttttgaaggttcagtttcgtgttcaaaatcttcgattgtgaaattcattatttattttagtgtttttttcttgatcctagttgatgatattttgagtttatgttcctggaaatgtgtgtgatattgattgaattgagttttgatggttaaatttcgtgttcaaaa

SEQ ID NO: 6349 - DNA, 1037 bp, Cannabis sativa
aatcctttcagcttcctctatttctaatacaattttagtttcttattagaaaaaaaaaataagaaacttacaatcttcatgtaggtaagcaattcctcgggcagaaccagccgcaaccttgactctcatttcccaagacataacaggcctcccctcacctgaaaacatgcaagccatgcaaaaagttagattttttctttagtgtcaaggatcacagcagagtatttgtattaaacggataaatggacagaaagaacaaaagtgagagttatggctcatatgtactctatgtatctcagttaaaatatggtgcatcagcagaggataacagttaacaattaaagtcttcaaaccaaagtttgaggtatgtctcactcaccatgaagattataatgaagtgtatcgtttggaacatagtcatagactagcagtctttgatgatcagatatacaataaccaacaagagaaaccaaatggcgatgatgtactcggctaataatttcaacttctgctctgaactcacgctctccttgtccaccaccaatcttcagttgtttcacagcaacttctcttccatccaccaagacacctttgtatacacaaccaaatccaccttctcctaaaagattttgtgcagaaaagccatttgtagcctggattaattcttcatacctgaagaatgattttgaactatttgtcccaccttccgaaggcgcatacctatactcactattagagttagttcccataaggggagctggagaatacggccttagaaataatgaatctgccaaggaaatacaagtcattaaaatcatttcaaaggggccatactcgtaagtaaaatcaagtcaataacttgcaagcttaagactagcctagtaaaatttatttagtagacaattctaagtttagcatcaaacaataggttttccaaaaaccacaaaactcataattaacctcccaataacaaactgttaatgtcatcaataatttcatgttcaatggacttttaccaccatatataagcaacaaga

SEQ ID NO: 6350 - DNA, 1438 bp, Cannabis sativa
cacttaactgtgaattttatgggagtcaacagtaatgatcgggtgacctgtgtcacgtttcagttccaggaggataccctcgtgtggtgggaaatattgccctttactcgggacatcactaaaatgacctgggaaagtttcaggatctatataatgccaaatactataatgagacagtccgcaatactaaaagaaaagagttcgctgagttggttcataatgccaaatactatgatgaggcagtccgcaatactaaaagaaaagagttcactgagttggttcacaataccaaatactataatgaggcagtctgcaatattaaaagaaaagagttcactgagttggttcagagagagactatgttagtgacaaagtataccataaagtttgattgacttgctaagctggctacggattttagtaagaaaaaaaaatatttggcgagtttgaatgtcaagattaggtacaatttggtcattactacaaatgacaccactacatatgctgatatggttaagaaggctcctcgagctgaaggtgcaattgagtttctgcaagagccgcgaggaaatactagtgttggtgggaccatcacccttcctacttctgtttatggtagggatggtggtgattctaatattgattgaaagatgaagacttttctgacaccaattagctcaaatcagagtaagaggttctatgggaaccaaggcagaggtggttgccagatccatatgtatcccgaatgtcttcgatgcaagaagcatcatcccgatgagtgcaacataaaaacattcttctagctagtgtggtttggtcggacacttcaagaaagactgccctctgttaagaaatgaagattcaaagtaggaggcgaaacctacaccaccacaggtatttgcgattacacaagcggatgctgcaaccaatccttctgtaataacatgtcagcttcctgtctacgactcatattactctgtacagtttgactctagagctatacattcatatgtggtgtcaagagtaattaataaattgggtaggccctatgattttattgagatagggtttggaacctcttacctggcggagaattggttatctccaaaaggtgggttaggtctatgctaattagaattgaggataagcagttaagggcttatctaatggaggtggacttaactgagttgacattatagttagttaggatggattttctttccaagtactcggtgttaggacttaaatagtttgacttttaattaggattttaaagtgtttttaattagttttagttatattttgtgcaattttacgctttgggttattaatattttcaggtttagcattggagaagaatagagcaattaaaaaaaaatgtgcaaaaaggattaattaaatgaaattttattgatagagcaccaagaaaataatccaa

SEQ ID NO: 6351 - DNA, 1041 bp, Cannabis sativa
aataacaaagatacaagtgttcttatgaagtaaacgaaagcatctgggggctaaaataaagacccaacaactaggttgacactagttctggtccctacggcaaggttgacattcaactcgattcgcatgtttttttggcttaaatgtaaattctgctctgagcagtcttcttatcttgctcaaaaatggggttggagacctcattcgcaatttcaaatgccatagaagtaccgaattgagtcccaagaagctcagtattgagcacccagcacccaggttgacatataaactggtgcgttgggtgtcgcttatctgatttcattttcgtctctaacatatggctatattttatagtaaatgagaattatgacttctgataagtcaaatttacacattgatatttaaccttttcagtaaagtgaaatatcggcaaaacaattacaaatcaagtagtttcgagtctcctgtttctataaaaatacaaaacctccgagaattggtgaacgaattcaccaaacccaagaaactagctaagtgatgttgaaatatcacttaggcttcaaaaaatgtagttttggtaggattttccactcatacagcatccatgttgacgtcaaaaaatcaatctaggcattggatgtcaacttgggtgctgaatgtcaacttaggcatcggttgttggacattctttcgtaaaatggtcataactcactcaacattactttgattaatgtgattttaagtgagtttgaaagcacttttcaagcaatttctgcacattatccctacatcgaagtgtaattttatctacaaaaaacctaaaaatgatataacggatgtaatttgagctctaaaaatttacgatcatcatctggagtcatttaaactattagatcaccatcaatggtcaagatagcccagaatgatttttttatattttttgtattattttattaatattttaatggacctccttgcctataaaatgagagctctagtagctcatttttcacattctgccaagtctccataaggttagtg

SEQ ID NO: 6352 - DNA, 2081 bp, Cannabis sativa
aaaaggtaaagaggtaaggagaataacgttaacaatacttggaaaacttaaatgtgatgttaacgttagttttaaaatttagatatataataaattactgctagtaaaaattcctttttaataggacaggaaaatatataggcacaagagattgtgtgcttccaagaaaaaagtagaaagactttctagtgttgctaatattctcaactcagtatttactcttaactattagttgtgtctggagctaattcattagtaagtgggcatagcctattctggagttttctttgcactcattctaggacacttttccaattggggcataagattttatatatttaatttgttatcaatataattaaaaattggtagcaaaatagttttattggacatcaaaatttactagtttggctactagaataataaaggtgttttattaccaaaatattagtaacaattaactacaaaagaatttggtagctaaaaacttacagcaaccctgattcaactaccacctatagttaccaatgaattttgtagcaaaaaaatgtatcagctaccaaacatatattatttgctataaaaggtatatttcaatttctttaaaatacaaaacatctgataaatttataaattaaagcaccaatgataaatattaaagaagctttaaaatttctctgtatagataattaaaatgaagaagctagtgaaagtactataataaatcattttcaaatcctaaaactatatagcaactgagataataaaactattcaatatgaaatattaattatctatttattacatcaaattctcaaatcccttaattattatgattctatcaacaacgagtttacaatgaaagataactacaaacatgcatattcctgaaacaaaataataaatcatcaaaatacaaaatataattgattttataaaaatttctacttacaaaaagagggcgagagggactaaaaaaataataatataatgaaattaatacatataaaatattgacatatacatatttggtttttttaagaggagtgttacttttctcttgaaaatactaaataaaaaaaattgaatcaaaaatacaaactgtaattgatattatcaaagttgctacttacaaaattaaaatttatatatatgtaacaaacaatgttccatacaatatcattcatgatcgttttcgttaaggttagatcccaattaaaatgtactcattaatctgaattccaccaagtatttttacagctacaatatttaagaaaaaaaaaacaaatctgtattaattttcggatccaaatattctccattcgagttgatcaggtttactgttcttctgatgtagaatctttacagacaaatgggtgagttaacaatttggaggcagaccaccttttacttgattccttttgcaaacaacattcaacgaagctctttaactcatccgaaaccccttctggcagactcggcagctcaccgaaacatacaacgcacatcaaagtaggccaatcagctctctcgcctggcggaagtagcggaaaatgacccatataaagctccattagagtcacacccaaactcgaaatatctccggcgtaaccgtcatgattttcatcataagtttgcgaatccaacctctccggactcatgtaagcgcacgttccgacaaaagaattacaagtatccaaagtacggccgaggattttgcttaccccgaaatcggcgatcttaacttccatattcgaattcactaacagattggctggtttgatatcacgatgaataattttgttcgagtgaaggtagtgaagaccgttgagaagtttctttgccacgtcagcgactttggactcagagaaagctccttccgatttgagaacattctctagggttcccgaatccatatactccatgactataccaaactctcccgatggattttggaagatgctgtggcatttgaccacgtgaggtgaatccgtacagcggaggatctccatctcggggttaagctggcggcggaaatttgaatcgaaattgtggtggatgattttcaaagcgtagatttc

SEQ ID NO: 6353 - DNA, 1693 bp, Cannabis sativa
tcataatgttttgtttttcttttgaaaaataatgaatattggtttgaattgaatatttttcacaagagttttccaaataattgactataatataaatacaaaatttactgacttatatagctagagaaatatggttttaattgtcaactacaaaattatttcgtacgttatatcaacctattttatgaagacaagatttgatttctccactgtagctaattttaattgaaggtgcatgaggatttcatatcacgtgttaatgacaatatgtatacaaagaaagaaacatacatagtagctgtgtcattgcagacgtagcataatctttttccacaaattcttttgcatgcatggccacctcacacttgtctatgtcaaattaatatctagctttaatttattaagacaaaccacttagttgagaataagactatagctagctataccaatacaaatacatttcactatcactatatactttcttctacttctcttttcttttcattaattagcaaaaacctaattttatgatcactactattggttttgctactatatatatttccaaccgatccaattcttttcttttgtttacacagaaaataatgtgtgaaaacagttaatatatataatatagttgacttctattattttgtgttgttctgcttataatatatatatatataataggtattgttcagaattgtattaaagttactattacttaataaataaattcaatttagatatttaagttttttttttaaaaaaaagtaaatataattaattaattaattaattaatgtaatagtgttatataaattaactgttctttaaccaaaaaaaaaataaaaaacaaacgttaaactactaatttaaatatcagttaaatagacacaactaatataaaatatgtaagtttaaattaaattaagaaatagagacataaaataaatattgtttcatcatttattgtaagtggtcaactgtctgtcgtgaatgtgaacgaaaaccctttacttggctatccgcagcaatagcatgtaatgacgtggacataattttttagaaagaaacaacgaaccaaaataaatggccaaatttacctttaatattatatattgttattatatatttttttattaagtgggggctttatactttatagtagattatttgacttggtctgttgcggccctccttcctatttttatgtattttcaaatgacattataattaattcatcaaaaaaaaaaaatgacattataattatagggaggagatctaacttcatatattatatattatgtatttttttttttttggattctagtgttcatgaagcctaagacttagtccatgctcaacttttattagttgctatatatacataactgaaatattgtaataaataaataaatatatattaatattgcgggacatgatgatatccatgagattttaattacaataaatatatataattatatagataaataaataagggtttttaagcaagcaacgaagtctaaaaaattaaaaaatatttttaacaatatgttaaatcataattaaattgtattatttgtggtacacacttacgtacaaatataaatatgcaatattatatatgattgcggcttgtagtagttgaggagcaattaaatgctcaattgctttttttttttttttt

SEQ ID NO: 6354 - DNA, 622 bp, Cannabis sativa
aaagaaagacactcagacaaagcttttcaaatcgctaacgctttagccaccacaggcaggaaataaccatccaaacaccagctcgttgaggcacaaacaaagcccacatcatctataataaccatgcccaaaccactgaaattttttgaagaacatatagttgcatcaatgtagactttaagacagcttagaggaagggtggtccatttagacactttaagaggggaaatatgttgcacaagggtatgctagaagagtcagccatcgccaaaggaggaggaagaggaggatggctagtcaacgaaccctggttgttaagaaatgtccccagaaattcacgagcccaaaagacaatgagagtaggagataaatttacattgttatggaccattttattaagtttgtaccagaatcttcacaagatcaccaaaaccaactcaatcatctctttcgacaggggattagtaaatctataaataaagtcaagaaaatccccacaaggaataagagcatctttcaacataaatgcacagagcattctacattgagtgagagagctgcagccctaacgaacatggtgtgtagtttcttcctctatcccacataaaggacataaaccatc

SEQ ID NO: 6355 - DNA, 1853 bp, Cannabis sativa
ttggtcatgttagattgatccattgcttgatgattttctcataaagattacatttttatagttttggatacaaaaaaattgtaacttttatctttggtcatgttagattgatccattacttgatgattttctcataaagatcacatttttatagttttggatacaaaaaagatggtaactttaatctatggtcatgttggattgatccatttcttgatgatttttacagattgctggacacaaggatcttctcgaaggcgatccacacttgaagcaaagactccgtcttcgtgattcatacatcacaactctcaatgtctgtcaagcctacacattgaagagaattcgtgacccgagctaccatgttacggttaggccacacatctcgaaggagattatggaatcgaaaccagccaatgaactcgtgcagctgaaccccacgagcgagtatgctcccggtcttgaggatacactcatcttgacaatgaagggtattgctgccggtcttcagaacaccggttaagtcaatccttctcatcccccggccccccgagttgtgtcattcgaaattgtgtttcgtcttctttgtttttgtttttgtttttgttaccttgtagatttgtttgtgcccaataaattataagggtctcatacagaaactgtttgagtttagttgaatgtctttagagtcaaaaatttgagctgtatgatccaaatgctgagcttgaagaacactttttaactaaggccagcattataattgtttatcacaaagtacttttttaagtttatttctttgattaatcaaaatgaaattgctttttcatttatgtttctttaacatggtttttcttggcctttgaaaatttcttagaaatttgtgagtgaagttgagatgatggagaataataatgtgaaattctagtgtacaaaagggttcatattattacccgctaaaattttgtaagacttattatattctcatttaaaaaattacactaaacatatttttctgtaacaaataatctcatatgttgtgtttttttgttgttagaattattagtctagatttaaaagttttcttttttttttttttttaaataattataatatacaataaagtattttttttttaactttaataataagtaaaatttagtactattattggcagttaatttctctaaaatatactcttatgtaatttattaaaaaaagttacattaggaagaaaggaaaaatatcaaaattaggtattatctttagttcaaaatttgaaaaaaaaaaatctccttaattctaatgacaattaataattgttccaaaaatattaataataaatacaagtaaaaactactccaaaatttgaatgttatacttgaatcaacttctttcacatcacttaatgcaattcattgaggataaagaaagtatttctcattgattctagttttttcgatcatttttaaatcgagtctaaaattttaaaaattagaaatgagagaataaaaaaaacactttaatattataataaatggccatcgaaatgaacaaatatttttatttatttaatacgtgaattcgacatttaagttaaaattagataaaaaaaatatatatataaaaattacacatgttagaaattgtcttccaaactaattaaattgttagatttaaagacttttgtctaattccgtttaattttactattatagtgtttgtgtctccgctcaaaatttaatatgtacaaaattatgcccttaaactttataacatataccaaattttatttcttaaacttcatttatgtttgacactcattaataaaattaacaaaagttattaaatccaat

SEQ ID NO: 6356 - DNA, 1036 bp, Cannabis sativa
gtcgagcccaccttgtgtcttgtgagttatatctaggcagaggaatacttgtaaaatattactaggttttaatcagttctaagatttatatttaaaaaattaatataactagtagtagatttctggccagataataatatagttagagcatcttcaatgtgctcaatatttatggttgtcaaaaatatacacatcattttaatttttttttattattattattttctttattccaatctatataagatttaacaactttttatatgaaaattactcaaatagttaacaactctaaaaattatctaccatactcttacatgttactatttaaataattaataaaattatattaaaaaataatgactacggtaaaaattacttgatgaacaaaccctattaaagatgctcttaatagttttggatttagagagaacgacaaagagtacgaggattcatcagtgtcaataacgtgaaaattataaaacaaaaacagctttttcgttgttctgtcgaaagaataaattattagacaaatataatactgcaaaaactagtactattaatcaatacatatatgattgaagactaaccgtcctcactccttgtgtttaggcacaaaatatgggctatttaattgggattttttcatgattatattaattaatccgacaaaaaatgattaaataagaattttactcccaaacttcttaagtggcttaatttttttattattaagattgttaaatttaataatttttgtctaattttagttaattttttcaaatgccatgaatgttaatatgctaatttgcactcttagaatttttttaaatgcagtgaattttcatccatgtctcattaataaaattaaataaaaattcttaaatcgaataacttcggaaaaaaatttaattacttctaaaattcaaaggacatcatttaaagaagtgaaatttctaattaaaaaggaaaaaccatagtcggtaatatgtatgaaagaatcaaaggtactttgtgtagcttttttttttttttt

SEQ ID NO: 6357 - DNA, 1154 bp, Cannabis sativa
gtccgagacactgaatatatcagcagtgttgcataccgtttttccaatcacaccagcaggtgttgttatacctatgtccgaatcctccttcattgctcttaaggcttcagagtgtctcctcataatggagtctcttatttgtaggatatcaactacaccccctttgaacaagagttcatttctagctttccaaataccttcaaacaaacagctcacgaaagataggaagctagcagtatgctgcctcgggatactttccaagagcctcactaatctttccttgatcgagttaccattacctacccctccacgggaggagaaggggctgccaaaccaaagcgcccatgcacaatgacaatcccaaaataaatgagtgccagattcagtttcttccccacacatagaacaaatcttatcccttacaaaaactaaccgttctttagtcggtaggcagtccgaaatcactctccataacatcatcgagtgcctgaagtgcaaccttgagctccaaactttcttccacagtttgctatctatactcggcccatgagcttgggacgcctcatagcctctcttcactgtgaacctcccatcagtcgactccttccacactaacacatctgtgttctcactaggtaatcggccaattctagcaattctttcacccaacgtatcgccaaacatttccttaagaagcccaacattctagcaaccattatcaagagaaatatctgccacagatctaatatttggaaatcttggccttactcgatccataaggttttgaaagtcgtagtagtcgagccatgggatccaaggctgcttccaaatatcgaccgtgtcccctctaccaactagagtcattcctcccctacgaattacatctctagagctgagaattcctttccaaaaggctgaatcattatctctggcttgtgtactccaaaacgaggccttctggcaatatttctccgctagacatttaacccacggcctattcaaatttgaggccatctgccatgccaacttggtaagaagtgctttattcatgtcctccatcttcctaaatcccaaacctccttggaaagtgggagtacaaagttgatcccaccccaccagggccatgtaatgctccttctccgtatcccccgtcc

SEQ ID NO: 6358 - DNA, 649 bp, Cannabis sativa
taacctttcaattctttcttgcagatgattcacaatctttaatattatcgagagaaacaatgaaacatctgcataatttcttttttctttttcttttgagagaaagtatatgtataattattagcagagattgtgtgagttttgaaattttactgtaatttgtaatttatatacaatacttgtcatgtagttatttatttatttatttttattagcagagattagggatatcaatatattattcatagaaggatatagtgcaaatttagagtgtggttactgtgtttcaagtctaaagaaaagacgaggttattttatcgttttttattgtttatgtttatttattaaactctagcttttagagaaaaatatatgcaagtctaccgaatctagagtattatagatctataaagatactctaatttcttaaacacacattatttgaaagaaaacttacatgaattataattatttacatttgattggattcataagtgagatacggtaataacgacgactttaaatttagtagtgactataagtaaaaaataattgtagtagtgactatataagtgagatacagtgacaataatgactatgaatataatgattactattagtgagacatggtgatgacaataattttgta

SEQ ID NO: 6359 - DNA, 673 bp, Cannabis sativa
ccgccatttacccttttatatattattcaacgactaatataaaatgataaattttacagtttaattagagaataaaattagaagactgagttatttggaacctgttatcttttgcttgttcatatcaaactccaactatatacaagttatctaataaatttaattaatataattgacttgtcattttccaatttgctaaataaatgtatgaaaatatgtatacacttcattttcatatatcaatatttaagatttctcatacttatcaacaaagagtatgtttggcattaattgagagtactatatgtttttggataattattttctagaattattattatctttttgaaaatttctcaaatccattttagcaattatctttgttctaactttctatgtctttctatctcttcactattttctcctttttctattttgttgttatttcttctgaaaaataacaaagaatgagatggaaagttagaacaaatgaaaataaaaaaaatattaataaagtttttatttatttatttatttaatgatttaaataatgaaaattataaaattggaccgataaatcttcaactcgtatatttttattagtacttagcatatttgttaaattgggtaccgatagacttataaaatggtgaccttagagattattattgta

SEQ ID NO: 6360 - DNA, 583 bp, Cannabis sativa
accacatgatttgcatcccaattttcatacaatttttatttgtttattatttgatgctaattaaagagaaaaatgttgaaaagtctcttgattgatcattataatgtagccttcatatacctattttttttttattaggatttggttaatcttacctgccaatctatacaaaaagaagacataaggggcaatataatttattagttaattaactacacatacaatgttgacctaatgttacacctatatctacatatataatattatttaagagatattccatttctttataggccgttaattgattaattgttattattttgtttttgaaaaagaaaacattattaatatgcttgatcatctataattatataattgcatgtttaataatgtggggagctaatgactagttaataaaagattattactattggatattagtggtatcacccaacactttttgtaggtgtgtctatattattattattttgttgttctttgaataagatataaaaaatgctgccttgaataagcgtggatctttgagaaaaggcttttctaagtcatgagcacatattaagaa

SEQ ID NO: 6361 - DNA, 927 bp, Cannabis sativa
ccttcgccaacgacatgatctctttcatgggtatacccataatatctttttctttatgtatctatatatatataaataaaaaatgttaaaagacattattggtggttaacacttttttcggggtattatatcgctatttatgtaattaagtatcggaattcatataacttaagaaaataatttttagagagtattggtaatcaattataagacgccctcaatatacttttttaatcaatcattcctttttaggtgcttaatattttcatgacttaacacttgaaagttattaaattataatgtgtggactcaatattgaaataaactaataataaaagaatatttttattggatatgatagtgtctagtagcttttagaaatgactaaaaattattataaattatataaaatttaataattaattacacctagtaatatctaacgagcaacaaaacaccattgatttttttttttaacatttttcataataatatgctactttttgtgcctgttaatatctttaaagtagtcataccatcaatccaaattatagaaactagacaaaaaattgtttttctctctcttccacctcatctccttcagcttacttataacaaacacctccacctcttgtaatagagtattgtaaaaagatggcttaagttagttcaagtgaccataagaagtgcgcgtgtattaaaagtactaagttcgagtcttaaattatacattataatatataaacacttaaataaaaaaaaaataatttaagaatattgtcaaaatggtcataccatcaattcaattaggtcaataataatctaatgagtattatgccgggtaagtgactcgagatgctgggttcaattgggctatctctctagttaaatcagcatctcgaattaaatcataataaaagacttttc

SEQ ID NO: 6362 - DNA, 1300 bp, Cannabis sativa
  modified_base (755)..(758): a, c, t, g, unknown or other
tattaggataattagtatttttacgttctgatttttttttacattttcaagttgtgcttttacagtatatgactgaaatataatttttagagtaagatggtcctttcattcaattttttttttgacacacattctattttatttaattttatcatgaaacaattaataaagtgaatgatatttaataaatgatgcaatttaatacttttcactttttttttactttaatgattgaaagataaaaattattatgtaaaaagaaaaaaagttttttactatattattcattattttttttgaaagagagaggacatcgatgtgccgtgacgacggagaaattatcagctctgcatgcaatcaaggcgaacagacagccattctttagagaacgacctgacccgaatccacttgagagaaaaattttattcttaaactaatgatgccttactatattattcattaacataaaagtagtaaaaaatatttaatttataacctctcatttactatttactcatttgatgataaaattaaataaaaataactattatattataaaaattatattttaaaatgtattgtttgcgagttgtatacacaatttaatagtgtaaaacgaaaataataattattttttattattattagttatagtaataagcaaatattgaagaaagaaaatcgataacaaaataaaataaacaaatattgaagaaacataaatctaataaccaaatagagagagagagagagannnngagagagagagagagagattagatcaaaaataacaaaagagagaagtaattacgatttaataaggtacatatttagtagtgttaatttaagacacgtgaattgaattgtgtgttttctgattttaagtgaagagattaatttttgaaaaagtaatcctcctaataatggaagttgaggtgagttggatggatccgttaagaaaagaggtgaaagagagtacggtatgggggcgtcaatcacgcgtgtcaagtgtgatgaggttgacgtctgtgacaggcaaacaccgaactggaaactcctcaccttcgcgtgtacctcacgcgttccttccccgcgttttaatgcttctttacctctcttattactcaccaaacactgtttttccctttctttctttttattgttaaattaatattaatcaacataaatataagacaaatattaatattaaaacttaattattattattataaggtgaggaataataatagtattgcatttgcaccagagagaaaataaagagataggactctctctctct

SEQ ID NO: 6363 - DNA, 1017 bp, Cannabis sativa
aacctagccatacactgctagaatacgctacacccagtagagacactactgtacgaaaagatgttgaagttaggtgagaaagagagagcgtcacacacctaaataacaaaattccattggggttgtgacgttacacatatatgtctcttaaatatgagtgtttcgaacatgttttttcctcactcgcacgttttttggaaaaatttctcagaaaatcacctatcctaagattactctaaatcaagcacccttaactttgaaattatcaagagatgaactaccgaaaataacatgcactttgttgatagaagtagtacttttcaattcatttaagtcatcttcaattatgtaatcttatgtctacacagtctcagaatcattacactcgacattcttcaaacaatatgaagttatacaacttagctactattttgaaaatgataaattttacaagaattcaatatgaaatatgttaatattagtgctattaatttagggtaaaaccaatacaaaaatctaaacaaaaccttgtttattaaagatcatcattaacaaaagaagaagaaggagaagttagagaatattaattgttaattaagactactcgtattatttggacaatattattttcttgatagactatatgtgtggtagacaataaagtccataaatattctaaataaaactctatatataattaaattaattgaatcattctctaataatacataactttgtgttatgttaaatgaatgtaacaatatcctcatcaaaatgttactttccattcttaattattaataatgttatgtgacattacgccattaattaaattgaaggaccacttatatagttgaaatttcaatgtgaaagtatataaatattatatgtatataatatatatacatttatatatatagtggatatatatatgatgttatgaagggttgagtagtttgtaatgataactataagtacttgttataacagtacttagttacgtatgcatataatcaa

SEQ ID NO: 6364 - DNA, 1097 bp, Cannabis sativa
tcacagccagtaagtgatttagttctgggcaataaattaacattcttgaatgcttcttcagtgaaataacagatgggtggaatactgatccacttaagacatatgtaccataatatagagaagtaccttcattctaccttcctcaaatatgggcaaaaatatgaaaataggatcaactgaagtggcagtatagagacggccatctgaaagaaataataaaatgacaaaaagataaaaagatcagaacttatatatgtgttcaagcacaaggtaagggaaagaccaaatcagagcaccaaccaacaaaagaaattgtgatctaactccactaagtaaggttgaagaaaagaaagagagttaaactgaaaaccttagaaatcatttcaataaggccttttacaagatatgattacccatcatgcaatttgcaacattactaatgacaacataacatgtacaaacttaggtaagtgaccgaatatagcccctataaatatatccattcctgggatagattaggcaggaaatcatgaaccataagtagattatataatttaacactacttgatatatcatacaatgtgataaagattaaacacagacaaagctaagtacacaagattgaacttcccacaagccaaaaaaagctaccaaaagttaaaaaataccttcagtaacataatccccaagaaaccaagaactgtacggctgcttaaaccaatgcatttcttgaaggacgtcatcaacaagaagatagcaagttgcaattcctgcaaatcagtaaaataagagaaaaccaacaaagctataattacttgaattgaagcatccacgggaagaacctgaacagaacccataacatatttcactgaactgaataatcatgtgtacttgataatgccaatgggcaaaatcccttacttaaaaattaaatctttggtaatgattgtggtgaaatgaatacttaccagttttgggatggcgaagggagagcaaacgcccaaccccattggtagaggaactattgttatctgtaatggaagtagaagccattataagtaatgaaatagcaaagaagagaagagaagaagtgaata

SEQ ID NO: 6365 - DNA, 872 bp, Cannabis sativa
aataaaaagtgaaaaaaaaaaaaacgaaatgttagagacataaaaatatgattggtaattaggtttttttctgatttttatatgttttaaaatgatttattttaaatattaaatttatttattttatttttaataattatatacgtagatcaataaaattgtgccacgtgtatcgtgtatacatgtggacgatacacgtggactgtcattctggcacttaacagttaaatttggatggaagttgtaaattgctaacggtattgtggtttggggggttttaccaccaaaatttgagttttggaggttaattgctagtgaaataatagtattgggagttttgccacaattaaccctttcttatatgttgtttcattttccaaatttaagtggagagggaggcgattttcagatttttgccatcccatttcggtttatgaaattagttcgaaagatttatcatcgtctaggtgagctttgattgggtttctggttggtgttttgtgcttctgcattttttactttttttttcctatttcaggtgagctttgattggttttcatggtggtggtggttttattgaggtgatggtggtttcgggtggtaaagggagttagggttaggagagagaaatatagagaactgttttgactgcaacttaatataagaggaattgagcttcaaggaaggggaagagaggttgttctttgagcaattaggtgagagagagagttgtaaatgaaaaaaaaaaaaaaaaagttgaaaagaaaagaaagagaaaatgaaaattgtttttttattttaattttttttaatttttaatttttgcaaataattattacatgaaccaataaaattatagtatgtgtacatta

SEQ ID NO: 6366 - DNA, 1295 bp, Cannabis sativa
  modified_base (328)..(329): a, c, t, g, unknown or other
ttatttaaaaaaagaagcaaaagtgtgtcaatatgaattcgatttggagaatttgcgttactgttactactcatttatcaacaaacaaaaaaagtgactgttgtgtacacttaaaattatggaagagacattgacttttgaatctttgtctacaatttgtatatctcatatcatatttcccatcttttatttagggtgagaaattcataaaatagttcatccaattgaatccgcaaagtgcggatatctgtacttgtacggattggattggaaaattcaaaatccgcatttgtgaggattagatgttgattgacatgtaaaagtaccnnatccaatccaatccacacatctttataaaaaaaaattaaaaaaattatatattcaaataatattttaatgtaaagaaaatagtaatttaaaagtataatacatataatacaattatatttcgaaactcaatagataaaatatattttttattcttatatataattttttttctacatacaatttaaataaaattaaatatttctttatacatacaatttttcttcttcctttgaatttgttatttgttattttaattattttaatgtgttgttggagacataaaataacaataatttattatatttttttgttgaaaaaaaatatatatttttcataaatattaaataatttaatattaaaaaataaccaatataaaataacatatccaatctacacttttgtagattgaatttgaattattgtgcggactggattggatccaaaaaatgaaatccgcacttaatgcggatcggatgtactattagcaaaatagtgcggattggacgaagactgctactgaaaaataataagcacaatgagtatggcaatcggacccacaatggtggcctcatttcaaaataaaacacatatggcgtatttgactgtttgactttggtgtcaatactcaaaagtgtgaaccagttgtaaagccctttttaacctaaagttggtattgtccaacatctccagttctccactcttgtgttgtgttgtttgtacctcgaaacaagtgaaaatgggctgtgaccctcaaattcttaatcattgaataatacattactagtaatttttatgttttttggctgaatatcatcatccatccctctacttttattcactcttataatctttcagttctttttttttttcagtttcaaaacatacaattcaacatatcttttcaacagcaaaaacaatcttttcgtccgtccaactagagtacatataaaaataccccacaattt

SEQ ID NO: 6367 - DNA, 618 bp, Cannabis sativa
tcaggaaattcaaatgaaaaggaagttatggtgttgacatgttattgctagatatacagagctaaagaaagttatgccttttggcataaacaagatatgaatacttggatttgtttgagtgtttatatatgtttttcaaatgtttaggctgttactgttattttgtttgcttcttggggaatatgaaaaatagtggtttgagggtattctgttctaaagctggaagattgaactaatgagttatgcccatcttcttatgttaggcccatcttcttatctttttactctattctcacatttttgatacttgaactaatactactgttgaattatgtctttagctttttatacttcattgtcaactgtggttacaaaagcatgtcacatcaagttgtagatgggatttataagtttatcattcattttgttctttttttttatgtttaaatgagatccatgaaagaaggtagtcgcatccatggaatactgatcatttctttaattttgaagctgcttgcttttgtggcacaaagacattatgtcaggagaagatgatacaaaaatgcagcaacaagaagagtctgaaaaagtcatgccatcaccaaaagaagaggttgg

SEQ ID NO: 6368 - DNA, 684 bp, Cannabis sativa
aagccttacaattagttctgctctaatgacaaaaaatggaatatttggtcagtcccaagacacaacccgggccactttacctagcttttggacactgcaatatggcagtagaaacagatttttagggttagatttcaaaacaaagaaaaaaaaaaaaagaacagaaaagaaaagaaagaaagtctggtcttggccttccccttggatcccttgcacgtgagtttctttatttcttactatataatacctttctgcttttcatggcacgtgaggttggccaattcagaaacctctctccctttcatttattattattatcattattattttacacctttgttgattctttatttaaagaaaacaaaaataataacaatatatagggatattagttatgagagttacttgattagataattaagtgtacacgtgcatggtataatatttgatgggtcggtgcttgtaatttcttttctttacttttcttttttatggtttcaaaacatacgtacaagttttaaagattttctatattgtattatatatgtatagataggtagtgaatatatttttgaattcttagtttttctgtatcatcaaatattgtacaatcctttaatatactaattaacgtgattgctgggttattatagcatgaataattgatcatcacatttttacatg

SEQ ID NO: 6369 - DNA, 822 bp, Cannabis sativa
ctttattgaattattggatgttacagaagatttagttgaattgaataatcaattgtggttatataaatcataattttgagagaaagaattatatgaaacattagaattttgggaagaaatgttgaacttcttcgcaaaccactctccactaccaaatattctaccttaagacaataatataaattaattataataattaaatgatcattttaattgttataaaataaataaataataataataatgaaaatgaaaatatgatttttttttttcttttttaatgaagaaaagggggggtggggttagcatgatagttctaactccgttcacgaatgttcgctaagatcctaggtggcgagattgcccttacgttatatgagtcccgaccaagtactagatgcatgaatgacctagattcgaattcatgatttctaactcgtgaaactacttgagagtaaacactttacaactaagccattcatttaagagcattgttgtgtggcacgtttagtacttgttaataattttctataatttttattaaattaaaataagtgaaacttaatattcaattatactaatagtaatattatacatcataaaaatactaaacaccatgagtatcctttagtatttcttttcatttaaataatgtcatgtatgcataactaactattgagatgaagtttgggatatttcataaaataagaaaacaaacttaagtttgggatacaaacttacaaaaaaaattatccagatgggtttataatggtaagagtagctactcgctggcgtggtcgccaggtttatgagggagtagca

SEQ ID NO: 6370 - DNA, 921 bp, Cannabis sativa
aattcccttaaaagctttgatgtaaaatgagaacatgttaaacacacctgggattccttgaatgatgaagttaggctctttcagtacattgtgaagtgttcttctttcatttactttgatccattttgaggagcctaatcgaaatataactttctaagattagatgggacactagagagaaatgttgcaaataaagaaagggaatgaaatactgtctacctgcagagataccgagatttgcatcctcagcagcgtccttgtcatcatcaccgatgtcttccacattagaagctggagtaccctcaaggagatactgaagaatttttttctttggtaggcaaactcctgaagcagcctgttaaagcaaggtagaagagttcgaaatgaggcacaaaaaggatgcaaacttacattacaaggatatcgagtcgaagccaaaggattgagatgatttcctatatgaattccagtgactcaacacttgaaaactttagtgtctattgcctagacgctataggaaaagagtccaataagagcctaaaggccatgaaagttttgttcatggtgaagatcacttccaaagaatgtcagaatgttttcaaaaaccataacactcaaccaaaatgaaaaaagaagagacaatatcttacctcatagtataattcgatagcttcgcgagtgtaattgttctctgtatcccatggcaaaggtggagcactttctgaaaacatgtttgaaagctaaggactccaaataaagttaaacataatgaagcaatacattagcattaatcaacagaattcataacaaccatgaattagtcaattaaaactctctaaattaaaaggatatcatgtcgagatgaactgtaaacatgtctgtctcacagaaatcctcaataaaatcacttgacataacctc

SEQ ID NO: 6371 - DNA, 653 bp, Cannabis sativa
agtaaattaatatgtataaagatttttgataacgcagattttggttaactaatttaataaaatttttttgcaataaatttactatagaaataaataactaataaatgataaaataacactaaatattttacgtaattttgtagttaaaatttatatacttcacgaatccttcttattagggatattttggataccaaatgcaatagaaatatttgaaaaataatcttgtttctttcaaattttcgtcccattttccatgaattttgctcctatttataggtacataggtgtttaccgagtttttcagaaatcgaataattttagagcttaagaaagtaatgaaggtatgaataatacgacaacatgcaaaagatttttacgtggttcaggcgctaactatccttagttcacgagtccattttattaggctctttcgccggagattatttatacaaatacaaaatgatgaactttgatcctattcccccgtgttcctcttaaagaagaaaaagcttattaggaatattttggagttaacagtagggttaataaacaatatgtttcctttttgtgtgaagggaaggtcttggatcttctttgtgagagtctgaaggatgggtctggatcctttctcttgtgcactcattggagta

SEQ ID NO: 6372 - DNA, 614 bp, Cannabis sativa
caacatggtgaagttaggggccacgtctctccaaaccccacatggcccttagagctccgagaaaatcttatcatagacgtggagccaaaaatgtccatcactttctttctactctttttctataaaaaccctctcagccccatcaacttaaataacacaactgaaaattacaaagcatttctctttcttttacaaagcttttaactttctataaacactactactactactattaaacttttgtttaaagtcttaagagcaaaatggctaccatgcagtctgttgtagctagctcaatttcatttggtgcttccaagaacagagcaactctagagtcacctaagaccttgtacaggaataacactcatttgcccatgagagttagatgcatggctcaggtatacgtttaaatcaatatgtccagacacacctatatatacatatatataaatcttaacctgtttgtttttgtgtttttaatgaatatataaggatggtgaaaaggaacccttacagccaattacagagtcagcaccatcaacacaaccaaagccagcagcagcaccttctcctccaaagccaaaggtatagctagtaataatcaagcattataa

SEQ ID NO: 6373 - DNA, 656 bp, Cannabis sativa
gagcaaagaactatagaatggaacgattttttatttttatttttggctagttagaatttttgccatctttgccatgtgttgagttatgtttctattaaaatttattttttcgtgagctattaattttactaatggatgcttgaagtggataaatgtttaagggagatgaattggttgtgtagtggacatgaattggtatatttaaggttcaaaatttataggacacgatttcttaataatctcaatagttgtatgtaaaagtttgggagacatggttttattattttaattagaatttgacattttcaatgtacttaaatacaagtagtaacacaagttgcatttttgtaatatatcatgtattatatatatatttttaattttgagtagtttcaaaatttctacaaaaagttcccttttgattatttgttattgatctgttttgtgcttgatttttgcatgttgcctattaatgatgatttaagtcattttatcttattaacacaatagagtctcagattgattatatcacaccagattgtgaatagaatttggatttgttaaaaagaaaatttttcagctgctgatatggatcctattctcaccattcctctttctttctgtgctccagttgattgttgggtttggaactatca

SEQ ID NO: 6374 - DNA, 552 bp, Cannabis sativa
aatccatttacttcaataaaccgatgaaattctctccctttattcaaatcacctagttgggcacaagaagaaaccaacccaaccattgtaacttcatccgccttaactttattctcttccatgtcttgatacaaccttaacgcttcagatgctagtcctgcccgagcatacccattaatcaaagaattccaagaaactaaatctctaacaaaacttttatcaaacagtttgcgtgcttcatccaattctccacatgaaacaagcatatgaatcatagcattgtgaacaaataaatcagaacaaaaacccaattgcaacacatgcccaagaacctgaaaccccatcaaattcgactgcaacaaagcacaaaccttgagcagtaaaggataagtatacttatccggccgagacacaccatctccaaccatcttcttatacaaaacaacagcctcccacggtgattcactctccaaataccctctaatcgctacattccatgaaaatacatttgggttttcagtgttgaacaaaattctggtgccgtaatcatga

SEQ ID NO: 6375 - DNA, 1181 bp, Cannabis sativa
cgagtgacctaacgtgctgtttaggaaagatgaatttggataatatctggcaaacaaaatttttgacacaattgagtttggttgtttcaagatgcgccaagcttgcttagctagcagagcctgattgaagtgaactagggaacgaaatccaagtccaccatcttttttagacctacagagtttttgccaactttgccagtgtgtcttgggtcgattattgtcattgaagccccaacagaagttagccataatcgactccaaagagtggcaagtggcagaaggaatgcgaaaacaggccatagtataggtgggaatagccaggatgacagacttaagaagaatttccttaccccctttgggtgaaaccttattcttccaatcatgcagatgggcccaaactttgtcgtgaaggtaattgaaaatttgtttgagggaggcccaagtatttttcaaaagatgatctgatagggatctgtaagtaattagaaattaaagtttgatccctaagctcaacattcggggaaaaatagagggaggattttcggaggttaaccttttgccccgaagccctctcatacatcgcaagaatctctttaatgatattacaggactgaattgaggcattacagaagagaaagctatcatccgcaaacagaagatgggaaatagcaggagcacgcctagcaactttaaaacccataagagaacaatttctctctttctgctgaataagagaagagaagccctcagcacacagaaggaaaagataaggagagagagggtctccttgcctaatacccctggttggcacaacattaccagccaccttaccattgaaattgaattggaaggtggctgtggagatacaagcagagatcaattggataaatcgatcagggaaatcaaaatttgcgcagtatggccacaatgaaagaccactccactctgtcgaaagctttggccatatcaagcttaaccgccattcaacctttcctcccacgagacttgagctttatggagtgggccacttcctgagctataatgatattatccgagatgagacggcccgggaggaaagcactctggttaggggatatcaggttgttgagaaccagttcgagcctattagcaatggatttggaaatgattttataaacaatattacagaggctaataggtct

SEQ ID NO: 6376 - DNA, 631 bp, Cannabis sativa
tgtttcccaaccttgatacacttggtttgacctgcacatctcgtgatgaaccaattggtgtaccagatttgaagttattccttcacaaatatcacacaattcgtacactgaaattgaggggctcctttgtgaatttaagtaataatggtgatggtgaagtgatcaacaacactactactactactcatcttacatctccatctacacctttttcttcttcttctttggagcaactatacattgatggtgctgatgatatggttgatgatgtgtttggggtggaaccatcatcacataataatactatgattctcttatttccaaatttaaaaagagtagaagtttcgagatgtagtagattacagagctttgcaccctcctttatgtgtttccccaacttggaaactctggaagtatcagaatgtcatgggctgacgtatttattctcttctgcaacagcagccactcttgtacaattgcaacgaatggtaataatagattgtgatgaaatgaaggagattattattaatcataatggtaatgaagaacaagaaaaagaagaaaacccccgaattgttttccagaatttgaaggaactatggctaacgaatttgcccagtctccaaagctt

SEQ ID NO: 6377 - DNA, 1114 bp, Cannabis sativa
  modified_base (783)..(815): a, c, t, g, unknown or other
ttaagagagatacagagagaggccgagatcttctgcattggagagaatctggaaaatgggttctcagatttttgagtttttgaaaatggggttgtgtttttgggtgtgtttctttagcttgagcctggtttttgtgggttctgagcttgtagcaggagatgggaacatagaagggactgtttccattgatgggaaagttatcattgggaggattgatgatgattttatttgtgctactatggattggtggcctcctgagaaatgtgactatggaacatgcagttggggtcatgcatctcttctcaatctggtattttttttctctctttttttctggatgcattacttttattggaactgttttctttctgaaatatttaaatctttgtcttggatttcgtaatatataatgtcattctgtcttttaaatgctcatctttttttttttctcgttctccatatcctccaagtttccaacctggtataatatatatcaaagctaatgttctgttaatcttcagcttcattaatatatatatatatattgtttctttatataaatttaagtattttctttcttttccctaagaaaaaagtaagatgattttagagcttctactgattttaattacagtatttctgttcatgataatttttttgtttatttattgttcatgtgtatttacttgctcattgtcatgtgcaggatttgagcaacaaaattttcttcaatgccataaagggtgagacatcttttctacactttattattattattattannnnnnnnnnnnnnnnnnnnnnnnnnnnnnnnnttattattatattattattatttcagaggtaagactcagtcaaatcctttataggagcctaaacatacgatcttgctacaaattgtgcagctttttcaccattgaagattagattaggtggtactttgcaggacaaggtcatttatgatactgaagataataagcaaccttgtactcagttcactaagaacacatctgagttgtttggcttcactaatggctgcttgcccatgaaaagatgggatgaattgagctctcttttcaagtcagcagggtaacacaactctctctctctctct

SEQ ID NO: 6378 - DNA, 875 bp, Cannabis sativa
gaaccccaaccaaaatagacattgtattttgtagattgaccacctttgatgttaggtactgagtaaactcctctatcatttaaagctacataatcagattgtaaagcagcaacaataagagaatcatcaaaagctgtcatgtgggggtaggcttcacttggagggcatttacttgattcacatttggagcattggctgcatagtttttcactcttcaaagcttctgtcaaggcaccactgcttagcaccaccatcaacacaatcagacacaaccccatcaacctgtgtccctccatgctcatcacttcttaattaacaatggtaatttcatcttttatacatatataaaatataatatttatattctatatttgcttacatgacaacttgtttagcagatattgtcctcgatgttatcagttcctttgtctttcaattgcttcaatgtgatttaattttcagtcagtaaagttggcaatcataacataataatatataatatgtatattgtgtagcttggcagaggctggcctatgcatgttttactttcatgttttaactttatttgataacatcgacaattttggtcttatattgggattcagcatcaaatttcttactcatttgtcttgttttaaaagatatcttttaatcattagttaatttgactattgtcttggacacattaatgtaactaattacacgtataatatttatatatagagagataagagatgaaaatggaaaatatgagcatagtatacaatatataaatatgttaagctgttattaacaaaaataaataaatatattaagttgtatcggaatattttgtttggtaataatatatttacataaaaactatcctaaaacat

SEQ ID NO: 6379 - DNA, 663 bp, Cannabis sativa
atatagttcaacctcttataattcacacatatatttggaataatgtttctaatgcaaaaaaatcatgtacttaaacaatataatatcctcacttaagtagccaagatctcatttctttaatatattgggttggagtttaatataattttatggttttgtttgtgaaaactgagcttcaactattagattttaattcaatcgtcaataataaaacaaagatttgagttattttactttattttttacttcttgtttcatcctttttgttaggactattacagttaaaatcttttgatttcacaatgattcatttaggattaggcatgaccatagatagtactatgttgctgccagtgaggctgcaaacacatgttttctaaacttgaaaagaagttatccatttcagaaaccatggaagtatagaggtaaaagttttccagcccaaccattccattatattacaccttaatttaattaattaattatatatatatataatatttggtttgcactataaaaaaaaaatgtgtttatatcaaaaatatttaactcaaactctatttttttacctcattttgtgctaaatactcttttttttttatttctctccacccatagaataacccaggtgtgtaatgtaaaaaaatctgttttttttttttt

SEQ ID NO: 6380 - DNA, 1055 bp, Cannabis sativa
tatattaaatatttttgtattgattatatatttaattttttttaaactaattatatatttaatttattttgtttatatgttatcatatcatatttttttatttatttcttaaaactttattaaatttgtggttgttcgtttttttttttatttttttatgtgtctatttaatgtatgtggttgaattttgagtttgaaaaatatttagaatattatttaattagattttaccaaaattaaattaaattattaaatgattattttaaaaaataagtactattaatgacttttttcaatgatttactggttaatatacttgcactatcattaatggttattggggcaagtataattatatcacagtgaaaaatctatgataatttaaaaaccgtctcaaatccgcactattatcatttctaaattttgcatttaaattagtctccaacattcatgtgtgtgtgtgttttttaaggaatatacatgtgttttggtgtaaattaaaagagaaatgataaaaagcaccagtagtgttaagcaccctcttacgtgtgaatatcgctattggtttaatttagtattgggtcccatatagtttaatacaatagcttttaagaagtatcgctaaataatcgcaaagcgacacgtcttaaaattgctaggcaccactagtacccaatagtaatactcaaattaaaaatgtctctaatttgaatgattctttcacaaggaaaaaaaaaagattcgcactaattgtattaaccatgaaggactatcgctaccaaaatattaaaattgaggaactattcatattaatgaataattgtatggtacatatttttatttggttctttatactaaatattttcttaattcttgatgtatatgatttttgaatatatacattaattaatatacacttatatatacttaataaaaatattaaattactaaaatagtattgaacctaaaaaaaaattatgacacctaatttattaaatatagatattaaataatatattttaaagtagtgttaaaccaattaggactgatcctag

SEQ ID NO: 6381 - DNA, 1718 bp, Cannabis sativa
ttttttttttataaaatgtgtctatgtccgatgtaggacgattgtgggtccgatagtgtgtccaacatttgtacttttgcatcgtattgctacatgtctgattgtgggttcgataggggacgattgttgtccaataatataatagtattttttatatttccaaatatacatgtaggtccaatagaggatgattgtggccgatagtgggaccaatattgattgagttttcaatttattttgatgtttttgtgtctgatactggtccaatataggcctgatattggtcctatattttgctgcagaatttctaacttgtattttcttgtatttttttccagaattcaagaccaccacaccttataattccactcttagagtaatacacaggctgtgtcacttggcgtgacggaaattattactatccgaggattaaggcaaaatttgacgaattccaattatagggtaaagtgaaggaatttcctttcaaacaattctttgagagaaaatcgctaaacttttcgggggcattgatccatcagttattcacgcataagatcaaatttgaaaagccagatgaggtacacttttttttttcttcgcaaagaagagatgcagattcagccgggtcgagtttgcattggtgacggggttgaacttgttacccgggcctacagaacaagaaatgaaagagaaaggaagttcgaattggttgattgtcgagtactttaacggtgatccatccatccatcattgtcagaatttgaagttgaagatgaacacccgataggtgttcgataaatgtccgataggtgctcaatattgacacgatagcttagtgtctaatggtgttcgatggtgtctgatatgtatgatgataataattttttttttttttttgtattttccatcccctatcggccatatatcggaccgccatcaggcagtatcatgcacgaggctcagatgagtatacatagttcatatcgggcacatattagactactatcggacaacatcgtacttataaggcctcgtaagttttgagaaacaactattggcagttattggggcactatcgggctgtatcgtccaactctctatgcttcatcatattgagatggtatcaatttactatcagaactttatccttaacctttaatccatccctgtattggatcctattgtcccaacatcagacactattggactatattgaaaaaaccaaaaaaatacaaatttccacctaaactcgatttacacaaattaaaaaaaaaaaagacagcaaaaaatactaacaaaccacgcattgaacatttaaacaatattcttaatcatcaaaacaataaaataatatcaagaatcaaaggaaaacaataaaccattattttcttgaaaatacacctcaatttattttcttcagctgaataaatgtctttgttacaagattttagtgtcaaagtcttgtacaattgataatttgtttagagaagaagagagattattgggtttgccatttcgggtgtaagaatgagtaaaagaaaagagagaaaagagaagagaagagaaaatgtgtttttggtaataaagaaaaatgagcctactctttagatgtttatccaactttttttttatcccttttttgtagagaaatttattgaatcaccgaaagaatttttattatttttgtaggtaaatttttaatgaaaaaatgactaaaa

SEQ ID NO: 6382 - DNA, 514 bp, Cannabis sativa
aataatctccactttggcaaaaaaaccaaaaacaaaaatgctccctccacatacgccttgggtgctctaagttcgaaagatgttgatcaagttcaagcagtattgaaacttgatccctgtaactactattgtaagtatatctgtagggttatctgcaatcttgactttctgaagaataacattcccttcgtcaatgatctcacgaaaaaaatgaaatcgaacattgatttgcttagtgccaccatgatggacttagttctttgtcgaacaaatggcactctgactgtcactaaaaacctccacgttcttctgaaaaatacccaaatccttggtcaacctgagaagccatataacttttttgaatacccctattaccaccatatattctgcctctgtagtaaacaaagctacagttgactgtaatgttgatctccagcaaactgcctgccactgtgaacacataactagtacttgaccgacgcttatccagatctccagcatagtcaaaatcaac

SEQ ID NO: 6383 - DNA, 1083 bp, Cannabis sativa
tctgggtgttgtgtttcgattaggaatagatgggagtgattgagatgagttggaaggagggagagatggatgtgttggtaaatctggtggagttatatgtatctagtttgactcattgagagggacaataggctgagttatttcgggtaatggaacagtgatggcaggtggttcagaatgtggtgggtcatgtgtaggaggaccacttgtatgaatattattttgtggagaaacaatagcaccaagagcaggtagagtagcagcaggagcacgctgtgacctgtcattttcagcatggttcacaccagataaagaggcagcagcaggtaggttctcagtggcaacagttggaccagcaacagtggcagcaggcacggattgtgacacatcagtaccaagaccaacaggtatgtcctcagtagcaacagttggaccagtggtaaaggaagtgttagtaaatgtaggtgcttgaggacaaaatgaagaattgcaagaaaaaggtgtatgggtgggggataatacctgcgagtgtgttgctgaagtgtaggcagaggaaacttttgaggatagaaatcctcattaaacaccacgtttctagcaatatatattctcccttcagtattttcacagagatatcctttatgatgagaagaataccctaggaaaatgcatttctgagttctgaaatcaagcttgtgtttattgtagggcctaaggtgtggaaagcaagcacacccaaaaggctttagaatgttgtaatccggcttgctgtgaaatagagtttcataaggagtagcaaaattcaaaactcttgttggaagcctattaatagtgaaaacggctgaactaaatgcatgccaccaatatgacaaatcaagaccagcattggccaataaagtaaggccggtttcattgatatgacgatgtttcctctcagcacggccattttgctcatgagtatgaggacaagggctttgaaagtgaattccttgatcaagtaaaaaccttttgaatggcctatactcaccaccctagtctgcttgaacaactttgattggaagattgaactgcttttcaactaaa

SEQ ID NO: 6384 - DNA, 2474 bp, Cannabis sativa
atttgtagagatttcttgatccaaaccttgctccaccataagatctcactgatgaagatcgtcaccataacagagtgagccctaaatttgaggattgggaacaacaagataatatactggtatcctgggttctttcgtccatgtcagagaaagttctcaccagaatggttagatctgactctgttgtccagatttggatcaatctacgtgagtactacacctctcataatcgagccaagataggtcagtacaagactcgacctcaaaacaccaaaatgtaaacttctttgagtgattatcttctcaagcttaagagtatcatcgacactcttgcctcgattggccattctacatcgcctcaagatcacattgaagctatcttcaatggattaccagcttaatataatgtactcatcacatctgtcaacaccatggcagatgcttatagtgtggctgaaattgaggcactgttaatggctcaggaggtacaaatggacaaagcagctaaggatcttgacattgcaaaaaacgaagctaatcttgctcacactaaagctcaaacaggaagaggcacatcctttacttccctaaaccattccccttatggatcaggaaacctgttcagaggtaatgcttcccccttctcttaatctaattcctctcaatctggttattttatgccagtttccagaggctcatgctctccatctcgtggccagtttgtaaatttttgaggaggtgtctctcgaggtcatggcatctccatcatttggagccaaaaacctcaatgccagctttgccacaaactgggacacactgttcaacaatgcttctacagatttaacaagtccttcactggacatgaatcatttcaaaacttcccagggcttgtcaatacaaatatagaagagatgcaagcctactatgccacaccagaagttgtcaatgatcccaattggtaccttgattctggttctaccaatcatctcacaccaaatgaacaaaatctatccaccatcaacaactatatgggtgaccggcaagtccacatgggtaatggcacaggtttgcatattcaaaacattggtcaatcttcctttgtatctccttttcataatcacactcttgtcttgaacaatcttttacatgtgccacaagttacaaaaaaatttcttagtgtatctcaatttgctcaagataatggagtcttttttgaatttcacccatttcattgtgcggttaaggaccatgttactttgaagactttacttgtttggatgcttgacaaaggtctttacaaatttgactcaaaccaactcaacctcctctcaataagcaagcagtcatcatcatcatgtccatccaccattgttgagtccaatacagaagtcaaacaatattaacttgagtcccctatcaacgcaatgtaattcgagtactctatcatatacttgtaatttctttgctttgtggcacaaaagattaggtcaccctcatcctaaaatagttcagcaagtgttaaactcatgtaatatccaaacaagcaataaaaatattgatttttcaaatcaactttgctctgcttgttgtcttgggaagcatcacaaacttccctttcctaaatccaccactgtttataacgcacttttacaacttttacattctgaactatggggtcctgtccccataaattcttcttgtggatatagatattacattagctttgttgatgccttttcaagacacacatggatttacatgagaactaaaaatgaggctctctccacctttatcaccttcaaaacccaagttgaacttcaacttggtttacctatcaagtaaattcaatcagattggggaggtgagtatcaagcattcactcacttcctacaacaatctagaattgtccataaaagtttcatgtccccacacacatgaataaaatggagatgtggagagaaaacataggcacatagttgagagtggattgacacttttagcttaagctagtatgcctttaaaattttgcgatgaagcatatatatatcgtgatgctatttttctagtcaacagaatgccttcacctcagttaaataatatgtcaccaatagagatcatctttcaagtcaaacaaacctacacctctctaaaagtgtttggctgcctatgctaccccaacctaagaccctaaaacaaggttaaactttaattcagatcccaaccatgcaccttcctaggttacatcttagctcacaaagggtacaagtgcctatctaaggatggaagagtctatatctttagggatatcatgtttgatgaactagtctttccatttgctcttgaagcagatgacaaatcatctcaaaattacacagccactctcactctgcagcatggtactgcttcaggtcttccttaaagactcatcaatttttttcctccccctggtttcaatcatccttcacatcctgcta

SEQ ID NO: 6385 - DNA, 1301 bp, Cannabis sativa
tgttgtggttacaacttctcatgttttcttcttagatttagctgttgctagaagaacattatgtactattttcaataacatggttctataatagcaataactaaatagtagcaagaaaagtgaagaagaaaatggtgattttcagctatgaaataaaatccactcttgatgggatgtaataattatgctatgatgaatgacttgactgatcccatgtgagaccttttcttcgacaggtgtgaagaacatgtgaaaaaacagactgaattaaaacagatggtaggtatttataattgtagctaagtaacacttatatatatatatatatacacacacatacgaaaatgtgatgaaactgtgattgaatagattgcaggcttggagaagcatctggaagaatccaaaaggaagtgcattcaacttgcagcttatgttgaatccaaaaagaaaccaaacttgtcaaatccaacctctgaaaaggtttgaatcaggtgaaactacaatatgaacccgacgatcaccttggccatatgttttggtctgtaaagtttcctgtgtaaatgttcttgaatgtggtggtgcaggcttagtagtaagttggtcgcttttaaggccatgtgaagctcaggttttccatggaaagttcaggattttgtttagaaattttgaattttgcagatgaaaaatcttgtgagaaatgaagactgggcaaattatatataagaaattttatgaaaaaaagaatagaaaaacaagttttcaagctttattttatctaagtgtatgtattaagttcaaaacaattcgagtgatcttcaagtatgtagaactggtttatagttctaggaatataggattgtaatagaaacatatatggttatcttcagcaggattatattttatgtttttttatttaacgtattatacaaccaatagtagtaataataataaaaaaaacttattaatattgtgttatgaaactgatcaattatgttagtttatactaaaaatgaagacgaactcttaatatgtacaaactcagaagccttcactaaaaaggaaaacagaagtcaattatcttcaaaactaatacaaaaatccttacatcacatataaatataggcatatgattgttgcattgtatttttttctacatatggaaattgaaaatacaattttttattttttaaaaaaataaaaaattaataaataatacaagtttttaaattttttaagggtgatatgaatttaagaccaaatagaagtgtactagactactagtctacataaatttttaaggg

SEQ ID NO: 6386 - DNA, 1190 bp, Cannabis sativa
gcagagcatgacaaatggtttcaaacgaataaccacaactattgcaatttatatcaactttcatacctcactatttcaggttggtattcacggggatccaacaaacacgctctccaagcaaattttttgattttgggactcactcccgacccccaaatgaacttccaccatcgctctgctgttgaataatggacacattctattttagttttcaataaagtgcacacctcgtagccgcttttcactgagaacgtgccattaggagaaaaataccatatgagatcatcatcattttgattcttaattgaaacaaggctaagcacccaaggtacatcctcagtgtaaaaaaatgactagatactatcctcatactaggggccctatttgcctaaaaggttggtaactctagtgttagggggacaatattgattttagtccaaagagagaaaggagaggctttaaggatccacttgtcctcattgatccgaattgtcaacccatttcgaatcctccaatgaatcccctgattgagaagcttacaagcccacatcaagctttgccaaatatatgaggcatgaggcgataaagaggctgccataaaattgccattagtaaaataacactttttaaacacccttgccaataatgattgcggattagaaatgactttccaatacaatttggcaagcatggcttgattaaaatcttccaaatttggaaaacccataccgcctctattctttgagaaacaaagtttatcccaagacctctaatggattttttgcgttgacatggaagacccccattagaaacaagcttctgttgcatgaatttcatctattgtgcctttaagaatgagaaaaaaaaactcataacataggttggaatagcctgagcaacgacttcaatcaaaatttaccgacccagttgagaaaacaaacaagatttccatccttgaagcttattctaaattttgctttggactttggcaaatacttctttcttcctttaacccgcatagactggcataccgagatacacatgatggcaaggaaccaaataaacccaagagtattagctatatttcccccactttcttcatttaccctttaacccatacatatttacgatgtatacatgttgatgtgttgactagaaagagatatattcattcagaatttggattaaag

SEQ ID NO: 6387 - DNA, 994 bp, Cannabis sativa
gctatttactttttttgtccaaaagacttcgttaagtgtcatggtggacataccacagtatacacaagtgtacacgtggcaaatttttaatggtccacataattttaattgattaaatattttaaaaaataatcaaaaatattttttcttttcttttctttatgttttttgttttttcttattcttctcgttttttttatatttttctccatgtaaccctaatttccaccagcactccttctctcttccgttctccttctcgcacaactccgacaagtcacctccagccaccttcaacccaaacgaactccaaaaccgacttcgcgaccttacaaatccaaccattcaacctccctcttaaacccttttttgaagtttccctttctcacctcgacctcgtcgaatctgattctctctctcccgcaactctttgctgataccatcacagttggagggatttgttgggctcgatggttcgtccctgggttcatcgtgatctggtaggtttgtcgcaggagaaaaagaaggaatggagagaggggagatctaatggttttaatcgcatagcacttaacacaaccttttgaacgaaatgagtaaatagctaatagaagtgaggtttggagggttttaccactaaaaattggtttatgtggttaagtttcactaatcatataggcaagtaatttttctaccaatagctcatgctaaaaatttaccatgtgtatacttgtgtgcattgtggcatatccaccgtgacacttaacaaagccttttaaaggaaagagtaaatagctaacagaaataatgtttgaaaagttttatcactagaaaattagtttatatggttaagtatcactaattataaaatttaagtagttttgtggttaatatctcatttaaaaatgatgtttgaattcttaagattgtgacttactctttcgtggacatccttgtattactagtgtactgttgttcaagatcttaagttaat

SEQ ID NO: 6388 - DNA, 1436 bp, Cannabis sativa
caaatccttacagccattcgtggaaactgatttcaaagattcctccaagatcttccccctcctcctcagtttctcagtgatgtaaacaaagctgcattaaattttaatcccaagttcgtgaattgggaagtgcaagatcaagttcttgtattttggctcctatcttcaatgtctgaaagcttattgactcgaatggtgggatgtaattttgtcaaataaatttggaaagctcttgaagaacactacactctaaaagtttcatctaagatcctcgagttcagaaccaaacttcagaagataaagaaaggaacactgaacattaatgactatcttcttaaagtcaaacaacatgtcgacttttagcctcaattggagaggttctatttgatcgaggtcataatactgccattttcaagggcttacaaagcgaatatgacacttttatcatctctacaaatactcgaattgaaggttatacagttggggaaatggaagccttacttcttgcatctgaatctcgaattgaaaaggaggatcaagaagtggaacctagtgtgaatatggccactactaatcaagatctagctatgaaagcattctttgctcaaacaaatcgaagctacaaatctcctgcttattccagaggttagtattggccaaatagcttcaattctttgaatttttcctcttttcccaacacgagaggaaacttttaaggtagctcctctcgaagaagcaacactaatccacatgccacatctatggcaagaggacgagaagatcgattccctattgcaccaaacagaattcagtgtcaactatgtcataaacttggtcatgctattatcgactatttttatagatttgacaagagcttcactagtgttttctctacaacagatcaatctcaatcataggccaatattgctcacacaacccaggatcaagatgacaattggtaccccgattcttgagctacaaatcactacattccaaatggactgaacatcatgacacaagctgattatgaaggccctaaacaactgtatgttggcaatggagctgcttcacccatctcccaaattggtaacacatatatgcatcctaatacttgtcataaaccttcaattctcaataacttactttatgtacctaaagtcacaaagaaccttcttagtgtctctaagtttgctacagataatgatgtttactttgttttctaccctgatgtgtgttatgtcaaggatcaggtgagtaattccacactgctactgggaaacatcacaatgggctatatacttttgattctagccaactctagttgtctacctccccaaccccctacagcacatccaatttcactagtcaaccatgtaccaacatagctattgcatctcttcatcagaaccatgttttttctgtctgtgtaaattgta

SEQ ID NO: 6389 - DNA, 1078 bp, Cannabis sativa
gcatttgtcttctgtcaggtacgtttaaccaatttttactcactcattagctgaacactcaactaatcaattccttctttggtttacaaggcataatatgtgtataatggaccttattgaacatattactacatataataattattaattatattttttaaaaaaatacatatttccaacatttcacttttttgagaaatagaaaaaaattaataattgactgtataaataaataattaatatactttatttttaaaaatttattaatgaaataagtcacataatttatgaataaactttgcattagcaatattgactgtatagatacccaatttttatacttttaaaggacctaaatttgtaatttgtcattttaactacagaagctaacagttgcaacaaaaattaaatattaactatttatgttgtctccctcaaaaagaaaaaaaaaaaactatttatgttgtcaaaaattcaaaatttaaagtatacaacacatctatataagctcatgtattttatcctttcacaaaaaaaaaaaaaaaatcataataataaataataataaaacaataaactcaagtattttatgtttatatcttaatgccatctccaatggcacactaaaaacttatgtataatgcaatttttttcacaaaatgctccaactaagtcttaaaatccatcatctaataatagtggacatgtagaccataacattctttttttatatatatatactttttaataattaaataacttacttatgaagtaaatatttttttatattaataaaataatattatagtaaagaatatatatttttgtgtaatttttagtattagtggttagaattgaaaaaaaaaattaatattaaaatagtactattttagtattgatttaacattaaatttaaattttagcattgcagttgccctaagtaagatggaccatatttgtagtggtatgaatggaatttttcatatgcataacatatatatatatatatatatatatatatatacttttgttattgcaggtgttcaacgagataaacagccgtgatattgagaagata

SEQ ID NO: 6390 - DNA, 818 bp, Cannabis sativa
gtcgtttatcatgttgtgaagtttgtgatgatgagtttgtttataacatgtaatctcttcctaatgtttctaatgtttggatacgaattgtgttatttataatttttcttttcctaagatatatatttttaggtaaaaaaaatatatatttgaaacttaaaatccacatcattcagattttttaattttatttaataaataacattttaaaacaattgtataattgatcagtgctaatataatatattaaattttgaatatgaattaatcaaatatctaaacgtctttataaataaattaccttaaaattcggataatgaccttaattttgaatatgaattaatcaaatatctaaactttcacaatttagattttaaataaaaaaatattttaaaaataattatatagttttatcttttttttttttttaaaaaaaaactaattattttaaaaataaaaataaaattgaaatattatttgaataactatgtcctcttcaatcgtcttgtgtgtctccataaatttacctatcttcatcaaaattataatgagcttatcaattaatctctttcaaaaatattttaaattaactcaaatataaagaaaaaaagaattaccttgaaattcggataaagaaaaactaataggtttgtcaaaggaaatagcaaaaaatcaatgaataaataaaattattgtaacaaattttgaaaaaaaaaatcgaaattgagatattattcgaattaatgaaaattaaatcacgaatttattaaaacagaaactatattatgtagggtaattagtggctaaaaatatatttt

SEQ ID NO: 6391 - DNA, 1556 bp, Cannabis sativa
cataaaaatattaatggaggaggaattagaaatagaatatgggaaattggtgggagataattttgagtaccgcattttcacttcttctataatattgggtcgtaacaaatcaagtaaaaggtacaaaaaggtcaaaattgatgtcgacttgtgcagccttgggggtatcaaggacttgatttcgggccaccatgcccgaatcttctatgacttctaccgtcgttctttcgcggtagaagtcctcggtagatgtggttgttacatcgacggtgttcttcatctccccggagaccctcctgtcaagcttcaacccaataatttggttaagattggaggcatagagttctaccttgtgcctacattattatttgggtatattttcacttcatttctctctttgaaaaattaattctattgttttgttaattgtgtaattaaattatttatttattttaacgtattaaatgttcacattaattttcatgaccgtttttttactataatatatatgtccttatatataaatattagtatgaccaaattctatgtacaaagttggcctagtttgattttgctgagtgcaataattatcaatttatacaaatatatttttatttgttctaggtaggattttgactgtactgtcacatatccattgtagaaaattggagttacagtcaatttttcattacaactttatagttaatttttgtgtataaaaaaatatatacattacaatattttttttccataacaatatttattatacttagaacatcattattgtaaatttttaaatttttttgaataatttaagcttgaagtattacgcgtggttaattgggattcaaaaactctattttcgatattataaattataacgaataatattatgaaaaaaatattccgatgtataattttgggtgttaatattaactaaaagattgttattaacactcttcttagagaaattaaaatgttccttctaaaatcattttttgtcaaaattcctcaatttttttaaataaattttaatcacgctcatagtattgatttaattatcaaaattctattgtagatttataagtgtaatataaaacttacaaattatttacacgagcaagttcgactttggacatagatctttgtctaggactcacctaatctagtaccatactttttaaataagagtctcaaaataatttttcttagggaaacatacatatttatgttatttaattatgtttgataaatttcaatcacactccaatagaaattaagatgttagtactcagcaatatctcctactaatacttacttactataagattaaagtaaaatacacaatatttgatcattaattatcatttttgttcttgtaattctaattcaatggattaatgatgggcaatagtgcttcaaattcaatggatacaacaagtggttataataacgagaaggaggtaggatttgctaaactaataggagacaatttcgagtattacatgcaaacttactccataagattgggtcgaaattcaaagatatcatcagta

SEQ ID NO: 6392 - DNA, 913 bp, Cannabis sativa
tcttaacaagggttgccttcggtttgatgagttgttgtgtagcatgatctgattcgacatgggtcggactttggtatctgtagtactgtttgatcaaaaagaaaatattataggattttctcggaaaatcttggtttctgatctgggttgattggtaattttttggtagttaaatccttttcgcattggagcccagccgggaaaagaattaaagctccctgattatttcaaaaatctcttgaggaatatacgaaaaaggatgaggttctaaaaatttttgccaacaaaaatttagaaccagaatctcaaatcaaagcaaaacccagaatctgaaataataataaaaaaagcccaattcaaatccaagaactttttcccgagaaatcaaaaatgaaaagctcaggctccatggaaatgatgagccgggatacgctacggccgagcttagaacaagggcataagctcgctccggcgttgattaagcagaagccacccgaagccgccgaactccgagggccgagctttaatttttggtggaattcaatggggttttgaatgaaagaatttcttattttgggggtaaaattataatctacggtggagtttttagtggttctttctttttttaggggtagtcctataaatttggaaaaataagaaccgaaatgagagagagagagagagaaaggagagaagagagagagagagagagagagctaatgtaagtgagagagaagaaattttgagagtatttatttaaacacgcttcaggacaaggaaacgtgagggcaggaaatagtgagtcaagaaaacaaatcagaaaatattaaaagaataaataaataatatttatttatttatttatatatatatgattaattagaaacttaaatattaaataaattaatgatga

SEQ ID NO: 6393 - DNA, 678 bp, Cannabis sativa
taaaaaatgaattaggtagttaattttagataaaaataaattatcactgaaaatatattttttagaatgctagctatgtttagttttttccaagtgcgatatatatagatgtgtattcatgattgagtactttagatattagaattttaatatcatttcaaaattaattaatttgttgtagctagctatggtttaaataaactaaaactaagattttaagctttcacattctcttttttcttttgtctacagcatacaaatatatcacaaaaatattttttatgtcaaatataattaatacaacttttacgtctttgattgaatggtaaagagaaattataaacaagttatataattaaaatgaggaaattataatatatatatatatatatacattctaaacaattatattactatacatatataattaaaatgaggaaattatagtatatatgataagaaaattgtaaaaattcattgtaaaactggccaaaatctaagactgaaaaaaaataagaaagccaatacaaattagcttttaggaagaattaaaatcatgtaaattgtttgtttgtgttaaatgcagatccaaatgaggtgttcgttgagaggagtgtgtgtttttcctgattaatttgatctaaaagttaatatatagtgtcaaaaataatgtaaaaa

SEQ ID NO: 6394 - DNA, 785 bp, Cannabis sativa
ttttttttttcgtgttttgggttgatattcactattacttgttaaagttttgggtttttgctaattatcaacatgttgcgacattgttcgcacatttattgatttctctttcaaatgtaaacaatatgcagaatttgtgtgttttgtcgatgtttcacgacatgtagcgacatctctgtgcgacatgtctttatggtttttttttgggaaattttaattagttatctatagtttcatggtatcgctaaattatcgttaatagtatcgctagatatcgttaatagttgagctgtattttaattgtttgaaatttgaaattttatgtcgttagatgtcatgaatattattgttatatatcgctaaatcatggactttgttgatgctatttttcgggacttgttgcaacacattagcgacacagtttacgatatgaaaattttaaagttttttatatgtttgcttacttttgcagatggctcctgaacttaaacttccaatttcttagtatttcacagtacacttacctatcggggtataataggtttagagatatcaatgctgtagaaaataatgaatcgaattgtgtatttcatagaatagtacatatttatatgcaaagattggagactaaatgggaaactactaataacaaaatagaaaactactaaatacaagttaccctaactttttacaactaatataaaactaatattctaacactccccctcaagctagagtatagatgttaatcatgcctagcctgttacaaagataatcgacccgca

SEQ ID NO: 6395 - DNA, 1824 bp, Cannabis sativa
  modified_base (198)..(199): a, c, t, g, unknown or other
cattgtcttccatagaacatagtttcttacgatccaactttagaggaaaaggttggttgagtgtgttaaagggttgtgtttaggttgattgggtaaaagggcctagtgagctagcagccactacaaaaaaaaatgtcactttttagtgacaaccttttaatcacaacaaaaaaatttgtgactaaatgtgacttttanncacaacaaaaaaattacttgtgactaaatatagtatttagttacaaattgtcactaatttagttttagccacaacaagtatcgtgaccgaaaatacatttagtcacaataaattttgatttttgtgactaatacttttagccatagattttttagtcacaacgtaggaataataatttataattagtaacaattttttcatttttaatcacaagttaattgtgactaaaagtaagattttttataatgcgcacctgctacagcagtgatgattccctggggagtctgagagtgagcagacattggtacgagcctttttattgctctgataccaagttaaagaatgcacaaaaatagttgcagaaatctcagctcaaaagaggctaagtagaaagttttcaaatttataagttttggatttatataatttcaaatttattcccaaggaattgacatgagattttgtgcattttctcggatcacgtgggtttccattgcttctctaggactccaataattattactattgcttgtggttcaatcaaagagcattaggttcaagaaatttgtgatccatgcgatccctttcaactttcaaaattaagtagctaacattattttcaaaaataaaaattaaaaaatagctaatgttaataatgtgagaggacaatatatatattaaccgaaaaaggacaagaaatataatactacttacttggacaaaacttatattttttttgatgtatatcattctattaatgcaacacgtgaggtgagcttcaaagttttcagattctatttaaatatacataagttttgcccaaacactttgagtagaagaccgttagttacatatttttaatttcacgcagtgtgagttttgaatttatttctcttagattaaattattatatctcaagaaatggtagaagaccatatatttttttcttgtatttttttttttagggaattcgactgtaatgtgtaactaagcatgtgaaaaagtaactagtactatataaattaggcaacaaatatatggggaaaaagttaaagttagtaaaaatcgatagatcgatcaattattccggccaccggaggccatggcttcaaccttaagcctgtccaaagctttgttgttactttcaactttgatatttctttttcttcttccattcctatcccaaaataatataacccaaaacaaggttatcatacacactttgtcttctccttttaataacaataacaccaccagtactattactcctattcctcctcttatcacttatcatcatatttctaacaccaatgatacaattccacctgacaaggtgaacatcaatgaatcattgctttaattagtttcatttgttagaagctaatatacataactgagttaattaatgattgtgtatttttgttttgagcagaccataatcaagaagaagaagagtaggttggagagaattgagtatgatttggtgaaggctagagtagctattcgtcaagccattacttccaaaagttttaagtctgataagaatgagagcattataccaagaggttccatatacagaaacccatatgctttccatcagtaagtatatatatagtactttttaa

SEQ ID NO: 6396 - DNA, 1179 bp, Cannabis sativa
aaattcgctaatattgtcaactatgattagaatatttgtaccttttgactaactagctaaatagtcatttatcatgccatcatttatcaaaagttgaagaggaccgtaagccaatccatgagctaatggaaaaatatgtaaactacgatgtgtataattgaattcctcacaaatttctgtgataatttcagccacttgattcaggataatttttgtatgcgtaccttcatacaaattttgaaagatcatatatagatcatcttgtacaaattttttgatcaaacgaagaacatatttttttcttataaaaagcttctgactatgtttgagttcctttaaaggtttacataaggcttttcggcgaagttcttctacatatgaagtgaaacttgctttctgaaagataggcatgtgctttagttgtatgtcaattagatcgaagatagtttctctattggcatcttcaatttgaataaaattatttgcattgttttgttttatatcttttatcttattttttttttattattcgtttacgatgcaaattaaatgattcatttaagtcaagtatttcttactattatctcagtggcactcatcattttcatcattttcttctcatccataatttaaaataatataatttaaatgtagtaaaaagtaataggcaaaaattaggaaaaaaatattccacaagacaaagagtatgtgttcttacaaaaaaaaaaaaatataataaacaattatgctataaaatacaagttaactaaaaaattaatttatattattatggtttactaaaaacaatttgcattttgatatataaacaaattaattaaattattattaaacataaaacaagtagtaaataaatatgcaataatattttataaaataatttatatgaaaaatataatacaattcccttatataaaactataaccttataaaaagattaaatcaaagtaaattattttctttagttgcactttaaatttctaatcaagtgagcatatgcactttctgtggtttatttttaatttttcttttcggtcacttcttgtgcttataaattcgctaatattgtcaactatgattagaatatttgtaccttttgactaactagctaaatagtcatttatcatgccatcatttatcaaaagttgaagaggaccgtaa

SEQ ID NO: 6397 - DNA, 694 bp, Cannabis sativa
tgcaaatcttactttccttcacatttatatcaaagtatcttacttttgttccaagacattttgagactcaagttcagtggcatgtgttatagaatgtactaatgtaagagtcttacaactaatctacctagtaatagcactattacatttgaaacagtacagtattaaattcattatgttgagatatgaggattttaggtgtttattagtgccattttgacttttgatgagctgttatttgttaatctttaaagcagcattagtttactttgtttttagattatttctttgcttttgacagttttaattggaatggaaaagaatccattgtttggctgaattttaaagttttgtaatgatattccttcaaaaaaaaaaaatgatgaaaaatgaagttatcaaaagtttgtatggcgtatattaagttttattgtatcatcattttgtttttattactcccaatcaaaccaacaataccttggtgtagattgtcagatgaattcaaggtctcttttgagtttattgtaatgtttttctgaagaattcaggtcccttcagctatggtagaggacactggatttatgtattaatgtattcggtggtggcattatggcttgttgatgtaaattatttaaaaaatttattgttcatattttggtgacagattcttaagttgctttcacgtacgtgtgct

SEQ ID NO: 6398 - DNA, 1309 bp, Cannabis sativa
agttcataaaaatacagaatctcagtgggagtgggagcactccaccttcgagctacataaaaaataaaaaagtccagccatcatgtgatagctctagggaataagtgggtaagggtataacaccacaaaaataaaaaggttgataaaataatcttggagtgggagagtaaccccagacattagatgtgtttgactccatgccccaaaacccttgtagttgtgacttagggtctccaagtctcaaggcaagcggtgaaagactccttcgtctcaaggtatgatgctactttcctctatgaacttctggagttgatgtacacacctcatggacgaatacagttcatcgtcttcccagccattagcgcgataaatgtactctcgcattgggactggacgctgtaatacatccgctggagggacaacgggaggttaagtagcttcttcctgtttgcttaagcccttattatttccaggacaaaccatttcacctttcccatcggaatacaaatacaaaatttcttggttgaaggaataaaactcatacacgtggagctcttggagtgctttgttcatctaagaattggaacaaaactcaacaaatatcctcccccacactaaatccaaaaatatagataggaatgggggtcccttaattgctaagaaaaggccccatctggatactagcgactcaaaagtttatgagtcgagtatcgagcaccagatgcaccacatacgaaatagaacaatggcatataaaaccaaaaacagatgaaaaaattttcgtaaaaaaaggaaaatataaactagttagtgcatttgaagaaaaggaaatcgaagcctgaaatatgaaagaaaataccctcatcttcaaatacattcataaagtcaacaatttcacaaaaatataccgtacagccaaaatataatcacagaggaatgtaaatacttaaaaatttgaggtcagaatgaggcggatggctctggaaagtagtgacgatagtattgcgcttggcacgtcggaggaaaagtataagaaaatccagtgagcttgaggaattcgctagttttggggatctgagtagaatggatagaaagtaaagtgggagagataagaatgcaaacaatatttataacttccaactcacgatcctagccttttgatgatcctacaattccctttaaatttcaagacatacacaacaacctgacagttagggagaagtgtaaacaaacacatgtatgaggggatgtttggagtactcgactatccgactgagaacctgcatttatgacttacccagggatttaa

SEQ ID NO: 6399 - DNA, 1605 bp, Cannabis sativa
aaaggagccaccatgctggcttgtaccggagtggagcggccgacggaggcgacggtggcggcggaagacacaattgaggaagccatttatattgtaccctttgcttaagtattttactatgtatataagagaatatagacttgttttgctatgctctaataagctttgttcttcctttatttatagaccaactgctactgttcttcccttctttttaatccaacggctttgattttgttttctaaaaggatgggtgtgttttgatcgttggatcatgtttagtcccatattcgaatcatattgaccacacacatatgtactggaaaagaatagccttatcgtcttatgcttcattggtaatgacacgtggcactctctagtgtaatcttatctcagcctattgagaatatgtagttgaatttgcatcgagggttttgagtgaatatccaatccaagcaattgaatttttctgatatgattataattgtgacttgtgaattaacctatatcattgataatttccacgtcattttctaatttatcaccttaatttctaacttacatatatgtctacttgctatatgtaaattatatatatatattttttttattgcttaatattaatgcatacaaaaatttgaattctttcacagacagttaaatctgtctttgtcaattacagactatggaatttcatgagttattaccaccataggttttgtacatgcgccaaaaaaagtagtaaaatatcatattaattttatcatgacattattacttatttttattttatatatagtatttatattacatttaatttaggaaaatatacatctacacatcttatataaaaaataattaacgatttgtttgagaaatattaattaccgaaaaaaataacttaaataactaccattgtcaaattattttgtaattagttatacaaagtatattttacattgaatgtaattattattattatttttttttgcttaataagatttttgttgatgaagagaactagtcaattacattgtgaccgaaaactttgagtaatgactgataaaaatagtgaaatgatcttaatgtgaaaatgtaagagagagaagatgtttgatgttttcttattcaaaaaatgtctctcccatattacaaggttacaagttgtaagtggtccttagtcaccatatattgttaaaaaaatttaaatttatatacatacatttagtgtgtatattaatttttttgaacacaaacttaccgaaattaaaaaaaaaaaataggcacactttatattaatactcataatactcttctcccttcttttctcttctaacttcattatccatgctcctcattctcatccataccgatagtggtccgatgtgagtccgatggtggtgcgattgtggctcgttgctactcattttttatgtttctatacataaaaaatagtagcatcaggctaccattggaccactatcagaccatattctacatttatagatgttaattccattcattaagctcgtcaagaaggtattgggccaccatcggactaccatcggaccatatcctacacttataggtagcatcgagctacca

SEQ ID NO: 6400 - DNA, 1248 bp, Cannabis sativa
gtacaatctcatccataaaatcaagaaaagaatttgagcttgttgagggtgtcaacaatggaaactcttcatttccgcctcaggcagtacttgttttgcatttatggggtaccacctcgtcatttctgtgcttatgtagacagccacgaccaacttctttgtcctcatttttatttgttcacatgtcctcatcctgtcctgtcatattttctcctttgtggaatcttgcttttaatcttccttgagtcacaaatagtttgactactctttagtttgccatagaccctagttgaatgtgggattttgatgggaaggctgatattttcattttatacaatttattgtttgatacaagtaagtttgtataaggctctatataattattcatatttttcttggttgtagtttcatgatgatatgaacttaccatgtggcgttcttcgtctgcacgataagggaggtcatggatgccacaatgggtatgatctgggccctggccaaataattatgattattgagtagtttataatagtaatgtcttggtttggcatctaggttcttaactggtaattttaacacttgggaaaatgatttacttttattagtggcagtaaaaattaagattcttatgcttaagtgtaacaaattgtaagttaagagtgtggtatcaaaaacttaggcaaatcttagtgataagaacctgctgccaaatacgtaaaccagtagcagaatctccaaacagtagccagaaattacagtaacaataaaatagtagcagtagaatattaggaaatatggggaagcttgagacaacgagacaatgtctctaacaatggtagagagcaaaagctctccattgatgcagagaattctctcaaaattttgcataccctcctatttctcttacacacctatatatagtactaattcctcaatcaagactaccctcccatacaaagactcatataccctttttatttactatattctaacacaccatactaatcctagggcctaacacttaggagtgtaaaatgtatattttcccctgaaactatccatatgattattatatttgcttcttttttggtccaatttttcatggggtcatatttgtttcttacttttttctttttctcatgaaatttcttgaacaggatgaagagtgtgatctatcactttagaggaaacaaagaatttcctcggctaagaattggtgagtttgtaattaaaatctgttgtttattt

SEQ ID NO: 6401 - DNA, 1382 bp, Cannabis sativa
ttaatgatcatatttcttgattagcaatatatatttatttgtacctcaacatctttcttttggtgtcttttcaaggtttggacgacaagcctagttgcttcttcagctgtctttggaggtgggttggctcctctccatgcctcagatagttttccatacctttattttatataaatatatataattacacacagcttatgtttatcaacaacaatttgtcaatgtatgaatttaaaacaagatcattggcatgagcagattaccagttagcttgagccttcttggacgacacaacatgcttactcagtccttctgggacctaattaattaaacgacaattccatacactaaacataatcagaaacatatgtaaagaagaaaaaagaaagatcagaagaaagtttataatgatatgcatatcaatcttattagcagaaaacaattaccgtacctcagaagtggtctcgaattggaagatatcatgggtaagggcggagacgccgtgggatcctgtagtagtggtggccggcttacaacaatgtccgtacaataatcttaaaacgttacccataatctcgtcgatctgtttagagacttgagagaaagaataaagagtttttgagacaatgtatgagttaaggattaatatggaagtagaatcatttttgggattgggaatgagaattgaggaccaatgaggatggagagaaagcaaacaaggaatagactcgtaggctaaagtaggacacgtggctaatcttgattagacatggccgtttttacagtttactttggtgactttgttctttttaaatttacaataaaagaaaaagagatctaagcatgtttgtttatgtatatttcttagctgtttgggaggttagatgtcacaagtcaacggttttggagcttccattagaagatgagtaaaatatcaattttggaggaagaacacgctaaccatgtaatagcgcttaaataagcaatggctagatacgcgctatctacgcttcatgataatatttaaaaccaaactaaattataaacaagttctaattaataattattacacacaaaaaaagttctaataatgtacgtaatccataatagtatttctttagaaaagacaaaaaaaacaaaagatttttttcttcttccttgtgacttaattttctttttggtctcaagattaggtttttaatgcttgccatgtatgtatttaattgagtgagaatgagatcatgatcatctatgcttgttttctcttatccaattatggatgtgagaaatttgtttgtttcagctatttatgtcaaaaatatctcgtctgtgtgcgagttttcttctatatcattaatttcgatatggatttgtatattttt

SEQ ID NO: 6402 - DNA, 3147 bp, Cannabis sativa
atgattagattatagatttgtaaaggtgcttagcattaattactcacattttatattatacttgattttatatttgttatgggccctattttttttgaaataggcatcagaattataatttctcaattcctgagattttattaaactctaagagtattatttatgctacatatgaaatatgtactttttatgatttttgtttgacgacaataaaaaatgcgatagacgactgttagagtcatatgggtaagtttagagcttaattcttagaaggataaaacataagagatattttggatgtcaggtttaagtggggttatggtttcagaccattttacccctaggcttgtaggttacttaagttgtaagtaagaacattttgggtattttattattggttttaggtagctggtttgttgtttgacgctagccactaagtttttcttcagcttaagtttagtattgattaattagattaatcaaaaataaaagaaaaaagaaagaaattaaaagccaaactttgcttctctaccttcaccattttcgaacccagcagaaaaccaacaacaaacctaaaacttttgagtaatcttgaggagttctaactgaaatcaagtagaataatcctaaggtaagagccctaatttcttcttgttagttttcaagttgttttgttagttcaagcatgtaaaatttgttgttttgctagtgttcgaattagggttagtgcttgatggttttttagtgtttagagatgatgttttaggcatgattcttgtggttttggtgcctaattcttgggttgagcaagtttgagttcaaagaactcaaacttggctcaataatggtgttttgaatttttggggttagttgttgctgattttggttggaatttattctaggatgttattacaggtgttctagaaagtttggtggtgattgggtttgatttgagtgagattcaaagtttttggggatttttgctatgaaccggttaaccagatcaacatgtgctctagaaccagttaaccgtttcacatggcaggaccctaaaaaccgatgatttgtttgggaaatctggtctatcatttttggcaattttcaaagccttagttttggtattttcttaataattaaggtatttccatgctagttatcaatagagaaacttttaattttgaatttaggtccccaggaaggattttagcaacttgtttacccatttacgtaattgtgacatagggcatctattcatcgcgtgaatttctgttcaggtcaaccagcacacttgaattcaaaaatgaggtaagattagcatagaatgtgtttatatatgaatacgtgtatgggtaatatatgcatcctgattatgtgattcatatgctaccaacactagtacggtagcagtactgagtgcattggtacagttatgatgttcaacgggtacaatacggtgttaccaacactagtacggttaagtatgcagtgtatgtggtacaacacttagtggtactcaaggtatggtgcaaaccctactaacactagtacagtagcagtacgtagtgcatgtggtgcagtggttgtacctcaattaaagaacgttcttactcatttgttaagccttgtggataggtgtatgtgcgccaagataaaacttagtattatatacgtatgttatgtagttttcttaccgagtctgctgactcatagatattactttgtgtgtaggttaaggaaaggctaaagttgaacaacattgagttcagagcacaggggatgattgtacatgtcgagacggtgcgacctggagttttcggtctcgggacgacttgggcttgtagtcgctgttgtgctgcgacatgtctgtaaaagttattttgaatatgaatgtaaagtttaaaagtagggttccagttttatgtgaatatatgtatatgtttatgaaagttaaaaagttaaatcaaattttcatttatcattagcaaaagtgtgcattgtaattataaagtcactgtagtgtgcctaatcattagggcattacaatttcagtattagagccaccaataaaataagattttttttttatcattttaaaactcacggttcagtaagcctgtacttgtttagcagtttatgtgattagaaaagcatgttaggaagcataatagtttatgattatatatttgaatgcattgccttaaaatccgtaagtgcggtacatagagtatatgtgattgctgtgtgacctacctgacttatgggttcgcaggctaagtcctataatatggacgcccaaaaaaatacaaggagtcaaggtaacgtggtcaagaccaaaggcaatcaaggaggtcaaaatcccctgattccatgtggacgaggtagaggacatggaaggttccaaaggggtggtcatgaaaatccaccaccaactcctcaggattgggaacaaagctttgcagaaatgcaagcttggatcactcaacaagaagaaattcagaggatcagacaatagggtccccctgtagtgcttccatagcaagcctcgactactttggttccaacggtgccagagaataacctgttggtggcaattgtatgaagcctttgtatgagaggtttcacaaataggcacctcttgtttttctaggaggtccaaatgttatgaatgtcgagtagtgggtcattgtaatcgaagaattttgaattttatgggtgttgtcgggaatgactgagtgacttgtgccaccttccaattccaggaagacacactcgtatagtgggagttagtatccctcacctaagacgtcactactatgacatgggagagtttcgagaattgttcaatgctaagtattataatgaggtagtccgtagtgctaagtggaaagagttcactgacttgggtagggaaaaagtatgttagtagtggaatacacgacaaagtttaaccgtttagccaagttggtttcgagaatagtacccacagacttcagtaagaaagaaaaatacttggcaggtttaaacgtcaagataaaatatgatatggtgattactacaggcgatacaacaacatatgccgagggtgcagtgaaattcctttagaagccacgagagacttcaagtgtttgtgggaacaccattttccta

SEQ ID NO: 6403 - DNA, 788 bp, Cannabis sativa
ttattaatttttggttgaaaaaaaaagcttttgatttatcattttaataatttatgttgttagttggtataatggctcgtttttaaaagttatttagtattttggcctaaattttttttgataattatttgtaaaacggcatttatctaaatattttgattagatgtcttgattttttttttgactaaactcaatactcactctctactcagtaatagtctagagcgtgagatgttattttgcaaaaaaatattgaaaatagtttgaaattcaaaaaagaatggccagtatcgtttataaaacggttataatgtagttatataataggcataataagttaacgtgaagtcattaacaaataagttactattggtaacattggtaaccaaatagtattatcaaatgatacattcacacctttcaaaatatattcacaacaatctaaaacaaaactacccgcaattgaaggtgcacggaagtcaaaagttacaaaaaaaatgtttgaaagttataccaaatctagtaggaaaatccagtgactttggtcagaattaaaatgttgctatatttcaacaaacagttaacaaagttgtatatggtaaattacacaaaagcctatactaatgttaggtgaaatagtacaatagtgtaagaggcccatgcttgcttctaattcacaagctaactaactatgtatgtaatgtatagctccaattgtagaaagtacggtatgggcattgaaaagaatgggttactctacaattgtctaattaatgaatcttgatcat

SEQ ID NO: 6404 - DNA, 787 bp, Cannabis sativa
tttttttttttttttgggaaatggcaggatctgggttttccaataagatttggatttttttacgttatatcgatagtttatcaataatatgttgatgttttatcgatggtaagcgtaccaagattggagaagactcctatcgacaatttttcgatagcatatcgattgtttctcgatgatttccatggctatgtggattttttatttttgcttttttttcattttcaatttcttatcgatggtttctcgatgattttcatagttgtgtgatttttttttttttaatttttgcatttttttcagtttcttatcgattgtatatcgatggtttcttgattatttttatggcatcaaaaaattcacacagccatgaaaatcatcaaaaaaccatcgacataccatcgataaaaaacttaaaaatgcaagaaaatatatatatatataaaaaatttacacaacctagaaaataatcgagataccattgaaaaattatcgataagagtcttccccaaccttgttacgcttaccatcaataaaacatcgacatattatcgataaaccatcgagataacgtaaaaaattcagatctcaccggaataatcagatcccgctatttcgcaagaaaaaaaaaagcaacatactcttcaaaatgtttaaaaatttattgtgtaaaacacttaaccattattataaatgtagcagattttgtacggtcattatgcttgattcatggctttatctccaccatcgccgtcggccatcgtggtcgttaatagatttttttttt

SEQ ID NO: 6405 - DNA, 597 bp, Cannabis sativa
tgtgtaattattaaggtggtaattgcacaatctagtaattatactatattttaaatataatgtagatttgaatatgagtgataattacatatggaattttaatattttatttggcaaaaaagttaataattacatagaaaaataatattttttagtacttaatatttataatagaaaattttttagtaattacacagtgtaattacactcaattctcatgaggggtcatgagagttcgagagtgtaattggaacccctcaattacattcaattatacaattccagtgaaattatatggtctaacaaatatgtcaaatcgtataattatttcaagttacacacaaatccaattacacagtgactttccaaacacgccatttttagtgttaggaaacatgcatgtcgaatggactccttgcccgactttttgagtgattttgaaacattttttgctcgattttccatagattatgtagcctttaatcttcaatttaagtttatatgactgcttaattaataatttataaacagttatagttaacaactaagacactatatctaaagcttaaatcccaagggtctctctctctctctctc

SEQ ID NO: 6406 - DNA, 585 bp, Cannabis sativa
atatatatatatttatataatcacgatgtaggggggtttgaatgtctgaggaaggagctgctttgagtggaatgcattcaaagttagtgaagtttgctgaatatataatctttatatatatgtatacatatacatatacatgtacattatacattatatgatgtatattaatataatatataatatatgcatacataaaaagctgagagaatgtaactttactatactttgtttttgttattagtttatttactttagagtttattagatcaacacaatgtgaatataaaattcctcaaaggaatctactccttccgtgaccatgaaggcaatatcaaatttctatttttgctttattaattaattaattaattataatttaataataagaaggtgcatctagacagaaaagaatttttggtcaaattctattatgtacaactctctattctacaagtagtactctctcttagtgtacatattaaatttgggtaactctacaaatatactcttcaaagtagtgtttcggtagattttgtatttttgtttcggtattcatgataatctgtaaatttttaaaaaatt

SEQ ID NO: 6407 - DNA, 2500 bp, Cannabis sativa
tgatgaaaatatacaattctatattgtacccactttgacagcgatacaagtagcatcacatctgctagctctttttcgaagcctatgcattatcaagatcaacactatgttccccatagagaaactagaggtcctcgtagcccaaacactgggaacaatgatgactctgatcccggtcctgggacccaacaaaacaaggattcttgctacctcacccctcagcaacttgatcaacatcaatatcatccacaacaacatcaacagttcacgcaatacattcaccgtccttcagctagtccagtgccaatgtcgccttactaccaagtctattctcaaacaccccaacaccaacagtatcatcaccaaatggatcagcaatatccagtctatttaatgtcggttcctcctcaaactcagtcttacaacatgtcattccaatccaacatggctgatacgacaacatctggggtggcctcaactcgactaatatcatctccaagccctaatatggttcctctccctggcccaacttacaagcaggaaggagttcccccggtttaccctgctaaggctgcttcacctggtttggttgatccggctgcagctacaagcatgtacaagactgatgtggcatcaaatcctcctatggttcaaatccctccaaaccagtatcatcagcaggcatatgtggaatattctcaagtgcatcatcaccattctccatccatttccgtcccttcaggtactgggaattacacttgtgaatatgccaattctgctgctcttggccctgcaaatgaacagattttttatgcacaacacccggctcagtcagccgcagcacgttccccattgccttctcaatatcagtcaatgacccctgcagctgccatagcattgtctgaggctgcaaaacagctacctacagataacaatactcagcataacagaacctcataaccactgtaagcaagtcatgatggaaacatctttctggttggtaaaaaattggatcttgtattagcttttcttttatttaatttttcattgatgttacaaatttgtacagtgctgtattacaaatgaataataaagaacattgttttcttctttacttcgggaagttgacaaaaaaattctcatttagtttatattaaattgggctcttttcatatgtatatatatgtaactaaaataactctacaattaaactcatgtgcttccatcagccgaaatcaattcggacaacagctacaacattctacttccatcagccctaatcattcagcctaacgtgcaacaaaagcgggaaacgtgctcaaccaaagcctccccgaaagaaatatgcttgagttcttccctcaaaagctaagctcaagggtgaatccagcgataagcagcacatttggctaattttttttaaattgaaaagacgcacctgaatccctttttacacatctccacgagcttcacgcagagttcagcccaacaagttgcataaaaagctaaaataaaaggctagcaagggtcgaagtaagaaaaatgcttatgactgaggcaatcgcagataatactcccaagacttgaccttgtgaaaagtccaaactcaaaagaggacagtggaagaccctctttcacagagaagggccacctcctgactagctacaaacagataacctttccgaaagcgggccgaaaagcatctcggccctgagaaaggaaggctggattaaaagaaaaactattcctgagtcaaccagcaggcaaacaagacataaagggaaaaaaggttgaaacactggctattggaaccagatgtttcgaaaaacgcaaccagcccctaaactgtctaacatagctagtctctaagaaaggaacaacaaaaaaatcctattcaactactaaacagcccccctggccagggcaaagttaattgtctctgcagctgaaaaagtgtagttaaggagaaggatatacaaagaaaaaaagaaaaaccaaaataaacaaattcaataaagggttggttggagaatcatggctgcgcactacctgacagagaggaaagacgtgcaccgaacattccctccacagtctccgtgtaaaggtcgtgaacgaccttcatgttccgcataaagcaggcttggcgggcactttccccctgcaattgctgattggcttgcagtaagccctcaatctagaacttggtgtccgtaagctcgacccagagggtttcgttgtcggcacccaggtcacggttcgacgccttaacccgctccaattctgtcaccagcacgccaacctccacggtggcccattctgcgaagaaggccacctgttaagaaataaagccaagtccaaaggttgaaatgccaaaacaaaagacaagggaagatgaaaagcaagcgcttggaaaacttaccccaacggcttgcagctttgcactgtgagccagcatgaaagcatccgcgctgctataggacgccaaggtctccatgggcaa

SEQ ID NO: 6408 - DNA, 740 bp, Cannabis sativa
taagctttttcaagatgtaagctttatgcgagctgagttaacagtattcatctcacaacaagcttgtcctttctatttgtgcaagttatgtcttatatcttgtgatattcgagatgagcctcattgatggcacattcgcctcgttgctcattctgacatactcaatgtttgtcgagaagacttccttcatgttttctcttcgcggggagatcatttaatattttgtacagtatcacaaaaatagacctattcatttattatttgaaatatgagtatagcattacattttggttgttttaatcggatgaactacttcgtgtataaattataaaatgtcaatgtaatgctcccattttcgtctgtttcatttaccaacttaagcttacacagtcagatttgtactattttcgtgcttagttaaaatattacaaataagactattttgtaaaatggtacaaaagaaaaagtattttcagctcaaattcaacagtaataattaaaaaaataatctcaaattttgttattattctactgtgacagaccccagtacatgagagaagaaaatactccaaattattgagaatattaggctatacactcgagtcgggtttttttggcacggtacgaatctgaattcgggaggcacgagcatgatatggcacaaaaaaagatggacttagatatcacacgaataaaaagtattgacttcaacacgacaaacacgaatatagaaaaaaaaa

SEQ ID NO: 6409 - DNA, 631 bp, Cannabis sativa
taattagaaaaaaaaaaaaaaagggaaccagttctaacaagtctgagacatataaatcaaataaaatcggttccacaataaaataagtaaaaacatacattacacaataacttagaaactgattataattaaaaaaaaaaaatcataatataagttgcactggggtttgaaccccaaatcctattaaattatgaattaaactaacaatagaataaagaaagggaacaggttgtaacctgaggtgattgtaagaatatcattacgctacacttaaaaaagaaacctcaggtgatattgctcgaagtataagccatgcattactcagtaagaacttcaaggataggattttgctatctggaaaaacccatgcttcacctccaaagtctcataacctaaaaccaaactcttttaaaagttcataaatatcaaaaggacaccctacaaataagattataaatattgagcataatacatagattgttgacaatttacgaacagtaataattttgaaaacatataaaataacataaggtttgcacaattcgggtttagatctccaagctaaaaatttaattatcgaatcaacaataccatttagtaataaagaaaaattaacaccaactagctctca

SEQ ID NO: 6410 - DNA, 558 bp, Cannabis sativa
ttacttggacttgtacaattttggtacttaccataacagttggttccccatctaaaagggagaacagaacactcagtgaaagtgtaatgcctggccaacttgacaaaaaatctaactaggataaccaagttcaatttgatgcatacatacatgcatatatacatatatactagtgctgactttgatggattgaacccaacttgatcgtttttttttagttccttatgtaaattcaagattatcagaagggattatctaatttcccaaattggcttaaatgatctcagaatgaaatattaattgttacaatttatcacataaactattcttaaaacataaccaaaaagtacacgactcatatttgttgcaaatatatctttgttatctctatgcattttttttttctgattcattcaagcatgacatggagtgatgaggttagaataattttagagagttaattagaatgttgtaattaatgcttttggtttgttaatttggtgctatggtaatctacggcatgtgctggttctggttcattcatcctaccaaatccag

SEQ ID NO: 6411 - DNA, 619 bp, Cannabis sativa
aaatttatgtctttcaatcacaaatcaataatgcgtgtaattgttgattgtattccaatttccaaataacaaggtatgtaattgacagtaaaaagaaaaggtatgtaattgattttttaaatattacaaattttaaagactattaatgattaatattcaaatgataaatgcaaatcttaaaagttaaagaaccacactcaaactatgagtttaattcttgattatttaataaatattatgtaaaaatgcaccaaagaaactttgttgtcaaagctttggttttacataattttcgagcttgtcgtttaaatcatacaatgctgaatgtataattcatttcattctgtataggttacaagaaaaactaatccacgggtcttcacatataagaacatgatgtaaaaactaaactacaaaaaaaaaaaaaaaaaagaattgaaaatgcattcacttgtcattgttgtcaactacaactgctatattataaaatatattatgactctctatgagtgtaaatataaactgaaattacagtcttataaacgaagtagaacagaacagttaatcaatgcaatgtaagtattcattttagaaaaacaaaattttgtaggaatgaaaa

SEQ ID NO: 6412 - DNA, 772 bp, Cannabis sativa
aaatgtagtgaattgagtagacacaaaaagtaaaagtcaagcctagtataatgataaaatgaattaaaaacaatcggaattaaaaaaacacaaatcaccaaacatattataaaacgaagcagtattattaaaacaaaccttcaagccgttccttccacacagtactcttcagttgggaaatagtatctgcttgtacaagagagcccaatctgctttcaatctcttcaagacccatttcagatggctgcaaataatcagaaacgcagtgagacaaaagatttagaatttgatgtgtatcagacaattcatagatcaacaagagtgtaccactctacctcaacatcttcgggtgcttcagcagatttagaggattttgcctgtgcaggtgcatcactcttcttactcacacccgctttagcagaagccccttttttgtttgtagcctgtgaataatattgccaagcacaagaaattacaatcaaagtaacttcaactacctacaatgtaaattattataagcgttgaaaactcacagctgcttgaacaggcctcttcccactaagcatgcttgctgctgactttttaacaaatgaagtatctgatgcctgcacatattatagacttaaataatcaacatttcattgcacaccagaatattaaactagtcacccagcagaatattaacaagaagtgtgtaactttacatgcaaactcacaacagcacactgttctttaacctccataaatccataatattaaaaaaaaaaaaaaa

SEQ ID NO: 6413 - DNA, 752 bp, Cannabis sativa
atagccgtgtctgttggtctggttccttactgctgcattaacactaactttatacctcccaagagaaggctgcacaggttggcaaaggtgtgatcatgctgagtacttggaggagaagtgatcttagtttgagcatttttgtactcctccaagtaagtaattataaaaggttccacttccaaacctgaacacttgttatctacaaagagaagtttattacgctggttccaaatagcccataaaatactaaaaaaaaaacacaactaaatcatctttgttcaacacaccataacctcttaacaaaacttcattaatgtcacaagatttattattgtgggaaaaagtggagaagctagaatgtttccaatacttatttgccctggaacagtgtaaaagggagtaagtgttagagtcaatttggtttaaacagatggagcaatatgaattatcaaggatttttctcgagaaaagattaagtttagagggaagaagatgatgaaaagctttccaaatgaagtgtttaattttttgggggaatattagaagaccaaaccgacttccaccaagccttcaaagcttcaggattagaagaaccaggataggtgttattagagtttgcaaggtgattagcagagctaactgtgagaatgcccgaaggatcgtgtctccaaatgaggcagtccttattaataggattaatcagaacttgaaggacagagctaacagtggccttatcaaagaaaatgttgagt

SEQ ID NO: 6414 - DNA, 1320 bp, Cannabis sativa
tttttttatgacagcaattaataatagttgtttcctatttaattaacttaatacactttacatgtaataaatatataagagtttaggtcattgttgtgtcattttcaaattaagtgtttcaatccaaaaataatccccttagctatgtcaaccaaaaaattacgtaataaacctttttattccgtgctcttgttatggagtttgagttaattttccgcccttaccgtgaccgtgtgaactataaaaatcattgcgaatgtatcattttaggtggtaaaattcttttttgaatttacatagaactcttatattgagctgcattttcaggtgaaataatattcaatgagatgggcgtaaattaagttattattattgaccaacattaatataatgtcttgtctaatagtctcatgtagttgtgtgtttaatttatatatatatatatatatatattacttaatattgtatataatttgatcaaatatatatatcatgggcgtgcaggaagaagggtgggtggtgtgtagggttttcaagaagaaaatagcaacgacatcgatgcgtagaagcgaacacgaatcaccatgttggtacgacgaccaggtctccttcatgccagacttggaatcaccaaaacaccatcatcactccaactcatcaaacgtcgtcgtttcatcatcaaatagcttgcctaattaccaattgctccaccactactatcccaattgcaagaaagaacaatctccactcgatcatcatcatcacttaccttaccaactacttccccacgaccacttccttccccttctcgagaccccaaaactcattcttcacccttcaacaagctccgcccctaccggcttagtcctcaaccacaacaacaatgtcgtcgcagcttttcagccgtcgatttctctcagatcatcatcacatgatcatcaatcagctgatcatcatcaacaacaactaactcttcatcatgatgatcaccaaaactttcatgcaagcattgcttatggtaataataacaacaatagtagcagtactactactactactaataccaccaatgatctaaaccagcagcagggcatggacgatcaggatgatcagttaacagattggcgagtccttgacaagtttgtagcttcacaacttagccatgaagataatgatcaggatgatgatgatcgtgttatttccaagggaggaaatgtaatcgtaagacataattgggatcagaagcagcaagaaatggtacccgaaaataatgcctccacgtccaactccgccagctgtcaaattgatctctggaagtaa

SEQ ID NO: 6415 - DNA, 1474 bp, Cannabis sativa
aaaatactcaaaataaaccacgtgttgtgtagtggtaggaatttcctttaccgtctttgctggaggtggtgccatctgtataatgggaacccttgaggtcactatcgatgacccaattaaggaagactgaggtataagacttatagctaacacgtggtccttggaattgccataaatagccgaaggggtggggaaagaatctgcaccacgtgatcccttcttctcataaaaaaaaatactcaaaataaaataagtataattataagaaaacattatgatattatttaaatttattttatatataaaattttttatttaaaaaattattaattattaattgatagtccaaagttttagatttaaaaataattaaattgtaatgttgacatttagtagtgaacgaagaaagaagatttttttttctaaaaatatatgaaatatatatattttaatgcatgcatatattgatagtctaaaatctatatgtgtattttagatttgttttctaacaagtaaaagcaagaactaaagatgatagtacaaactctctatacgaaaacaatcttgagtgtaaactaataaagagattaccaaaatttgaacaaagtcttacaattttgtaaaaaaaaattatttttctcatcagtaatgactaagagaggaaataatggaaatataattttgggaaattgcaatcaaatagaattttgtagcaagtaagatagaaaatgtgtcttcaaatgaacctctaggctagccactgatagtgttttgcgatcaccattttgaaattcaaataatctacaccccatgactagtgtaagaggtctttaatgggtgtaaattggattaatggagaggacttgagttgagagttaccaaaaccatcttccaacaactaaaacttccctaattttgaatttcaaaagtcattatagtaataatctctctttattacacaacattgaatacttactccatatattacaatttttagctttaatgtacacatttatttgtcaaaccctcaatattcattatactatttgtaaatgcttcatcaaagtatttgccaaatattcagaattaattagcaaattaatattgtgttttttttttttttccataatcagatatattcaatcagtgtatatattgatcttgatcgatctttgttcataatagctatatatatatattaagaatataaactaatacaaaaactaatgattgttatcatacttcaaaaaatgcaaattaataaactcaatagcatcatactaattcctaatagaaaataaataaatggcctttccattattagagaacagctcgccgggctgcatttcccaaccggcctcttctcacgttagcacggcgtttcttgtacaccaagccaccaaacacacccactccagctgccgccaacactcctatcgctatccccgccttctgtccaccgcttaaccctcct

SEQ ID NO: 6416 - DNA, 1991 bp, Cannabis sativa
ttatctaaatttcttccacaacaatttatatacacgaattcatttataagaaccttcttgataatttcacgtgaaaaaccccatttggataaagtatatatatatttatgcatttatggagtacatttcaaacaaaacattattaacatggtcccatacatttgacaaattaatattgactatatatataggaacacgattttatcccgtgatactttcacggaatgtattctgtgatgtacagcagccgttagatgggagatttattagatctgagggctgaggttaatcttgaggtaattagagttaaaaaataacaacgtaccctgagacctatctattgtactatagaatacattctgtgaaaatacaggaacaaaatcatatccctatatatatatatattgaaacagatactatttgttttgttttttttacaaattaatgtaccagttctagactcaatctcaataattaaacttttttttttaattattattattatgattaacataggtacgttatgatcaatatggtactattgattatcatcaatctcaatatacaatatataatagtttattttttgctaataaaaataactttgaaaaaggtctactatgtataatatatataaatatatatatatacatacatttatagcacgtactatcatgcatgttgagtgtccaaaaacattcctatagtcacattcatttacctaaacttatatatttaattttatacaataattaaattcattttcaacatatacatatatatattatattaataattaataaggggttaacttaaactcaaaacttataattatctctatttctaattaaggtgatcaatgtatatatatatattgtatgatataatattgtatatgatatatatttatgtatatatattattctgatcatgtttagatcaataatctcttatgtcttgttatcaagtagtttataaaattttgatgatcagtacatataatatacacctatatataaatatatataaagtttaactagtatatatatatagcttcattattattggtcttgaactacatacaaaataaagatgtcgagtccatatccacaaagatatttgccctagacattatagaagtggggtactacactatactcttatatatatatatatatatatatgcgcattatataattaattgttgatatgagataaatgtctgcaccgcccacttcccttgaaatagatatgtaagtctaccactgccattaaacccatctcacgtttctatcatcaaaataatatatgtaaatgtatatatacatctaatgcatgcatgcatattgttacatacatatatgtatgacattcaaccatacatatatataataaattgagatcaaattcaatatctattttaaatgggaccttattcatttagtaatggacaatatatgtcgagtgatcttattatagaaattgatatgctataatcttagaaaggatatatgagttatatgaattaataattagtagcacacaatcatatatttagttacatgtcatggtatatatatatttgtatcatgtttctgtttaaatataatatataaatatatatgtatagacttgaaaaactattgcataggcatatgatgtattggatcatattcactaaatccaatccaattatgtgttggatattaaattttacattgaaatgttaaattagatgggttctattctaaatgtattttcatgtatatttatttatattagttcagatttatattcaatacattgagtgataagattcttccatttagattattttatcaaattggatatatccaatctaataatattaataataaggaaacttttaatattaatttctatatatataacataaaatttaattatttatctaaactaaataaaaatactatatttattaattcaattagatatatatggttgtattagat

SEQ ID NO: 6417 - DNA, 880 bp, Cannabis sativa
tgtaattaataatttgcttgtaaataaaaataaaagaaagaaggcgtccgtacggtttagaaaattgaaacagaagcacccagtctacctgatactgatagatatgttttatttttgtcacggccggggccctgaaatccaaagtagtacggtttgttctttctttattattatttttaataaattacattttatattattttgagtttaaattaagtaagccaaaaataatgctaataaattctttaattgagatcaaaattatttcatagaagctaattttgtgtgcccccaattaaataatagcagcagctagcctcaaaaattaaattaaaaagaattattgaagggcttgcttattggagagccacacattatggatcaatgccgccagtcttcgaagacagcacttaattactagcaatatttagcatagtacttcattataccaatgcatatgcatataacatatataacttccatggaattatgtatatatatcacatgtatataattaatgcatgacaaatttaattaagacatgaaatgtatgtttaatttctctcatgcacaatgcatgtgtatatatatatattatattattatgtatatatattttggggtagatggtggtgtaataatttttactgaggggttaggtagtagtagtaggagagggatggggggctatacacatatagactagagactggttcttttttttttttctttttctttctgagctagataaggttgactggttcagttgaactggacaagttttattattgagcattgttaaatgttaaacgccatactgatcttaataaaataagaaatacaaacaagagatataataaggataataacattgacaaaa

SEQ ID NO: 6418 - DNA, 1276 bp, Cannabis sativa
aactctttgtagtgaaatggttttgaaagtggttaattacccaattgtcaattttgtaatgagtgtttaattcttaaataattatttaatgtattatttatcttcatatatttcttttctagtaaatactcttttaaaaaattgagactttaaaagagctaatttttgaaaattattttctttttctctacttttttttaatatatcaagatatgccaattgattcatttttcattttttttttatttattttgagaaatatatcgattaatttttttttttaatttttttattgattcttttcattaagaaaaaagaagaataagaagacaaaaaaactaaaaaaaaaggaagaaaaagaccaaaaaaaaaagtagtttttacatgtcttctgttgattttattgatatactagtataaatataaatatattttaaactaaatagataaagaataaagtctcattcgaacttttattttaatgttttataatttttctcaacttgaacccacaatttttttgagatatattgtaataattggtagttccttaattcgtaaggataaatattaggtaagttgtgcaatttaatattgtttgagaaaagttaactataatgattcagagactgtgtaagtatgagactataccgtagaaaatgacttaaataaattgataggtactacttatattaacagagtgtatcttattttcagagcaccgtttaagaactctaaaactaaacgtgattgacctagaataattttagtatggataacgttttgaaaaactttataaaaaatgtgtaaatagagacaaaacatactagaaacattcatgttgctcggtaaaatcagtcattattccaaaaaaaaaaaaaatataactaatgtgatgtactagttagtgggagacaacccaatgttacatatatagttggcttgtactcaataaataaatttcatttattttgatttgttaaaagaattatgaaacacatgtgtattataatatgctagtaggtgtaggtatattataatttaaacaaaagagttagtaaaaaaaattaagaagtcataataatttgactataaaagtatgagtaatattagatacacacttaaattttaattatatggttaagattaaataaatattattatgtgtttaatttacaatgtataattaccatcttaacaatttgactatatatatacatttttttattctgtcaaaataataagagagaagttgcatttaaaaaaaaaaaaaaaa

SEQ ID NO: 6419 - DNA, 565 bp, Cannabis sativa
tgttaaattaattttatcaaaagttggacaaccaaatagtctagaattatctcttctttttatttttcaactacatagaaaaataccaaaattgttcatcaagagtttcatatgaataaccaattagtagatttttttttttttttagttattacaatttgttcaaaaatgacgaatcaactaactgattcagagtgtgatccaaacataattttctgttagtggaaactagtgatggaaatttgacatgcggggacaggtatccatctcggggcagggattaccctccttaatgggtaatggggtggggcgggatacaattttatatacgtgaagcgagtttgtgcagaggcaatactactcatcccatatttttgcatatagttttctaattattacctattaaagctatgggctatacttacaaaattgactattaatttgttctaatttactgtataataaagattttttaataagtacaatatttaattattttaaattcaatatcttgttttttatgtttatttggaattacattgtacattattttcttcttcttctt

SEQ ID NO: 6420 - DNA, 578 bp, Cannabis sativa
aggtggtaaaatttgaaactatatagctataacttttgatgaagaagaactactcatcaattaatttatttatagggaaactacacgaacttagtgagaagaaagggtacaattgtctttccaaaagaagtaaatggcatcccattggctggtgtagaatttggttgagataataattataataatttaaaaaaaatgtagacataatgagttcgaaaaattatggatgattgttttagattaaaataaaaggatcaagaaatagtgacaaccgttgtaagcggcgtttataatggtcaaatgggataagagagagagagaatattattgggttagaggaaatgggtaattagatctccaccagatataattttaaacactctgaaaccgaatcattactgtcgctaccgctcaaccgctttggactctcgaatagaacggtcaaacctgtcctttttccttcctatatgtctctccttctatttctcattcaaataaaagtaattttgttaatttatcatcatatttactctcatatagataatatacattttggtgaatgaatatatattctagtt

SEQ ID NO: 6421 - DNA, 834 bp, Cannabis sativa
ccagctctggccatcccagcacctctacttcaagctctagcgcccattgtgattcgccgttcacagaaacaactatgcttactggcgttctcaggtcatccctgtcgtccgtgcgcatgaccttgatggtttcctctttggaacacgattgtgtcttcctcaattcatagatggtccaaccgaaaataacccagatgatccacaataggttaatcccttctatactgtctggattcgtactgatcagaatattttaagttaattgctaaactcaatctcagaggccatgttaggccatgttcttcgatgtcgtgtgtctgcagaactgtggctgcttcttgagaacctcttcaccacactgtctcaagctcgcatcttccagctttaatttcaacttcagtctctgaagaaaggatcaatgtcaatccatgactatgttctaaaaatgaaatccattgacggactcaccactgctggacaacccttcaatgatgacgatctcatcctctatatactcggcggactaggtttagagtatgactcggttgttgttaatcgcacatatagaggagatcgtatcacactttcaaatgttcaattcctcttacaaagccaagaaatgaggattgatcagctcaatactactattgctgatcttgtagcaccatcttccaactatgccacccgaggtagaacaaattttcctccctcaaaccctggcagatccaccaaccaccgcagctatggacgtggtcgtggccgtggtggaaaccaaaatcgtgttgcctgccaactgtgtaacaagccagaacaccctgcatcaaaatgttatca

SEQ ID NO: 6422 - DNA, 505 bp, Cannabis sativa
ttgtattttcaatgtggataacctgatgtggttctgtagactggaatgctcagttttgttcttttatgggccctcaagtagggccatcttctgatgggccctcaagaaaggcccatattgagggagcccattcaatatacatcacccgtcttgtgaacacacatgtcatttttttttgtttttttgacgaaagacaatgataatgttattgtgtacagagggatgtgatgattattatgggtaattgatattgttggcacattaatgcacataaaaaaatatgtgtcgattattatacattatatagtacatgttgagatttgtttctataataaaaatttagaaagttaaactgttttgtaaaacttaatgggtaaaataatatgacttctacaaaaactaagtttaaaaaatttaggaatataattaattaagtgttggaaattagatcactaaaccagttcctacaaaatgctacaacatcagtttagcacatacttttttt

SEQ ID NO: 6423 - DNA, 1227 bp, Cannabis sativa
ccctcagagatagaggccagaccctcagaggccagacttcggagatggaggccagcctttgaagatggaggctagccttcatagatggaggcaagcctttggaggtggaggctagcctttggagatgggggccaatctttgaaggtggacgccagtcttcgaaggtggaggccagccttcggaggtggaggacaaccttcggaggtggaggccagttttcgaaggtggaggccatccttcagagatggaggccagctttcagagatggaggccagacttcaaaggtggaagctagcctttggaggcagaggccagccttcggactgcttgttgctgactctccatgttggtatgtctgcgcatgttattctttgggagttttgatagaagagtgaaatatacacacttctccttcttttcccttggacttcatggcttaaaggaattgttgaatttccctattttgccattatattggtaaaagccatcattattgtgcttgcctccaccattctcattatttgagaattgatagagatcacttcactggttggcatactggacaatgtttggggcgctatgaggctatgtgtttgttcatcattgtcctgctctcttgtctgggcttgtcgatcaacttcttccaactttatgaagccatcagcttgctcaaggaactcttccatgttgttcgtagagatcctctggatttctttccaaaagtcactcaacaataggctgcctctaagtatggtcgtatatcagaaatcttctgtcaggcctttgaccttggtggccttagccatgagctattgaatgtagtccttcaaaggttcatcttgtctttgctttattttgaaaaaagatcctccagtcgggcaggtatttgtcttgaaacaaagaactgagtatagaactcttgggagagctcttcccaagaattaaatcatcctagggccaacttgaaataccattgttgggctatttcagttagagttgctggaaagattcaacagcgtacatctctggatacttgttggagatttgtttggatctcaaagtacttcatgtgtactaggggatcttcttttctcgtgtacatcttccaagttagcatcttaaacttgggtaagggcaaagcattaatgtatgctgagaacggtgatccccttgacctgtctatctcatgttctaaacttgggcaggggcctggttgattggccttct

SEQ ID NO: 6424 - DNA, 515 bp, Cannabis sativa
agtctcattaatgactaggttactactgaggatgagtcgaatgacttggttacatttcagtcaagcttaaagaaatgcagtaatatctctaaatcatctccagacaagattgaactccatacaccaggttctctgactgctaaaatttgttttcgggaaactcctaagtcagcatgcagaagctctttattttctccaggagaagcattttgggatgaagcaattcaacttgctgatggcttgtgtcatccaacagttaacttctgtgcaaaagctgctgatgaagttggttttgcagaaagccggtgttgtaaaaagaactccgataatttgatagaaaagataaatgaaggtgcaagtactgctccatctacttccttacaagggttgctgggaagacctggaaatgaattagaagaaaaatctcattttcctgttaagcattttgatttcttgtttgacgacaaaaatttggatggaagtattgtacgtaatggtgacacaaataatataaa

SEQ ID NO: 6425 - DNA, 1035 bp, Cannabis sativa
gaaatgaccatatctttaattcccaagactgagtccccgtttagtgctattcaacacagactgattgcttgctacataaaatttataaatgcatctcgaaactgatttgtttgagactagctgagattcttcctttcttagttaatcacatgcaaggagtttttgttcaacaaagaacaatagctcataatattttgattttcaaggatcttatctaaaattatagctggaagaatgtttctcctcattgtgctattaagattggtcttagtaagatgtatgacacagtggattagttgtttttggagaagtggcaaaacttgctatgcttccctgctagatttgtgaactagatcatgacttgcatcaaaggtacttcttataacttaatgctcaatggaagactccaaggcagttttaagggcaagaagggtcttaggcaaggggactttatgtccccattgctgtttgtgttggtcatgaaatttcttactataagacttgtgcaagaggctcaagatggtaccttttaatttcaccccctttgtaagagtctcaatttgattaacctttattttgtggataacttgattttatttagcaaaggcacaaaaaaagctattatatatgcacctcaaattggctttggatgattttggtaagattacaggtcttttgattaatcttgctaaatcccaaatattttttggtggtgtggagcattctattagaaaagatatttctaatgagattgggcttgaggagggtcattttcctctcaaatatttgggggtacctatgagatctactaaatggcgcatggaagattgtgggattatcttaaatatgattaaaaagaggttgcatacttgggccactagaaacttatcctatgttggtagaatgcaacttatccaaactattttgctgagattgaggaactattggatgaatattttcattctccctcaaagcactgtaaaaaaaaaatagagaaacattgcaggcttttcttatggggtcaaaatggtaata

SEQ ID NO: 6426 - DNA, 3003 bp, Cannabis sativa
tctgtatattatggctttaatgccttttcttctgcaattaatacaatagggaaaattccctttttataagcaaaggaatacacagaagtctatttcctattggctgagagaataacagaaaaatattctttgtggcccacacaggatatcaaatcattccccaatcattgctaacggtaatgagatatgcctagtcagcatccttgattccatcttctaattgggctgacattgggcctctcatttcaacaattactatagataattgttttttttaatatgtgaaaatatatgtataaaaatacatgtaagcaattgtgttaagccccctagctagtctcaagagtggctccgtcagtgattgatgaatagtttgaggataaagtcacactcatgcacacaagattcgcttctagttatcagttatatgtaactaaattctttttttatattaataaattcagtaaatgaaaggtacataggggaccttcttatttagtaatgactactaatgtgtcactataactggaaattaagatatgaataattatttaagtagtagcacagaggcactattacaagatcatatggcagcatcttttcagcttatctaattgttgtcataccagaactgcttttgaagatggttgataatgtttttgtcaacctggaaggccttggcaaggacatcagggttgatgggagggtccgaaccgaacacagcatttgcaatggtgatcactcctgcattttggctgctgagagcagcaaaggcaactgctggtgtgtgtccttgattgaattggaaatgaatcaaaccaattgggaacacgaacacatctcccttgttcagaacctttgtgaagaggcggtttttgccatctttttggttggatgtcacaaacccaacgtagagtgttccctcaaggacgaccaagatttcagttccacgagggtgagtgtgaggcgggttttggccatatggtgcaaagtcaatgcgagccaatgttattccaagagtgttgagtcctttaatcatgtcaacattcacttgtgtcacattggatccaacagggttgtgtgtgtctcttggagtgtccagcccactgaagaaaaagtcttctgccttgacctgcattggatccttacagaattttccattcacaaacactgtaaaataaacactttttaattagttagcatgaaagaattgcactctatacataaactatgttaaataacgagtaaagagagttagtagtgcgtttacatacaagcattttcagggtcgtctactgctacacaaaagtcctgaagaggactaggatcataggcagaggcaatggatgatgccaaagcaaatatggcaagtgtgagaaggaaatgagcactcttcatttttggttaagtggctaaggtctcctaaataattattctattctgtagttataagcgagttattgtgatataagctagcatgaaaccaagtctatttatagagttattttctaacctgaacctactcctactccatcttttcttatcgaagatgtgagtaatacttggaaaaatgtagtcttaaggttggtatatatttaataataaaacaaagaatcattcttcaaccactatgaagaagtttatttcatttaacttgatccgcaatcgtttgcttcatacaattaccaattggtaaggaagtggtcatctttctctctactagtattacttacctatattaattatgtacactattagagcttatagtttagtacgtaaatagaaagcaaaactaatctaatgatttttttctttttagtagtataatgcaaaatattttagcttaaatatcataaagcttttagtgtattttaacccacttatttgattttaattattatagattaataatatatgactacatgcctttagaatttagatgtgaaaacaagaattctcttaattagaaacaattaattcaatgtcttgcttgaggagcactctacagaatttgcagatatatatatatcctacatatcaaagcaaccatatacttttcaacttacaaacagtgcttttctacaatcttactagtttttctggccatttttctacatttgatctgtgaaagaaatgtgctacctaattggctaagttttcttgagttatgtcttttaagacctcaacaaaagatgagctatagttcttcccttcataaaaaaacatgaacatgatgaggataccatttgatgaggctagctgtagcaaaagaagaaaagaagttgcatcatctagcataactacatgttctattatttgaaacatgcaaattaatttactactagtagaaactattagtgataagtaataaaataacaacttttttaatggttaaaatctctatcttcattacaaatcttgatttttatctatctatatattatatttatctgcattgaataaacaaccttcattttcctgtggaaaaaagtttcaactggttcatattcaaattcaaagaaggtagttagagctttcacttagataagtatcatatttcccaaattgattttaaaagatgatgtgattgtttacttaacaaaacatcgtatatatataaatatattaataacacagcacaacagttatagaaagtgtttaaccattaatagccaagaacgtggttttgacttgtttgaactttcagtgaaagagtaatttattttactgaaacaatgacgtctgggctgagactaaagatttatctggtgcagcctttcaaagaacgtgtcaaattgaaacttcttctaatgtatatttttctccttatacgagtattttcttctcagttcctattttactttttatgatgttttaatttgtttctactaatttcattttcctgttgtattacttactagcccattaaaataaaataaaataaagagtatgcaaactattttgcacatggtataaaagactctgtatatcactaataaaaag

SEQ ID NO: 6427 - DNA, 1487 bp, Cannabis sativa
attgccaatgagctcatcaatgctatccactatatgaaaaaaggcaaacatggttgggctgctctaaaacttgacatagaaaaggctttgtcaaggccactctcctttgtgtttgtttcccttgcaattttgtttctcttatcatgaaatgcatttcgaatgtgcattatcgtatatctatcaacaacactctctctgaggtcataaccctaccaatagaattagacaaggagaccctctttctccctacatttttttgttagttgcagaaggccttttagctgctatttgtgctaaggagcatagccataactttactggtcttaggatatgtagaaatgcccctatcatctctcatatcctctttgttgatgacaacatctagtttactcctatcactgagagttccagtgaagccatcattgatattctctatttatcataatgctactgggcaaaccataaaccttgccaaatcttccattatgttttccccaaataccacattggagctaaaaacaggttccaaaactctcttggcctatgttgtgagggctttgtgagcaaatatctttgtgtcccccactgtactggtaggatgaacaatgtgcacttcccctatcttgttcagaaggttgcctctaaaatgaatgtttggaatggtaaatttttctctagagcaggcaaagaaatccttatcaaggttgtggtccaggctattccctcctttgccatgtcctgtttcaaactctccaagatcacctgtcaatccttgcagtgtttgatctctaaattctagtggggatcctgtagcaataagagctaaattcactggaaaaattggtttaccctttgcacttcaaaattttatgggggtcttggtttcagatttctcaccaatcacagtcaagcccttattgccaaataagcttggagaatttggacaaatccatcaaccctgcttcactctctcctcaaagctagatactttaaaaacaatgacttcctcgatgctccaaaaggtcacttcccttcaaatacatggagaagcctcctttggagaagggaattgctaaagaaaggcctcatctggaaagtgggaaatggtaggttcatatccttaaaagaccataactgaattcctggttttcactccctctttttccttaacaactttgaccctactgatcagacaatctcctctttcattgacaataattgcaactgggacatttccatcctccaacaatcattatcccattaccaggtccaggagatctttaagatcccaattgatctcacttaaaaggatagcctcatgtgaggttttcaccattccgggatcttcactgtcaactcgccctaccacctagccaactccaacccctccctactttgccttcctcttccaatcctaattgctataaaacccagtgaaaagcagtctagaatgcaaaaataattcccaaaatgaaacatttcaccta

SEQ ID NO: 6428 - DNA, 2532 bp, Cannabis sativa
ctaatgtgcaaacacctctccaacaactgatgctcctggaagagttgaccaaaaagatcctggaacctcaaatccacgcaaggataaagggaaagagatagtgcctgagcagaataagaaagaaaatcatgcttcagggcagggtgaccaaactaattctagaggcacactcgcacataaacataagactgatgccaaaggcaagaagtctacttcacagaaggacaagcatcgtcacaaaaattccagtagtcaaagttatgatgttgatgaggtgtatctaatctcagacagcaacagtggaagtctctccacaaatgatctttgaagaagattaattgagaagaaagagaaagcaagaacaagaaaaggcagaccctgcaggaacaatttgagaaatcatatcaatttgatggatgcgggaccacaacattggagcagatcacactttaggaccactcctaaatgtgatatacttgtcaacaacatgtatggaggatttaatggtaccaagtccatattgcagctagagataagcccatcttatctatgcttgaaaggattcgaatgtacttaatggaaagactttcttaaaatagatgctctgtagtcaatgtggccgtctaacatagcaccaaaagtttcaaaacaactcgagaagaacaagattgacgcacgggctcatttgtcgacactttcagaaaatttgattcaccaagtggagaacatgtatggtagcatatttttggtggatttgaatcactggatttgttcttgcaaaaagtgggaattaatgggattctttgtagtcatgccatgctctcatattcaaagctcataaataaccaaaagttactcgagctagaaatgaaacagatatatccaagtattcagttgcaaataaatatattttctacttgaacattatactatcaaagcttcacacataaagtataaagtaattaatactatcaaatgactttcatctaatcgccattagaatttagagtccaaaaaaaaattgtcaaaagcagaatcaaataaataatcataaaaattcccataataaactttaatagctctaacttagatgcaaccagtataaagaaaagaaataaagcataattacaaatgtttcagtaaatataaatgattactcatttttaaaaattaacataaatataccaaagataaaccaataaagaaatctaactcaaattgaatgacagttaaactattagaagaatagaacaaatagcatcgacacaacatacaaacactcataattgtgagaaatgactataaagcttcacatatacaagtacggagtaatactatcaaatgacttttatccaatcctcattagaactttgtgtctaaaaaataataaaagttgtcactttaatattaaaccagataaataaacataaaaaaccttcataataaaacccttacttagaagaaaccaatacaataaaaaagaatcaagcataatcattattgtttgtgcaaataccaaagattactcgttcaaagatcaatacctaacaataccaaacatttcaatataacaatgaagatgcaaccaatacagtgaaaagaaaatcaagcataattatgaaataatgcatgtgtttagaaataatgtaggtgtgtgtatggaaataatgcaggtgtgtgtgtgtgtgtgttgagattgttggcagatttgaatggtgtgtgtgtgtgtgttaagattgttggtaaatttaaatggtgtgtgcgtgtttatactgtgtgtgtgtgttgagatcgttggcatatatgaatggtgtgtgtgtgtgtttatattgatttgcttttgatgtttattgatactcataggttaatgacacaccacttgaagaccctggacactacgctagaaatacagatcctacacctcatcaatcactaatcagcaactgccacaccttcttcacaaccaagcaactcaacaacaatggtacaatatcaaagtcctctgaaataataatttattttatacttttcgactgtttgtgcattcataatcacattttgtcattcattgtagtaaaggatatcccaacaaattgcaccaactcactgagggattatggactatgcaaacaacatcaaagactagtggtgaagcattttgagttgtattttgagaagtattttaagtagtattttgagtagtatgaaggtcataccaaagcatcaacttacaatattttaagatgtaattggtgtttatatgataaaaattaatgaaatttcatgtcaaataactttctttgtaaagtcaaaagttacatcttttatgaaatgtaactggactcgtaatgttgttatgttaaacaggatgttttagttatgggaatttgttgaaaagtgtcatgtggtaacatgaagatctatttcaaagcacaattttacatcttttttttttttcaatttatgttgtttgaacagaaatggtactattttcagcaatgagtttataggtttatcatggaggattcagtt

SEQ ID NO: 6429 - DNA, 1221 bp, Cannabis sativa
atatatataagccaaaacctcccttcttcttcaacaatggcgggaatggcgaccttcttcactttctcatcatcgtcttcttcaatcctcacctctcctccatcactttctttctcttccaacctctctctacttccaataccgactttctctcgctctcttcaatttcgccacccaacatttcccagttacctcctttttcactctctcttttgtgctttgatttctcattttcacttcgatttagcagtgaagtaataactgcttcttttttctttttcacaggaattatggctttgtctagtaacgatattaaggttggcactgaacttgaaatcgacggtgctccttggcgagttttaggtaatgtcattggttttggttatgagcagttttgtgatttttagattggttctgattttaactttcgtgattggataattgtgtgttgttatagttgaactgtttattgtagtgattatcaggaattcacaattgagaaatggatcatttctcatgtttttcttgtactgttaagaatttcatatgtactaatcatcgactctcaactatcaactggataaattaacttacatttcaatctaataagagagttgattcaagatagttaaatcaagtgaagagccatgattttctgtcatttgggttcaatttcttatagcaatttgctagagtttagatataattcaaattaaagttctgaatactttattgaaattcttggtgtgtgaagtggtgtgatattccttacaaatgataattattaaattaattcatgttagacccgatacttgattacactaatagtggtatgacacattgtgttaatgtctagtgttagacaccattagtgtcctgtagcacttttcttctaaattcctgtaagtcttgcattgtgtggtagtttatagcaacttattggcttccatatctgcagtgtgtttaaaacgttgaagtacttctttctgaaaaatctttgcctttttagtgatttgtatatttaaaaactattcattgtgttactgaattgaagttaatatttgttgcttattgacatttatagagtttcttcatgtgaaacctggtaagggtgctgcatttgtgaggaccaaaattcgtaatttcataacagggaacactatcgagaaaacttttcgagctggagtttcggtatagtcttttgacctatgaatttattta

SEQ ID NO: 6430 - DNA, 682 bp, Cannabis sativa
  modified_base (334)..(341): a, c, t, g, unknown or other
atattgtaaattatttaaaattataatatacacaaaaataaaaataaattatactaaattattattctaaatgccaaaacaaatgaaaaatctatcatgtctttgaaacgcaaaatcatcctataaactataatataaatatttaactttttttaatatttattattaataattaaataaaaaaaaagacttttttatttttacacttcaaaatagttttttttgcatttttatgaaattctacatcgaaacccctattgtttgcaacctaaaaaaatcgtatagaaacccttattgcaactagcgctacaacactttagaaactcaaaccgtnnnnnnnnaaaaaaaaataaaaaaatagtataagggttattcctcataacaaaaattatgtagtatttatataaagcatagcgtataaacacaattgtgttattttattttaatttttagagagagagaaaagattgattaaattgcagaaatggagaagaagaaagtgatggtagcaattgatgagagcgattgcagccactacgcacttcaatgggcactcgataatctccaccacaccattctcgattccaaactcgtaatcttcaccgttcaatccaccgtcgatctcggttacatcttcgcttcatcttacggctctgctcgtacctctctttctctctgtgtt

SEQ ID NO: 6431 - DNA, 954 bp, Cannabis sativa
atcaatcttactaccaaaaacatgattcaattgtcctgaaactgatgaagacatttggtacatgtgtaaaatgtagtttgcccttcatcggctgatctcatctgtctggtataatacgaagcttcatcgttaccacatttttcacatttcttcttgattttcgatagctcgactttctcctcactaatttgtgatatccctagctcccttttaatgtcctcagcagtgacagtgtaagatatttctcttccaagaatatctttggcttttcgcctaaactgacaagagggacattcggcatacctagctgatttcataactagcattgttccacacaaatcgcagaacatgaaatctctccctctagaataagccattaaagctctcagctactgtgttttttttcttttaggggtttgagtgttgaaatctccaaacaaggttgctctaaaacaaatcattggcacacatgagggatttagtataatcaattggctagtttcttaaagcaattatgaaccaaacaaatagagcatatgaacatacaatttgagtgtaaacaagattttacatatatgtattcagagcagaacaatatacaaaattattaactttacagattggaaaacaaactcagaacacttataaaacttgcaaaaaaggtaacaaattttccaaatatatgatttaacattaatcaatacaaaaacatattcctgtttttctttctaaactatcttataattagaattaatacaatgtattcaaaggtgtatttaagtactttgactatgatagcaccacataaattcgaatcttggtagaaacgatcaaaagcaaagctttctcttgcactaaccaaatcccaaaactgtttctagaattacattaacacaaatatacatatatctatcatataattgagaaccaatttgtaaaatttattgataaaca

SEQ ID NO: 6432 - DNA, 1056 bp, Cannabis sativa
aacaatttgtgagtttcgtggggggtcctcacgtttatgaacaatgtcctttttacagatgttaacaatattcccatggagcaagcccaagaaattgggaacttcccccgctcaaacaatcagttctctaattttttcaaccaggggtggaagaatcatcctaatttctcgtggagaaataatattaatcaacaacagcctcaacaacaatctacacaacctcataagttcgctcagtaacaaaattctggtgggagttccaatcctcaatctgatgctctaaaccaattcatggctgaaacttagtcttctatcaaaaatttagaaactcaaatggggaaattggctacattaatggccctaggtaattttcctagcaccacaaaagttaatccaaaagataactacaaggcaatcacattaataagtaggagaactacgaggagccgagtgagaagcaactagttgaataagagggtcaggatcaataggaacgagcacaaatggataagaagcatagatttgatctaaattatactttcactagtaaattaatggtactaggatacaaagtaactagaaggctaaaatgataatttggccaaaactaattacaaactgacacaaggatggttaatcactagaattgattatatcaaaggatactgcagtaacactcaataaaaataattctataattactaagaggtcaattccatatttatagtgaagtaatcatggaattaataaataagattatttgactgatgagatccaataaataaataaagacttcaaagccatggctgaaaaaaaattaagtgaatcattaaagaaacttcaattacatggtggcgagtatttggactctaaatttaaacactattgctggaagaagggatcttacccaaactttcaacacttggaacacctcatcagaacggtattacagagagaataaactaaacctacttagacatggtcaaatcaattatgtgttactcaacactgctactaagcttctagggatacgcacttctagcagctatttacatt

SEQ ID NO: 6433 - DNA, 1398 bp, Cannabis sativa
agctcaacctctgtgcatttattcaatatgtatcaatttgccttacgcttgaagagcattagtaaggtgtcaactctcttctgacctaatggtggtttgacatgcgtgaacacaaaagattgttgatctaacatgtttgggatgacgtcgacgttgacgttgtttcattcaggatgatggaatctagtttccactttttaaaagtatatataacaaaacgttaatgcactgttaatcacataagattcaacaatagatcttctcgacgggtatgattcctgacatattatttatactcatacattaattaattgttggatgagatacatttacatgtaatgtaccggtctacttatatgacttatctaggaaaatgcataactacatggtcatggactattatgccaaaataaagctggtggatattaataagtgtcatctagtactacactttccatatataatttgagaaacctctaaaatttgcatcttactattagttgttgtgttgaatatttggaaacattttatttgttgtttctaatttataattagttacttcaggattttagttgtattaagatagtaagattgataactttattagtttgtaatctaattaagtaatttgtaatatttaatttttatgtgatcgttgtataatgtatatgctaaagctaaaatcgcattctataaattaaaatctaattatttaaaaaaaacgaatattagcaatctagttggattagatcaaattattacaaaaggattaatgaattataaaattagattggatgatcacctctacttaatatgataataaatttgagagaagattagaattttaactaattatacctatattataataagtttgtaactttgttttattattttcttttcctttcttatatgtaaattataagtgtatgtgtatggggggttattgtggagttggcaaaaaatacactctaagtatggaatgaatttaattaagacaaatatgacaatgtttattgtaactatagcagaaattagaaaaaaaaaatcaaaaattttaataatttgttacacacataatttttttttattattgtaactaagaattaggcattataaatttatttagatttcttaaaatttgtagaaaataatacccactttggcttctatcaataattaaaaaaaaaaactatattagttctttcaatgcaattttactagggagggacctcatattatgaggccatgattggttttgtaaaaagatgatttttttttttcgcttttggcaagcagattggatgataatatatatttagttataattatgtaataattaaatgcatggttgttattaatttatatgcaaccacaagttctatatatatatatata

SEQ ID NO: 6434 - DNA, 848 bp, Cannabis sativa
ttcatattaaagtttgtaaccgactgttggtgagtatttcgggtgttgagctttttttttctttttacaaaaaatgtaataacttcattaagatacaagttacaagccaagtcttattagtgtgaaattttaccattctatactacctctttatctagtcttaaagttctctttcctaagccatgaaccttgtatttgcttgtctacacacatgtttaagagatcaattacttacaaaaccgaaataattacaaatttggccgtagaccaatactaataaagactctaaataatttcagctacaataaaaataccaaaaacagttttacaatagaaaagataataaacagattatagctcaatctgaattcagaccaagtttgaatcaactttggacaaaattcaaacctcaacctctacaactatataaaaccactactgcatgtgaagatcattacctgcatgagctatactgttgtagagagagtagagtgagaagctcctcgagctcagttgtaatatcttaaaatgagaaatagattaataattctaataaaattaattaaatattaatgtgatattatattattatataattaattatgtgttatatgtgaattattgagtgtaagtctctatttatatgataagggtatttttgtaattttgatccaataaaaaaaattataattttactatactagtgcttttattttatcatatacaatttccatcaaaataatcaataaatcacacatactcacaaaaataaataaataaataatgacagtagaagctctcaaaattatgtcttaactaaaaaaaatatctaatacaaaggctaaaag

SEQ ID NO: 6435 - DNA, 826 bp, Cannabis sativa
cgtcctcaagttctttctgccattcgaggtcatcaactgattgattacatctcgtccactgcttcaccacctcccaagtttctttctgacaatgatcgtgctactcacaacattaatcctcagtatgttcaatgggagcagcaagatcaacttctctattcatggttgctatcctctatgactgaaggagtcttaactagagtggttggcagtgagacttcagctcaagtttggaaaactctcgaggtatatttttctactcaaacctcagctaaaattgatcaatttactaatcaattgcagactataaagaaaggatctctttccatcaacgagtatcttcttcggatcaagcctgttgtagatcgtcttggatctgttggacatgttgtttctgttaaagaacatatagcagctatattcaaaggtcttccgtctgaatatgatacgttcgtcatctccgttaattctcgaaatcaaccatatacggttgctgaaattgagtcgcttttgctctctcaagaacatcgaatggaaaatcatcatcgtgatcttgattctgtcaatcttgctacaaatcgcaatccaaaaggccgtggatctggatctggtaattcttactctcctcattctggttttgattcaaaacaaaacatccattcttatgcttttcgagggggtcgttctgtttggaatccctatgctgttaatcctagaggtgttgcgtcctcttcagctggttttcgtggtcctccaccaatttcacagggatctggttcccctgtttcttctaattctcctggttctcgacctatctgtcagttgt

SEQ ID NO: 6436 - DNA, 977 bp, Cannabis sativa
tgcaattgtgcacaagggtgttagctaggactttgatgctatatttgctgcgttcaacgttttcaagaattttctgttgtgcatttgctggagggggaaatgtttttgcctacctcgattgaacctgcttctagttttcttatggatgaggatgtttggtgccttcaggtggatgcttttgtggtacaatcagaagctggctttgcaatgtttcaaaagagttgtgatcaggtggatgaagctttggttgcagttggttgtgcaaaggtatcgacggtactagaaggtaaatttcgtgctattgctcttgccttgcaagtttctcgagacaagggtatcaatagactttgcattgagatggactctaaagtagcagccacaactttcaagattggttatctcctgtttggatggtgtacttatcctttgttttctttttgttttagtctttttaagtattttaatttggttgttatggtgtctgttcccaagtctgcaaacttttatgcaaatcttcttgcttgatgggctatacttctctttggatgtttaagggggtctccttagtggtcactagattgatctagctagtgttttatgaagaagtttatttaataaaaaataaaaataaaaattaacatggctataaatttggcaaactctaattttaataccatccatatgttatgttgtacactccaagttaatctcctaggcgtaggtagcgtagctcactacgtttacttgtcattattttaggtttttcttcgtcaaaaacccaatatatatcatatgtacataaataacgcgatatcatcaattatatatatgttatcttttttgtagaacaaattaacatttttgctgtatgttatgatgatctgtgcttcgcattttattttttatttcttaagtatatttattaggagttgaaaaagtgaaggattcgatggcctttgaaaaaagaaaagatagaa

SEQ ID NO: 6437 - DNA, 821 bp, Cannabis sativa
ttatacctctttgtttttagctcataatagttcttctgagaagcaagaacatagatgcaaatcaagtcagagaacagatccacagctggttgaaaaacaacttccctcgactttccatgagagtgtcaaagttcttgagaaagatgctattgaacatgaaaattctttattcaagattgttatacaaccatcaaacaagcggcttgtggtaagtttttgtataatctaaatgacattctatattctccagttgagaagaaacaaacatgtaactttttatcatcattgcatcaaattatctctcttattgtcttttcttggcagtgtgtaccattagacatagttgagaaatacatcaggaatgaaggtgatgccattctttcgattccaaatggtagacaatattggactgctcaatttaagatgatgaagagctacatagatgggaattgcagagctattatttataatggttggaaaaaattcatggaggacaacaatttggaagtgggtgatgtctgtgtattcgaacttcttaatgggatcgaaatttcatttcaagtgttgattgtccgagtttctggcaatttaaatcaccaaaggcctcaaggtgagttatgatttttttttttgtttcttttaaaacagtgattgagtactgtattaagtttaattagtatattagaatatgattgtgagttgtagtactaaagcatgttattgctactctttactttgtgttcagccagtaactctgtagaaggtgagaacaagtcaaaggaagatgagagtgtgaaaattgaaagagatgatgagatgtg

SEQ ID NO: 6438 - DNA, 1268 bp, Cannabis sativa
tatatatatgaactcactgcaaagaaataaactccatccaatcaaaaggattttccacattgtactttctctggcatcccagtgcaacctggaaacatagaaagcttgactttaattgaaaagcgggaacaaaaatatgtcgaaggaaaaagagccagaaatgagttgttaaaagataccaaaagtcgatctgcaacaaattttatgtactggctcatcagtgctgagttcatgccaatcaatgcacatgggagggcctcacaaacaaattctgtctcaatctcaacagctttgcctacaatgtgaagaactttttcccaaggtagtttgtttcgcaataaactgtaagccagagataaaacaagtatgttattatttcacatagcaaaccaaaaggaaaaaataactgaattttcctattccaagttcataaaagaaaaaagccagatataggcaataaaatatctaatactagcaatgtctttattatcaatcccgagaggtgccatataagcctagagaaaataaacatatacaaaaattacctatacagaagacaagcaaaatcacagtggagtccttcatctctagaaataagctcatttgagaatgtcaagcctggcattaatcccctctttttaagccagaatattgcacaaaagctgaggatgacaacaaacaccactactaataaggaaaaatgagctcaagagatgaacttggcaacatcaaaaaggtgcatatgactgattactatcaatgaaaactaccttccagagaaaaatattccttcaacacaagcaaaagcaacaagtcgctccgcaaacgaagtggaactgtgtgtcataaagaataagaaattatgtaacaaaaaagaaaggaaaaggctactaatatggaaaggactgtcaatgacatttgaaagataacaaaagtatctagctcaaagtcggtctaatgtaaaattgagagaactatgaattcattgaacactaatagcttattgagattttagaaatcccttgaaatgaataaacataatatactatctaaaactataccatgtagtcataagctagtttttgaggaaatattaagtagaaatatgcatcagtacctgcgaatccattccatagcccacttagccttgctagagatacaaggaatgttttcaactgcattgaataatctatgtttctcacttgaatccttaatgtacgtttccaaaagcaagctgtacatttctgacagaaagcagaaccgaaaaa

SEQ ID NO: 6439 - DNA, 670 bp, Cannabis sativa
agaaactaacaaaagcacttttcttcctatttcttttttcttctcttagtaattgtcctattataattttattgttatttagttatttttttaattttagaaatatttaataggtttttattaaaaatataagtggatcattaatatattgacacgtgtcaatttagtatgttttaataaaatttaatagagtggtagtgctaaaattaatgtatatgtaactttaagtatttaattcgccaaaaaaaatatgtgctatataagtatatgaaattaaaaacattaagtatttataccacaaatactattttgtttgaatagattttaaccaactggtagtgatgaaagtagcaaaaatttaacttaaagtatttaattcgttaaaaaaacatatgatatataagtgtatagatttatattgtaaatattcttttgtagatggatattttttaatttttaggaattattgcataaaaatataagttgacactttatttataaaaataccttaataaggtaaggacaacatttataatttttatgtgcttttaattaccaaaatatctcttacactatcacttacaccaatcagacgaaggttgctggatgattgaccgaaggtttcaatcccaagaagcacggatcgtggattgaaggtgtgtgtaagagg

SEQ ID NO: 6440 - DNA, 1526 bp, Cannabis sativa
aaaactaagccagtttcatcacataaatctcaaaaaacccaaacaatcctacatctcaatcaaaatgtgacaagcccatacatatctccaactccaagtcaaggaaaggaaaaaaaaaaaaccaatacggtcaaactaaaacccaactcaaattagattcagaaaaagagaaaataaacatcagttgacaaaaagaaataccttggcggcagtgaaagcctcctctgactttttcagagtataattcttcttctcatcaagtgagacagccattttgacacagcaaaaacgacgagaagattgcgaaaactgagaaatgggtcttttagaaaggaacacgcttgaacatgaaatcccagctccgaccaccgcagcactcgtgttcgccatcttctctctctctctctctgtgcgtcaatggagtatggatcaagaagataaagtggctggtaaagagacaaccttttagattggcgtttatttatttatttattttcaacttttaaggtacgacgcggataatttatttgggctgggatgggcctgggcttgggcctgaagccgccgccttaggcctaagcccaattggaactattatttgttgatataaaatgggtttggttgagaattttgatcatactttggtttatacaatgttatttaattattttacctcaaaataaaatgttatttaattatttagtcaaaataaatctcgtcaatttagaaccataccataatattattatttttgttagaaaaaaaaaacataatattatttaactatttagtcaagacaaatctcatcaaattcaaaccaaggacatcatttttttgtacatatggtgctcacaaaaagggcagattcatatgtatttgagatagggattaaagaataaaaaaaagttttacttatataaatcgaccaaattagatcaagatgaggtttctgttttgaaaatatgcctgaaaaatacattaaagctaaaagaagggagtaggtgaaccatctctaatgttgatataaaacttgatacttacctaaatttagcacaaaaaattgaaattatattatattttgcctactatttacaaagtgtacttcaatgcactaaatataaattaaaaaaaaaaatcaaaatcataatagtacgataagaaaaagaattaatataattttttataataattaatgaatcataataattatatgggtcaaattttataccttttagaatacaactaagtaatattttttttgaagtgcactaaaatataactatacactatacatttttagcactttattatagatgatgctgttagaatggtttatattaagagtgttggatcaactctcactaaaatttatgccacgtgttcattcaaaatttatgcagtccacttagtagttagttaattagttaagttctttagtcttatactatttttcaattaagttattactcggtttctcaagccatgttagcttttcttttatgtacacttgtattctgaaaattaga

SEQ ID NO: 6441 - DNA, 1508 bp, Cannabis sativa
aatatataaagatatatattcatcatcatcttgtaagttgtaacaataatacatacatgtcttcgtcaaactttcataatcaccataacaataataatggtaagaaattatcaggagtaaaattgtttggtgttgaagtaagtagtagtagtagtactactagtgatagccatggtaagcagccagaggcagaggcagaggcagtgcataatggtgtaccagtaatagtagttcccttatataacaataataataataatcattattacagtactactagtcatgatgttaggaggaaatcattaatgtcatcatcatcagcagcagcagcaccattgtatagattcaagtgtgagtactgtaatcaaggttttgtgagttctcaagccttaggggttcatcagaatgcccacaaaaaggaaaggaagttaggactcaggccccaataccaatatgctcctcctcatcaatactactacgggcgtctcttcaactcaccatcaattcatcatcatcatcatcatcacaagcaggttcttgttccttcttctgagtcagcttgttcttcaggcaatgaaggagttggccatggtgatgatgatgatcttgatcttcagctaaggcttggaccatctgctaattaataatttcactacattcactattaccattattgaagtgaaaaataataatgtcgttttcatccacttttagcatatatagaatatcttgtacctttttcttatatatattattattattgatcatcagaaccatctttatcctcattgcaaatggatctgaggcactgcatctctgcaggtcctaagaatatatattcaacattattatatatttatgttatatgtccaaataaattgctataataaaaacttaaaaactgatttgagctaggtatattaacgatttgtatgtatgatgagatgttctagcatatgggatgtatgagataaagttattttttaattagtatatatatatatctatatttctttcattcactgctgagtactttttagctttttttgtatagtacgtagtcgtcgtatctgagatgttgcatcacttttctgttattattattatttttttttcaagaggttgaaagaatccacagatcatttctttgaaaatttctaaacggcgttgtgaacaacaaaatttgaaatttgtatctaccaactgcaaaatccatattcataatttgtaacaacaaaatttgaaatttgaattgttaattgattttgaaatagaaatgttacttatcaaacactcactctattctacctttctccactgcatttctaatttctcacattggcataaaagtcaaactaaactctaaagagtatccaatcaaaattagaaaatctatctaaaaacttatgattgagcaaaaattaaccacaaatttgagaggtattatagaatctcaagttgataatgtgtagaaattaattaatattgttcataagatatatatatat

SEQ ID NO: 6442 - DNA, 507 bp, Cannabis sativa
tctttctcaaactaattattagaataacatttttgactttatatatatgcaactaggcttatatcaaaaaaacaaaaattaaatcaaaaacaaaaattaataaaataccaagtaaaagttgattatatggggatatagctaaaaaaagattcgggtatatatatagtgccaaaaatacaatatgcataattacaatcatgcaatattatatattattaattagaatattttgaaatattcagaaattaatttatttattttaatttcagatggtcagcaatcgcagctagattaccgggaagaactgataatgaaattaaaaatgtatggcatacacacttgaagaaaaggctcttaaataataataatagtaataacttatcatcatcatcttcaaaacgacagcgtattgatgataatgaccaacatccaattagtactacaactagttgtagtagtagtgatagtgacttttcaagtgttacggctgaattattacaccaaaac

SEQ ID NO: 6443 - DNA, 3380 bp, Cannabis sativa
tgatgcagaggaggacttccaaccggttgctcgaggggctaaaactcaagaaaaaactcaaaaaagtgccaccaaagtcactaatcagttccaggtgctgatgactcaagaacaaaatggggaagagataactaatgtagcagaaatacagagtatcataggaggggaggggggaggacctcctactcctaatggataggatcttaagctggaatgtccgagggatcaactctcaacaaaagcaaagagaagtaaagcaatttattgctcatcataatgttgggttagttggtctcctcgagacaagggttaaggcttccaagttgggggccttataccaacaaatgtttcaagggtggtgcttcacaacaaatattgcatggcacaaaggtggaagaataattgttgcttggaatcctcttcaattccaagtaagtattatgaaatgttcaagtcaagtaattcatttaggaatttgtacagttggaaataacttacaattccaattaacatttgtctatggctttaatgatgagatgggaaggaaagtgttgtggcgtgagctaaaagaactaaacacaaaagatccatgggtggtgcttggtgactttaatgcaactttacaaatggatgaaagaataggagacaaagtgaggagtcatgtttgcaatgagttcctagattgtgttcatgtatgtcatctagaagatattcaatatagtgggaatttatacacatggagcaataaacaacaaggtcatgataagatctatgcaaagcttgatagagttcttgcaaatgaaaagtgggtggatttatttcagcaagctgaggctttattcttgaatgaaggcctttttgatcatacaccaacaattatcaaagtgtatcctgaagtccaaagtgggaagaagccttttaagtacttcaaaatgtgggcaatgcatccagaatacaaacaagaagtaaagaaagtgtggcaacaagtagttaaaggctccaagatgttccaaattgtttccaaacagaaaaggctgaaaggagttttcaaagaactaaacaaaagtggcttctcagaaattcaagccgctgattctaaagctagagaagagctcaattccaggcaagaagtactgcaaacagatcctctaaatgacacactccagcaagaagaaaaagaagccagggaacactatgctacagttcacaaagcatacctttcctttatgcagcagaaagccaaaatttcctggataaaagaaggagatcagaactcagcattattccatagttgcctaaaagaaagaagaagacagaacaagatactatcaatagaagatggagatggaaataggattgagaaccccgtagccattactgaagcttttttgaagttttatcaagggttgcttggaacaaagatgcaaggaagactgccagttaataaaaaagtgatggagcaaggagcagtgatcactaaactacatgaagatatactcaattcagaatgcacaagggaggaaatcaagcaaattgttttcagtattccagagaataaagccccggggcctgacggatatagtagctcttttttacaggaaaattgggaactggtggaggatgatgtatgcctagctgttaaagaaattttccaaacgggtcatctactcaaagagctgaacttaacggtgcttacgttaatcccaaaggtcaaatgtccgaacactgtaagtgacttcaggcccattgcttgttgtaatgttctttataaagtcattaccaaacttctttgtaatagattgaagattatactaccggatctggttgctcaaaatcaagggagatttgtaaaagggaggtttattgctcacgacattatgacctgtcaggatcatattagacattatggaaggaaatctgtaaagccaaattgcatgatcaaacttgacctccaaaaagcttatgataccttagactgggatttcttagaggaaatccttttctcctttaagtttccctctaaggtcatctctttgatcatgcaatgtgtctctacagccagattctcgttgtacttcaatggtgtgctgcatggtttttttggtgctaaaagaggagtgagacaaggagatcctatgtcaccccttctctttgttcttggcatggaatatctgagtcggattatgaagaaagtggggaataaagcagattttggcttccatgaaagatgcaaagaattgaagcttaaccacctctgctttactgatgatgtcctccttttctgcaaaggagatctgcaaagcattagattgatgcttcaaggcttgaaactcttttcaagatcctcaggtctttggcaaaataatagcaaattcgctatttactgtgcaagaatgtctgaaccagagatccaaagagtgacacagctttcaggatttactcgcagctcaattccttttaaatatctagggataccaatttgctcaaagagaatctcacagaatgagtgcaatactctagttgacaaaatgacatctcgaatcaaaacctggagtactagacatatttcctttgcaggtagggctgttctcatcaactcagtattactcactatacatacatacttgagccagattctaatattgccgaagagggtagttgctgagattgaaagaatttgtaggagttttctatggaaaggcactaacaatatgagtggagctggagctattgcttgggagaaaacttgtctttctaaagctgaaggtggaatgggatttttaaatgtaagtacttggaacaaagcagcattgatgaagaatatatggacactagcggtaaagaaagataatttatgggtcaagtggatccatagtgtctatttgaagaatggagattgttggagccacaaggcctccatccatagtagttggtattggaggaagcttgtggaaataaaagatgagatgaaaagaaactgggattcaagtcagattgttgctttggaatataaaatttcagatggatacaagaagatgcagcaacctcaagaccgaattcactggtgtaatcaagtttggtctagactcaaccatcccaagcatagttttattctttggttggctgtattggacaggcttaaaacaagagaaaggcttaaaagaatgcatataacagaggtagatgactgttgtttctgcagcaatcaaatagagagtaaagaccacttattctttcaatgcagcagacctggcagcttgctccaacaggtgaaggattggattggttggaagtcccctgcatctgatctgaatgctttgatccgaagcattagcaggtccaaaagaagcaaatttcagcagcaggttctctcggctgct

SEQ ID NO: 6444 - DNA, 1138 bp, Cannabis sativa
  modified_base (458)..(458): a, c, t, g, unknown or other
gacataaaataaaattgtactacgattagagaagaaaataagtgtgggaaatgtaccaattcatttcaccagtccattaaccaatcctatttgatgagaagatcacgggtgtggagtaatactttcttttatatatgtaaatataatgggtaaatactattttaggctttccgttttacaaaagttattaattgaattttctattttattaaatgataaaattgattttgtatatttaaaaattgtacaaataggactttaaactgattttttattagaataaaatttaataataatccggtctagagatgttatgataaaactagttatattttctatatcttttcatgttagaaacttttttaaagtttattgtattacaaaataaaattattgaaaattgagcttagggtcctaattttaccatttagaaaatatagggtctattttatcatttnacaaaacagagagtccaattagtaacttttgcaaaatacagagtctaaaatagtatttatccatatataaattataattataaattttaactaattatgtcaagatccctatatcaaataataatagaaatttaattgcatgaactaattaggatttgtcaagtagctaatgatgtgacacttagcgacgtacttataaaagtttcaaaatacaatttaagtattattatcatcaaaaacaaaatttaagtatttttttctactaaaattaaacttaaatatttatatcacaaattattctattttaataagtgtaattttatttatttttttattgaagctttatacaagactccctatacacatatactctcttgctctctagccatttgagctagcatcaattgtgtaaagttatataattgatttgtacacattaatcttaaagaaaaagaaaatagtaaagaaatagaggacaagataagaaactgatgaagaaaaagctgcaatgcagctttggtcaagaatcaacatggaatgtcgtatatcaaagatatttgttattttgtataattgtatggttcttttttttccgaaatttgtataagaagttaaattgcatattagcaatttagcatagaatatttccactaaaaattccatatagaaacaataggtgg

SEQ ID NO: 6445 - DNA, 613 bp, Cannabis sativa
tgatgagactttttgttatgttgtagctagctagtcgttgatatttgtccaataagtaaacgattgttttgttttgttggaattggtttttgactttgaagccataaaaaggaaaagtaaaagagaggatgtgagttgaaaggaacaaaatgattaggagaaatggagtggaccgccgacacgtgccgattctaaccgaccttcttaatgcaccgttccggttttctgacttttagatcccatttttacaacagaagaacccatatattgtcatgccattgccaactcattcaattccaccgaaagtaggtccctactccctaaccttaatcatggatttctttccattatattcttctcctctctagtttttgtattgaacaaacgtttttttatttatctttctccccaagttttttttttttttttgtttcttttttctaaaatacgtagtgtaaaattgtgatgatagattaatgtactcaggtgaaaataactaacaaactaaaattaggtgcatctgtgtagcgagattttaaaattcagacaaatttatgtgggtcattccctacaataccacattttttttagcattaatttaagtatagtgaac

SEQ ID NO: 6446 - DNA, 615 bp, Cannabis sativa
attattatgttaaattgtgtgagacgaaattacaataatattacaaattgactgatgttaagtactacttgtgttgggacggatccattaatattaatgtggggttataatcctactaataaaaatatatttttaaaaaaattaaatgtaaattttttaatttgataattgtagactaaaataataaaaaaatattcctacaaaattaaataaatctaatatacgtataaatattattttttatgttaaataagtcccatgaaataaaacttattatggtccctcacttcgttgcattcctcataaaaatatggaaaatgctaaagggtaccggtggtgattagcatcatcctatgtgtgagtattgttattggtctaactaagtatcaggtcccacataatttaatataataacttttagaatatatcgctagccaatcacaacgtgacatgtcgagaaagtgttaggaaccacttgtggctaatagcaatgctctaaaaatatagcatattagaaataatgttgacaggtgttagcatttctatgggcttaagaagaaacctaggtctataatccattacctattttccctaacccttgagctggctgggctt

SEQ ID NO: 6447 - DNA, 1416 bp, Cannabis sativa
aatcacagcagccgcagcctgtgctgcagccactgctgcatcagcagctgcagccgtggctactgcaacagccatggcatgctttttctgctcattctcggcttcaattgcagcctgtagaacacttggtggagtcatggagaactgctctgtagaatttatctcctttggagtggctgcagcggcggtggcagatgatcttcgaaaactccatcttcttttctcctttggtgttggttgtggtattgatattggagttttgggactgtcagtggcaaggggagaatactccttctccttaacatccttgtccttcttccctgtcaagatacttcttagccatttgcttgttttccccatctttgtcaaaccaagttccttctaagcaagcataattgtgtgaccacaaacgctaaagaggaagactaagaaagaaacaagtcatatattgcaagatctttcacaaagagaaaatggttttgtctttgtcaggtcgattaggcaaggctagtttaggtagtgaggaaagaaagaaagaaacaaagaggaagctcgccagataagacagttgccagcaatctctttcaagattaaatggtaaatatattgttattccttacctttgcttggcaacaatcttagattctcatttccttctcatatatctcaccttgttctaatccattttcatcaagggtgttttggtaaacagctcatacataggttgatatggggcatgatgggataggatcagaaaccatgtggagttgggacaagaagctggagaatccttgtaaaatactcaatttctaagggtgggggaagctgcccagttggggtcccaatttgaaaactgtgtggggtccattccaccaagtgatatgaggaaatgtttctttattttctttggcacgtgcacactactacttccaccaagctagtagtaaatggattaatagaaaaaatcacagtataaagcttacctaagataattattctattctaagaccctattagaaggcacccgcacccttctatttatctttacatatccaattccatggggtagattctctgcaaacttgtgactagcaaagagaatgtaagtagagatttttgtgtgacttggtagaagaaaatttttaaggacaatttcagagagtcttaagtgcatttagtgtcacttaggtaagctcttgattttggtacttaaaaatggtcacccctatttatatatgagtccacctagaaagttaggaaaaacaacaaatccaatgaattttgaatcaatatggtttaatatcttctgaagaagaataaatagtaaaaccaaaacgttaaatgcatttggcaacatttgaacatagaatttagtcttgaaattttgagctctaagtattaataactctcttacaa

SEQ ID NO: 6448 - DNA, 1170 bp, Cannabis sativa
aatgtatcctatgcaaagagatgtgtgctcataccttaatttcattccattactattgggatcaattgatgatattacccaaatatatcatggatcaaatgaataagatttttagggatttttgatggaaaagagcctatgattctggtgctccgagattggttgcttggaatcaggtgtgctctcctaagagtgtaggaggtttgggttttcgcaatataaagtattggaattacgatgcttttgaaagtatgtttgggacatagtcactgacaaagagagcctttgggttaagtgagttcactcagatatatcaaataggacaacattttcaaatctttgtatcgaactttggctggttccaaacaccaaagatttggcatgattttacttggaacaggtttagtgctcctaaacataaatttattacttggttagcttgtttataagttgcaaactaaggataaacttgtgatatttggtgttattgttgataacaggtgttgtttgtgtgagaatgttgttgaatcttagcagcacttattttttttcgatgtttctatacaactaagaaattcttactgccataaaaagaagtggacaggtttgagtttgagacaagagactttagaggctttcgtaaagagcatcgagaagaggaaaacctctaagttcaggcaagttgtgatggtagctatatcttgattgctatgatttatttcatttgagaagctagaaatatttgtttatgagaacaaaaagtgtatgttgtaaataatatagttaggagaattaaaggaaaagtttttaataggtttctcgttttaaaagagagaaaataagtttagatgataaagaatggtttgaggctttgagtacttgtattgtaattctctgctagtagttaaatagttgttttggacataaaattcactcatttctaaaaaaaaaaaaaataattaaacaagtcacaaaattaattaaaaattatagacaaattagaaaataaattctaacagtattagaaaaataattgtcgaaaaaggagtccggaaactactgcactctctctcactctccggtagccgcaagtgggctttgtcccagtaaccattctttaacctccagttgctataaaacgggtcaggcacggcccggttagacctagtc

SEQ ID NO: 6449 - DNA, 613 bp, Cannabis sativa
tctttgagctcctatacacatgatttggttcataacaagtattactcatatttatgtcaggttcaaggggcagtttttgatcttccagaggaggttgcaaaggagttgctaagcagagaattaccacctggaaataccctttccaagatctccaaggtttgtcacttttccatcataacgatttttgcatgacaacataagtttgtgtgtacttaatactgatgggagagatgttgtgccaattgcagttgccacccttgcaagatgacgggccttctagtgataactatggaaggttttctagcagagatagaagtaggggtcgaggttctggtggacgaggtgggggacgtagttatggaggacgtggaggaggtttccgaagcaccagaagttgggacggttctgataacgatgatgatttattcaggagtagtggtcgtagcgtgagaaaatctaacagtagctggtctaggagctcaaggagtggcggggatgattggtctaggagttctaggggcagtagtgatgattggttaattggaggaagatcatcaagtaggtctccatcaagggggggaggagacaggtatgctactacatttctcttgga

SEQ ID NO: 6450 - DNA, 683 bp, Cannabis sativa
aataatttaaaattaaagttatagtaccttttaccccttaacaaaaaaaagaacataaactttagacaaaataaaaaaaaaatgtttaaagtaaattatgaaaaaatgtagaatacacccaggattgtactagagaaaatggtaacttaagttgaggcaaattatggtctttaataactttacacacaattttataagcatctaattgcaatagaaattttttaatttagtagaaaagattctaatgttttgccttgaggtcgtggattcgattcatggttttttcttttatttaattttaatggagaatagacaaaattaaagaaaagtgtaaagttaattatgaaaaatgtagaatacactctatgttacatttttgtttttcattcattgaatgacatgtatattaagtatcccatatcattaaaataaatcaccaggaaaacttaaaatttgtgaaagaacacccgtccaaatacactttcctacactattagtaacagaaatagccgggcattaacaatgctatttgcataacgcaagatcattacaagaaccaccacttaaagaactaacatccaaaaaaaatagactaaaaactaatatttaaaagacaattattaattcaaccaaccacaacctttgaatcccattcaataacggaaatagcaaacccaaaccgc

SEQ ID NO: 6451 - DNA, 1205 bp, Cannabis sativa
gtaaaataatttccaacatgacctggtaggattctctgtacggcctgatacgtggagtgcaagctaactgcaaattgagcccttaataatccaacaaactggatggaaaatatctattattaaggggtaatgtagtcttttgtatttaatcaatttaatatgtaaatatctatgattttctctgctaatgaggatttaggttgtcctatttaaatggccttaacttaaccctagaaacctaagtcactctaagtctcataaaagcttctaagtttgaaaccctagtctgtcttcctgtctctcttgtacacacccaagtgggttctcccttcctttttatcacacccctctaaggccatatctctctctcattagagatctgcccactaattcatcctttgttaccttaaagagagctatatcagagcccacctatagtgatctaaatagtattatctctagctacgtatcaatacaaataaaagaggagtatgtcataacctgctaactaacggggccaaaccactataaaaatccttgtattatttactttattgttcttgttgcgtaacatgtggcaaatatcagactaatacgaccccgctatcggttggccactttttgaggtcgacaaggtttatgtgtggaaaatagaagattaaaaaaatgggctccaatagtgtaaaagtggtgaagatgttggtggttttttgtggtagttagcgagggttttatttgtgttgtctctggttggtgctggtttggttttgtggagaagaagatgatgaagaatgagagaagacgaatgctgaagggttattacattatcctatcccattggttatttaaaaatacccgacgacataggttacacatgtgaaatataaataacacctctgacgtcggttattttcaaataactgatgccatagggcgtatttttacagtttattattttagattaaaaactgaaggtaaagaattttaataaatgttatagctatggcttttataaaataatcgcctctacatgtcaattttcaacaggctagtatttttacaccctttagcttccctttttataaagattgttaaaaaacagcagttgttgtcttgacacgacacgaatacgatatgcgaatacgaattgccaccattagactttaaagtagtcagatattcgaaatagcaatgattttttttaa

SEQ ID NO: 6452 - DNA, 1724 bp, Cannabis sativa
acatcgatggctcaagacatgaaaacctgattgggacaaaaattacaataaccgttatgtaagaagctggcttattattttagctttgcatctggctattggaaaggtggttggaatagatatggttattctttgtacttaatttttttggaatgaatacttggtgaaaagaaatatatatatatatatatatatatattttttattagaaactgtaccttcagtgcgaaggtcaacaataagctcattaaaagaacctgtttgtgccagatccttgtgaacaaggagagtttcctgagagtggaatgcacaaaaaataaggaacatgtcaaatcatgcaaggcaataatgacaaaggttttccaaacttgggctggcacttaaagcagataagttaatttatgtgaaataaagaataaatagattaccatggcattacaagctgccggataatccagttttgcatccaggacaatttgctttgccatatccatgtttgcagatttatcaatataaacatggcagattccatctgaagaaaacaaaatgctgttacttactacaaaatccagaaccatgttcaaaacagaaaaacaactataaataacagagttatggcaggttcaattcatattaccagcatgacccaggacaggaatcttggttgagcttgttatttgggataccagcttattgctgcctcttgggatcactagatctatcacatcgtcaagctataacaaaaaataattgcgcaaccttcttaacttcagctgactcaattttcccattgaagttcatgcataaaaagaaaagaataacaataaataagtaattattctaggatatttccaccttaagtagatcaggaatctcttctcttgacgtcacaagtccgataagttttccgccaacattatctggaatagcttcggtaataacctataaacaacgcagaagccaaggaatgatgggaagacaaccacaagaatttcaagtatattatattatgctctttcaaagtatattatattatgtagtgatcaattgaatataagaaactaaccttgtgcagaatagcattggatcgctttgcctcctttccacctttcaaaataagtccattcccactacggattgctagtgaagcaatctatttaaacaaaacaaaatacagatactaatgatgatgagaagatactcaagtttagtttataaaaaggtggaaatacttaggattacgagaaaaagggctttcctaatgtttaggataaagttatgatggggataaaagtcattaatatgtccttagagaagccaacaaatgtgttcaagtgccttgcttgatagtagaggaataaaagttttattacagacagacagagctagcttgctcacccaaacgactggtaccatactaacataaaaattaaagagcaacgaaggttgagggttccctttacctgtactaatgcatcaggacgagactcgaaaacaattaggagaactcccaggggactggatgttttctctagtacaagaccatctgcaatctatatagaagagtggccatgagaaatcatacatgaaataaaaaagtgatatagaatagaagattagtcatgaaaaaaaaaatatatatatatcatttttatttaaagaaaatatgtttacaggtacagacgttaaaaaaaagtagtagaagaaagaaagaaaaaacaata

SEQ ID NO: 6453 - DNA, 986 bp, Cannabis sativa
tgctgtcaactctagtgttatggagcttcgggggtctcttggttcagtggatagtcgtctttctgagattggtgtggtgcttatgcctaatgctgcttgctataatttctctatcttagttgatgcagctgtccgtgataagtgggctgtcctgctgtgctagtcctgaacaaatagggttgtttagtggaggcctttactgttaaggtggctgtggattcccctttgatggctgaagctcttgttgtttgccatgcaatttctaagtgtatttcctgtaattggcatgttgtgtgcatcttctcgaattgcttagtagtaacttcggtccttaatgctatgcaggtgccatgttggaagtctaccaatacctttttgcatttgttttaatttggttgctgattataagcttgattgtagtttcgtttagatttcccgtatttttaatcatgctgcgcatgacttggctaattaggttgcgtcccataatgagtttaggttttttttagttgaggaagtgatgttgttttggctcctaattgacttggtgttttaggttttctggtttaatgaagcttccttttaccgaaaaaataaaaaaactatagaattttaatgagttttagttttaaaatgtgtattatttaattaatttaataaatattttattttaataaattatttaagatttgaaattcttactagtaaccatgatataattatggctattttaagttattaatataaataatataaaatgtgaaatctttgaagtaaaatatatttatttggtgtgatttattgaaattgttgcactaaaagtaaaagattctacaccaaattggtgtcactattggagaggtctttcttacttattgtgaacactcacaacaacttctctaaaataaaatgctttaaaaaatgtaaagaatggtactaaaaatatgatacagtagatgctctaaactcatacttcattttttttt

SEQ ID NO: 6454 - DNA, 576 bp, Cannabis sativa
tcctaaatttttaacttgtttgtataatgcttctttcttcttttttttgaatatgctaatagcttctaaaattaaaaaacttgtttgggtgaaagataaaaacaacctatttttttaacttttttttaataatgaatataatttaattaaattaactcagatctcaaaacatcttgaacatcattctcttaaaatacacaatcaaaaataaaatggactaatctataagcaactacattaacattaacaaatggcttaacaaaaaataaaaaaaaaaattacaatcctctgccaacacaccaaaataagaggacaagtgaccttccttccccataaataactaatgctgaattgcttccattattgggagacaaccatcttttgtggcgacctcaacttaatccaactcaatgcttctgtttaaccacttgaggctaactcaaatagacataaaaagatgcgtgtgttgataatcctgagttcgagtctcaaatccaatgcgtcgttaaactcaataacttctgcaacttttacttttggtttgaccaccctatacctacaacttgttcagcttta

SEQ ID NO: 6455 - DNA, 878 bp, Cannabis sativa
ctactcggggtgggactcgtcatcgatagaagaagaggaaaaagagaagcaagggggagggttgggcgccgtcaattttgttttttttttttttttcttatgattcttttatttttagcctaaaagttttagggcgggtggttcgataagtataaaattaagggtatgaaaaaatttaataatgtacaaccgaatttcatgtgggatgtaactcaagttttagaattgtgtaattccttactctcgaacctggcttggtttggtaccagattttacctatcatttttcaaaatccaattttttttggggaatacaggtgggtacgttttttggtacaaatgttctaccctaagtgcacgtgttggtgttgttacaagtaataactcatgcaaatgaggtcaatcccacaagaactgtaactaagtactaacaaattgaatatttgtttctatttagcaaaataaaactttagtttgagaaaagattattgatgttttataaaagaaaactcaagaaggttattcctaagaaaataatcttttatttttgatttgcttagtgtcaatgaacttttaaattaaatgtttaaaaattattacaaactaaatatgtaatatcccagaaaatataatgatatttaattggacatattttattaaatatgtgattgtattaagattggggtaagaatatgatcctacttaggctaaatgtgtgaaaattagcgtaatctaattaatgattaaataaagcttaatttattaattacagaaattttattgggttatgtgggtagagtagctaccacttttgaaataaaagatttttggatattgtcgaccttggaattcagtagagtggttagaaatgtcacgaca

SEQ ID NO: 6456 - DNA, 1406 bp, Cannabis sativa
cagtcatgtctttacttatctaagtctttaaattccaagaagagtacacactcaaaatgtacgagtcaattaagcaggcatactgcccagtcaatgtttgtcgagtcaaccaacaccaaagatatcaatctttggcatatgaaacttggtcatccaagtctaaatgtaatgaaacatcttttaatcaatgaaaaactctcctttaaacagcctttaaagttctgtgatgcctgccaaattggaaagtcaaggcacaatcattatgctttgtcgactaaaactgccacgaaaccccttgagatcatccactcggatgtatggggtccctcaccaatcctatccaaagatggatataggtactatgtccactttattgatgaatttaccaatttcacttggatctatcccttaaagttaaaatcagatgtcaaagaaatctttctcaacttccaaaagtttgttgagagaaagtttgagtcaaaaattaaaacactccactcggattgggggggtgaatacagaagtctcgctccctttttagctgcattaggagtccattttaggcatccatgtcctcacactcaccctcaaaatggtaagtccgaaagaaaacatcgacacatagtcgaaatgggactcactttgttgattcaagcttctattcctctccaatactggtgggaatcctttagtacagcaacctttttgatcaatcacctttcaacacccactctaaaccataaatctcccattgaagttctcttcaaagtcaagccaaacctgcacttcttaaaagtctttggatgtgcatgcttcccacatttaagagcctacaaccaacacaagttggattttagatccactaaatgcgtttttctaggatacagtccaaatcataaaggatacaaatgtttgcatccatctggtcgtgtctacattgctcaaagtgtaacatttaatgaaactgattttccctttgctcatggtttccatgtatcccacttcaagagttctgatataaatacttgtcccactcaagtccaataccatcagtggcttccctttgtatctccagaacatgacgaacacactgcacaaagcattggacatgatgcacaacatcatgtttcaactgatactaaccattgttctgcagattctcatctatctccttctctctcggccagggactccacatccagcagcaagagtaaaactcctacctcagtcacatcctactcaacccttccattagaagtacttctgccaatctctctttcaccactaccaaatcaacccaatctgccaaaccagatacaacagcccttacccgcatcaccacaccagcaatctccaccacaactccccaacacacaaccctcccatcctacacacaacatgattac

SEQ ID NO: 6457 - DNA, 723 bp, Cannabis sativa
aaaaaattgatgttacaatttataaccattaattttttctattagtgtttcttacttcttagaaccaaatgaaacttaagattatcttttgttgattaagaattgaactttgttgttgtgtaggaagagctttggcctttgaggagtttcgagttggattcgttatgaactcaaccgaaagtgaagaaggaaacatgtcaagaaatggcacatcattgaacttggaccttaacaattttcctcctagtgaggaaattcaagaccaaggaaatggtcattttcaatctcaagaacaacaagctcctaccaccaatggtgttgttgtggctagtactgaaaatgttgtaatcctttcgccatcgaaatatcgagaggtttgatcttaattaacagttgtgagatttgtcatttcttgtattttgcttctagctgatttttgtgtttgtgttcgtgttcgtgttttctttatcttgatttggccaagacatattttcggagaaggcgtaatggagtggaaattcctaggacaggtgaacatctttttctttttgctttaaggtcttgttattgattcattaatgttaacgttgcgactgacataagaaagtatcttccgataaagtagacaataaaattttaatattaaatatttattatattcatatcttattgtgtttgttagatgtttttttttttttaatcattactactttgtttcatttg

SEQ ID NO: 6458 - DNA, 1188 bp, Cannabis sativa
aatcataataatcaacatattaattttatttagtatttaattaataagaatatttacactataataatgatgataatgatattgaggatgtaaaatattttaatttattgtaaatctattagtattagattagatgtagtctcgattctcgaccgaccaaccctagttcataatatattatcgttaattaataattacgagcataatttgtgtgaaagttttagtaatatttaaaagatatattaatattttaattagagtgagttaaatttgtaaacgggattaggtttacgggtaaataatatatcaaactcaatggtttaaaatagttgatatatattttatcaaaaatattaccatgtaaacccacaaaatgtagtataaactagggatatataagttgaggaatacctcttttttgtttctattaatcaaaaataccctcatattttatttcattaaaatctacccagttttatgagtatgttgcctaatatattcttaccctccacttaagtgtagcacatgatttacattaatctaaggggtataataaggacatcatctataaaataggtatatcttaaaaaatatagaaataaaggtaaaaattaaagcaaataaagtaaagtgagtatacaatgcaattttctctataaactacccaatttaaaaattgaaccaaaagtcaaaaatattttagataatttccataccaaacattccctaaagtagtaaaatagaaaacaaagaatcacatatttaaatttaatttattggttcatcacgatctttatgcatttgattaatattaaaacttttaaaaagttttacacttgaaaaagaaaaaagaaaaattaaataaaattaaagaaaaagaataattgggacatgatttaataagtacacaaaaagtttactaatttatgtatatatatattatatttagtatccatcatcacataaataatctgtaattatacatttttccttaaattagacaagattaatcaaaaagaggtactaaccaaaaatgaaataattaattaccatatttcaaaaaaaaaaaattaattaccatatgatatgttcattcaaatcaaacaattatatatatatatatgagcattttgttaaataattaataattaattacccgaaaatatagagatcagcaggtttatcatg

SEQ ID NO: 6459 - DNA, 973 bp, Cannabis sativa
taatcctctccctcgaagtgtggttgggtcttttgtccatgaaacatatgttgtgatgggtgtgaatgaggaggttccttccaatatagatgaaaatcatgaacaaccagtatttggtcagtttgtaagttcgatggtcccttttacaataatgatcctattttagatctaaataatgatgacaaagatgatttgatagtcgataaaatcgtaaagatacattccttgagattggattgtgcacctagcaactatggtgcagagtgacaatgaacacctcgtaatgaaaattagaatacacctagaactagtagtagtcgataaggcagatcagaagaacatgctccccataatgtactgttctcaacgttctcgttatctgaagtttgtactaagttcaaagctcttacgtggacaaagaaaagtataataaaaaaaattatatgttaactacttcttacaaagtaaggaatcagggaagatacaacttggtaatgtgtacgaaaataaggaagaagtgagataagtagtgggtaggtttgcacttaataattatttttagtggatggtgaagaagtctgtcaccgttgtattgtacattacatgaaaggatccatattgcaaattaagattgtgggagaagaagaatatgcattctcaaaactttaaggttatcgtatttcacaacaaacacacatgtaacttggatgctaaacattccaatcaccgtcaagcagtaccgtgagtggttgacgatcttattaaggggaagtacactcaagatggaactatgtaccaggctaaagacattatgagggatatgtttgataattatgggatccagatgagttatgtgaaagtttggatgtgcagggagaagacacttacgtatattagggatacactggtgttttcctataagaagctaccttgatacttatacatgctacaatagaagaatctaggtaccatt

SEQ ID NO: 6460 - DNA, 541 bp, Cannabis sativa
taatgcacttaaatggtaaatactagacctaagatttcttatgctataagtgtgctcaagtatatggttaaccctggaaaattacactatcttgctatgaaatggatatccaagtacctaataggaactacatattttggtttggttttcaaacagtcacaaaaccaaactttgacagaagaattttatgactacgattatgctggtgatagggacacaagaagtcccacttctgcctattatttcataattggggaaaattgtataagttggagagtttagttgcaactagtggttgccttatcaactatagaagcagaatatatttctactacagaagccatcaaataagttgtatggattaagggtgtcctaaaggaatcgaatctactcaagagtgttcctataatctattcaacgcttcatcagagacaaagtgactcagggagaggtcacagtggaaaagattcccattaaacataactctgcaaatatagaaactaaagtggtcaccctagctaagttcaagcattgtatgaac

SEQ ID NO: 6461 - DNA, 593 bp, Cannabis sativa
tagaggaggctagagcaatctgtaatagaagtaatgtttaaatagaagtcgtcgaggccattgggatacgagaagcacttagctagattgagaaccagcaatggagcaaagttgaagttgaaacaaattgtcttgtagttgttcaagctatgagaagttccattgccatgttatcctattttaggagaattgttgatgactgcaagagacgtttgactgaattaaaaggtacaaatttctttaaaatttattaaacaatctgctaacaatgtaattcacttcctagcgagatctacttgttttatttctgatcatgttatacgagtgagtgatgctctctcaaagttcatttctgtatggatgagtaatttgattaattaatggaattttatcttcttctataaataaataaataaataaataataaaaaaaatatatatgctttaaatatgttctatattcaaatacaccttttaaattctcttatattttttaccttataaaaaaacttacacatctagtaaaaatctaaacacaggatccctctgggatcgactgctatatctacgttaccaaagctacttttcgtgtaa

SEQ ID NO: 6462 - DNA, 1166 bp, Cannabis sativa
ccatgggaaaaagttgagaatttccatcttgaacatcacccaagctttcaacttgaacttcaaccaaattaagggaatcaataaggttacgttgagaagcttcagtggcactagaagatgccgcactgccattgttttccttcgaagccactttagaacgagagcccttccttctacgcttatcattcttaagggaagaagatgaaggacctgaacccatcttaaaggacgaattgggggcaggggagaatactgggagttctgggatttcttgagaaaattctttagtattttcctcagtatgttggacataagggatcaaggtcaagcttgcttttcttttacggggttgggggcaggggtgaattaattctgtgacatcaattgggtcatggaaaagagtggggattggttcaaacttatccactgggggtgggcccattaattcctcagataatccaatttcttcagcataaatgggccaaggaaaatgggtgggctcaggatgtttatggggttgtcttgattggcataactctacatgggctttctcaaccatttggtcataagttggcccaatattggccataatggttgtgagaataccattgtctgcagggtttggaggaggcctagaagagtatttatttaaaatgtcaatatcagaggaagtactattattaccttgtattgatcttcgcatggctctaggggacacagatctggtcttccttcctttttcaaaattacaacggctagaaaccctgagaccagagctattatcctttggatgcacccttgctttttctaccactttcaaattcttacccaaaatggcacctgggctattgctattgactcttatcactttctttacaggtctgatgctggctgtatgatgcaggggctggtcttcaacagcaccagagacaggtcgctttcctgaggctttggatctcgggtcagtgatcggaggagctctcgccggcgaggaaaacctatccttgctatctctgaaaaattctagttgattccgagtgttgaaacaactaaggaccgctgtttctgccttcatccatggtccataggcgggaactgcatcaccttgaggaggaaaggcataggccgttgaacgaaagcatgattttttgtcatgaccaaggtac

SEQ ID NO: 6463 - DNA, 653 bp, Cannabis sativa
ttaaaaaattagaagtgaatcctggttcaaatgtgttcaattagaattttgtggttcggataacatataggaatgttaggcaacaaatttattatttgccaagcataagttatgtgtatgtgcctcgtacatcatagggttttcccacatgataagacgagacaacatgatccattgaatggtcatatacaccctcaaaatgactgaaaattaaataataaaatatcactactcaaacttcagattagtcccttaaaagaaacttgtggattagttcatcatgacatatagaatgctgtctaaaacccttagaccatcaccaatatatggggtaaaaatatgctatttgtcacaaaaaattaataaatactatattttgcattttgtttttgcaaatgtgtacataatagcaaattaatatacaaattgataattatcattgataataatcaataaattaaatataatattttaaaaaaatatatgaaagtaactcattaatgttaaataatgataatgtaaataaaaatgattatttattgtgctaaataaaaatgccaaatttgacacaccactaaaggagttttaacaaaaagtataaaatatagcattgaaccacttatttagcattctattagaaatactcttataaa

SEQ ID NO: 6464 - DNA, 1565 bp, Cannabis sativa
tgaaggagcatttaactcaggctcctattttgtcaaaactcgtggaaagggaggatttatttttgtacttggtagtgtctaatcatgccgttagtgccacacttgtacgagaggaagacaaggtccagtatccagtttactatgtgagtaaaagactgctgggtgtagaatccaggtaccctatgatcgagaaattgacctttttcttactgaccgcgtcgcggaagctgagaatgtacttccaagcccatgccataaaagtactcacaaatcatcccctgcgtcaggttcttcaaaagctggagtcctctgacagattgctaaagtgggccatggaacttagccaatttaacatccattaccagccacaggtatctataaaaggacaagcccttactgactttgtaatggagttttccagcttcaacaacctcttgaaagatccaatccctaagttgcctacttggtaggtctacgtggatggagcatccaatgaaaagggggatggagccagggtgatcttaatttccccgcaagggtaccagctttagagttctttgcactttggatttcatgcctcaaacaacgaagcagaacacgaaaccatattagcaggtctaaaattggctaaggaggtaggggcctaacaagttgatatttatagcgattcacagctagtagttaatcaaatatctagtgaataccaaaaaaagggtgaatggatggtcgcctacgtcatgatgtctcgagatttgttacaaggatttaaaagctacaatatcttccaagtgcaaagagaacaaaatttgttcgcggatatgttggctaagctggcaatagatcctgagattattgaacacatggtagtcccagttggccatttgaagagacccaatattgatgtctaggaggtaaatgctatagtggataactctcattcctagatggcacgcatttacaaattcttgagtacaggggagcttcctacagataaggctacttccaggaaaatccagtctcaagctccccgttacataatcatggaggcaaagttatacccctgaggactattgatgccgtatttgaggtgcattgccagggcataaattagtgctataatccatgaggttcatggaggctttttacagagatcacacttttggaccaagtctttccaagaaaatccttcaataggggtacttttggcccacaatgaagaaggattgcatagagtatgtaaaaaagtgtgaacaatgccaaagatacgctaaggttctgagagcaccacccactaaaatcacgcttatgagtagcccgtggcctttcccagtttagggaattaaccttgtaggatccctcctcacaggcaaaggaggagtcaagtacgcgatagtcgcggttgattacttgatcaagtgggttgaggccgaaccaatgaacactgtcacctcgaaaaaggccttggattttgctattaagagcaatgtgtgtcagtacagacttttgtataaaattttctcaagacaatgggaaatagtttaacagtgagcacttcaccgacttct

SEQ ID NO: 6465 - DNA, 625 bp, Cannabis sativa
caatatcaatacctgccacattaaaacgtgcgatcaccgccacctacatccaaaatcaatcattagttgggccttccaaatcttaagcttaaataaaaataatatgtattaattattaactacatgtgtgtaatgttgtttccaataaataattcctgttgtttctctatacgtacttattacttcaccgtacaataatgaattcagtgcagagacattctgatgagaatttttggctgatcactaaagcgctatactcattttgagtgattaaagtacattcgtatacatatattgatccattatgtattaaaacataaaattaattctaatttttttaatgaaattaatagagaatatcaataattttattattaaatttttataataggcattacctttaaatgtgcactgtcatgaaatatatcaatatattaaaaaataatggaaaatcaattacttacctcaaagataaaactcattattaaaattttattgtatttactattattatactgatttagtttcccaaattttttcttgtactatttaaaaataagaattcaaccattgaaataaaagagttaaatattctcatttctttcacaaatccatagcagaaaga

SEQ ID NO: 6466 - DNA, 546 bp, Cannabis sativa
attaccgaaaaaataaacaattacttaaaagaaaattaaaacaattataaaatacaaactatatatttttgaactaaatcaatgtattcttaagtggattaatttggtttgatatgaatatttaattaactagtttgatttggttttgaatttatgaaaaacagtaacactagtttgattcgaaaaaaaaaaaattaaaaatttagaccaaatcaattcataagagggtggtaaaattttcaaaaagttatttagcgtggccaaagtatgagaacttaaaagataaacacaacaacataagctatatgatgataatctctccttataattcatcataactaatttcattcgtccctccttgagtgggtatacatatataaactataatcattgtctaagaaaacttttggtgagaaaatgatatatagaacgaatttctttttacgtggcgctggctgatagaaataatttattaaggggaagtgtagagtagagataattaaggagcgtgatttagtagataaaggaaaagtttgtggagtgatt

SEQ ID NO: 6467 - DNA, 928 bp, Cannabis sativa
cctaataacaatgcttatttattagctgaattataatatttctgatataaaattgcaaattagtaaactcattttattgtgatcaatccaattacctttgatttcgaaggaaataataacacgggttggtaaattaatttaaactagctagatagatatattaaattgtactaggatatcatatagcagtattctttttgggttggtgagattattttatttatttatttatttttttgagtgaggttgtaatattatattatatatatttatcttagtggagggttatttatttatttaattatatattaaggtctttcggaacattattgctggaaaggctattgccatgacctttgatacgtggccttaattcttaggctgattaattaagttgtttagctaattaaggccattaaggtctttcggaacattatcattaatagttatataaattgtttaataatatatataatattcattcattgttgattgtcaacacgtatggataatgtaacaattaagaacgcataagatatatatctcaaacaattaagaacgcatactaggattggctaacaatatagtttaaattatatacacatacttaattacactaataataaaaatataaatattgttaggctatcttctagcattttgtaattttgattgttcgatcgatggttgaaatactctttaatcgttataatatatatgatgacttcaacaatattatataatgatcatttgaactgactgttgcatgcagtgtgatcaatcttcaatttcaatgagtaatcttctccctatccaaaaataaaaaaaaaaacacaaaaaatttcttccttaaagaaaatatttaccgtactatgcatagtcatcactaattaagaagatatacataggtatactatccgcgtggtgt

SEQ ID NO: 6468 - DNA, 1126 bp, Cannabis sativa
aactagctctcagtaagaataaattgaaatactctagttatggcacctgccattcctttaagctccttagacaccttggtcacattctccacatggtgaagcacaatagcaacaactaactaatgcttagctttttggtgttgaaccaatataattaaatgaaaaacaaaatagtattaggaatttgacaccaatgtaaatagttagtagtaataacaaataactagctagcttgcttgttgtcctaattcgaaaaaactaaagaaacggtaatagtggtttaagattcaaaataaaatatcaattacaaaacaactccaaattacaaatcaaatgtaacatgtacaagatagtgaaaacaattattctatatggtctattcatacagctgaatcactcattccattgagtggccccttagagaaaaacaagtgtaatattggacaagagcagcatcaaaatcaaaattataaccactaaagagttcaaaatcagttattcaaacccgccacaattcaaaatgcaagaaattagaattgacacataatacaaaacaaaataagtctaaactaatacaattgaccaacttacatatctcatagtttgtttgaaactctaatgatgatgatgataatgtaaaaagaaacagacacacacatatatatacatgtgtccaaaattaacacactaataaaacagtcaataacaaataagtactccaccaaataaataaataaaatgatcattataactaattacgtaaaaattaattataatttttaaaaatggtatagatctagctagagatatatgggtaaacatatttttgtagtaagccctttattgacaagattctcatactttgtataccccaataagccacaagcaataatagtccaaaatgatgcaacatgtattcttaactcttcaccaactttaactgtaaaaaacatagccacatactccatagatctagtttagaatatgatttgaaaagaagagaaagagatcgaagctcgaaagaaaatcatgggtaagaaaagggttaaatttctggctgtcggagcttgggtctacggccggagggtgtaggggcagattgacgatgggacggaaggcaacgtgt

SEQ ID NO: 6469 - DNA, 1551 bp, Cannabis sativa
gcactcttgaattataatgtatatatatatagctctatatatgtatgttgtgtgtatatatgaatggttccaatatatatatatatatagctacgttgatcacattgtacatgttatatatatactcaattcgatctctttggctgtttgggtaatttatttataatattgttcttatgttttcaagaaatctagctacctaatatatatatccacatgcatgtcatggcttaatttcacttatataaatatatatatatatattacttaatttgatcatcattttcgatttaatttggaaataataatgcatccatgattattaattaactgccttattattaattcattcatactaaccgctattagcgaaatgaagaatcttgttgcaacaagtgttacttatcggaaaccccctagaaatttcatgttgaataataatgaacatgcatggttgaaattcaaataaatgtttcatgcaaccaaaatcaaatccatgactcactaattaatggcatcaacatgactcaccatgcatattgtgaaattgttgaattactacggatactcaactctaattttgttaaattatatatatatatatattactgtatgttggtttatatataagggttcaggaattcaaatatttagaagaaaaaaaaatcagttagggatttgttatttagatatttatcgtattaacttttttttattaaaaaaaaacttgtcaaaaatataatagtttgatataattaattaattatatggtttgaacaagttataaccttttttttgaataaaaattgggaacagaaaaacagaacgtaccctaaaataatgttttccaatttaaaatatatttttttcttaatatattagttgtcgtttatcaacgtcgttttgaaaatagggtcgtttttattatgtagtttgtttacgatctttttatgattgtcaaggtctcgtcaaagttttttcaaagttataatataaatattaatgtcaagaaataaaactaagatatattaattccctaaaaatcacgaaagagtaagccttataaaaaaaatagtaacagaattgaaaaagagtttgaaattaaaaagaagaaacaaaagttgatgaagcattcactaattaattagcattattggtacgattcctaatatacacgcagtactgataagctccaagggttagcccactgttctgtttgggacaattcaaaaccacttttggaataaactcacaacactgatcgctaattactgggcaatctttgtttttataactcgacatctctgcataacatgatgtaaagttacaattattaaagccattttgaggaacatcagtacttggaatacaacgcgaattatcatgtggtggtggtggtggtggtggtggtggttgcgaaggccgagatgagctgggtggcgctggtgttggaagagcccgagaaggcggtggagttgaattttgaacacaagaatttttgctttgcatgaacaacccatatggtagtggaggagggcaaccgctattagc

SEQ ID NO: 6470 - DNA, 1084 bp, Cannabis sativa
agagaaccctcttggaatgtcttttaagaaatgtgttggataggattctttagagttagagtatgcccagctcataactaatctataattatatgacctatcactttgtagcccaatgagctatgacctacttttaacataaccctttattacaaaaaaaatgagttaggtaggccaagttgtataatttggcccattttttgtgcacctatattgctaactatttttgaaaagtaattttaaatctaaactagaaaaattaagcaaaaagttgaaagtgaaaattttaaggcttgattaattgataatttaaaaattgttgttctcaaatgaaaatatgaattttgtgactaaaaactgtttatgaacaggacgaatctgaaaaataaaattgaggcagggtaaatatttatattttgtagaaagtttagaattttcataaattttataaaattagatataataaaatttgaagtaacttttatgaacattttacatttacatttacattttatgcatagttggtaatcggttcaaatatattgtaacgataatatttaataaatttttaaaaggagtattgaatttgcaatctcttaaactttgaaaaaaaaatcaaaacattatttcaacttaaacaaatagtgtgtgccattaaattaattttaatatgaaaatataaaggaaaagagagatagaagtaattattcttgcttttcggctaagaatatacataacaaagtttgcttatctactacaaaacacaaaatttatatgatcaaaacaagaaattaaagaagttcggttgtactccggttccttctatctctgataacactgtttttgtaatgactgtgaggtctaactgtttttctttctaatctatgaatacttttttttttttttaaaaaaaaaaaccaaataagaaattaaagaagtaatttgctgaataaatatgaagatcacaaaaatcaacacctccatttaccaattaatttgatatatataacaagtgagacagattctaatatcactgttaaaagtcacattacttcaagaaatatagccattttaaaagctataa

SEQ ID NO: 6471 - DNA, 670 bp, Cannabis sativa
ttttggtttatggacagccaaaacgttaaaaaattataaaagaattaataaattcatcacagatgaaaatatataagaaattattttgaaaaaataggatgcatttttttgtttgacaattttatgtctattcatccatgttaatattgttagcaaaatatattttgtattaagtaagagtatattatacatatttgtctagcttgtttatttatttaatttacttttttacaaaaaaaaaaaaaatatattggattgacaattaattaattctatgtatatttaactataatataatgaaacttttggttttgaccttaaggaattgagaaataggttgataatatatatatatatttatatatttttagttaaatttacattttaatttgtgtattgtgtatagatatagatctttctcttggtgtttgttttagtttattattggtttcaattccatcggtttagttaggttttattgttttttgttacactcattcttgttataaccaatatattatacttaataataattaggataatattcaatcatcaccattaattaggtaattaaggtgttgtagatatttttaagtgtgttacttgtcataattataatttttaggtccaaaaaataaagttaatatagtcaaagccgatcttattgtta

SEQ ID NO: 6472 - DNA, 1191 bp, Cannabis sativa
acaaattgattgcgctattgctttaagtagtatttcttttcatcctgcagagaacaacttctcttgccatgctgagaggagattccacagcttatccttaatttcaccaaaaagaatttttttgtctcttcctgaataagaaggcaacttgagatacctttcatggcacagttttgttggcatgttaagtacttcctgaaacacatctttcttagtttaaaccgtgtttggtgagaaggaaagaactgatttatcttcgtttaaactctagcctgaagcatgacagtagcaagttagagagtgtttaattgcaattgcagagcttcggtttgctttacacaatatcaagctgtcatctgcgaaaaataaatgcgaaactgatggagctcccctagcaatctgtaagccgtgtaaggaacctatgttttcctcatgttgtagtaatctcgataaaccttcagctcaaataatgaataggtaaggagataatggatccccttgtctcagccctcgctgaggaataatatttccctggatggaaccattcagctgaaaagagtaagtcacagtcgagatacatctgtgatgagagccacaagtgagggagaaaatcccaaagtcaacaacataccttgtacaaaatgtcattcaaccctgtcgaaggctttactcatgccgagttttatagctgcatatccttgtttaccatgtttgagatgctttaatgagtgaataagttcaaaagcaaccagtatattatcagtgataaggcgagatggcaagaaagcactttgagattccgagattacacatgaaaggaaaggctgagaacaatggatttggataccaacttatagagtacattgcacaagctaatgggacgaagatgggacattgaattaggttttttgatcttaggtatgagagtgatgagagtatggttcaatgaagatgggtctccaccatcattgagaacttttagaacagcttgcgaaataactttaccaataatgtgccaataatttgtataaaacatgacggacattccatcaagaccgggactacaatcatcactcatggatttcagagcagcaaagacatcctcttctttgaaaggcctggtaagttccacattcatctcatctgtgactaagcatggaacagtatcaagaactgttcgaatggcagcaa

SEQ ID NO: 6473 - DNA, 1252 bp, Cannabis sativa
tattaacgatattagcaatatttcaaaatccaaaactaatagacatgttcatctattcacagagtgaaattatattttttctacaacacttacattttagttaatttcgaaaggttgccataggtagccggaatttcagattcactgaaattgttgttatcaagttgactgcaaaagaaagaacacatttataaataaaatatcagtactattttgtcatttcatttcctatataaacagcataggattgttaacaataagagttaaagctaataaatagtggcttatcataaatcatgaagagaaccagttttgcctaagcattttagaaacaggatattccaattacattctcggaacagttccccagttcaaatgaaagacttgagagtctagttagaaacttagttgctttttgttcattaaataaagtacacaaaaacttgaatgcaagtagtaatcttaagagaatggaactgactcagtgtcaaattatcaacatttgaactaaggtttcggctttataccttaccttcaatttctttcttttaagtaaagattttataccagctatgaagcatgaacaattagctttggctttcaaatatcctaatgctacacaaatcagtgactaaaagagaacatataacttaagtaacaaagtaatgaaaaagcaaaatacagttcaagaacctagatcatttactgaagtaatttataggtaatttcatttagtaatccaataatgttgagcaggagaagcatacagtatggccagctctgttatgtttgcaagttctggtggaagcttcccagtaaagttgttattatccaaaagcctgcgatattttatttttattcgccaaccacatgttcccaagatgttagcatacttccaaaaattccatcaataaatgaagcaagtggtacataaactcacaagtgaagaagacggggtaacttggaaagctcagaaggaatttgaccactgaaagaattgttgttgaagtggctgcaaagtaagaggcataaggtaagagtaagacacacatgtaaaagcaggtcagcttgaagaggtgtttttcaaaaagatgcacttacaggtgtctaacaccgttcaaatttgcaaaatattttggtattggacctgacatttggttctcatcgacctgtagtcgatttaattttgatagatttccaagctcatcaggaaaagaacctgtaagtttgtttccattcaagagcctgcata

SEQ ID NO: 6474 - DNA, 1796 bp, Cannabis sativa
caacccggccatgtattttttttttatcaatgatgatgttaggatcaatatctgtacttttattataaatataaataaaaccggttgtgaaaggagcagtctatttcttttgacatatgaatcagactgtgtttccgagaagagacttgaataaaagatatctgatttttgcccattttcttttgcagtgtgccacatggatgacaattgttgtacccactagcatgacggcatatctatatctttactcacatggggaagtatcactggctgcatcacaaccagtgtaatagatgcatccatctacttatatacgattattaagttattttattgtttcttctcacctggatcgctactttatgaactatttttatcttctttgaacccaaaaagtgctgtcaaaactatgatccttatgtaatcagtaaatgtacgtgaataatttgtgtttaactacagatgttaaacttacctcctgaatttgaaaagttgattacataggtaggataacagtttctaggataatttgattaacacacatcaggccatgctggagtcattatcccttgtagtttatctccttcctagcaaagccatttacatagggttctatggtggatcaagtgtacatagaaaaaaaggcttaggggctccatttacctagaattttgggttgaacattagtatgctcaaatataaatgaaagcattatggtggtttaagaaagaggagacggaataagtcttatgtgttttctaattaccatgtttccattttcagttttaatacaatttgtatttggttttatattttccacacatatgataggactttctattactgagtaaatgatttttttaataagatgtttatgtagttttccagaactaacataattgtttgttctttttttttggtaatctcacaaagaaatgataggatttttcagtgaatcatccagtatgaaaattaagcatgtggaaatctgaatgagccaaaatgttaattttataaagagtaaataaaattgtgttgcaattagtgatgcagttattactgttcatgaactataatagtacatttaaatttcccatcatcaactatcacaatgacattgccgttcacactattcatttccttactagtttgaatatttttttaaaagtcttcctatgttcttctgtaggtgctcttatatgctgctattgcgttgctgttggtgtttccctttgatattttttatttgtcaactcgcttctatttgttgaggactctttaccgtatagttcttcctctacaggcaagtttttttagttgaaccattcagctttataatttccttaagttttgtgtttgatatgttgccataaagtttctatctattttgtgtatgcaggcaatcactttttctgatttttttgtggctgatattttgacttccatgtctaaggtaggttcttaatatctacttaccatttttgagtggtttccttccttgaacaatttaattttagtattgcagaggaaaacaaagatctagatgtttttggaacctgttatatgtgttttaagcaagcataggacatgtgttgttaaactttcgaagtagctaagtacagccttttttttttctcttttttaaagggataagatgaaattttatgtgcctatattattttaatttattttttatgcaggtattgtcggatttggagagatcagcttgtcgtatggtccatcgacaggttagtaatttcaacagttgaactttagtttaatatttattgatcggt

SEQ ID NO: 6475 - DNA, 604 bp, Cannabis sativa
ttcttaacaaaatgtcctttttttttgttctcatctcagcaaaacatagagttaaattataagctgcaggtcattcaagctgagctagaatcaacaaaaatggaaatggttaagaaagaggagtacctgaaagacttactcgaactcttaaaatcaacaatgaaggaaagagatgaaacaatgtatgagttgcactacttagagtctatgatgctgaaatgtattaatgatcaacctcctcaacctcaaaataacagtcctatctcaacaatgcctgatgccaaaaccaactcagactcaagcattatatcagaatcaccaaatcatttttctgctgatgagacttacctaaattattctcatcagggctcttattctccacaactctccaacaacatggctgaatattcaagccagattgatttgggttctgatgtgattgagaatctttcccaaggaaaacttctgcctctgcaaggaaaactattgcaggctgtttcggatgctggtacagtacttcctcaaaatcttcttccaactcggcggaaccgcccgcctccctcgcagcccttccaaattctgcctgaaggtgccggtgccggtg

SEQ ID NO: 6476 - DNA, 1390 bp, Cannabis sativa
aggggtcttggcctgaagacattaaggactggaattgagtgtgtggagagtgaagtttgtggagattgaaggtgaagacgaagatgacccataaaattcatgtccgttaattctgttgttgtctttgtttttatagtttttctctattaatttattatatattagtaaagagagattattaacatcaagtcgatatgtccgagtggttaaggagacagacttgaaatctgttgggcttcgcccgcgcaggttcgaaccctgctgtcgacgttatcgatttaatttgaattttaatcaaacgacaatttttcctttttgaaagccaaatgtcgttttttttgttctacacaaaagaaatgaaaatttgaaacataaacatttgagttgttgagattgttgcattttaaaaaatagcattataaatagttaaatttctcaattaagctaaagaaaaaaatatacaatttgttttgatttttgcgttttattatttagatctttagtttgttttagatttgattttgagtattttttcaaattttttgtagctgaccaaatctaaatactcttttattatcttataggttataggtgtgaattagttttgttttcatctaattttcttacactcttctttatttagttttataaacgtattgttttattttgttttagtgattctggtaaattattttgattttggtaaactatcatttatgtctagtctagcagcattaataagttggactctagcttttatgttcatcttaacctgttaagtaactaatgggatagaattacaagaggcctcaaaaatacacttattctgattgcaccaaacaaaatacactattgttcccaaagcaaccgagacaatcttggcagcaatgcctttcaaggagttgatccaattattaacccaatcagctaaatggtttggccatgttgtcaaaccgaaccacttgacaacaatctataagattgttctagagaaaatgcagtcaaaaaatagatgattatgagtttctgaaactgcttcacagacaaggcagaaagaaaagtctatagtgataaatcagtgataaatctgtcaataagatcacgagttaataagtacttatttaatgttgcccagaaaataaacctatattttggaacattaaatctatggcaaacaattttgtaataattcaccttatctttacaaattagagaataatagaactttttaaccttgtattttcctaatcggcctcaatcaacgcctctttgtcgatacaaagtctaagtttgacaagtttcttaaattacgagcttacatcatgtagttatagtccaaaatttatcatccttcaaataaagtgcgttgatctaccgaccccataagcaa

SEQ ID NO: 6477 - DNA, 892 bp, Cannabis sativa
tggccagtattaaaatttaaattatgatcctaaatttatttgaaaagtttccccgatttgtcactgcaaattgcgatgcaaattagggtctattttaaaaaaaaaaattgtacagctttaaaaagtgttgctgttgtctctaggtttctatgtgttataaattggacttagagaacagtcaaacatactcatctcttctagtctcatattttcatattttattttgtgagaagattatttcttttgtaagaacctagagtgttcaactaggtttttattttcttgtagtgatcttttgatgttcatagaataaaatgaagagaagctttaaacaagcgtggatcttcgggaaaagacttttctaagtctcatttcaagagaaggtggccatatatctttgggagaagatctgtcaaagactcacttggagaggaagtgagcacgcatcaatagctaaagagagttcactacttagtgtatttcagagatcatattagccaggtagattataaatggttgtgataaatgattaaagggcatctaattttgtgtaagtcaatgcttttttaatctttggtgctttaactaattgattttattctcttagtgtggccccgtgaactagtagtatttcaaaaaatactgataccacatataatattttgtattaaattttaaattttgtactatttatttctacaattgtcttattactgtaattcggcattctacaatctcaagttaaatatggaaaaacacaatttttcacacattcatataatattttgtatcttcctctgttttcttcatttcttgtatagttgtatatggtattaatatagggtgtctataatacaaacatcacaaaggactatggactgattaactaaaa

SEQ ID NO: 6478 - DNA, 938 bp, Cannabis sativa
gttaataatataattaagcatctaaatttaatttttataaaatatggcaaactaattataaataactacttttaaatagtatgatgtcttatagcaatatgctctttattgaacatgtccttcttagaatgggacgcactttattggctatatttatttgtgttgataatttaaattggactagacgagtgtcgacctaaatttaatcattcatgacattttattaagctgtactacttctagttagttaattctattagagttttgtatgaagttagtttaggttgttatctttgtaacacagttagttgttgtcactactataaaaaggatttttatgttagttgtctttctttttttaagtcggtaagaacctctctgcatctataaatatcattagcctcttgatcatttttgattcactactacaaaaatgactttttacttcggttataaagcgacgcataaacattttgtgtcggttggtaaaagcgacataataatggcagatacaaatagtcaagttatttgcttcattttaaaacccgacgcaaactttttttttcttcgattgagaactgaagcaaaaagtatgctctattagcgtcagttcttaagtgaagcaagaaacttagcttcaaactgtaaccaaagctaattgggttattgcgtcggttacaatttgacacatatttttatgcaatttttttttactttttgtggcagctataaagagacgcattgcggtaggtaggagaaaattgcagatttctttgcaattttttccacttgcattttcaaatattagaattgatttgcataacaatatttatatgactaacaataacatttgtaatataataattgtgaggactcggttaagtgactcaaaagtaaaaatataaataatgataaataaataatataatgtatatatg

SEQ ID NO: 6479 - DNA, 1083 bp, Cannabis sativa
cattgattttttagtttttgttggacaagcctcatataaactaattcctcaaccttaccacctgctctcaggcctttttattttttatgctgcaaagggctagcccgctcctagccccacaaaaattttatatttttacgaactactatccgtcctcgaaaagggtgataattacaaagatggattttataagttacaaacccatctagccaatgaaaccccagttcccttcaactctcaaaagtatatcaaggaatactgtcataggtttttcttttcatcagggttcaaaaccttcgaacgctcagacctcttgactgagtggggtaggatccctcctttgcaccgaacgactcccattcaactatgtttaaatcatgccaaaatatttgctggttataagagggcaaaattgaatgtgggtgatttgatgactactttcaattgctgctagggaaaacttatcttgagccaccaaacatttgaagacttcaatttatccaaggtatcatgccccaatgccaagaacctgggaccaaagtagaagctcctgctggagatcatagaaatagttgaggataagtaaaacaggtactagtacaaaaataagtagaaaaaccattacacatgccttcaaagtgcatccaacaagataaaccaggagaagatagggaaaaattctacagccacgaggcctcatttacccttttgggttcccaactcttggacccttggagccaatacttctggaacccgtaagtcccccttcaattttcattatgttcatttagttcaagaatactctcactcacagacggtcggcttttgcgtgaggttatataggttctggatgccccatactcggtggggaaatagggaaaatgacttttattttttaaacacgagtggcttcgtgggctgatctcaattgagtcctagtctccaaattcctatcttattggatcattcttgctacataacttgaagctaatttcttccatctgatagttttttaggagatgacaacaccaactctttaatttatgaatctactaagacagaattaggacatcaaggtaggaa

SEQ ID NO: 6480 - DNA, 531 bp, Cannabis sativa
aattaaaaaagcaacttgctcagtctcccatcctaccaaagcccctagataatgaagaattgggaatatacctagaagttatagaatttgcaataactgtggtccttatcaaagaaggagatggagttaaacatctgatatactatgttagcaagaggattattaatttggaaaatcgataccctccaatcaaaaagttaacatattacttgctgcttgcctcaagaaaattaaggctttactttcaagctcatcccatcaaagtctacactaactagtcctacaacaagtgttacagaagcgtgaactgtcaggtcggttgcttaaatggccaatcaaacaaggataatacgagataacctacaaaccaatggtggcaataaaaggccaagatctcgctaattttgtggctgaatacacaaatatcaccccaaaaactctaaacaagatcaaggcagaagcaaaatccagagaagaagtgagagcaagtgcaagagattctaacatggaaattgcatgtagatggttctt

SEQ ID NO: 6481 - DNA, 929 bp, Cannabis sativa
  modified_base (564)..(569): a, c, t, g, unknown or other
aataacgactacaagtaaaatatggtaataatagtgggttgcatatagtgacaaatataagtgaaatacagtaataacaataatttttaatatagtgacaactgcatgtgagatatggttgacaatagttttttagctagatatctatttatgttaggatttttcaacttctaatatatttttactacaatatttgaagatatctttgtttgcttctttttttttttttatataaatttatttttctaaagttgtgtcaaaaaaaaaattctaagtaagataaaataaaaatttagtaaaatagttctcatataatttttttaaaaaaatataccaacaatattaaaattaaaaatataatataattttatgatttaattatcactaaacgaaatacaaccgcacgcgaagcgtgatttgtttcctagttatttataaattttaaatttcaatttgtatattcaaatacaataaaaattattaactataaaatttagggtataaatacaattttggatcctgtattttgtaaaaattatcaattggaccttgtgttttgttaannnnnnaaatgaaccctgtattttctaaaattgtacaaataggaccctgaactgactttttgtcaaaataaaacttaataataatccgatctagagatattttggtaaatatatatagttacattttttgtatatgttcatgttataaattgtcttcaagatggttttattaaaatataaattgtcagaaattgggctcagggttctatttttactatttggaaaatatagtatctattttttcatttgacaaaacctaaagtccaattagtaattttgtaagacccatggtccaaaatgacatgatatgtaccctaaaatttaaagtttaatttaaaggcaataaaatttaaactttaaaatttt

SEQ ID NO: 6482 - DNA, 563 bp, Cannabis sativa
tttttttttttttttcaaacaataattaaaatcaactaaagaaaaaaggaaaaagtgttaccttagtggacagtcgacactgcattataatttttcgtacatgttggacacgtgtaatatagccttctcctaacttaaaatgattatataatgcttagaagttagaactccaacctaatccatcatccacatctgaataacagaatcccaaaacagctgcaccccaagttttccctcgttgctgattaatgttttccttttcagactaaatgaccaaccaaatttgactcttaccataatttattccctatggcaaggtatatatatatttctgcataaacatatatcatctttactcattaaatcagcagaattaaaataatctctttttttttttccttcatattttgatatgggtttttcttggtttggtattattgttcttgctcttctttttctaatctcaagctcaggagaagcagaactagaagtctctaccattgatgtccaaacagccaaggcacttatcaattcagaccatctatatcttgatgttaggtaaa

SEQ ID NO: 6483 - DNA, 539 bp, Cannabis sativa
ctcctccatcgaaggcatgttcaatatctactgcataaacagaagagttctttattcgtttattttattgttaacgaaggaaaagttatccctttactgaagaggaaattgttgtggcttggtttggtcacacaggtgtaaataaggaaaaataaataaatagagcaaaaatgttccatttatgtagtctgttaatgttagtttattggtttattttggtctggttttaggtggtaggtagaaacacccaaagttctgatgttataggatcttggcagagacatgcccctggaaaccaaacatggcccaccaacaaatatggaagttcaggtattgttatcactcagatacagattgttactaaatcttttcatttcttcatctagatttgacactactaaatcttattcaaaactaaccaatgtttttggatttactacttttcatatgctcctatttttgcaaagccaaatttttagaagttagtagaactgtcatatattctaggaaatgaaaaactatattcgatgacaatattt

SEQ ID NO: 6484 - DNA, 731 bp, Cannabis sativa
ggtgtatttatcattttataaatgcccttcattttaattatttttatttatataaatatgtatttttaatccatctttaacgtggagagaaattatgtgggaaaagaattacttgtcagagaacttcgatggaaggttggtaatggggatgaaattttttgcgccagagacccttggctgccaggtttcacctcttttacgcctctagtttttcaaggtgatgacaaaactctaaaggtttcggctttactctcggacaatcgtcaatagaacttgtccatgttaaagtctttatttttagactctgctgtcaacaaaatactcagtatttctcttactcttgatgaacaacaagacacccttatgtggtatcatgaatctaatggtatgtatacagttaaatctggttattgtctggctatgcagttaaaagaccaatctccatcagctagtggcattcttgcccaacaatagtggaaaaaattctgggggctgtccttaccctcaaagattcgaatttttctttggcgtgccatccatgactgccttcttgttgttgaaattcttcacaccatgcatataaatgactctacaacctgttctatttgcaactgttacaaagagacaatcattcatgctctcttccttcgtaaacgggttcaacaagtttggaatcactccacttttagtcttgaaggtttgtcttttaacaataggagcttgaaagaaat

SEQ ID NO: 6485 - DNA, 1178 bp, Cannabis sativa
ttttctgaaattcatgttaataaagttcgtatccttcgctaaaatttactttacaaaatatagaatgtcgatttgtaataattaacactcttttatataaggtcagtagatatatggagaaatctatcataccaaccgtctaagcttgtaatatattgtgtttttccctcttccagttttatacttacttgttatttgtttcttgctatctgtttgctttgttacggtgttttgcatttttactttctccattgaaaaaacgattggtaaggaggcctatgctcaagaaatgcatgctttattggtgctcttattttaattctttgtccatttttccatacatgaagctctgtatgatttagtatgttacagcatttgttctttgcaattcaatctttaactggattctcattgcaatgtttgaaggattgtgaaacgaaaggttatggagtctgaagtcggtaattgctaatccttactgctctaaaacagctgctatgaatgccatggagaaaattaattgatagaaatgccctgattagcactgttcattatcattagttaattcatatattcttctataagaaaatcaattagtaactgttactaccaatttgaatatgtattacattcactttttaatattcttatccttggagaaaagggccccttgtaaatatgaagagtgtgttatgcattaaatttaggctgagatctaattatcattaatggtgatgatgaaaagaataatggggtttgtcgtttgtcttgctttagcttgtctcaatcaaaattatgggaattttaaaggttgctatgtgattacagtaacaactgttaaatttgactcgtatactctaattttattgcaatgctgatttttgtctgttgtggatgaaacggaatgcatggaactgagagatgaagagaagggctggagctggttgctatctttccttcatcaaatttgtagtagaaggtgaattaacagtagattatataggctaagcctaaagaaatgactcacacaacctatacttattagctttgaatctctggcttcttttttttttttttctgatacaatactgcctatgggtacgttttctaagttattccacgccattttcttatggtagcttatatagtgattaattgtcattccttgtagaaccatg

SEQ ID NO: 6486 - DNA, 1043 bp, Cannabis sativa
cttcatgaagcattgaattttgttactcttaccttattccaaagtttcaatctttgtaataatctgatttttgagtagttcaaaccttttttttgaatgctaacttggcattactctactcggctgtgatgtatgaaattggattttgagtatgttcatattactacttctaccaaatgctttcattttatttatttttaaaatcaaatatttgggatatcaacttttattaatactacaaagaaaacttacataaaatagtataattgtttatttggtaaattagtcattcgtattgttttatcctgcattacttatatttttacttaatagttttgtatttaattatgagttaattaaagagagagacaaataaaggaaatataatgagcttgtacaacttagggccggtcttaaacgggttcatgtttagagttcatattttttgggatccaaaacaaaaaataaaaaattctttttaagtttttattcatagcgtaattagttggatgtattatatattaatacaatgtataagttttttaatatttttgagagtgaagatccaaaaccttaggttcataaactctcaaggtggaacattggtatagaagcttctaatgttgaggtttaatgttgttttactatggttctaatgtgcatacataattaagttaagttgtctttagataattggagcttctattttattaaataataaaaaaaatatatatataaataaaatagcttaattttaaaaacaattcctaacacgaatcaaacatataaaaaaaatttattttaacaaaaatattttatcatttaatacaagatcacaaaaatttgcaacataagatccatatttacccttattaatttatcattaatttaaatataagcattggtttcttacactaaggccttactaagattatgttccaatatcataactcattatggataattggatatataattgttgttatgattgttttaatgccttattataattatgttgtcttttcaaaagtataattttccaa

SEQ ID NO: 6487 - DNA, 699 bp, Cannabis sativa
aaaaaaaaaaaaaaattaaaccagaaattatataagctatgaaaatacagcgtatcaacacaaagtattcttcttaagtttcttcttttttgaggtaaagttgcttggaccaatttctatagacattcttttggttctgcaaagcataaaaataagtaaatagaatgagcgaagaattctatatatcaacttaaactgcaattgaaaatcaatactcaaaagtataaaacaacacagtttataaagcagcataccttgttaaaagttcttctgactctttattgtcatcatcttcaactacatttcgtgtagaaagttcttctaactccttacaattatcatcatcatcgacgtcgtcgtcaattgcatcagctggagaaggaagttacaatcagaaggaaaatccattatcaggataaaggacataaacttcatacttggtaataatattaaaaccagtcctctccaaagccagccaacaaaatcgaattaaaacacctccaaaatcatgcagatcaaactcccgatattgcaagtttggttgggtcattctctattgaattctgacaattggacatcaaatgtatgcaggaaggaaaactaaaacaaaggatggagtttggtcccaaaagccatgtgatttaaaggttctttatcttcaaataaaagattttaaagacatggagaaacaggaaaaac

SEQ ID NO: 6488 - DNA, 546 bp, Cannabis sativa
gctcaaagaatttgtgaaaaaaaaccccatttgattggatattataatattctaaataccttttgagaattgttaaagggcaataatagagtgtttaacattatctgaagttatatattgttattagtacaattaattatcaggtcataaaatattacctcataacagtgttcaaaaacttttattattcatctttatccgattaaagattattcatgtatttttctaaaaatttattagattcttcttcatcattcttttatgagaatgcttaaagacatttgtgaagtctagtatcttcatacgtgtcaatatcgttattagtgcaattaagtatcgagtcacatataatttttaagaaatatcactaattaattacaaaacaacatgtctaccaggtactaagtatcactgatacccaataacaatactcttattttatttgtgtgcttattactaatcctaatctgaaaagagtatttatgccaaattgagtaattattcttcaatactaaaatgctttcactttattttgtagatttcaga

SEQ ID NO: 6489 - DNA, 615 bp, Cannabis sativa
cttaaagtggctcttaacaccttaacatttctcaatatcaaatatcagagaattttgttgagtttacttttaggatttagatttaatattgggaagaccaagactttgtgataaatcaatgaattaatgaaatttgtcatggttctgattcaatttgtcaaaattaagtaattgaccacacgtacatgcgggaaatttcaaatatgtgcagaaacaaattagcttcaaataaattaacaaataattagtaatgacaaaatcaactaaacacaattcgagaattgaaagaatagcaaaatataatagagacaataaaattataaataaacaatgtaagaaaattgtaaaattaataccaaaaattatattggttcaagtccgatatatcgatgtgatatatgattctactccaattctgaaacaccatcaaaacttcttttattgattgagcaataacaatacagttaagagcaattctctatttggaatctctcaaggtattttctctataacactcttctctgagaagctttttcatctacagaagcttccccttcacaaaacccaaaatccaattttctcttttcactgtatccctctctctctctctctctc

SEQ ID NO: 6490 - DNA, 734 bp, Cannabis sativa
atccaatatccaaaaacaacaactctacagccctttaaatcattatcatgaacaggatgtatgtctctctaacctaaattattgattgtgcaaaaaacaaaaaacaataattgagcagttgtacttaactagatttattccccaattcagcaaaataaatataaaaacaaacattaattacaaaaatatatttataattaacataaacaagataagaggaacaagcatacctgattaactgcaggtacaatctttgcaaacttaagcaactctttaatctgctgaatactgaaattactaactccaatagctctaaccagacccaattcaaccaaagcttccatggctttccatgctttcttcaaccgattcaagaactgcctatactcacttccagacttggatggaggatcagtggcatcaccaaaggctgaactttcaggccagtgcatcaaatacagatctaaataagaaaccccaagattctttagagaaactctaacataattctcaatcttattgagagagttcatggtacaataaagcttagaagtcaaaaaaacatcttctctcttaagtgaccccatgaatgcttcagccaaagcttccccaacttcaacctcattcccataaagatgtgcacaatcaatatggcggtaacctactgacaatgccattttcacagcttcaacacaaaggtctccaccactctgccatgtcccaagcccaacagc

SEQ ID NO: 6491 - DNA, 833 bp, Cannabis sativa
agtattttactttaataactcccacagtcataaaatatgtgctttgatacatattattatatatctttaagatgatcatgagaagtctttggatcttggtaatacattgtttggcttgaagttgcttagtgcagcattccatcactcaatgtaagacctacttacggcaaataatacaattaattaattagcttttcaattatcaaaaaaaataaaaattaattagcttttcaattctatatttataaatatatacaaggaaaataaaatgaaagtaatacatatgataaagtaattactttgagttatataaagaggttccaaaaatttggtctaaaataataagattctaaagactgtaagtaagatccatccaaatgtttgaaatctgttagctcacttggaagtgatatataaagtcactgtttccatatgttgttcctaaaatctaaattttagtgcaaatatatttttataaaaacataaattcaaaataaaatttttaaatagttgtttacctttaagatcattttttcttgtaaatcatgggtaacacattgggttgaaattgtggatacatctttcccttttgtagcaatatcatctacaatactttcttcatttgaaacctttaagaaaagaaaaaaaaagtactttagtctaagaaaatataaagagaaagtcaaaaaatatatttaaattaatattaccttaattctttttcataggtatcgactttcttattatctcgtacatttttcttcatagaagcaactttctctaatttagaaattttatgcttttttggtggtcattcatgtctttgtacaacc

SEQ ID NO: 6492 - DNA, 1036 bp, Cannabis sativa
atctgtggaaacttgtaggtgttcatcttcttcaattgacaatgttgaagtggagtcgttgaagtgatttcctctacatctttttagtgtttgcctcaaagataggccatcactttgtcttttaatttgcagatttgggttagagttctctttctccaaaaaattccctggagccgtgggaatagatggagaagcatcagtattggtaaaaagagttgaggtgttaacccagttatgcttattggtgactgaaactgcttgtgttgtgggggggtaagtcgcataagtattattggacaatggtgctgaaatcgcaggcatgtaaattgatgagagatctgtgtaattgggatcaggatcaatagatgaaaaagtgggctttacaccatcattctttgaggcagaggagtgtgtagttaggctagtgttatgattaagaatgggcggcttaaaatgaatggactgtgagggtaaggtaacaggtggaggagggatgttaatgagaggaacattcaccccaatatgttcatcaactgcaacatttgccgtttcttgagaggactccccatctaagaattgtcgtggttgaggcagaccacgtaactgaaggcttggaatagcagcagtgaaacttttcttggcaagccgagtcaaaagtggccaagcatcccctttagaaaaatcagttctgtatctatcgtaacttgaaacaggcagaggtgatccttttatatacggctgatattcaagtgctggttcatcaccattatccaattgctagagatacttctgacatttattatatgggtgaccaattatcccacattccatacaatattccggcaacctttcataacgaaaatcaacccagaacttatccttaacatgagtgagtgagatcatacgccctctctttagaggtttggtggtatcgagtttaattcggatacgcaaaaaaggcccccaaccttcattcaaggagtcttcaaagacatcaatgtactcaccaacaatatttccaagagcaatagccaac

SEQ ID NO: 6493 - DNA, 508 bp, Cannabis sativa
ggggagccatatcccatttgttgatttagtaaggcccaatattagccaacaatacaaaggaaggcccataggagacttttaagtcttcctttagtaattgacatttttacaaaaaatactgaaggttaggtaaatatttacaattttatgcacatgaattttttttacaaaaatactattttttataaatcagtcgtaaaatataacaattaaaaacaatgaattaactaaaaaactccttagttgttagtaattagtataagaaggaagagctctctttcgttgtctctttcattggttggtttgtagtcccaattgaaggaggaatggattatggggattatttatttttatgttttaaccaaaaaaaaaatatatttttgttaacttcaattagcaatgtctctaattttttaaccactaaccaatgtagcttgtagtattgctagagcttctctttcttattttttttctttgatgttctgctgagcttttgttgcatacaata

SEQ ID NO: 6494 - DNA, 819 bp, Cannabis sativa
tgtttgttccctgatgaatgatgacatgaactagaacagtttattgttagtgtatgcatgattggagtgaaattcttattaaatttttattgcagttattaataattcaggttttattttctctgtgatcagtgtgtatggtatggcctactctgacatcctgaatttgttgtttgcggttggggtttggtgttttgcctatattgctgctgcagttcttgaatctcttcgagtcttcaattttctctgcccaacttgatttggttattgagggctgtttgtaggggtcatggggtatgctcagcttgtaattggtcctgcaggaagtggaaaggtgattttcagcttataaaagctaacccaaaaaccatgtttcagtgagttgttactttaattggtgttaattttgatgttatgtttttttttggtaattgtgatcagtcaacatattgttctagtctttaccgacattgtgaagctgttgggaggagtatacatattataaatctagatcctgctgcagaaaactttgattaccctgtggcctttggtaagtatttctttctttacggttgttccaggttttatttttttcacctggatttctatttttttaatttataaagtgatttttgttatcttgctttgtgttgtagtaccagaaattaagtcttttttcttctttttttgcttgcagatattagagaactgatttcattggaagatgttatggaggaacttggcttaggccccaatggtggccttatgtactgcatggagtatccttgatttactttctaaatttcatctttgattttt

SEQ ID NO: 6495 - DNA, 1424 bp, Cannabis sativa
aatctgcagcttggtctttgtgtcattgccagagatcgttggggcatgcccttttcttgtgtactaaagctaaacaggtttggtccatagctaagcttatcacggctattccaaatctgcaacatctgaatgggtttgagattttctcttcaatggctgctgtccacacgaactctgagctagagagaattctttgtcttatgtggagtatttggactgaaagaaataaggagattcatggaacaaagccgaaacctgcttctataatttgatcttttgcagacagttatgttaatcaattcataaactccactctgcagcaccacatattcgactcaaatggcacctctcaacctgctgctactaatacagggcataataatcacacaggtttagttaaatggactcctcctcctgctgatttttttaaaatgaatgtggacgctgcatttgatgcgggtggttctattgttggcgtgggagcagtggttcgagattactttggagaggtaattggtgctttttccaaacccttgtctggcaactactcaccgaaagaaatggaagctatggggattattcacagtttgcattggattattagcaacagattgcatattgactatattgagactgattcactcattgttgctaatgccatcaacaaaggatcttgtgtaggccaagtttctctttatgatcttattgatgacatttctcttttattatcctcttttcctagagtttcaatttcgcatgtaaagtgtgatgctaataaagcagcaaatgacttagcgagattcgctcttcgattggataatatttgttcttggttgggggaaatttcttctccaatccactcttgttattgttatggattctattcaataataataatagtattttttcaaaaaaattatttaaatattataaaattatttttaaaatgtaaaaaatattttaaaataaaaataaaagtgaattaaaatttaaaataaattaatttataggattaagtatcatttatgatgtaattttaccgcctatattctttatgttttaatatagggagcatataatatatactgtatgataataaaaaattcatgtggttccacttaatttataaggtacgagtgatgttattgagcatcgtgaggatcccatggatgggtttaggctatgtttggtaggaagatcgagcaagaaggatgaatggagagcatagagaggataggagtaggaatgataaagatgatagttgatctcatttgtcatttgtgttgttgatattatgtgtggtattgaaaggatggagagaaaattaattagtaaattaaaaaattgtcctattgaacataaatatttatttcgttttaaagggtaattattgtattaaacaaatttgattttgtgtttttcta

SEQ ID NO: 6496 - DNA, 977 bp, Cannabis sativa
aatccattcctttcgacgatttggggagagtggttcagtagatatgaagaagattgaagctgttttgccacaaataaaagaaggattagataaatggtctatgaaagatatttataacatggatgaaacaggcttgttttatcgcatgcaagctgataattctcttgcaacaaagcaactagaggggcgaaagcagagtaaagagaggattacaattgctatttgttgcaatggtgatggctctgacaaactaccgctttggatcatcggtaaattttctaatccaagatgttttaaaaatattaatcgtgataatcttaactgcaagtatagagcaaattcaaatgcatggatgacatttttgttattcaatgaatggcttcaatggtttgatagacgtatggatagggatgttttgcttcttttagataattgcacagctcatggaaaaagggagaatcatcccccacttcgtcatacaaaggtaatgttcttaccaccaaatactacttccaaaatccagccatatgatgcgggtattattagaaatttcaaaggctattatcgtcaacgatttaaccgccaaattttgaaacggatagaggagcatgttttcgaaccatcaaagataagtatccttgatggaattataaatgcagttgcggcatggttaattgatgtcaagccacaaacaattgccaattgtttcaagcattgtaaaattaggactactgatgttaatgaattgcaagttgggaaagaaattgaagaggaaaataaagaagtcacgaaaaatttgggggaacagattcaagaactttactatactaatgcaatggatattaatgacttccttaatcatccaagtgagcaacaggtcacgtatactttaaatgaggaagaaataattgctgcaattagacaagaagtgcaattagaagatgacttggaggatgatagcacaaaattagaaaaaa

SEQ ID NO: 6497 - DNA, 976 bp, Cannabis sativa
agatcaaattgttgtcattcagtctagatcaaattgttttgaacttttcgtcatgacactccttacatttttgaagttatgttttatgtcataggacaatcttagttatgttggattgtagttatggccaaggtggttttaatttcgacagtttacttgtgattgatatcaagttggccataatgatatttagttcaggtaacacatggttaaaacaatgttaacactctaataatggtatcaattggtattgtctattttgcattctgcaccaataccataatttgaagttaaaatctcagccccaaggttggaaagtgctggtaggcatttgttccaaggcttgaatctccacagactgaaaaaccttggggctacagggaagtctcctggtctaactgccagggtcaagaataaaaaagggttaaaaacttaaaatctcagttccaacagggataatataaatccgtcagatagattagaccaagtgcagtttaccttaagatttaaaatcccagttgagatttacttttccattttcttttgtacaaccttctagtttcagaatttttctaaacggcgaaaagtcataatgtgctgtattgctactacctttgtaatttcagtcactgttaactttgtgaaattacaaaggtttaaactcttacaaatttgttttccaattgtaaactcatgtaacttgtgcttgatgaccattatgcagatagggaattgtgttggtgcagcgaatcaccgatacttcattgccttcctcatttcagccgtcatcagtatgatctacgtcactttcatgtctacgtatgcaggtctttatgtctggccaccattatcatacagagccttcggacgcattcatggctacagcagcaatatggcttctactgctctcaaagaagttatgcttgctttgttaagatctgcagcgttgctctctgctagagggctcattcttgta

SEQ ID NO: 6498 - DNA, 1183 bp, Cannabis sativa
gttactcatttataattttttttttaacaaaaatacgacttctcatgaaatttataccacagaaagtgttgctttcttctctcgtagattgtagtgcaccaacaaaaaatcaacccaggcacttgaaaatcgccattagaccaatgactccagttgaaggcacatctagatcagcaatggtaaatcaacaacaatcaatagtttatttaaagttttataatactaaaattttgtaatatatactctttcaaagtaattatgtgttgcaaagaaatagttgatcttgagtttcttgtccaaccaaaatagatattgtcaacactaacttttccttgtgtttaatatcgtaataaatcaaacttggttatgagtatctttttggcttgtaggttttttccgttgtgattacaaaaaattaacgtcaaaatccttgaatattgtaatggtattataaaataatataaaatatatatatataaaaaaaaagaaataagaaaagagagaagaagaaaatgagagagtgaatgagattttttagtagtttattttaatagggtgatccttatttatacaaaaatatgattagaataatagaaaattaaatcaatgaaataagaaaaatataatcaagcatttatggtaataattaatgcattgatttagacatctataataatattttataacacttttttttttatgtctataaaaagtgtcttattaaaaatcttgttgaaaaaactcggtgaaaggaaaaagagtgcagtgtatattaactgtcattgatttagacatttgtagagatcttctaatcgacgaattctaatcttatatgtcgtcttctcaaatgttgatgttgataatgattttatgaatatatttgcaagattgtcacttgattgaatttattgaacatcaatcgatatatcatagatcgtgtgtaaagaagaattttgatgaaattggttctatctccttccatttacatttcttgagtgatgtaagcaattatcttttatagagaactgttaatgctgatattgctttattgaaagtaaaatatttcccgaatatgttatatcaatgatctcagttgcacacattctctacttacttcataaagtacaagtatattagcgtgatataaagttgcttcattaaaaatcttgtcaagaaaacctag

SEQ ID NO: 6499 - DNA, 844 bp, Cannabis sativa
ctcaaaggaagtcctgggcagggactactctatcccaacaactcttctctccatctccgaggtttttcagactcggattgggcttcctgccccgttacaaggcgttccaccaccggtttttgcattttcataggtgattgtcttatctcatggaagactaagaagcaacctactatttcaaaaagctctgctgaggctgaatatagagctcttgctgcaacaactagtgaaataacatggcttcaataccttctccacgacttccacattccgcaagacaaaccagcttttatctattgtgacaatcaatcagctattcacattgctaacaatcctacattccatgaacgcaccaaacatatcgaattagattgtcacttcatacgtgacaaaatcagcaactccaccatccgattgattcctgtctccagcaacttacaattggctgacgctttcaccaaacctttgccttccactactcttaccactcatactgccaagatgtctgtatatgacatatacagtccaccttgaggggggatattaagaatattagtttttgcctcttttatagttctgctgtaggtttgtttctgttagagtctgctccttatttctctaactgttttacctatttctctaactgtaataacgatttctttatcacagtaaagtcaaggttgtatcttaggttagttttagggtgattagttagtttggttagttaagcagattggttggcttaacctctctgctatatatatatatcctctgttgtaaacactttattccaattgaatcaattcaataaaacctcatcttctattttctcaattccgcaata

SEQ ID NO: 6500 - DNA, 666 bp, Cannabis sativa
ataatttttcaatctcatttttttagggttttttgagtttgggtggggcaggttttggggtagaaatgtttagccctaaaaactctcatttttatttaggggtattaatttgttgaatgtaactataaattaagagacttggtttataattattgcattggtcaaaaagcaataaactaaagttttcacctcagagtcaaaactcttgacctattgactattgtgtgatattataacacttctggtgggtcaaacaacccgtcaaagggttaattgatttaccagcacaactctttttaataaaataaaataaataaattaataattttgttccacttttatataacttatcagtcaccaacccacttatattttaatttttattaattattctataatgatttaactaggaaaaggggtatatattcaatcataaatgtatgaatacaagaatttagtatataagaaaaataaatggtatttatgaaaataaaatccaatttgttggtgcttgtttaattagtcatatatatgccaagcttttgatattgacggcccaaggccccaaatctaacaggctgatttcatgggccaagtttcggctggaatagcatagtccaatatatgtgttattcttttttagtttaattatccaaacactaaaag

SEQ ID NO: 6501 - DNA, 708 bp, Cannabis sativa
aaaaaaaaagattaatactatatttttcttattctttttttggtctgtactactaatcatgtgatagtttcatatcatctaccattcctaacaaccatgcaagaaaattgtataaagaacacatatgtatatatataataaaagtgaataatatactgatgatttgaattgcagataaacttaatcattacccatatggcaccaaaacttttaattatggatgctgttggcaaatgataatgttgatgaatttttagaatatctcaacaacaatttaactataatcaaggtttctcttatggagtttaattttaagggatgtgaaggtcaatggttagttgatggaagagaatgtgaagtaagtaaatttttcaagctcaacattatgacttcatttttattttcttcatgtagtggggtctctctgttaggcaagaataatcaaatattttccaccattttctgaatatgcttgccacccaaaataatattttttattttttttttcttttggaaaactttaactagagaaagtcactcaatgcttactcttgttctatctcaaaagatttttttttttttttaattgggttcaatctgagaaattgtaataaatgtttgataaattctggttgagctgtttcatcattacatcaaactatagtaatactctactcatatagtcattttttgtgtgaagactgaaga

SEQ ID NO: 6502 - DNA, 2068 bp, Cannabis sativa
ataatttgaggtttttattataaagaaattaattataattattaaagggttaatatgtattaattttgagaattaatgtataaaatacattaacctaaaatagtgagtcgaagaaggagtacatgtcaatgtaacctacggtctccattattaattatcaccgaaggagtatagactggcctcaggacgactttattttgtcctctaaggaaggtatttgtctatactattgttcaagtttaatctcttgactaaggaggaagtgatgtattttagtgcgacactgaccctacgacatcgatactaagttaagtcataaaatataaaataataggtcatactcacaaaatgcaattaagcttccatgtggttagttgttaacttgaccaaacaatggtactttatattttgaaaaagaaatatgggatatttaagtttcaaaattataaagatgagaactatctcataggctcaatgaaattgactcgataccaatcctatggcaatgatcaattgtcaaaaaaatttatcatggaataactcaaacattattttatgtattttaattgtatgcgctcatgcatcacgtttatagtcattccaaaatggtatttatttttcaagtatatttatcatgttatctttatttatttcagtcatgtctactatgccatatctccttattgctttactagcacttgaaaaattgaatggtgaaaatttcataaaatgaaaatctaatctgaatttgatgctgatttgtgagaaccacaaatttgtcctaactgaggagcgtcctgaggagcccagtgccaatgcctcgaaaaatgtacgggacaaatatgactcttagattcagtacaatagcaaggccaaaatacttcatgcttgtaaccatggacgatattctgcataatacgcatgaacaaatggagaatgcattagaaataataaattttctacaagccatgttcgggtaacagtctaatcaaacaagaaatgatactacttgtggccctagtggccctagccttggccttcccttttcccttaacgccttttgtcttggcaacagtcttggaaatcctatcactcaaagatttcaaaatctttgcttctagtgtttttgcaaacatgacaatcagatggttagcaagaaactttcaaagcagcaaagtcaaaccaaaattagcacatgacaacatattttaatagtgtgtgtgtgggcacaacaagtcattgagcagctatatggttccccatgggaaaataatattacatcctcctggccaatgaagctaccatattctctaaagttagggaaagatattgttgcaaaaagttccactctaacagtatgtggagatgactctggattactgggactcctaatactttcatctaccctgtctatgatgtcttcatggggtatttaagatgatctatgttaaaaaaataactattgaatcccccttggtccatccgggacatacgatggaggttgggggtacggaatatacagaagggcatgttacctcttcataaagtgctggctccttgggcaccttcttccaggtacactgcaacaaaccactcaaaaatctcctcctcctccatcaaggggttatgatggcagggcacccaatctgcttctaggagcatatcttccttagcagcatcagtgatgattttagccaagtcaagagctattatctcctttggaagcctgactttggcccctgccactcacgttgtcaatgctttggaaatcggtgattagctcgtgttcacgaagcaacttcagggtgaccaagccttcaactctgaactttgttttggtgaagggcttgtattgggctgtatttttctttatttccttggcttcgggactctgaggtacaggctcttctagaaataagaattataaaagctcaattagcacttaaactagaaaatattttgaaagaaggaaagacaacaatgaaaatatttacctgggatttaaaagcttaaatggaaggtaggcaccctcttcactgggaagctagtggaaaagaaccaacactct

SEQ ID NO: 6503 - DNA, 2625 bp, Cannabis sativa
cctaagtttgtctcgaagaagaagaaaccgcgagttggagagtgctttggtcaagatgtctgcagtttgatcataggcaggagtatgtttaaccaccaatgctttggctagaaccttttctcggacgaaatatagatcaagttcaatgtgctttgttcttgcgtgaagaattggatttgctgacatgagaaccgtgctgagattgtcgcaccagatggttggtggtcgtgggatttggattcttagttcaccaagtaaggcttgaatccaggtaatttcagcagtgaggctggcgaggcttctgtattcggcttcggtgctagaacgagacactgtatgctgcttcttagaggaccagcaaatgagattcgagccaagatatacgcaaaacccagtggtggatcgtcggtcatcaatgtcggatgcccaatcggcatcacagaatcctactagatcgagagatgtagagtgagacatgtctataccgtaatcaagcgtgccttttaagtaccttaggatgcgtttgactgttttccagtgggattcgagaggagcatgcataaattgacacaccttgttgactgcataagcgatttctggtctggtgagtgttgcatattgcagagcaccaactagactccggtactgctgtggatctttaacaggatcactaccaatgcaggataatttttctcctcctgtcattggtgttggcaagctgtttgcacattccaatttagccttgcaaagtacatctgttatgtatttggtctgtgagagatgtaacccatgttcagtaggagtgacttgtatgcctagaaagtagttgatgtctccaaggtccttgagtgaaaactgtctattgagttgggtaactaatgatgatatttcattggaatcactcccggtgattagaatatcatcaacatatacaagtatgtaggtggtgtgtttgttggtgaacctgatgaagagtgatgcatcggctttagaactgtgaaagccgtagtgttgcagtgaggtttttaacttgtcaaaccaggctcgaggggcctgtttcaagccataaatggctttgtggagtttgcaaaccatattgggaccttgttcttcgaatcctgggggttgttgcatgtagacttcttcaatcaagtctccattcaagaatgcgttattcacatctagttgtttgatttcccaatggttaaagagagcaatggtgatgatgattcttatagttggagattttaccacaggactaaaggtctcagaaaaatcaaaaccatactcttgatgaaagccttttgctaccaagcgggctttgagtttggaaacactaccatctgcattttcttttattttgtacacccatttacatcctatggctctttttccaggtggcagagggacaatagtgtaggtgccattttttttgagagccacaatttccacattcattgctccattccatttcggatttttcatagcctcttgcagtgtgagaggtgttttggagctgatgtagaccttaggtttgtaaacacctgctttagcacgtgtgatcatagggtgagtattacttggagctgatgttgctgtaggttccacaggtgatgcagctggttctgtatgtgtagagatggttccagggagagatataggagattgattgactggttcagtagtgcttggtgtttgttgttggttattagataacaggttgggtgtaatgacaggtacataaacatttggagagttgaattgatggtgagtttgtgaggattgctggtgtgagaatggacagagaaaggaaatcgatgttcattgaatatgacatctcttgagatgtatattcggccactagcagagagacatttatatcccttatgctttatgctgtaaccaaggaaagtgcactcttcagacctaaagttgagtttgtgtttattatatggtcttgtgtttggaaagcatgagcaaccaaagactctcaaaaggctgtaatcgggttccatgttatgtaatttgtgcaaaggtgtatcacctttgagtacagatgatggaagccgattgattagaaaggcagaggctcttacagcctcatcccaaaattttaaagggagtgatgcatgagctaagagagtcaaggcagtttctataaggtgcctatgctttctttcagccacaccattctgttcatgagtggtggggcatgaaagacgatgatgaatgccatgttcaacaagatatgaggtgaatgcttgaaattctcctccccaatcggattggagatttttaattggtaggtcggattctttttccacttgagtcttgaagttaataaaggtctgaattgcatcagatttatttttaagtagatagacccaagtgaatctagagaaagcatcagtgaaatgaacataataatagtatccatttgaagagatcatgggtgatggtccccataggtctgtgtggattaattgtagtggttgagtatatacggtgtctgagttaggaaaaggaaatttatggatctctcccaagcaacaggctgaacaaaaatcagattgtgttttattaatattgtgaatgttacagctgttcaatacatgtttgacagtc

SEQ ID NO: 6504 - DNA, 1565 bp, Cannabis sativa
gatatcacaattgattggatagaatacttggacatggaggtttcaaaaagtaatctcagtaaaaatcttcatgacaggtcaattttgcttatagagatggtaagtagtcttgtcttgtcttggcccatcaagctgtttgttgttaagtgttttgctctacttcttttttactatacatcaattcaattcaacaaatgagtttgtgagatgactgggatctttgcataaatattagaatatagagagaaaataaatgaaacttaagaaaccaactaactaattaaacagtggctaacacccagctatacacaaatctaaccaccaacacatcttaaagctgaaacagagtagaaaataaggatttgatgaaaacaacattttgctgaggcatggattttgatgtaaaatgccaagtttaggaaatagctcaaacatgaattgatttaaattaaaaccattttcataacaattgatttaaaaccatgttcataagaattggtttaaaaccatgttcataagaatttgatttaaaatgccaagtttaggaaatagctcaatcaccaaatgagtcttgctcctattacaaaccaactctctccccagaattctctatcaaaacaaaactttgagtacaagtgcttccacataactaaacttcaacagatacaacgaacaactagtgaaagagtctaactgaaaataactcatcacaagtgtcatgaactgtagccacacaaaaatcgtaatccttttctatcaaataaattaatcttgtttgattgatttgaatatatatatatatatatatatatatgtaaatagttgtgatgactaatagattttggactattagttattatttatttgatttgtaaatgcagtattctaaatttgaaccatttgacgcttggattccgtacctagctgtaaatattttcaatctctatgtctgtagagaaaaggtacttcattaactaaataataccatgatgtagctacctactcgttgcttctcaagtcatgttaagtgctggatgtaattggtttctattttgttgagctattttcaaaaaccaaacaacaagttacacttagcagctacattagaatgctttgttttacttttaacatttttttatttcttaggttgaccatgaaaatgaaagaaccattgatctcattgctttaagttgtctttccattgtttggaagtcaagggagaaagatttctccatccttatgcataaggtattttattaattagttacttacttttccatccatttattattactaaaacgattttatcgaacaggcaaaatataaagaactccatactataacactaaatatgtgtttagatatggagtttcaaatcttggatgtcattggatgtactccgaagagcataacaattgtgactcctttaaatcttggaaagtatttcgaatccatacagaaaatgaacttcgattttgacaagtatggtgctttattttgtaagaccataatacagtgtcaaagtggtaagtcaaattaaattattaagtttttaatttttaatt

SEQ ID NO: 6505 - DNA, 1539 bp, Cannabis sativa
attgctttcttaatcacttgagaatgcaatgagggactgattttaaggaaatataatcataaaatattgtaactctgctttttttattcatatacacttgtccataaataaaatatattatatgtaatccatctacatttgaatttacagaaataaaaggcattacaagtgctattataaaccaacatgtatctgggggcagtaaagatatgtaggtagaaagagaagaaaaaatggtaaaaaaaaaaaaagtaaagcattgtatgcttctctatacaaataggaaaaaatggcttcgccctggaggatcatgtgttcttctctaaaacagatagtgctggagtcaaatagttattggctttgtcaggcaaatgtgcaacctgcattttgaataacaaaattagaaagacataaaatttgagagagatctttttaatgatattggaaaaggtgctgagtattgtccactcaccagctcatagagtcccttcccctgctcagcaacatattcatagcatacctgcaatgagtacaatacgaatatccattaagaggactagactatgcttaccgaaacccgatttattaacataaagaaactgaaaaaaaaaacttagttttgctcacatcaaagctcttgttccgtgcagtggaatcatgcaatgccttcacacaaatatcagctacatccgcgcagctgattccctgattatattgagaaaagatgtttaagatttgaacttcaataatgctaaattagtgtgtacagtgttggttagagctagaagttttataatcagatgaaaaaacaaacacaagatgactcttacttgtgaaatcctgtttccttgatcaaatatgagtgcacgttggccaccaggttcttcctgcattttaccaaaaaaaaaatgagttttatgctctcaatgagccatatctaaacatttgtatgcttgtctatctatgtaactatgcttcattaagaaagcagttaatgagcaaagtagtctatgtaactaccttaaggggtccaggacgaataattgtatatccaagtcctgattttctcaatgaatcttctccagcctataaacattgagagaaaaagaaaaacattatacgaggacaacttttgtaagttatatgtcactaaattttgtaagtgtaaggaaatagtttgcatagtaagttttaacaaaaatcaaaaagctcaccctcttggctttaagaacctgctcccttctggtagggtctaatcctgatccagtacatgaaactaggataaagtccgtttcttgcccagtctgcagaaaatcaaaataccttaaaaaaattattaaaattgaggagaacatacatacttcactgaaacacgtggtttaattgaaaggagaaaaaaaatgaagaacaaatagtacatattgctcctgatgcccttctgacaaagtaattaatttgatttacaagtagggctgtagagtagtagttttagcatgttgtcaaaaaaatgagaaaccaaaacatatataacatccaata

SEQ ID NO: 6506 - DNA, 3281 bp, Cannabis sativa
atgctttatttgtttacttgccccaatactggcacactgggcctctttcactgtatatatatatagataaactcttttattgtaattaaaccctacaacatattttctacagccacactttcggctgaatacaatgaaaataagagagcctttttctgtctaaaagaccgacctatttaagaaatatggaccaacacgagtaaaacacgcaccaattcgagcacgagatgaaaatactaggcttacgggccgtgttggatttactctttaaaaatattgacacggtatagtacgacctatatttttttgtggcacggtacaatacgaccaattttttgaaaaatatataaataaatatgaatcggactaacatgacacacacaaacttacacaactactacctgttgtagctagtgacatgaggataaaagaagactaaacaatatgactttcttgatatattcgtaaaaataattaccgtgcatggagttataaatggtattctcaatatactggcccttacaataaatgaacaaataaatacaaataaaaaacacaaaaggtattcacaatatgctgacccattccattacatatatttgaaaaatacaaaggtattctcaatatgttgttgtacatataccaatattggctaggaatgtagacgtgatatgatattaaattcttttcgtggtggttgaaatttttttcctgtaatgaatggtaaccaaccactagtccaatagacatatagtagtgtatggaagtaattaaaatgatttggagacaaatgagaaagaagttgtaaatcttatcctggcgaataagctcttaagtctcaatccatacttctgttcttttgccgaaaggcatatttataaaattaacaaggttaatcttttcataaaatcaaccatgactttaccttgctacctagctagctgtacgtacacgtaacacggctttatcatgtcacccacaattactttttattatctaaaaaaaaatcaaacttatatatagcacacaataattatatcaaatcatatgtatatgaatactttacacgactatatatagatatatcatataacatgatagaataatgcatatcacaaaaagacaaaaataagtcttgtattttttacaattttttttaatattcattttgtataattttctttttaagtaatttatttaatttttagtggtaataataaataaattttaattctggaatttttgtatatacttgactgttaaatgttaagtaaattgtgacaatccataattagcccaagccattaaatttttattttttttaaaaaaaaaatagtttaaataaaccaataagaaaattagacagcgaggtacctacggagttataaaaatataacttatgtattgttaccgtaaaaaattaaacttaagtatttatttacaatcaggagttaaacttaagtatttatgccgcatattacttttttttttacaataatttttggtttgtttagtaccttttgtggtgcttgacacaaataacggtatctcaccatttatggtattcaactcattttataaaattttcttatgaatgataatttatggtattcaacttttctggattttttttcttaatgatcttaattttttttcttatgaatgatttttttatttataatttttagtacattattattaatataacattattatttagtaccttaagatgtccaacactatacaaataataattgtgttccgcttttcagcctaagttttgggtccattttggagttgtttcttcattaatattatatttagaatggctttacacttgattttcctgttcttgaggtataaaagtttattttttacaaactggtgaaaagatagggcaaactggaagaaaaaaacctcgaagctaaaaattggtctatagtcgcgactaattatatggttgcgactatatggtcacgactaaggggttcattggtagagacaatgatttttgagattgttctatggtcgcaaccaagcattatgtggtcgcgactacgggctaaacacgagatttctgggcagttttataatttcactattctaagatatctccattattttctatataaaggtttcacgttttagaagttagattctcagaaatagaatcctaaaacctaagaaggagcaaaaggaagcaattgtagcgacccaaaacaagatcaccaactggttctttctttttcccttttaattttttatttatgttaatttctgtttcaaattttattatggatgtgaacatgagttttatgaactaattaaactcccaatttaaggatataatgaatgttcgttgatgtttcctcaaattagttaatatgattattagttttttttctatagattgtatgatttgttcttatttactttaactacatgttttagactggtcatctttaatgtgatttatgatcctaatgtgaaatatctaagaaatattgaacattatgagtactctaataaaataaacatagtgtaaaacgagagtatttacatagcttatgtgaaatttagattctgtaattgatgcaatttatatgttaatttatgcaagtagataatttaagatttaggaccttaatgatttgagaagagttggagttacttttataatctgtcatcacttaaattaaggaagagaattaataatttacattaacaattgtgtaattaaaacaacatgattcatattcctaaccattcattcatagtcaattataatttgtattgttattttactgtctttttttttttttttggtactgcgatgttgtcccagtacaacatgatttgataaatatttattatacaaatgtatgttcatatctattttcaatttaatataaaatttcatatatttaaatatatatgagattaaattattatcattttatcaaaaataaaaatctgtgttagttgctgttattggtagtagttactctcagctttgtaaaaaatttgtcgagctggtgtgtgtttggaagaggtatgcccccatttatgttgttagtattaattaatgaagtttctttcttgataaaaaaaatattgtttgaaaaaagtctagtatttgaataattgaatggtaatgtttaaatatagagatttttcgcatcagttatttatttttattttccgattttttttattgcatgcatgcgtcatcagtgtgttgacacgctaaagttcgtgattatggtcagaaaaggagctaa

SEQ ID NO: 6507 - DNA, 553 bp, Cannabis sativa
atacatcttaataaaagaaaaatacacataatatgggccgacccatttataaaaaacgaaatgacttaagtaaagcacgatacgagtccaaacatgataccaaaatgtaagtttataggtcgtgctggagtcattctttaaaatactgacacgatataatgtgacttgcatctttttattatgagtcgacacgatacgaactatataattacagattttttaaaatatgagctgagatggcaattatttatttatagctaaaactttcaccaaataaaattcgttgaaatataaaattcttataattgacacgtggtcttaattatcaaaagtgaaatattaaaaggtaacagtagtgtcaagcaccctcctacgtgttaatatcacaattggtctaatttagtatatcaggtcccatatagtttaatataataatttttaaggagtatcgctagtcaattgtaaaacaacatcccttaagagtgctaaattccaccgatacttaataccaatactcttatcaaaaatactgaaaaagtgagtaaataatcta

SEQ ID NO: 6508 - DNA, 2134 bp, Cannabis sativa
ctcgcactcactgtgcactctctcaaatgcagagatccccctcttgccctcattctgctctctctctcaagcgttcatctgccaccgtcaaccatggagaaccccaagacgtgagactcaaacgcttgagaacccttctccctctcaggatttctccactcggcctcaatattcttccgtgctctctctcttgctcttaatctcgcccaggcgtagattcatcgttgttgatagtagcaagcggagatccatcatcactcgagtgtaagttttttttgccctcgatttgagttttgatttgattgtgatattgagtttaggttttgtttgtggttttagtttttgattttgtttgtgataaacgatttagggtgatagtgattttaattttgggtggtggctgtactgattttttgtttatttttatttctggctttgggcagatggagaagaagaagaagaagatgatgatgaaagaagaaggaggaggaatggtggtctagatacttcgagagaagaagagaaaaagaaaagaataaataaaataagaaaaaaagaatttcgcttttaattttgttttgtaatttattttatttttaaaaattattttttaaattataaatattttttataaaatttttataatgtttaaacaattaatattacatggaccaaaaaaattactatgggtacactgaagtgtgtttaccgtggcacttaacattgtcttttagacgaaaggggtaaatagctaatagaaataagctttgggtagttttgccaccaaaatttcaatttttatagttaagtgttaccaaaatgtaaagttcgggtagttttgccgccaatatcccttttaataaattagttttatattttaaatttctttcactctaacaatttcacaaactttttttgcatgctaaaatggttgagattcgtgccactcaaccaatgccagctaatgtcccgcgccagtacaatgtcgaccccacccaatttcttgaagatatgcatgttatgacaaaagtattgggtgagcagtcatgccacttgagaggactgggccagttgctaagacttaagacgggggcaaaaagagaaactcccaggctaggtcgatccgggcagcccactgtcactcaagaggagtatgaggcactaaagcgaagggtggaagagcaagaagcatggaacgagtggcaaccacagatgctgatcactcataaccagatcatgagtgtgttccaataacaaatgatctaattggcaagcgccgttccaggatttcacataccgaagatgctcccaattccaccgattccaccatttcagcctcctagcaatgcagttggttcctcctcacagactgcccctcccggtgatgacgacgatgacgttgtcgatttgtagtatttttttagtttgaagtgtagataatattattatttatgaactcaaaatacttttatttaatttatgatgtttaatatagttttgtaataacagtataaatttcgattttataatatatttgatatttatttaatattatttcgacttttaatttaaatttaatttatatatttcatatttataatttttttaaaaaaaattgtaaatacttttaccggcgcttgaaatgcgccggcaaaagtattattttgtatattatatatattttttttgtgcacccgcaaaagtatttttttattttttatatttttattacgttttgttggcgcagtactcgccggcaaacgtattttcatttaatctttttaattttttaatttagttttgccagtgcaaaaattcgccaacaaatagtacgcgccaaattggtatttggtgctgaattcccaccaaaagttctattggcgtcttaactcgccggcaaaatgtcgtcagaggcacatcagccggcagacctattactggcgatgtctttatgccgaaaaacaactgcgccggtgtaaatacttttaccgacgcatctattaaccttgccggtaagagatgatgtgccgacgagctattgccggcagctttttctggcgagcaaaggtctagtcaaagctagccggcgacttacacgtagttttgcagacgaacaaactcgccggcaaaaagt

SEQ ID NO: 6509 - DNA, 544 bp, Cannabis sativa
agagagagagtacttacatagcttaaaagatcttcagaatactcttcttggctgaaataattatttttcttcccggtaattatttctaaaagtaacacaccaaaactaaatacatcagatttgattgaaaaccgtccatgcatagcgtattctggagccatgtatccactacataatatacagcatataaataaataattagtataaatatatattacttgttactttaattaggtgagaatattgatatttagaaattggatatacagtacacaaaatgataataagctaaaactagaaggaaactaattttagagaagataggatggttggtcaggataacataagcattttaaaggtcttgaacaaaaaaaataactttgaaagagtttttttgtttttgatttttaaaaatacacatacaaatatcaaaaagattgaaactaggctttctttgaagaaagaaaacaaagagagaaacagagtatgtttcacaaaacagagacttaaaaaaatgcagagaaaagtcttacagctttattga

SEQ ID NO: 6510 - DNA, 847 bp, Cannabis sativa
ttttgtgcggggcaaaattgtgcaggtaaagtggtttttcatgtatccatatcgagaaaaaaaatcaataaatgtgagaaaatacttgtttctgcacaacatagtagagtaggttcactaatagaaattgattatgactgattgtctttgtcctctttttagtaatcatttaaaattagggattattttgagtcatttgataaaagatcaggtgaatttacaattgctttgaaaaattaatatgcgtttctaaataattacaacctacataattatgaaaaaattagactaaaaaactattttaaatgaccaaacaactaaatagtgacagtgtatcataataagtttttaacaatattattaggtgtcttataccatactaatgtggcgcgttgcaagtagttagcatttcctatattattatataatcaaaatatttaagattcgattttaaattacatcaagtgtcactttttctttttgatgcagtgattaaaatcacatataattaacgatacaacaattcataattggtgacggtactttctcggactaagataactcatcgtctaaccgaagggcatattttgtcaaaccatgaactgtagaattttaattgcaagccacatgaaataaaattgctctaaaaatttaagacaataaaattataacaatcttcaaaacgaggcattcaggtggtgcctacgtgtcctcggtgtaagggggggtggctcgaggatggggctcatgtgttgtgggattgttcttggagtaaggagttgtggaagaaatgtggtttgtgggaccatgtggttaagctcaaatcaagtgatgtgttgttagtttt

SEQ ID NO: 6511 - DNA, 1084 bp, Cannabis sativa
atatattttcctctcagttcatagagtttcatcggttatatgtcctcttatttttgaatattatctcatagcagaaggggacttaccaaatactttaaggcaggccttaatatataaggtaatttttcaccttaaggaacttggttagtgatctcttggaacataccctttttttttttttgttgtctcaatatcatgagaaaccatgctatgaatctgtggagataaatgtttaaggacttatttggtaggccgtataagggtcgtattgtattacataacaaataacattatgttttgataaaacattgtattgtattaattattatgatcataaattttaatacaatgtgtcgtattatttaatacataacaaataacatatttagcttgtattataatatttaaaaagggtctagggtcaacctcaatcctagaattggactcggacttcagacttgaacctaaacccaaaccttgaacctggacccaggacccgaatccaaacccgaccccgacctcgaatctggaccaagaccggaccccatacctagaccctggaccccgaacccgaatccgaactcaaacttgaacccagacccggacccgaacccaaactgggtccttgaccccagacctgaacccggaccaagacccaaatcacgagcccaaaaccatacctaaaatcagacctagaccagggttgggtccgggtctgtcgtctaggtctggggtccgagtttgggtttggggtccaagtctgggtccggggttcgagtccgagtctagcgcatgtttcgggtctagggttcaggtctggggttcggtctgagtcaaaactgaggtcgagtttattgtaaagaatttataattttacataacctattagtataagttaataccaaatatagtattgtattaaataatactaatacaataaaattcaatctaacacaaatactatacaatacaatacatcacgatgtactaaatgagctctaaatatgttatttatcgtctttaaattttaattgacatttgcaattgaaaaattctcaattgatcaagctaacaatagtttttt

SEQ ID NO: 6512 - DNA, 1480 bp, Cannabis sativa
  modified_base (439)..(459): a, c, t, g, unknown or other
  modified_base (548)..(558): a, c, t, g, unknown or other
accaacatcttgttgaactcggaatttgaggccttcgtatccgattacggaacatctagattacttgatccagattcttctaatcaaaccatgattgctggtacatatggatagattgctccaggtaacttgttccatcttccattccttaaaaaatctatataatgaacttaaaatcaaactttttttttttacatttttatttaattctgttttttacaatttttttacttgtttttttttttagaaaattattattttcacttcattttttctagcagcaatatgaaaataatagaaaaataacactttgtattttaataaaaaaaatccgaaaaaaaagagtaaatttctaaaaatataaactttttgtcatttttaggtatttatgaaataatccgaactgaggattatttcacaaaaacataaaaacaacaannnnnnnnnnnnnnnnnnnnnttcacggaattttaaacattttttttattttatttacagaaagtacggtctttttatgttgtaatcttattaatttgttgttgattttnnnnnnnnnnnatgttattttttattgttattttgatgttactttcatgtagttttcttgctgattttatgttattttttggaaaaccgtaaaaatataaaaaaaaaaaacattctttgaacgtaaaaatgtaaatatcttacaaaaaaatgatgacttatgtaattattcctttagaaattgatgaatgaataattagttatcatcaattttaattttattaggagatcattattatgggacgtcaaggtatctagcaccactatatagcagttttttatgatctttatttaaataaaataagtaggacccgatattcaattgcatcaataatgatattacacctcacaagagtgagtgctaggtaccatgagtactttttaaaatttctctattagtggtatcattgaaactagttacaaccaaattgatattttttttatataaaaaaaaaaattaaacctatttgacagtaataatctgtcattttagaaattgatgcagtaataactaattaccactattaaattttttaaaatatatttatgaagaaaaaaatctcataaaaatatatacaaataaatagaacgcataaaaaatataaaagatatcatgtttgacttagcttctgttttctacttttagttcttgaggaaactcattctgaaaaaactattaaaattgacttctgttaaagaatttttcaaaaataaaaattgaactcactagttactcaactagtaataaaaatgtttttaaaccttcaaaagtccaaaagcaacttttaaaagtccaaccaaccataatcgtaatatctatcaaaaatcatattttattttgtataatttcttattttctaatttttatctgttaggataattgtttttgttatgacatgtagaatttgcttacacaatggcgataacggagaaa

SEQ ID NO: 6513 - DNA, 1139 bp, Cannabis sativa
aaacttgaaagatagaaaccgagagagttttaaggagtgaaaacatgtagaggacaaaaagtttcagtgttatgatctgatgtggacattgagatggtcaacaacagagtttatgtaaaaagtttacctgctcttcatcctcaatattataatcatcatcagatgatgaatcgttttcttcatcaccacaaggcccactacttcctctttgaccagaattcaaaacttcattcgatttcgcaacattttcgtcttctccagactgcaagttttctacataaacatgtaacaaaaccaaatcaatataattacgaggacttcaacatacaagttaaactatcagagcaactcaagatgttcttaccagaaactacaccattatcaatggatataggcacattcttatcctcagaatcagaatcagactcagactcagaattggaatctgaaaggaaacatggtgtcagatttgattccttaggtagtgatttctagtagaaacatccaaaattgtaggtttaggtgggaaacctcttatctatatatttagcaacaaaaagaaaaaacaaaaattaactacttgctactgttatgttaagtgatgatagcaacaatttatagactaaaacaaaaaaaagcaagagatgaaaaatcgagttaatgaaaacagtatttactttcaactatatatcctgtgaagtggacactcccatttttacagttatgtgatagctcaaatgacttttcaaatacaagatcaaccgaaagttgaggaatcttttgtgaaagtctcccaataacaaatttctgatcaccgaattttgctgtcagtataacaggttcacttcctgcatctttcttgatctcaccaagacaaacctgcattaaagcagcttttaataaataagcaattactaattatgtgaaagaaaatatagacaaatcacgaattacctttgcaatatgcaagaacgatccatcatgttcaaccacttcagacttcccacttttgaccacaagacctaaacaccagaccacaaattttaaagctcaatatcaaaactgaaaccataacatgcttaaaaccatactcatgttctatcatgatattctcacacactcatgttcttgttaaccat

SEQ ID NO: 6514 - DNA, 607 bp, Cannabis sativa
attatattttttttaggaaaataaaaaatcatgggtaaatataaactcatccgttaaagatatagggttgtacgttaatagcttgtttacattatattttattcaatctataaaaaatgagttacaaaaatataagtataactcgttcaattaaagaaaaatcaaatttaaacccgtttaatgaattggtcggtttggttagataaacctgcgcaaaccgattaataatatttttttttacatttaattattatattttagttaattataataataagataaatatatagatggaatttaaagttcaaattaatcactataaaacaaatatagtggtttaaattttttatttttcatatgtatataaattatataattatattatattatatataataaaaatatgtatatataaaataaatcatattaatcgagttggttagattagttcgggttaatttttatccgttcaatataaaaattatgcgggttatatttttgtgagatttttcggtaactttttgacaaattatctcaatttaatttggacgaattcttcatattagacggtttacaaaaattgatgtataatccattaatattgata

SEQ ID NO: 6515 - DNA, 613 bp, Cannabis sativa
gttgccttttatctgtgaattcatggtttttttttctctttctttcttactattatagatttaggtaacttgaaaatatgaacgaaatcgtgttgggagtttggaattgggatttttgatagggaaaggcactaagaattgaacatctagagcggaatcgagctagtgcctgtaacatccaattcacttccttctatttgatggcttatttggacagtattggcatctaatatatagtatatccattaactgttattcctatgcagagaaaagctagaattgaatttcctcatcaaacaaaaagactacgaaattgtcagaaattttcttagtaatggctgcaattgtagcgactttttgcatatatgatttgctatctctggatcgcataccttgagccaaggcctaggcacatgaagctatgtactttggcatctctcaccatatttttttttttggcttgaggattgttattttctgcttgattatttactcaatatatattgaagttgctgacctttttgttcatttgatgggatgcatgatgtgtgtaggtatgattctactgttgtatggatttggtacttcgtttgatgtttaacacttttttttt

SEQ ID NO: 6516 - DNA, 605 bp, Cannabis sativa
cacttgttttctttcttatgggagttagtgaacagcaaaacaaaaatgataacaatgacaaaattgggttccattcaaatatgacagatcagtcattttctgaaccttttagctaagaagacagatagaatcatagaataaaatcaggctttgattcaaagaaaagcttccataatgggggccaggttgttaactgttaagtcactcaaaaacacttataaattgaataaggaaggtaagtgtggtgagtgagtgagtgagtgagtgagcttgtttgccaaaacattatgaaatataatgatgttgtttccaaaaacattaagccatttatgtcatcatagactttacttaatatgattgaatattatatcatggcagagagcaccaccaatggtcaaaatgaacactttagtaactgttaaagtcaacaataaaattacacttttgctttgaataaaaataacaataatggctttcataaaaaaaaaataaaaaaaaaataacaataatggctccaaagatggatttttgtatttgagagttgtaaaaaacaagatcatcactcactagtcctagtcctcctaccaacccaatttgggccattt

SEQ ID NO: 6517 - DNA, 507 bp, Cannabis sativa
atatatattggtgtaatttcgttttcggatcctacataatgaaataaatgatgtgtcgtatagtgtttgagttcacaaggcataatcactttctcgtaagtcggatgtacgataaggtgttacaatctaaccactggtgtagcaccacgtggcaaaacgtgaggaaaaccggagtatggcgtgacagaaaattgctgctactggtccgggtagtatatattatctttggatacgctgctactgttgtctgcactacaaattttattcccaaactaccctctcacttacacatttactcacgtgccctctccctccaaattcactataaaataaacttcaaggatttcaatcaagtgacaccagtattcatcaaaaaaaaaagtcaagtgacaccaggataatgtttggtctgcctttgaattttatttgtcaaaatttggtaattaagttccttaagtttttctaaaataatgtagatgctaacatttatttaattatatctaattt

SEQ ID NO: 6518 - DNA, 1633 bp, Cannabis sativa
attatgaccaggaatccatttatctgaaccagctaggacattgaaaccactcccaatcttaaaacgcagaccttgaatgagcaattcccttccccaatgaatggcctgccaagttagagatggagagtgaccgagccttgcacccaagaagctattatttgagaaatacctatgctttaacaattggcttagcaaagaattgggcatatcaaagattcgccaagcttgctttgctagaagggccttgttggaatgaacaaaggatcgaaaccccatacccccttcaaatttagacttacacaacaatttccaacttctccaatgtatcttggaaccatctttgttagatccccaccaaaaattagccatcatagattctaattggctacagaaagtcgaaggcagacgaaaacaactcattgcatatgtaggaattgattgcacaactgccttcaaaagtacctcttttcccccaacagaaaataatttctcattccatgcatgaagcttttgccatatgcgttctttgacatcactaaacattttctttttatcacgctccgagaaagctggtaacccaagataacgttcatgacattcactaataggcatgcctaaggtgttgtggaagaaatcttgagctgcttgagtggtattaggttagaaagacataacagattttgtagtattcaagagttaacctgaagcttggtggtagatatcaagaactctcttaattgcccttgccgaactttgtgtagcttcacagaagagaagactatcatccgcaaataacaggtgagaaatcgatggtgaatgacgtgttaagcgtagacctttgagattctggatgtgctcttcattctgcaatagccttgatagcccttcagaacaaatcaagaaaaggtacggcgataaaggatctccttgccttaggcctctggttggttgaacatgtcccacttcttcaccattaagcataaatgagaatcttgtagaactaagacagctcatgatcaaagcaacccatttgtgatgaaaacccattttaagcataacctcttggatgtagatccactcgactctgtcaaaagctttactcatatctagtttgagagctgaatagcttctaccaccccttgtcttatgcttcaagtgatgaattaattcaaaagccacaaggatattatcggtgataagctgatttgagagaaaagtactttgtgtttctgagataactgctgggagtacatctttaaaccttagagccaaagtctttgagatgattttatatatgacattacaaaggctaatcggtcgaaaatcgcccataccagtaggagttttggtttttggaataagtgtgatgagtgaatgattaatagattccatattattaccatcattcaaaacacccaatacaactttggtgacaacatctcctacaattgtccaatacttgtgataaaatattgctgaaattccatcgctacccgggcttttatcaggatttattgtcttgagagcactgtaaatttcctcacttgtgaaaggtctaatcaatgaatcattcatggctgatgtaacagtagtcgggattgtatcaagtgtatgaagcaatgcttcaggatgc

SEQ ID NO: 6519 - DNA, 1152 bp, Cannabis sativa
aaagttaaaaaatagtatataaaaattcttttaataataataaattgaatggaataataatatttcatatttaaatttttttaaaatggagtgatatagatagaatttaaaaatgttataaattatatactataatataatataattaatcaaaaataatataataagtaatgtgagaaatataaaattctcaaaaaagaaatccttttcacttttagtagttgaaagtggaaagattaaaagaaaaagtgaaaaaaaaaaaaaaggataaagaggacatctcaaaaaaaaaaaaaaaaagaatgtgagtgtgatagaataaaatggtattgtgtgattaatttttatagtcttaattcttaaataagtaaacacaagaatgaatggataagaaatggaacactttccctattcttcattttcttcacgactgacttaattaatatcacacatattataaatttgagtaaaaaaaacaaaattatataattggaaagaaaaattatccaaaattttcttcatcatccatttcaaaagaagtccaatatagatactaaatatataacattttagagctatataaggaagggaatgcctctaatttgtttgaaagttgaaatgcattaggttgaccattttggacccaaaaatctctctattctgattttctctcttattattattattattatatctcttaggtagtcctcacccgtcatccgcttcatctatttttttttttattatttttttcccatattgtccctgtctctctttcttttccctttctattcagaaattttctaggaaaatcaaaatactccgagaaaaataacctcatgagggctcccaagagaccgatccacgcagtttccacatgggtgaggcggcagccccccaaagtgaaggcctttttggctgtgatttcgggtatgactgctctggttttgctccgatttatcgttcacgatcacgataacctctttgttgctgcggaggctgtgcactccattgggatttctgtgcttatctataagcttatgaaggagaagacttgtgctggtataacttttttgaccattcttttgcatgcttttgtttactcgaataggtttccgcttggtgaaaatcgttcgtcaggatttaggggaa

SEQ ID NO: 6520 - DNA, 731 bp, Cannabis sativa
tatataatctcattattcgttattaattataatagtttatttagctaacttttttcttttttttttttatgttaaatatacaatttttacgttttttactttttatgtatacaattttatgttgtaggtgatagtggtgggtcatagcgctgggggtaaatctgtcacggatgtcatacacaaatttgctgacaaagtccacatcgccatatacgtggctgctgttatggtcaatacaatttcaaccaagcaagtaagatcatttgcttatacatgtcgtgtatgagaaaaaatactgatattccaaatctgaatagggtagatcacttggctttcgacaaaaggcacgatcacagtctctctctctctcttatagtattattacacatttacattaattaaatgtcaagctataaaattaactccttaattaaaaggtattataaggtggctgatgattatttttggtaaaatgtactgtgagctagcttgaaaacgctgattcagttgagttcatatatggacttggactggaccaacctccaactgggttcatggttaagcctgaatttcgatgccaacttctgtacaatgagagccccctagaggtaattaattaattatagggtcaattttttttatacattttcgggttataccaataaattgcaactttagtcaaattttttttttataattttcagtatatgaataaattgcaacttcattac

SEQ ID NO: 6521 - DNA, 1793 bp, Cannabis sativa
ggtaattctacggtaatcctcatataaaacaaaagatatgaaagaaaagttaattaaagcccagtgatcacctccacaaatcacgaaacaataaagtaacaaaattgattattaattaacaaaaataatagaaaccccgccaaaagtaggcttattattatagcttagagaggttgttgttgtgcttcaccttttaatattattattattactattattatttaaaaaataaataaaataaaataaaatagtaacgtgaggaggaggaggaggaagatgatagtagccctaaaatttaggggtatggtagtaacggccgagagatgacgttgaactagaatcagcaacacataggcgtgggaaaacggaacttgccctttctttcccacgtgccacttacggtcaaatgacggtgcccaatccttgacacgtgtaactcctctgttaacaaccgtaaagttggacgaagcccaacaataataaatcattaattttttttttttttttaatttcttaacaacttagaccactcttcctccattttctcagactcactttccccactctgatccaagagcttttttattattattattattttatattttacaataaaaaaattaaatatatatatggaacggtcaagatttgttttgcatatttaattgatggaagattattataattaattaagaattgggattgtgtgaattagtcattgtagtctctgttatgttaattcaatatattatgtagttggtgagaaaatcttatccgaagtcatttcagtgcttattattatgaatataatacactataacgataaaagagttatatttatataaatttaatttaattaattaattaagaaggattattattagattagggaccaccaatttgtacaatatatcaataataattaagactgtgcaagaaataataattaagaattgagtccagcaatagcaatagcaatagcagtatagtatagtaggactctactactactatagtgattagtgagattagtgattagtgattagtgaatagtgatttgtgaatggggaattgggttaattacacaaacaaactataaaactaagaaaaataaaaataaataaagggcaaaagcagactaaagtgacccaaaggtggtatgctataatagaaagataccgttttgaaaacttcctctctcctaatcttgaaacccatcaaaacaacaaaatccatctctttctctctaacctaaaagctcaattttcaattctctctctctttttctttctttctcaatttcaattttgggggagttttgtccaatttttctttcttcttgttctttcttctctatatttcaatgtcagataatgtccaagatcatcatcatcatcatcatcacgatccatatcgaccgtacgatcctttcaactacgagatcgacggtcgatcttgcagtagcttattattcccattcctgatgaacaacaacaacaatcaaagctcctcaattatgtacaataatattcctaatattaattcgaataataataataataataattacttgatgatgagtaataatactagtaatattactagctacaccgactgtctcaacggtagctccatggatcaatacaacactctctctagagctttcgacatctcctgttctgcgccatcatcatccgacgtcgtttcccaaatcttagataataataatcatcatcaacacgacatcatcgacactagtactactacaactcctaataatgataatcacaacg

SEQ ID NO: 6522 - DNA, 1108 bp, Cannabis sativa
ttgatgcttttttcaagcaaaaggttgaggcttcgctcagtgatgttgttttcatctacaaggcttcttacaagattgagctaaatcgtgctaagaagtataaagaactatacaactagacaaactctcgggttcaaactttggaagaaaaggttacgaatactgagaataaggtaagaaaacttgagcttaaactaaacatgacttcccttgactatgaccgtcagggtgaggctctcaacgacaaacgttgctattgccaatttgtagaagaagctgaagcaccatcaatatctccaacaacaagcgaagacggatgttgaagaggctaaggttgctattgtaaaggctgagtcttacattgaggaactcgaggagaaaaatgctcttatgtagaagaatcactcggaatatttgaagaaatcaattgttgtcactttgtttcatctttagaagatgaacaagggcgtgttggacatactagaagaggaagattaggaaaatattctcccacagaccgtagaacttgacgttgctcaaaaaactaccaatggggtcgttgaagatcctgggacccttcttccagatgatgtgaatccaaaaaaaaaaatatgcccttccgtcttcaaagactgttctagccaatgaggttccacctaatctctagcctgactgaactaagaaaattcttgatccagctcaaacgtgaacttatctcttctagcttcataactctttttcttaacttttgttttgggggaaaagggtccccctttttatcttagtagagacgatatttgcaccatttccgcggggtattaaatattatgataattctgctttacatttttggtacttaaattcactaaatatttgatgcacatcaaatgaatttaattttgctaagttagtcttgctttcagattccctcttattctagttccaacagcttgaaccttaggattttgactttatgcttagacattgtttttctttaacaaattattttttctaaattccttggaactttcttagacattgttttaaacaatctgttttagagaaatttagtaaatattacttactaaattctatcccaaaatgatat

SEQ ID NO: 6523 - DNA, 993 bp, Cannabis sativa
aaaaaaaaaaaaaggaaaacaaccagatttaagagtctaaatttagaagagtaagaaattcggtttcgtactgtacctttagaatagttattgttgggaaggagagtggtatttttgggtttatcttcgtttttgttattctttttaaagagcaaaaaatatttgcagaagacctggtttgaagaaactatgagtaacctgaagatggaatatgggcctttatatatggtagagcttgagtttgaaggagcaagaagcttagaggaaagtgtgacttttcttctcagctctttcttactttgctttattttattaataaaaagcctcaactcagtcaaagtcaaatcttcaaaactgtatggccccgcttctctattaataaaaataaaaagacccatttagctatatgtctcttcctttcctgctaaatgaaattcaaatgcatctgaaatgcaaattcaccatgactgacctgttgtgctctgctcctcatttccttcgcttatggttaaccgcctcaacaggtcgctatacacgtgtcatgcagtgccaagctccttccccacgcgccactagcttttttattcctgattttatttaaaaacaaaaaagaaaaaagaaaagtactgattttcttctttaaaaaaaattatataactcttttttttttattaacaaaatttctcaatgaatctttaccacacaaaaaggagaaaaaaagaccattttctttactcgattaaaaactgagtgggtcatttttgttacactaataatgataacacatgcataaaattgtcagaatctataatgctttattttttaattatgtctggtcaggaattaattagtaatgagaaaatgaacaaataaaaagaaaaaaaattctaagaaaaacaattaaaaactgagttacatttaacacttaaaatcaatgtatgtaaagatagaaaaggtaaagatggttagggaggatggcgcgtgggagagaag

SEQ ID NO: 6524 - DNA, 524 bp, Cannabis sativa
atatatatgactaattatgtaaattatagaaaagaaattgtctaaaatttaaaaattatttgattttttttttggggtccaataaaatggtggaagttaagggtccaataacataaaggcaagttccacatgacaatatgtgtcaaataactatacaacttttgggtacaaaagtagaacataattataactagaagatctcagtcatttgtattcaaacaaatatacaaaaagggttttgttagatttgggtgaatcccatgaagtttgacctttgtaactcttcaaatcaaagctcatgatcttcttgatcatgattgacttagtgtataaggtacaaatttaatcaaataatatgaaaatgaagctgagccatgcatgtgagaccaatcacatgaatatttaacatcattttccatatacatattgatatagttctttgtgtttgtttttgtggttatatattgttaaatatatataattcggatctagcaataaatgataactgtatatatggaatggag

SEQ ID NO: 6525 - DNA, 1561 bp, Cannabis sativa
ttgttacatctgagatatgaaccatttgtctcatatagttgcagatttgaaaagtggttgcactatctaaacccgttgaaatctcatccattaaaagaactttggctggaccaaccaacatttcccctgcaagttattcaatgagctattaggctatgatgatcaagctgtagtagtttttatcttaaaattaatttgtaatgaatgaggtgaactatttctcaagttctttagttgtgttactctaacatagtaatgaataccaaagaatacaaaatatctttttagatgttactgtactaattcttgagggcaatttttatttatatataaataagtatacaatattacaaaaaaaaaaatgtaaaaaaaatataattatataattttatataattttacgaatatttataaataaacatatatgtttaggactttaacatgtagataattttttgattaatttttctttgaaaataacgcataaagctaaatatataaatgtaaaagttaatacttatattttgatatattacgaaaataatatgtttactaaaatttaatacgaaattaaaaaatttatacatacaaattttatttatgttttataaaccgtatatatattattatcaaatatttaattagtattattaatgtttataatgctattattaatcaagtatgtttattatgataatatttcaatagaataaatataatttgtttattaaaatgttataacagttttaaaaataaaacacttatgtttattttattttattttttgaataaatactttttttattaaaaggtaataataatttttttttttttaaaaattacttatgcttattaattattcaaaaatgtgtttagaaaataaaagaaattataattaaatgtcacattatgtataaacactgtgtttatattattattgatcatttttattaattattaatccgatatatattacaaaaatatttgttatgatattgtgtgtttattaaatttagaatacaaatttataaataaaacatatatgtttataatttatttttatatataatttgtatataaaatgaaaaatatgtttctctgtataataaattgtaaataaatttttatgtagatataatgtaattaaataatataaagtatataaatttataaatttcctttaattaaatttataataaattgtaaatataatataattaaataatataaagtattattcaaaaaaaaaaataaaataatgtaaagtatataaatttacaaattttcctatatataaatatagctggtatgattttatttactttggacttaaactgatttgctttcgaattctacccaaaaagtgtggaacacaatagcaccatcataataagagaaatacatcaaatagaagtggaaaaactataataaatttataattaagatcataggttagtccagttatttgtaattagatttgtattggaatcaagtaatagaccatagacacgtacctattgttagacgcttcttctgcccaccagaaatacctcttctcata

SEQ ID NO: 6526 - DNA, 1004 bp, Cannabis sativa
cttgggtttgatgcattatcctatgaatttttttgttgcatacctttggttttcatatctaacatttattgggcaggtttggatgtttgagaacctcttgattgtgaatgtttgttagccaatttttttatgctcgtagagaccaattacatctttcataaacacacttcaaacaacattcttaagagcgcgacctccataccttgaattggaagttgttaatgatttcatagtagctcaggacactcttgagcttttctttatccttgtatgcctatccattttcaacttcagggtggaatttatttgttgtgagctttgtgttgttgatgtcaacctctagattggtttttttacagttgttttccagtttttctactatttctttagcaacaagatttgcacaatcaactatgtcaagttggttgtcgtcaccttcttctgtttcaatctctccttcttctgctggttgttctagtgtgtatgattcggttgttgacgcgttattctcaagcattcctacattttatcaaacatgtgttattcttgatttgaatataggtattttagtagttgttatgatgttgttctgtgtgttaacgcacaatgaatatgtggtaaaatcagtttctttgatttttagttgtaagtaaaagaagaagcttacatcgttgaatattttaattggtggtatttttttttctgatgaatcagccatttcattgcaaaacaatcaactttacaaccaataagcacctccaaaaggcctttaatcttatctatacaatattatttacaacacttcaaaccactctctatctttttgcttaattttcattagcattacaagtgctattctagtattaacactccatttaacttgctgcattatctcagaaactaccacctattttgcattccaaaattgctcattccgagctctccataagaaataaactagagcagccacaccagctgctagaacctattttttgaagcttgaa

SEQ ID NO: 6527 - DNA, 856 bp, Cannabis sativa
gtaagtcatattttaggagtctcgagattcaactcatttcgacgtctgaaatcctaacgggaggccacttccaccagttggagccggagagtggcaatggtcgcttaagggctttatgaagccatgagtgacttttctcacttgtatttgatacatggatgttgaaaatacaacttggccactgaaaatcctttccttgtgtggtgaccgaccactgccatttccttatggcaatggtcagccaagtagtttctatactacttggtggcttctttcacttgattttgacatattattggtgaaaatacattgttggcgaaaaatctcacttcccctcttcgtggccgaccactgccattctcttgtggcagtgccatcaaaattgaagagtactgccatttccatatggcagtggtcgactagggttggccataggtgggaaatggtttctcatatttatttttcactccttggtgttgaggaaactcatttagacaatttttccttcatgatttgtaaggagcgaccattgacattcctttttgaagagcactgtcatttccttgtggcagtgctcttcaaaaatgaagagtactcccatttccttatggtagtgggcgcatataccttgtttcttgaggatttgatgccattttgactttatgcataaatcaaagtcatatttatgcccaaatgagttaagtccttgttggtgtccttggcggattgaggtctctagggtgaaaatgctcgcgcgggcccataaaccctagtttgggcacacttgggtgtgtgagtcccaacaccaaatggttggttaatgttccttgtggtattattattttgaactttattt

SEQ ID NO: 6528 - DNA, 699 bp, Cannabis sativa
aagtcaaacattatacataggtctagttgaaaactcaaacaacataatatgattataaggcttttcaggagtaacaatagtagatgggaaattggggtgattcacagcatcagggaatccttgagtctccaaacaaagagcagcacgaggttggtacacaaatccacctttacccttcacatctttcaaaaaattacttgtataaaattgcacaccaggggcatttgttgacaatttcatagaccttccagatttcttatcataaactacagccactcttttcaatgccccataaggagttccatcaagaacatagttgatgtcatagccattttcctttgctagcttcttgattcggcttccaacttggcgcggctttaggaaatcgtatggggttccttttacctcggcgaatttgccagtgggaataagttggctgtccacaagagtgatttttgaaccgaagattttgatgtaattggaaagaatgttgccactgttgtggccaccaaggttccaatatgcatgttgagcaaggttgactggtgttggcttgtttagagctttggcttccatttttacactcagtttgttatgtcctgagagagtgtaggttacactcaccaataggtcaccaggaaaacctgtacaaatttggtacataataaaatttttgttagaagggcttattttagggcc

SEQ ID NO: 6529 - DNA, 633 bp, Cannabis sativa
tactttgttgcctactggagaaatagttgtctccaacatgtgggttaggtctcttccagtgtatgtggaaggtagaaaaatgtcgttggatctaatttagttagacttagacgattttgatgtgatactgggaatggactggttagcaaaatacaacgcaaccatcgactgtaagaggaagatggtaacatttgaactagagggtgagactcagcttgtgctgtgggaaggattcatagatcccgaattccaatgatcttgacgcttcaggcaagagatttgttgcaaggtgaatgtattggttctctagttagtgtagtagataccacgagagagataccaatgggacccaaaaatgttcttatggttcgataatttctaggtgtgttccaaaagagttacctaggttaccaccgaagtgagagattgatttttagattgaattgatactgggggcagaaattgtctctaaggccctgtatcagatggcaccgacagaattaaaagaactgaaagtttagttacaacctatgcttagttaagcaagggttaaagttgttctttttataggtaaatctttctcttatctccttgggtttctttggagaaattaagggtttttacttggttttt

SEQ ID NO: 6530 - DNA, 808 bp, Cannabis sativa
tttgcaccccttaaaagaggtacatcgatgcacttcttatttgttttggcatctagaaaaaaatattagtctattttttttttatagttgtgtacgttatatagttatctaaaacattctacaaaattttgagaaatttagaataatttataatataaaaaataatgttcaaacaatcaatttcacacacatataaaataaaagagtcacgcgtgtaacagactggttgaactctatttttggcgtgttaatttttttttttaattttttaaaattttaaaggatgtcttaaataattataacgtatacaactacgaaaaaattggactaaatttttttctgaattacaaaacaaataggggtgcacctgtacacttcttttatgagggtacatgtgcaacacttgttgaaacctgttttcggtgtgttaaatttttttgaattttttaaaatattaacagatgtcttaaataaacctttatgactataagaaaaaaatttattaaaatattatttgagatatcaaaataaataaagatacattagtactagtagatcacttttaaaagtgtgaatttttgataaatatatatcttcatattattattattattattttttttcttttcaaataaggccaaatgaggaacacgggaaaacacccacgtaccaacttctctaccaacagataccaaacaattgggtaccattcaaagcatgcatttatagttttggaaaattgtagaatgcaccacttaaaatcacttttaatatttcgacattcagaattttttttatttaatttaaa

SEQ ID NO: 6531 - DNA, 1011 bp, Cannabis sativa
aaaacaaatgtatgttactattatgctaaagggtattatcattgaattgtcacacaactacaggcactatataacacacaatatcaacaagcacagtactataatcagttgtacggaacgccatcatcttcggccatgaatgctccatattactatggctattcttatcaacctcaacctcaacctcaacctcaacctcatcatcaaccaacaagaggaccatcattttcgacaccgccgcagcagcagcgaatggttgccggaccaccttcatatgtctactatccagctcatcacatggaaactaatattgcatcgtactcatctggctaccctaatcaatcacaacaccaaccaaggcatccttttgcctcttctcccactggtaatgattattattattgaatatataattaatgttttttttatggcacaacaataatgcatcatatatacagacacacatatatatatatagtagttataatagatgatataacacaatcatgtaaaattattaagtataggaggaaatttttgggtgtataagatagtgagtggggccagatgccatgtgaaatgagctgtctggggttatatggggtgtgaccagggtaataggtcaaacactggaaagtagtgacagacaagcatagagagagtaaactaatagtgactgcatgtggtttgagcagtgtttatgagaagatgataatatatgtttggtagattctcaatacatcctagctgggtcgacttggttgctgcccctctctcccggcccacatcttaataaataattccactaataattataatatatttatgtatacccatatatatttctccatgcctagtactacgggctaataagtataactaatcaatatccatatttaatttcaatttttagtagatggttaagatgatcagaagaggaagaatatatatatatatatatatatatagtatcgagtttgcaatattattcactcaaataacaactcttag

SEQ ID NO: 6532 - DNA, 809 bp, Cannabis sativa
gagatgggctgtttttgtttcgttttagaaaaaatgatgtatttgaatgttcagtgataaaattgtaatatgttctttcgtgtgtgcattattttatattttgttttcaggttcttaagctagtacatttaattgtttcacttggattgatactggcaacggacaaatatttaaaaaaggcatttgtggcagcatcaattaagttcccaagtgctctctttgggatgttttgtatattctccgttctagtgattctagacaccattgttccggcagcagcagcaagtgtgatgagcttttttgagccagctctattgttcatccagagatggctcccattattctatgttccgtctttggttgttttgcctctctccgtcaaagacattccagcagcttctggcatcaaaatttcgttgatcacaggtactttatgaataatttgttggccaacatataatttcaaagaatagtcgtttctggggtgtcgttgaattttgttaccaaattgttttagcttgaagatgttatgctatatatatatttggaaatgaaaatttagtattaaacgacttgcatcaactataaaaatattataattaagtatgatattgttaggatcccacattggcaaagtatgatattggttagtagtatataacttctttgacactctcttctcttaggctagcttttaagagtgagttctacccagtagttatcagttatccttttaagcaatagtggaagttgtgatgaattcggttagtcacttcaaatccaacttcttggatgtttatgtgtatatt

SEQ ID NO: 6533 - DNA, 1190 bp, Cannabis sativa
ccaaaaatttggtctctcggccaaattaattattgaaatatatttttaataggtattatttatgaattagtatagtatttaaaaatttgagtttttatgattaatttttctatctaataaaaaaattatttatttttacattataggggatgaattgttcggttgaaaaaaaaaattaagataaaaaaattttcggcaaaagaaaagataaaagaaagttgagttttacttaagtatttatttgtataaatatattttttaatataatgtaaaaagggatattttttaatattttttttaattaagtaattaaatttagtataattttttttatcatttgtcattgtattaaaattttataatttaatatttttaaaattaatatttatagtaattattaataggtaataatcattaaaaaattattttatatgtataaagggagctcgaaggtgaaggtggtgagcagttgaaagttaagtttggtttgcctaagttagtagggatttttgtggtaattaaagtcaagaactacacactcaatatgtcccattaattaacacgaatccaccacacattgccaaatataatccttctaatcaaacaaagtaagagaaaaatattaattatgaaaatcaggtacaccaaaccaaactaatctttttcattcctaattattcttgcgcttcttaaattcatgagttaaactataacttaataaatagcattttattaattttaaacctatattttaggatgactcatctaatattttgtgtctatattattcatggagtttaattatagtcatttattttgcgtatactgtatatatatggtaataagtgtgggtagaaattttagctaatttcatgaaataattaagagtatgggatgtgtttgttttggtaaagcggtacttaattataagtagttagttatcttggatatgaaggaatgcactaatgaaaaaagaagaaaaaagggatatcactaatgattatgggaccactataatataacatgcaatccactcaatgccacttatttaaattaggacttgcatcctataatttggctacaattattattattattattattattattattattattgagaaaactataaattttatgaatttttatgtgaaactgtgtaaaaatatggttttttcaaaaaaaaaaaa

SEQ ID NO: 6534 - DNA, 1410 bp, Cannabis sativa
cttctgctcatttggcattaaactcaaagtttaagagaagagtttcaaccctcttaacatcaacatgactgagataaaatctccatgactgaacaccaatagatcgtcagcaaagcacatgtgattcagtttcagatatgagcatctttcatggaatttaaagccaggcatttcaccaatctttcgaaggattcgtgataagtattccatccgtaatacaaagaggaggggagacataggatctccttgccttaaccctctctttgcattaaagaatccacacatagagccattaaaaaggagagagaattttggggtcttgatgcaggtcattacaagctcaatgaagtgaatcggaaacccaaaaccagtaagcatttcctctaggaaactccattcaatggtgtcgtaggccttcctcaaatctatttttaatcatgtagcttggcttacaatttttccttccatatagcctcaccatatcctgacacaccagaacattatgggcaatatatcttccatgggcaaagcccccttgattttcagcaataagatctggcaacaccttcctcaatctattgcagagaaccttggtagttgtcttgtagagcacattgcaacaagagattggtctgaaatccgccacattctttggacaagcaattttgggaattaaagtgatagtggtgttgttaatctctttgaagattttcccagtggtgagaaacgacaagatagcttctgtaaattcagttcccactatgtcccagttatcctgataaaaagcacttccatacccgtctggtctcggagccttgataccaggaattgaaaacaaagaatctttcacttcttgattcgtgtaatctgccagtaaaatagctttatgaaaatccgtgacttggggccaagattaaccacagattgcaggacattccttctattctgcatattagtccccagcagcttttcataatagttcaaaaatgcattttgaacaccatcaggagagtcaaaccaggttccatgctcatcttcaatcgagaagatcttgttttgaatccttcttgatttcagagaagcatggaagaaagctgagttctcatctccaacggatgcccaatttattttagctttctgtgaaagaaacatagtaaaagccttatgagtttcattataccttctattggcttcttgctcagcttccatcaattgtaaggagagcggattcttggtcagtgcgtcctgggctgctatcaaatcattccttgccatcatatatgccttttgtatcttagaaaagccttcttggtttatctttttaaggattggtttcagccttttgagtttagaaaccactttgaacatcttcgaaccattaaaattttcctgccagcattgtctcacttt

SEQ ID NO: 6535 - DNA, 673 bp, Cannabis sativa
agaggtgtcacctgaaagtgtaccaaagataatcagattcatctttagttgtgttcatatgttctaataacatgtttgctctcaatgaagttgtgtcaaagtttggaacagtctctttgaacacttcccatctcagtttcgaatcgaaattttcggttggtaccattgttctcacaccatactgtgcactaatctgtcacaagttcttctagttaaaaatccatgtattaattcatcaaatgataatgaagtgatttctgttttttttttgttacttaccttggcagtattgaaagcaatgttcttgcaatctggtaaaatactaatggaattatgaggcaaaaaatatgaaacattgtgaaattggacagtgacatctttcatgtggctgttcactaagaaagcaacacattcttctgagttgtaatctccatacacataagccttcaaaaacaagtttcaacaaatatgattataacaagagtttctcttaactattgtatttgcctagttttatcccttataaagttttttgttgcaaaaataccccttcaaatattactcaaaagacagtaataattcaaagggtaattttgcaatataaaaaataaaaggaaacaaaactaaaaaaaatcaattcaaagggtagataataaaggttaaaataacaaac

SEQ ID NO: 6536 - DNA, 562 bp, Cannabis sativa
cctctctcagcgctgagctggaggaagcgaaggatggggaggttatagctgttgacggtggagatgcggccggcttgaggggtgaagacatcggcgcgtgaaggatcgccgatgttctccctaagcctcatggagcagaaggtctcttccaaaccgttagcttcataccgtccgccacggctcattctcctccgctcttgctcgatctccctctgcctctcgtcctcgtacctctcctcgcgctggtgctcctggctagacctcaaggggctgaccaaatccaaagttcccttgactctgatgatgctgttcctgtcgtcgttctgaccctgaagcctcttaacggtctcggagtcaacattgaatgcctcttcaagatatctgctgttaaaccccttgaagatgttcctgtagttctccgatgagtgtcgtccttcgctcctttctcggattctctcatcaaagcgagcaccccgtcctccttctctccttagctgctcaaactcgtcttcggggtttccagccaagtagaatctctacgcaagtgttgttgtaaattagc

SEQ ID NO: 6537 - DNA, 2179 bp, Cannabis sativa
gagcccaattggtaatgtatagctccaaatttattaatattagcccaattggttttgagatagagaaatcaatctgttgtaggagcttttgtgtgagaatgtctgctggtgtatggtaaggtttaatgtacatgtaacaaaacaatgagagagggaatagaagtgaggaaccaaattaagtgaagaagaagaagaagaacaagttgtctttaaggtgtttatcttcaattgatcaccattgattaagttaaagttatcttgatctgaatattgtaacttatctattgtctcatataacaattataattaataacaattattctcatctcaaaataatcagactaagtcaaatcaccctttctttttcttttttctttcaagattataatcagtttcagccaggtacatgcattagaatcttgtacaagtatattggttacttaattattttctatcgaaaaaagaactgactgtaaattatgtaataaattattattaaaagcaaatagttattgattttctggtgttctttttttctagttaatgttcatacgttttcttgcttaattggaagtgtctcagagttattactgattgtcaacccgagaaagaatcagagttgacggatgccttgatttggatttcaccttctttagaaacactatccattaatgaaaatctcatattttagttgctttacactattgtaactgttgagaatagattattatgagtaggggatggttatcttctattagtttcctttgctaaatggtactctactccttttataagattatctttacttttttttgtagctttgactactatacataacaatgagatgtttattttcatgtgaattagcttcattattgttatagatttatttttcttcctattgctattgctgcaacaacaaagagaaaaaatatgtggaaaagggtacttcattgagtttaaacattgaatattattattacactattgtttatttaattaatgaatatttttcttcatgataaaaaaaagtctaataatttacagatcatatatataatattacattttaaataaaaaaataaactagattaaacataatgctacataatcatgaatgtcgttagtttatgaagtaattttaataaaccacccaaataaaatataataataaactcactaaacaaaacagatcgtaaaactttatttatgaatctcttcaagatgtctatataacatacaacgtattatgtaatagtgtaaatagtccttatatatgtatacatacatatatgattgtatacatatatgatcaataaaaattcaccacatgattattaaactatctcaattctacaattgggacaaaatttactaacttgtagccactcaacaacacatttttcgtgatacgcgtgagtacatggtaacttagcagcttccaaaccaaccgaaacatcctccaaacaaatcgaacaaaaaattagattatcttttacctccactttttctaatttttcaattgactcttcactcgccgccacaaaacgaagaggaatatcattcatatcatagtcatcatcgtcgttgtcgtcattatcgtaatctgaatcaagttgaggtaattcatcaacaaaaactctaatagaaacatcaacgccgacttcttcatttgaactataataacttttgttgttcatcatcgttctaccacaatcaacgatttcatcagcaagaaaagacagagaaggaagaaagaccgcagcaagcatgtcttgaatggcaacttgagcttgagtgtcgttgctcttcatcaatgtgtcgtatgaaattcgcgcaacattttctataaaagcagttgggtttcctgtgtcgtcatcatcgaatagaaattattcgtcttccatagcaaatggtggagcaagaatgaacttggcatttaagttaatggtaaaaaaatgagcattatgtggttcttgttcaattggatttggttcaaaatgattgggcgttatagagtaatagggatccccaatgacttgtggagaactcataattaattactagtagaaatgattaattttggaatcaaagaaaaaaaaaaagcagtgaaatttgggtaaaaaggtaatgattaatcaaaattagggttagccaaatgtttaggaaaggaactaaa

SEQ ID NO: 6538 - DNA, 901 bp, Cannabis sativa
aaaaaataaacatatttataattttgcatacgtaattttttcgttattttggcagttggatttgtcggtacgtaattgccaagttcaatttaataatgcaaaatgatacaaaattgatcattttttttttttataaaataataattaataatcataaatttcattatttatttattaattttaattgatttttcaataaaaggaaaaatgctcagacactagtagaatattcctcttaaatgataaggagttgtgccctagatccgatctaatataatttaaattataaatataaatattttatttttctctttatgggcaaaaatatatacatatataatggttttcaataaatttaacaaatacgtgcatattaaattaagcacatttataatgattatcaatttacttgacacaaaggttcaacaatttcaaattggtttagagtttggataagaagattttctttgttcatgattttcttttatgtaaatatcattttaaattttatattttgtaaaaattattgattggattctctattttattaatgacaaattaaattatatattttctaaaataatactaaatagtactatgaattattatttttgtcaaaataacttgatgtagaggtgttatatgacaatagtagttacattttttgcatttgtccatgtcggaattattttcaagttggttttattaaaaaaaaataaaaattgagtttatggtcctattttgaaattttttagaaaatataagatttattttatcatttaacaaaatagagagtccaatcagtagtttttgtaaaacatagaatctaaaatggtatttattttttttctagaaaatagtttagggaaggtctgatgtacaattccttaagggctcgtta

SEQ ID NO: 6539 - DNA, 1033 bp, Cannabis sativa
atggcaggggaaatggctgaactcatatggggacaagaacaaaagatgtttattaatgggtatgtccgtctaaagaaaggttttcctctacaaaaaagtatttttataggacaatttataccaaatagagggaaataacattgggttcatgaacaaaaagattgtcataatgaaaatgaaatggttttgcaaagaagtttaaatggttaaaatgtacctaaatatggatcatggctctaagaggaagatccaatacccaattgttttatggctcatcaccaagatcaattacgcattctggaaattgaagatgcagagaactaggggatgagatattgaaaggtgatgaagcaagagaggaggccgatcgtctagggatcgtcaatgatggaaaggaaaatgcacggtggtgctccgatggcttcaaagataatcgctaaatcaattgagaggattgagataaataacaaggtggaaactaaagtttaaaaactgttattaattcaatatacattattatcagaattttgggaacttgtttatgactacaaataaagaattatttttgtataatcttcaatgaaattgaaggtttttttctttggaaatagttaaagttgaatgaagtaatgcaactcaaattatttaccacaaataccaaaataaaacaagtcaaatttttcatggcatattgagcaaacatttatctactaattcagggactatgtattcactattgaggactaaaatggagtaagagttcaacaaaaggatattctgaaacaagtcccacaataacaaggcaacaccaccataaacatagtcccaattcctctcaactattaagctacatatatattcggtagtaaaaaggtaccatagctcaatctttagatgaaaagttacatatatttatgtttaaagagtaaaaaaggaccatacttgaatcagaggaaagtgccaagctttgtaacaaaatgtagttggctctatttatctgggtagcaagaaaaagagaaggcattagtaactc

SEQ ID NO: 6540 - DNA, 1286 bp, Cannabis sativa
aaaaatttaaaaaaaaaaatacatcaagatattttttctttatttttatactttaaaatataaatatatctctccagtaaaaataacaaaccattttttttttgttgttttataattattatgaatttacttttctgatcattttgtagttgtcttaacgttgatttctcattgtttttttaattattttcttactttttacaaaaaaaaaatactaattttagaaccttataagtatgtttttataaataaaaattttagactgtaaaattgtcaaaaaaaatataaaaaaaatatttttaaaaaatttaagggttttttcatttttacacctcaaaacaattttttttttttttttttgtatttttacggatttctacatagaaattcctattgcaactagtgctgcaaccactttagaaacccaaaccgtatatttgaaaaaaaaaaaattaaaaaaagagatatagagtaattcctcaaaaattcattatatctaatattactacgagatgactctttacaaataattaactattttttataataattatttattaaaatatataaaaattttatatttatttataccaataataataataataatataaatttacaatgatgctctgaaatcttttaatattttttctatatattatggtatgattttattattattatatattacaaacatttataaatggatcataccactaataagtgttccctaacccctaacatatataaaaatataccctaagagaattggtgaaatgtttgaattttggtcatacatgtggagtgttaagacaaacttagtcactaatcatataataatgtcaatattaatatatacactttactcaaggccaacttgtattaaattaacacatttgttattgtttattttggaagagaatctctagttgttgtttatagacttttgaattagaggtgaataattgaaccttttattgatttaagataaactagatgttttttttataaataaataatatcctaactagattggtaagaatattacattcactccatatctaaattatattagatgtttgttttattttattttcatatatatatatatatacataaattataatagtgacatgttaccctatagaggtgaaattatgtcctaactctcaatggtttagttgacactatgaccatattgacaacaaaaattgtccaatacaccatgatttgcttatttggtaaaatctcaatttacatatatgaacaaatataatttgtctcat

SEQ ID NO: 6541 - DNA, 1157 bp, Cannabis sativa
actttccagtgcttaaaaaaagataagtctaataccatcatagaaattgtgaggattacatttctcatgaaaggtagatcaccccataaatagaaccaaagtgttgtgtcaacaccaagagatcaaactttttccgatcggtgcccgggcttttgccccactagtcccgtagggttggtcctagtagctcaactgagagacctcgtagtgactaacagattttgatgctaagagaaatggaacttgaaacctggcacttacccgaacatctcaacatatgcccttacccctaggccaaccaacccctccgggttcaaagtgatcaaatgattttgagggttaatgacattataattccttaaagttctttatcttctcttgggaaaatgaagtcattattaatgggttcgtaaatcatagaagcactcattgttgctgctgctaacagaacacaaaggcctaccaagttaaataatatttttaagggaccctttcataatgttaaaagtgttacaacgtccttgtccttgtcctttgattatgattatgagaggaccctaggtacgaaaaaatggtttttattttgaacgctttgacgtttgtagtataaaaggcaatcaacattctcatgaaatataaatacattttaaaattacattgcatatatatgtttcgccgatttgttgcactagtgatataagattgtaatcagagtcacttataaatatagaattcatatgacacactcataaatacagatggaagagtacctaagataggatagtttgcttgggacagagttcaattaaaacccacacatacaaaataatattggcttggtattattgccctcaacaataggccaaaggaaagattgattggtaagtgttttataaaaataacactaaaggacattttgattcgcaaagcacaaaagcaaaaccctaaaacaatcttcaatcaaagtccctccaacgagcctaaatttacactaataagaccctgtgcgatgctaccctcaaagttctgtttagtataaaatcagtgatgttagtttgaatttctttgagtttcatgttgttaataggagcacaaaataatgttgtagatttcttttatttccaatttccgctaccaggagtaaataactggagacc

SEQ ID NO: 6542 - DNA, 519 bp, Cannabis sativa
gaaaattactctcactgatgttctttatgcaccagaatttaaatacaacatcatctccaccagctgtatgacaaatgatgttccagtatctataattttcgattctaatgtttttcatattcaggacaaagccaacctgaagatgattggaagaggtagcaacacagatggtctctatgtctttgatgatactgttggaacgcccaaagtcttatccatttcagctgaaacttggcattcacgacttgggcacccatctcaaaaacgattagatcttctcaaagatgttttgcattgtaacacttctcttttacataaagataaaccatgctatgtttgtccaattgctaagcaaaaaagattatcttttcaaaataataacaagttgacaaatcacatctttgatctcattcattgtgacatatggggtccttatcatatagcctctcacactaaccacaaatactttctcactcttgtggatgatcattcaaggtttacttggatttatttaatgca

SEQ ID NO: 6543 - DNA, 619 bp, Cannabis sativa
gttgtagctcgggtatagctgagattgtgatatagtttgatgataatttaaagttgcgatttagattacgaatgtgcataactaagagattgcaatatagtttgatggtgatttaggttgctatttgggttgtaatatcaattttgactttaatttcgttatggaggtcttgcgatttaggttgcgaataggacatggatgaaattgtaatacagttagatgttgatttagggttgtgatttgagttgcgatatcgattgcaacttcagtttgttttagaaatcaatggaagtttcacgtggtggccattctcgaacaatcacagagggaggatggaataatttagaggaagaagaagaaaggggggttgagactaggatatggtttgattgtgatttagagttgtgatatgtgttgtaagttcaattttgattttggaaaaaactaagcttcaatttctacggtggaaagtaacaggaaacaataaaaagaaaggacgagaaaaaatgtgaagaaaaatgatattatcataaaaatgaattgaaaaaacataaaattaatgtaaaattatgaaagataaagtacaaaaatagaaaaataattaaagtcctaaaatgag

SEQ ID NO: 6544 - DNA, 1149 bp, Cannabis sativa
aagagtttgggtgcaagttcacaatcttccccatgagttttattcaagtgataatggatttcttcttgggggtttggttgggtctgtgataaagcttgatatggaggaggacaaaccaacctcgtggacaacgttcttcaagatcctggtggatattgacattcataaacccttattttcagggtgcttttttgatttgaattctggtgtgaaacaatggttgcaagttaagtttgaaaagattggaattttttgttaccattgcggtcgtctgggtcatcaacgacgaggctgttcgttatcgtcgccaatgacggtggcgaagtgtgatggtattccattcccaatgtatggtccgtggctctcaacgtcctccgcttaccatgacgtgttctctggtccgtcctacggtggtcctagtactgactcctcctttggcgtggtgaagaaaagtggtgcgtatcgtccattaatggcgtctccgactccggttgctggtgaatcgatgggtgtcactgggatggttcgtcgaccgagacgctctatgatggtgacccatcgtgcagctgctaagtcttgggagctccagcgattggtgtggcatcctaagcaatcagctgtaggtggtaaggacacttttgctacttcgggtaatagaggtgatattggggttcggatgcagggaaaagacttgttggtatttcttttttgaggagtccaagcgtggagggtagggatatatttttaaattcaaatgatgtggtcgttgacttgtcttctctggatggtgggtcgtctccgtgtgggccgggtttgaagcttcttgggccagctgaagagcttttggattgtgggcctaagattttgaatcaagatatctcccatcccagtgggtcgatccaacaggttgtgccttttttaattagtggtgggcctgttttggaggaatcaaatttaaataatatttctaatgttgggcatgtggacccgattgtatctaatcctactcccactattattgggccggttcttttggaccaagctaatggtgggcaagttggtcttacatcttcaaagcccgttggtgtttgtgagaatcaagttcaaattaatgaagagcaagcattgtctcatttctttaaagctcaa

SEQ ID NO: 6545 - DNA, 879 bp, Cannabis sativa
tcttttctctgtcaaacagccatggccaagcccgaccaacgacaaccattctcgatcgccaaggtcgaaatgaacctcgaaaactcaaaactcaaatcttgaccttccaccctctagccccctcattgtctgtctttctccccctctctttctcagttgtgtacgatgctgctgactccaataattgaagaccgaaatggaggccacggatggcctctccaagtctcgagaggcaaaaaaaatgaagaggatttcgtctgagaaattgagggtacagtcgaattcatataaataggggatttgagtttttgtttaaggggaatctcaggagtagagttacatggctgagactacatgtttgagtgaattggagtttcttagctagaggtttgaccatcttgctgagaattataagaaaattggctaagtctgaaagctctaatttctaaagagagaaactagagagagatgctctcgcttgatggagaggagctcttcttttatagggaaagatgtgttattaaaataataataaatatttcaataaatatgaaaaaatatatttaggttatttttgactgttgatgatgatctgataatgaaattgaattcaatggtcggtcgtcaatttctgaaacctgagtcgcgttcccaagaccatcttcgggtaagttgtagtttaaattcgtaactctcttgtggacaaaatgtggagttgataatttcaaaattgtcattggagtgtgagacaagacttgatagagtattaaaataaaattaaaagtcaagttgaatcgtgtgaattagatcaatattgagtgagttatgaccattttactgaatgatattcttggaccagcgcccaggttgacatccagc

SEQ ID NO: 6546 - DNA, 586 bp, Cannabis sativa
cttttgttcactctatctttttttccctccccagataaatgggcggattggctaccaaacctatctaggtaatttccacatatttttcaatcttattaataaaaaataaaaaaaaaataaaaacatttttttccaataaatacagaatcctcactatgttaatttttttattctaagaaaataaataattcaattaaaaaaaatacaaaatcaagtgttaaagacaatgcaaaatggactggagctaaataagactatcaaactcaaaaaatatttaaagataaaacaatacgaactgaaaaatgagtgataatattacaagtccgattacaatgagagaacgaaatatctaagaaagacagaaatgactctttaatgtcatgcattgtactaaacttaataaaaatctcttattattgacgggagcctgattcctcactacccctcctaggccattttttctttttttcttttttgaaacgagacatatgcattgtgtttaatttcataattttttttttgtcattaggttttgaaaaatttcatatctttctacaatttcaactcatattcaaacctagtactt

SEQ ID NO: 6547 - DNA, 1484 bp, Cannabis sativa
tttacttagtggcactaaataatgattaatattattattaaaatcaacgtaggacggcacttaggtatatattattatagttcctatcaaacaagttgaccatttacgtagtcaaaaaataacatgacttttgtcctaagtccaaaaacaaaaaagtcatatatatcaacaaaaacacacgttaatttcaccaaattagtgacgtggagttagtaaagtatagttagaattagatataattaaaaataaatgcataattaattgactaattaattacctgtccaagtttagcatgaggaagtttttcctttacggcttcttcaagctccttacccatcggggccccacccgacatgacggtcctaatcgacgacaagtcgtaccgatgaagatcgggacacttggcaaccgataaaacgatcggaggaacgaacggtgcgattgtcaccttaaatttctcaatcaactcaagcaatttattaatctcaaatttttgcatgatcaaaatagccgccccgacccgaagtccacacaataaaatggaattaagggaataaatatgaaaaagaggcaaaacgcatagaatgacgtcgttttgatgaaagtacaaatttggattatcaccgtccacttgctgagcgacacttgtcaccaaacctttatgagtcaacatcacaccttttggaagaccagtcgttccagatgaataaggtaacgcaacgacgtcgtctgggtgaatcttaacagctggaatctcgctttcgtcagcttgcgtcagcaacgagaaatgtaaacactcactctcgattggtggcgcgtcgatacacatcaccttcacaccaccgccattttcattactggtaaaatccttaaccttatcgatatagccagataaggttataacaagcttagttttcgacgccgccgcttgtttagccacctccgccggagtatagaaaggattggcggtagtgattatagctccgatgtaagaagcggcgagaaaagagtaaacgaattcaggactgttctggagtaaaagcatgatgacgtcaccttgtttgattccgatcttgtcaagaccggcggcgacttttctggaggtgagatcgacgtcggcgtaggtgatggtttctccggtggcgccgttgattagacatggacggtctttgaattgagaaatgttttcgaagcaataggagtggagtgggaggtggtttgggatgtaaatgtctggaagttttgatcggaaaatgaattcttcttcgagatcttgtttgttgttgttgttgatgttctccatttttgagttttttgtttggttactaagaaaatgagagagaaaaaaaaaataatataagagagagttaggattaaattagatagagtgatcaaagaaagtgagaattgggtaggtttttttttttttttttttacgaaaaaaccttccctaatttttcagattatgaattttggtttaaata

SEQ ID NO: 6548 - DNA, 940 bp, Cannabis sativa
acaatttactacagaatcaacatcatccactctcaacaaaattctctctacaatctcttctggaattaggcaaaatctatttgttcctgcatcagtatcaaattcagtactcaaactattcaaatccttgtccttgataaggataaatcattataatgatggtgtatctaatctatgatcaaaactaggattaataatagaagagtaatttaccagtgtgatgggtgaggccatccaaagccatttattaatttgaaatttgtaatgtatctgagagaagtaattttgagaagaaaaaaatatcaaaacaactaaaagtttcagtctttcagatctatcttcagtgaaaggcttaatatccgtaacataatataattcaaacaatagcacagactttcaaaattcaaaattccaaaattagagataatatatatagtgatccgaaataaaaatattataatccaaattttacagtcattctaaaaatcaaaactaataaaaagtttgaactttgaatgaaggaataaacaatatacagtgaattttgaactcacaattttgcccccaatagttggttgaagagattgtatggtggtttccttgctaacattaaatttttcagctttggtaacagagaaaacagaaaaaggaacaatttttcacttctctttctctctcgcaaagagttgagaattgtgtgtgctagggttacttacaagtcttaagttatagaaagtaataagaaaaaaactagttatgatacaagattactataaaaattgcttctttgtttccttaaaataacaaaaataaaaaaagattactataagtgttttcttcaaaaaaagaaaaaagattactaaaagtgtccctccaagttgggccaggcaggtgaggcctaacttggagggttttcctctattcatacgggttcgtacga

SEQ ID NO: 6549 - DNA, 607 bp, Cannabis sativa
gggattgaaccttggagctctcatgagttgttaaaagctttacctttaaactaagcacttgagctataattttcataatagttaatctatatatagggaccccaaattttgatttcgctttaggccccaaatatcttaggaccggccctgaatggtgaatcaccttgcctacatccccggccagaaaacaaccacaaacagggcctttgagagtcttttattagctgatgttcaataagagattacaacatgttcagttacaccactcaagaagcttagtttctgcaactaaacaactcacttgtggtgatgatgattgacaatgcattacaccactacaaacactcaagagcactcttctctcattctttctttccttaaacaacttccttaaattctctctcacttaatctattttcccttgatgagttcaatcctagccaaatgattgagccttatatagactggtgtgtggctcgagcaccatctgtcataacagacagttagttaattcggttatgtaggttgcagcaggggtaaattagggagtgagtaatatttggccaataaacaacaattgtccaccttggccacatatcaagaattg

SEQ ID NO: 6550 - DNA, 574 bp, Cannabis sativa
attaatacttcttttattatatataggaagagttgttattccggacaaagaatcagcagatttcttttcctttattggaaatttggacaagagaccagagcttgattctaacataaaacatggagatgtacggtacaatgcagctctttccatgatggcttcaaagctctcctatgaaaaccaacctcacatccaaaacactgttactcacacatggaaggtatatacatatatatatatataaaaaaaaattaacacaatattttttctttttgcgttattaattaattttttttttataaaaatgatattagcaattttctttttttctttgataaaataatagtcattattttcttttgtgaataaattgatgataaggtttttgttcgatagaagtgatacgatcgataacaattttatttggtaatcctagctaattaattttaaactatttgtgttatcctctacagatggaattcgtgggattttatgactactggaacggtacgaaacagctgtcccaaattattaattcttataaaaatgtatatcaaatcatcagatcgtatat

SEQ ID NO: 6551 - DNA, 891 bp, Cannabis sativa
atttttttatttttaaaatatttagtaaatcaataaaaacaattagataaacatattatatataaaaatatatatatatataaataataatgaaacccaatgaatatatatatatatatatgtttaagaaataattgagctagcggtccttttttgtaatgtgtggcacatattggtgcttctcagataattgattaaccatctattgtgactcaaagtttctatgtatttgctagtactggaaattgcactctgagaattgagattagttatttgtgtgtaaaatttgtggaaggagattcacattttattaatgcctttaaaattttcttccaatattctaggatgtatttataataacgtacgaacgtatatataacgtatatatacgtacatatcttattgcatcgttcaattttttttttttaatattattattattattatttctctttaagtgaatattatagccataaagtcaaggaacttattttgtatcgaagagacaatacaagaaagtgaatttgttcttgtaatatgtccattgtcctttgttatatgtatgttttcactcttatacgtatatacttttaatccgttcatggaaaaaaattatatatttttttgtctaaattaaaataatactgtatatatatttatcttgatgtaaatttgaaacatacaaatttgataaagtttgacaattaacagttaaacacactattaaattgtattagagcattgtcaaggagtataagtggtggtgcctataattttttaaaaatgatcctttgcgattagttaacgatattttataaaatttattatattaaattatatgaaatttaatagttattatttttttttgaatggaatagttaattataatag

SEQ ID NO: 6552 - DNA, 1164 bp, Cannabis sativa
cacaacttcaagcaagataaagtaaaatccctcttggaatacaaaattatatttctccatatcaacattctaagttgaacccaatacacacaaaaatctaaatcaaaaactaaacctgaaattatgcatggccaagacccatatgcatataactatataatacaaacagaataagggcagtttgaggacttacaggagatgctctaccaccatcattactgacccttgtgaggactgtacgttcaaatactgatttggggtcgaggctatgaagttgaagatgatgatgatgataagacaagttaggaagaagaagtatggactttctttttctgggtactctggtttcaactccattaaaccccatgtgagggttttgagacccaaggtggaagagcacatgggacaccttcaaactcaaggttgctggaactaacatttcttgacttgttgtgctgtgtctatacaagaaagaaaatcactactattggattttggtcagatagaattcttgatgggattttgattttcttgattggtatcagctcagttcatcagtttgagtggcatatttgtctgaaatggattctgttttctttttctttggcttgaaaatgaaactggagaaggaatgcgctagaagtttaaatactgtgactcggttggctcagtgactcagtccgagtgtatgtgaaagtaattattattattattatcattattattattgttatcattattattattattataggaatattatttttacactttgttagcaaaaccataaataaataaaaaaaagtttagcctaaataattaattaaatatctataattattagcaattaatttaaaaggagagttcaataaacaattgactatagatgacaaactgtccctaaatagttcgtcttaagtactatcacttgccaacttttatctttgatacaactgagagtcccctaattttagccaacttaagttctacattcccaccacgacaaatggtacgggcttcatcaacaagattgcctaaatgatcccgagctatcataccgattctaaattgattattcaaagtgaacaatacattgtcaacatttatattgatttgattttcttgagactttattcaactttatcaccaggtgccataccacta

SEQ ID NO: 6553 - DNA, 3386 bp, Cannabis sativa
tggatggaagcttcaagaagaagatgattttttttgcaaattcagcatcaaatgttgtaaatcataagagaagggatttgtttagaatgttggatttgaaaagcttgggtatttgcagcttttttatttttctttgtatgattttacagtcttagaagtttaaacatttgtcaagttgaataaaatttaataataaaacaaattaaatatttcatcaatcaaaatttatgctacatcataaataaatccattagatatataattcatcaatcaaaatttatgctacatcataaataatgttaaaaaaataaaatatcatatatttgcatattaatttctttcttttttttttgttgttatttatttacaaacaatacaagaaatatagcacactaaaaagttatcaaataacatcttaataggacaaaaattaaaattatatatatatatgagaaaaaaataaaaataaaaacctaaatcatattaaataattattgtatcaacgaaataattaaaattatttttagtatgtaattacacccaattttcgtggtgtgtgtgagatttgatctaaaacaaaatgtcaaagaataaataaataaataaaatatatataatttatttggtgggacccacaaatgacttattcttctccttcctttgtctctctcctcaacatcctcttcttctcttttccttatcgataggacaaaattaaaccagcacaacaaaatttacatccaccactatgcacattcatctataagtgaaagacctagaatttgtacaaaaagtgaaatgagtttaagcctcagtattatggtagttattaggcgcgactactcgatttaggatgtcattttctatgattggtattgagagctagtggtctagtggacatgtgatatgcatggatagcttgtctcttgtgattatttagggcctctctattttgtttatacatgacgatgaggatgataggtttcatctcgtttttttcttaaaaatgctaaccatgcaaggtttttattaaactattggtcctttaatattaattcatttcctactaggttcataagctcactcactgtattttcctttccatgaactcatcttggtacttgtgaataagagagaatcattgatggagaacggtgagatttgcttggtcatatcttaataattatcttttcttttaaaggtttaatatgtatataattattaatggatggtctatatcgcttaaatagatatgagcagttagggatgtggaatatgatggatgcttagtattatttcggtgttttaaaaattattaaatctaattatttggtaactacataattgtgggaatattattgttctatatataataacgaatggtcttattttattacaattatgttctatttaatatatgagttattcaattattttaaatatatatttgatatgatttcgtataaattaaaggattatttgtatctaccacaacctaaggcttaggtcgtgacagaagttgtatcaaagcaccgggttcaaaatctcagagtgtatcaccaaattgataagattttcttcaaataataataataaattaatcattgtatttttggtatattaaagcttaaatataaagagaatctattcatcactaacttgttagcttttgatacaaagagcaaagaaaatacatttaaggcaaaatgtaggaggaggaggcgcatacaaagggaagagaaacaaggaaagtatgcagctaagaaaaagtaccctagttgatgatagatgagttgtttgatcaacttgaaggtttcaaattcttttgaaagattgaattgaagtcaggctattatcagttgaggactagggaagaagatgtccttaagatttctccaaagacacctaatggacaattttagatgctattggattaacgaaggtaccttcatttatggatctcgtgaatagtcttaggatcctacttggataagttggtggtgatattaatttatggtatacgaaccttaagggatcatcattcatatgctaacgaagagaagtgtgacttctgaaggaatgtggtcaaattcttaggacatgtaacatctcaaaatcgcatcattatagatccttcgaaggttgactctattatacaatgaaaaataccaaataataagatcgatatttcaagttttcttgggttagtaggctactattgtcattatgtagaggatttttctctccaattgttatgccttcgacaaatttgacatggaagaaagtaaaatttgtgtgaaatgaaagttgtgaagaagcattcataaattaaagcgaagattaaccgtgacactcattttcagtgattcaaataataaggaggcatatgtggtatttgtcgatgttatagatacaagtttaggatgtatttgtgaaaaataacaaggttttttcctacgggtcttgagaaaaaatatgcacgttgcataaggaaaattaccccactcatgacttaaagatctggagatgttatttgtatgatgcaaagatgaagtcatattcaaatcataagagcttaaagtatctctatacatagtgacttgaatttgaggcaacaaagatggatttagtatatgaaagattatgatttcacttcacaatattatcttagaagggctaatgtagtagtagatgcactatgtaggaaatctcacggtacgtttgtatgttcagctcctgaagactagaaagggacaattacaatgggtgatcatgatttgcaatcatatgaaggagaagagatagattgtgcctctaatgtagttgctacattagtgtctctttaacaagttaagcatcgttagtggcaagatgagaaaataagacttatctagaatcaaatccatgatgaagaacatttagatagatagacagttaacgctatggggtacttataccacaagagaagattgattattgtaaatacctgtaatcttagaaagtctattatgatcgaggcatgtagctccaagtttattgtacattgtggtagtgcaaagatgcaccaggacacgaggggaaaatactaatgggatggtatgaagcaagatgtggctagctttgttgctaggagtatggtttgtcagtaggttattgttgagcaccaaagatctttaggtttgcttctacctatacctatactagagtagaaatgggataagatcactataaactttgtaactgggttaccattgacacgcccttaggacatgcgattgtctaggtgattattgatcacttgagtaagtctgctcattttattttgtttaaaaacttaataggctagttgactttatgtggacaacatagttttttgaggtaccttc

SEQ ID NO: 6554 - DNA, 642 bp, Cannabis sativa
atatttatatatatattaaagaataaatactatttaatattctctatgtgttttgtagaagctactgatcggactatctttctgtaaagataacgaattgggtcttgtatttttcaaaatataatattatacagtactctgaattgattttttgtaaaaatgaaacttaataatgattcgatatagaggtgttatgataaaatttggtacgttttcaaaatatgttcatgctaaaaattactttcaagttgattatataaaaaaatgttaaaaattgagctcaatgtcctatttcatttgtactattttagaaaatacaatatctgttttattatttaacaaaataaaaaatttaatcgataacttttaaaatacaagattcaaaataatattaatcctttattaaatgataaattcagacctcatattttacaaaatgtattgcattcaatttcagtcaaacaaaaatttcaatacagttaactttagagtcattgtttgacctagatctgaaactaccattgaaaaattaagcttagctactttattaattcattttataaaatatattaaattgtcatttaacaaaatacaagaatcaataacatattcatatgtcatctcagtttgggttattggtgg

SEQ ID NO: 6555 - DNA, 614 bp, Cannabis sativa
taaaagaaaaagattttgtaatttggttattttgtgtatctctttctttctctttccttaatctgcaaaaatcgtttatagccacagcacaacactattcagaattaagctcagacttagggcaaatccaatagaagctaccttctaattgtgttggtggacctcattttttattttttttttaattattatatttttaaactaaccaataagaatagaaaagaaaaaaaaaaaaaacagctctcaaatgtatatattagaaaagtcaatttttttttttttttacaatatctcatttttgtgacagccacctccactagcaactcctagagttgcacttagtaacatggcaacctaatttttaagatggttatcaatcaatattagtttcttattaaagttttaactagtgtagcaaaatgtggcatctggtaattttattttttatgttttatttacaaaaaaacaaaaaaatacgcttgtaaaattttaaaattataaaaatacattttgtttagcaaaaagtaagaaaagaactaaaaaaaataggaaaaatcaactttatgattgttataaatcaattataaaacaatgggtaaatataatttcggacc

SEQ ID NO: 6556 - DNA, 677 bp, Cannabis sativa
ctattgtgtagattgaattggatccactgctacaaaaataatttttcccgatgtttttaaacagtcgtttaaagtattttcgttgatttctataaccgtcgcttatacgaccgtaacgaaatgggtaaaataagcgacggttaaaaaccgtcagtgaattttctgacaattaaaaatcgtcgcctaacataatcgacggttatagtatttatttatgtaattatacaactatatatttcctatagctaataaaaaacaaaagagaacaaaaacaaaatggattgttatttatgaaacctttgaaaagagaagagtgagtagatgagttgttagttatggaattaggtgttgaatacttggaaagagagagttattattaaatgtagttaatgcccaagaagatgaaatgaatgaccaaatgtgatttgagcacaataagaaaaatgctgcatgtgtttttgtgtgcatcatcaactcatgctcatgcatttcttgcttctctatttttactaacatatcataacattgacttcattgtgttattagctcttcctttttgactttgaaactgtcaacattttcggccgacagactcaactcttattctttcttcatatatattaaagagaaatattgctaaaacttggtgcctagtacgatatggtgcactcttgagt

SEQ ID NO: 6557 - DNA, 1250 bp, Cannabis sativa
ttacatttcaccaacattccataaacagcaacaaataaaaactcttaattaaactcaatagatatgatcatcaataatgatggatatatataagtttcccattgaagacttatatgtagctaattccccaagaacacatgagtaagaaccgttttagtcaacagggaagccttcaacaatctcaaaccctgttcatatatatcaaaacaaacaacaacaacaacaataataaataataaataaaaccccaaagaaaaacaaagtacatacaacaataacaataacactttataataagagtttcaacacaaacctcattgataccaaccgaaacaatcttctcctgaagagcaccaatctccttaacattgaaagtgttaagtaaagcaatgcttgatatagaagacataggtttcacttcaagatcatccataatcatataagtaaccactcctttcacaatacctacatcatcattagccctagaagatgatgatgatgatgatcccacttcggtagaattagggggtggcacaaaagtcagaaccttattgagcaaacttccacaatcagggcaagtggcttttggatcatcagctacatacttgttaggacaagaatattttttggttgaacgatgagaaccaagtccgctagaataattattagattttttaccacaagagtagagctcatgagatgtgatatcatgattgtcattagtcaatgagagaaggtttgaagattgtcctagggcagaagactttggcttaagaagaatatccttatccacattagattggatgtaagtatcacttagattctctaagctttgatagagttttcctaaggtaccaaccatgccaatatcggtggacaagagccttatgatggtaccaactggcatggagagaagagagaagagaaaatcagtgaagtattttcctccttcagcaaataaaacccttttctcctttgtatcgattaacaacttgagtgtaataacattttgactattacttgtgtttgcaatggctgcttttcttgattttctctttctgtgacccaatctcaatttgtttacacttttatttttttttatgattctagatggcttcattttgtttactctctatgtgagtcagagttgagactaatatatagggctatcaaatttgtggtttattataattatttatttgaatattggagatatatggttcatttggatcgactaattaattattttt

SEQ ID NO: 6558 - DNA, 1026 bp, Cannabis sativa
acctaaccaatttcatgaatgaattgaaacccagaaacagcacttgatttgagtaatctggtgctaagacaccagcctcattttttctatttaaattagagtatgcatatgatacgtgtacacacatatgtaaagatgcattgctcttttctcaacaatgacatacaacaaatcaaagttgattaccttagcgtttgagagttggaaatataagaaacttgtacaccaaatacgatcatatatattccaaatgatatgcaaaccaataaaacagtatcattgtaatctataaattttgaaactttgaagagaggaagatacgattcaaagcagaaaaaacttacaattctaccatctatcacgtgtttctctacaacaactttctctgcaacagcagggtcggcaaaaacaataaaaccaaatccacgagcacggccggtagctcgatccttcataatcaccgcttcaactacgtctccaaaagcctggaaatactctctgagacggtcttcatttgtgtcccaagatataccaccaacaaagagcttgccaggttccatttccattctgctcaagaaaaacaacaacacacaatcaatataattataaatcaacaacaaagtaatatacaccggatctaatcggcagcacgtaagtagatgagaattacgtaaggaaacataatcaaaggtacccttttccgattctctaaggaatacagtatttgatatgttgccttagaagactagactgactaacacatggaaagttctggtaacgcggattaaacaacaatattgcaccttaaaagataattcaaacgaaactgggaatgatagtcttcttagttagatatgagaatgggtatcctaggattcaatctagaaacatcagaggcttcacaaaactattactgatcgacccacaatcaatcctaggattcctgtaaagaaagaacaaaacagaagaaaaaaataaaaaacaaaaattgatgcttggattaaaagaagatccagatccccagaa

SEQ ID NO: 6559 - DNA, 2043 bp, Cannabis sativa
tatagagagacttggaatatatttaaaaaaatagatatttgtggattcaatgtgaaaattattatggattaaattataaaaaatctttaaaaaatcgtaacataaaaatgtattgttcaagaatttatagttctttttttttcccttaattttttatttatttacaatccatttaattaaaaaaagtaatcaaaacaatataataaaaaacatatcggtgtgttataaagtaaatcaaagcaattttaaatagtgtttttatctatagaaaatttatggcaggtactactgtttttacctcatgccatagggaaaaaaaatgaaccaatcacaacaaataaattagtgcagttttctttcaaaacaaaaaaaaaaagtactcactaaatttcaaattgaaaaatcttgaaacaaagatatacataacaaatacatttcaaaagcgagcaattgatgaacagtttggtaatatgatgtaccaatatatcacatctaaatagaataagcaagtgtgtgaccatcataaatcatttaaagctatggaatcaaagctcaacacccaaaactttcaaaggattatacaacatagaacaatgtgttaaactgtagaatcataaatatgttcacaattaaccactatcaccacttaaaatcgttctaaatttaaaatcttgatacaaataattaataaaaagcaagcacctcatgctagcagagaaaaaagatttgaattcctactttgatacctcttatctacctgtaaataataaaacaaatggaagaggaagaaccttcaaagtttaagaacccttccagacatcaatacattgggaaggaagatccactatctcacattcactactttgtagtgcagactaatttgcaaggtgtgagagatgatgtcaggtgcagaatcttctgccacactgacatccaatggttcttggaggtagccgctaagactaaaaatcttagcgaggatgcaagggtaatgccacttgcaatcggactcatggagataagtcctctgtggttcgaccttcatcttaaggccatttacaccatgaatgacttcttagatagagcagatggctttatcaaactagaagaagccatcgcccgggccgagggcttaaatggtggcaagaggaagtcaccggactctccatacctcgacactgaggcacaaggcaatgggaagaaaggatgaactaatgtaggtaagagagccaacaatggtggtaagccaataaactcccccgatagagagaagtccaaaactgggggtaggcccttacgagattatgagccttgctttaccacctactccattctcttggccccaagagaggagatctacatggccacatagccaatagtgtcgtattgcaaacctcttcttttcaaagagtcagggaagagggatatgaacaaattctgtcactaccacaacaattacggtcatggcactaatgagtgtaatcagctgaaggacaaaatagaatttctgatcagacaaaaacgtgctgctctttagcagtatgttcgacctgaagctctagttgggggcaatatagctctccaatctatgctagttgccggcatgctagagattatgattggaggccctcacctagctggaaattcaaggaaggccttagaaaggtatgcaagatcaatatgacatgaactaagagccaaagtgctagaggtagatgaatgtcttccaaagtctcaatgctacgggtgtgatcatatcacatttggagaattggactcctatcatgttacctaccctcacaacgatcctctggttgttgaggtgcaaatagcaaatatgatggtggcaagagtgatgattgacaatggatcatcctccaacatcctgttccagcaagccctaatcagaatgggtttgaccttagatgacctagaaccatgtgaacaactaatgcatggtttcaatggaggtgacattgctccgtgtggcaagatcaaactaccactcactatcagcactaccttaaagtagaccaccatcat

SEQ ID NO: 6560 - DNA, 1072 bp, Cannabis sativa
ttgtctgtctgagaaaatattttcagctagaggaaagattgtattttcacttattttgggccacttatcaggacttggcacaaggtaaactgttttttcataacacctcttgaaagcctctattttgtactgatggtgcacataagtatgagatttatggttacaaaactaaattacagctaaggcatgtcaacatggaatgcttgtcaattggaatctcttatatgtgcatgttttttcctctaaatcaacagtaaaaccacctttaggattcatctgaaattagaatatagttgcatttgcccttgatatggcgcatcgtttagcaacctctgttagcttagtagtaattttaatgatatttttgtgtataatgcttttccattttgatatactctctttttatttttatttttgtaaaaatggcacataagccattacttaaaaaagtaacaaaccaaagttaaaacaagtatttttttcatcaatgagcagtgtagttaaagttaacataataagcagttacctgatggactccaatagagtaactattggtttttcccttgcatcaagaataacattgttgaagttttcacaaatattgttcagtaacatatcacatttcaccccctctttgaaatgtaattttgtccattatgatgggtgctttgctgccagccagttctatgccttcacattgaccttctttatgtcttccattctcctatcaaaatctgctacaatggtggatttggctgcattccacaatagttgcttcagcattagtctagggaactccttgaacttttcatgcatatatctcacacaaaacctactatcagggctgttgaaaatgtttttcgctacattttgaagccccttttgtctatcactcataaaagtgaatgagtttggctcaatggtactcaagtcatcccttaagaactctaaaaactaactctagctattggttgtctctttctcaatgatagcataggctattgtaaatatataatttgatgcatcaaccccaatagcatccaacaatactcctttgtaacaccccttcaaa

SEQ ID NO: 6561 - DNA, 1283 bp, Cannabis sativa
atatatatgagtatataataattgtgataataaaaattatataatgaatgtgttatattattaatcttaattatatataattagaagacttttattacatggttaattaaaattaaatacacattattgttatgtgtaaaaagtgaatagtgtaagtgatatctttatatatataataacttttatatatatgtatagctagtgtatatatatatatagatatattagttggtacacaaatctcttaataaattttatttataattaagttaataacgaagtagtagtacacattgaaaggtgctacattaacaaaacacacacactaattaaggatgatcataataatatataaaaattaataataaaagaaaaagacaaacttaaaaaggttggtctttttctctatatggatcactttattattaatactctctctttctttctacaccttcattcacttgatgctgcaaaaaaagaaaaaaaacaagataaagataaaataactaataaaaatattttttaaaaaatatatatttttgtcttaaataaaaaaagaaaaatgatttgggtatataataattatgacaataaatagactatttctaatcactaaagcacattttataagtttgtaatcttttttttttttcttccctttatttaataggtaatttttttcttcatatcaattagtgaccttgagaatatatatagtgtcaaaaatgaaatgtatattacttaagtttaattaattattcttttatattaatctaagcacttaaattaatatatgatacatagagttaagtagttaaaaccctcaataatgtgaacacataatattgcaacatcatatattgagaaaaacaaaaaccaaataaaataaaatgtattctacctgttgcagttggtggaggtgctgattttaaaaggaagggaaacgccacaagccgaagggaggccagaaacgagattaggtttaagtccgggaaaattgcctgcagcactaaccaagcacttgcacacagcttgacggtttgctgtgttcgaggcctgactatttaggcttcgaaccccattacagcatcccgtcgggacagcacccccagatctcaagtaggggatgcatggtgctaccgagctagccacttggccacatgttatggcctgggctagcggtgcaccaacaaccatgcacatgagtaccacacaagtggtgagcttcatagctaaggacattgccatttctctcaaagggccaaaagaaagaaagtactata

SEQ ID NO: 6562 - DNA, 1046 bp, Cannabis sativa
tatgaggagaatgggttttaccttttataaattaattatttgtgttgattaataagtttctctactttcacctttttagctagctaggatgtaaaattaaagtaaaatgtattcttgaatcatgtttggtaagggaacctaagctacaattagttagttcgagttagttatttctgttagcggtaggtttagttgattgtaacaactttctattacttttgttttctggacatagtatattgaactcgtttttcatcaatcaatgaaacaattctttctctctttctcttttctcttcgttctgcttctttctttgaacaataacatggtatcagagcaataatcgttcatcaatagagcattcttcagctgtcaacaatggtggttcgtcgatccctccaagttcgtctcaacaaattactttacctaaaactaatatcgtttctttctctcactctctctctctctctgttcgattggacgagttcaactaccttctatggaagcatcaagtcttggcagcaatcaaaggtagttgcctggaaaaatatcttgaaccgaatcaagctccatcgcaatttctcacagtggaagatcacattgctaacatagttagtcttgagtctgaagactgggaacattaggacaacattcttgtttcttggctcctttcgtctatgtccgagaaagtactcatcaagatggttggatctgattcagctgctcaaatttggaccaatcttcgtgaatattacatatccctcaattattgagccaatattgtacaatacaagactctacttagcaatacaaaaatgcaagcattcctaaatgactatctactcaaaataaagaatataatcgacactctagcatcgtttggtgaccctacttcagcttaggatcacattgaagctatcttcaatggtcttcttgctgattacaatgttttcatcacctctgttaacacaagaagtgaagcctacatgttgttgagattgaagtactgttaatggctcaagaagtttatctagataatgttgcca

SEQ ID NO: 6563 - DNA, 1398 bp, Cannabis sativa
agggcataaaacccaacagagggagggtctggccgtaagccaccttctttttgctgacgatatcatcctgtttggacaggccacacttcatgaagcaagccaattcatggacattttaaatgaatactgtaagtactctggacataccgtaaatgttgagaagtcctcggtcttcttctctaaaaaggttccagcacacactgcttaatcaatttctcacctactgtggatgaagcgaatgtccaaaaaggcaatgtatttgggcatacccctgttcaggtcccttaagcgcactgaggatacaaaattccttgtggaccgagtgttgtctagagtgcaaggttggaaatccaagctcctatcttatgcgggcaaggcgtgccttatcaagaatgttggttcctctttggctaactatgtagcatcctccgatgttataccatcttcaacggcaaaccaaatcgataaactcctaagggatttctggtggggtgattctccacatcaaagaaaactgcatccaattgcctgggagactctttgccgtcctaaagtcaatgggggactaggattaaaatcaagtgaagcaatcaataaggcattcctaatgaagtgggcttggaaaattttaacagacaaggaaagtctttggcgtcaactaatggatgccaaatatttaaagaattggaatttcttggatgtagagatcaaaacttcagattctattctttggaaagccatcctaaaggccagagccaatttgggaaaggggttgtgtcgcagaattggtgatgggaactcgacttccatctggttcgatccttgggtaccgggggggcacccttcaacccaaccccaggtttgatgcctctgctggaatgagtatggtgcgcaactttatttctcaaggcggctggaatgaaccactcatttgaatgtggttcctagaggaagatgctaagcgcattttaaatatctcgcttccaagtacacctcgggaggattcatggttgtggctcccagaatgcaacgacaacttcttagtcaaatcggcttacaaggcgatcaagaatgtggatgtcatggctgactgtcacaacaagtggagaatcatttggggttcaaaaatccatgagagacttaaaattctatggtggaaaattgtggccaattgtctcctcaccaaggataagctgaattccattttctctatcgcggacccaaagtgttcattatgccatagtgaagtcaaatcctcactccatttgctctggcactgcaattttgcgagggcagtgtggtttggctaccggtggcagataagaacgaattcatttacatagactgctgggaagcgtggctagactgggtttctatagattctaatcgtctcgttgg

SEQ ID NO: 6564 - DNA, 1539 bp, Cannabis sativa
  modified_base (1275)..(1284): a, c, t, g, unknown or other
attattattattattttttgttggaatgttatgtaaataggatcttataatttgatattttaattttggaacattatggtatcattgatagtgaaagttatataagttgagataccaatatttattgatatgacttttgaatttttgaaactcaatatcacaatctcatttcatttgtacaaaaacgtgttagtgaaaaaaaaaatgaaaaaattgacatttttgtcttaataactatctttcttttttctttttgagtacaaaattatatatatcattttaattattgtttttttttttaaaaaaataatacaagagttattggagtggttctgcttaagtttaaatgaaaaataatgtaaaacaagtgaattttgtatcaagtcatgctagatacatgttgaaatgatataaaaatgtttatagatatattttgaaataaaaaatggaaaataataataataaattggtatgagacgaaaaattgtatggaaaaaaacttgattcaacaaaattttttataccaaaaattattaattattttttttttcctttttttattctttatattttccttaccttattcttttctcaccaaaatttaatttccaaacattaaaaaaaaaaaaaactctaaaacaaattccaaaatatttttccttagtctaaacaaaaacaacaagcctaaatactcgaatttcataggacccctttttttttttggctaactataatttttgtccaccgaactctcatatgtacaaaattatgtccttcaaaatttttaaaccgttagaaaaatttctaaacctattgagaatattggatttaagagcttttgtttaattttactaacaaatgtctgatgtggatgaaagtttagagacatgatttagtatatattaaagtttggagatcttgatttggtacatggacaatctctatgttagtaaaactgaacggaattaaatagaaatctttgaatttaacaatctcaatagttcgaaggaaatttttaacgacctaaaaagtttagaaatataatttagtacatattaaagttcagatgacacaaatcctaattaaatattcatttgtacagaaagaataatatattacaatgatgcagtttggggatttaaacgttaaataccattttggaccttgtgttttgtaaaagttaccaattggaccatctgttttgttaaatgacaaaatagaccgtgtatttctcaagatgatacaaataggatcttgaactaattttttgtcaannnnnnnnnnaataataatccgatctaaatatgttatgacaaaattgtttacattttctgtatttcttcgtattatgaattgtctttaagttggttatattgaaaaaaaaaaggttatcaaaaattaagctcatggtcttatttttactattttaaaaaatatagggttcattttgttatttaacaaaataaagagtccaatctgtaatttttacaaaatacaatattatttaccctattaaaaaaagttgaggactttaactgc

SEQ ID NO: 6565 - DNA, 552 bp, Cannabis sativa
catgaaacttatttatccaagtgagtgtgctttgcatcactcacctgttcaaactcgggagtcgaagacaaagactcagaacctcacaagaccttgctctcttcaacatcgaacgaatggaacctcatacattagcttggtacacttgaacaaaaggccttttaacaccagaagcacaagcaaaacccttccctttaacctgaggatcaggctgaggtataacaatcttcaatatatcactatcagtagtcatgtggtccaaagcaagggaaggcaaggcatcaccaagggaatgagcaacaagcaacaacttgggattatcaaagtaagggtttccattaaaaacaatagaattagctgaattagagactaagtgggtaagaccttcatgagtgtaaggcctagatgaattcaagctgagaaatactaacattagaagcatttaggttaataggagtaggaatcataacgtcctaagactctaaggggcaaccaaaaaggaggctgaaaccatggtagaatttagaagaggagtaaaactaaagtactggt

SEQ ID NO: 6566 - DNA, 1323 bp, Cannabis sativa
gtaatttttttattttaaaattttgtatgagaaaaataaaaaatatgttttataattatttttattttttaattttatttaaattgtgtccaggttcggggccagttcgggatccaggtttgagatcagggtacgggtccaagtctgaagttcaagttttgctcttggtccaaattcgagtccaaggtcaatgttcgggtctgagtctgggtctaggtttggggtctagggttcaggttcgagtttgagttcggattcaagacccatgtttggggccaagtcttgatctggggttaggtcccgagatccatgttggaataagagtcaaaaatattaattaagaaaaaattaaaagtaatttttttattttaaaattttaattctcaattaaaaaattgaaaaaaaaatgaaaataattttttaaaatatgtttttgaaaagtatttttatttttttaattaaaagatgttaacaaacgcactctttaaaaattagagaattatctcatatactatttttatttttattttttaatttacggtttaggttgctctagtgatttttatatgagttgttatgtgaattttagttacaatttagattactccatgtgagttattatttagatttacgcaaaaaaatataaaaaatataatcaaacaaatttgagggagtactactaattactaaactacgactatctttcacttgaggctagcttaaatgaccataggtggttttgtgtgtgctggaggtcctaggttcgagtctcagataaaatatggttgtaatatataaacgattaaataaaagaagaaaaaaaaaaaaaaaaactaggactacctttctaattctccttagtccctactgcactgtgtgaagtgataaaatcaccagctttcatcacctgtgggtcttatctttgaatttaattggtttgataagcgtgtgagatttagtacacgtgtggtttactattggggtcttcattccaaagaaaatatatgacaaattcactcataaaaaaaaatagaattaacatatgacaaattaactaatctctatgactaatctctatcataagtatttcaattatttattttcatgaataaattataatgttattttttaatattgtataatgtaattataaagagcctcctaatatattagaattttcgaataaattttagacaagtaattgtttcaattatgttgtagcttatgttttttgaaatatttttagtttttttttttttttttgaaaatgaatcaatttattgaacaaccacactaggcttatctgccattaaaggggcagca

SEQ ID NO: 6567 - DNA, 949 bp, Cannabis sativa
gcaaaaattctataggtagtacacaacagaagaagcaagcactttagtaggccttacaacacccccatgaacaacacagttacgctcagaccatattgaccacattgtgaaaataatttgctccatttcagattctattaaaaatagtggagagctccaccaaataatccccttactcatataatatgattgattgtaatcgaacatcataccagtagaacgcgaaactaaatgcgcatacttacaactaaacatagcatgaccaattgattttcaagctcgattacacagagaacaacttgaatcaacgatgactcttgttgacttcacttttagctatcgatattgagtctttaaggtgattaaattgaatgataaattaccaataaaataataataataaagcaataagaacactaggaatttatagagattcaatcctatgataatagtaatagcctactcctctttttattgtattacttagaaaattattaagatcacaaggtccgactaggtgaattccttaaaaaaatttgagaaagcttacaattatttcagtagcataataactcttagaaagttcaaaaaaggatccccttcacagtggaatgactccactatttatagagaaaatacaagattaatgtctcgaaaaataggagaaaaatttaggaaactgaataaaaaagccccacgattccctcaatcaaatagatctcataaaaatagggattttaactaagttatagttgtggagatatttatggaaaatatctttagagatcttctaatactgcatccctctatacagagtatgagagtcggcttggcatgcttaagttgcttggagaagtgcaaggcatgaatcttgctcaacttggctttgaactatcctggacgaaaccctgagtgaatataccccgtccagctatgaacatacaaaaca

SEQ ID NO: 6568 - DNA, 898 bp, Cannabis sativa
tctcgctccaatgcccttttcattggaggcctatcaacataaactttccaaagatgcagtttcggaactggttcgtccagatcgtcattcatcctaatacacttaacaatgaagtttgctaaggcttgccctttgacgaaaactcgaggctaatattaaatatcaaattagttgagctccatagcctatttttgtaaccttccagatgactctaatttctgtaataccttacggagaaggtggtttgttaataccttaatgacatgggcttaaaagtagggtttcagcttccataaggcaattagcaagtaaaaggacaattttctatcataggatatctagactctacacccaacaatcattttcttatgtaatagaccggaagttggatcttcccttcttctcgcactaatgcggcacttacaacctgagctaacatgaccaagtacaagtataacgcgtttcccttaatcgacttggaaaaaattggggatttggtcaaatgttcctttagcttctggaaggcatcttcacattcttctatccattcaatttttttcgcttccgcttaggacattgaagaactggatacacttatcaatggatttgcaaataaacttactgagtgctgcaatccttcccatcaagctttggacgtctttgtgtttctttggggaaggcatgtctaggaatgccttgatttgctcttgattaactttgattcccaaagagctgatgatgaagcctgagaatttccctaaagaaacactaaaacactaaaggtgtacttctttggatggagcttcatcccgtacttccaaataatagcgaaggcttcctctaactcattgctatgctcttcgaaggtcttggacttgaccagcatgtcttccacgta

SEQ ID NO: 6569 - DNA, 976 bp, Cannabis sativa
gtggttggattgggatgtggtccaccaagaggttctggccgaccccttgttggccaagatccgtgcggatttggagcaagacaaggaagttcccgggttttcacttgcccatggacaacttcggtacaagggaagagtggtgctcgctgccaattcaactttcttaccccaatttttgagggagtatcatgagacacccattggtgggcattcccgagaatcacgcacccaccaacgactacgggctgatgtgttttggactggtatgaagcagcaagttgtcaattttgttcgtcattgtgaggtgtgtcaaagaaacaagactatggcgatgtctctggcaggcttgctcagaccattacccttgcccgcccaagtgtgggatgacattactatggatttcatcgaagggtttcctcgttctgaaggggtggacacaatacttgtggtggttgatcgtttgagcaagtatggccatttcattccacttcgccacccatttaccgccaaaactgtagctgaggccttccttgccaatgttgtcaagctccatggtattccatgttctattgtgtccgaccgagatcgtgttttccttagtcacttttaggctgaattgttcaagcagcagggcacacttttgaagcatagtacggcatatcatccacaaaccgatggccaaacagaggtcgttaaccgctgccttgagacttacttgcggtgttttgcttctgagaagcctcgtgtttgggccaagtggttgtcttgggcggaatactagtacaatactagctttcactcctctttgggatgtacacctttcaaggtgttgtatggtcacgaccctccttccttagtgcgtaatcaccctggtggttcggcagtcttggccgtggaccagttgttggaggatagggattctttccttgatgaccttaagatgcatcttctccgtgctcaacaccgcatgaagacc

SEQ ID NO: 6570 - DNA, 1024 bp, Cannabis sativa
ttatatgtatttactatttagtaatgaacgtgacaagttttaggttttagctcatgaagtgtgaaaagaggtttgccgccaattccgattacatgtgtgatgtgttaaagaaaaaaacaatggtagggaggtccatgatggcaatttgtcattttgttttttgtcgacaattaattgaattgtgggtttttttttcttcgttgggttaataaatgcacagtattaagtatatatagttctcagaaccgatgactggtgagtttggtaaggtaaaagaagggtgtaataaaggtatgagttaattgtggcataattccaaaattttcattttgtttctatttaaaaaccctcaaatcataataatgttagcaatttagctattctatccattattagttattaattatcatattgtactgacaccttaaacataaagtattctaatacaatgtataaataacacaatttaattgagccacaaaataaatattaaaaataaaataaaaaaatttaaattattatttttttttgaatgcaaaaattttaaattattaatttgaagtaaaaaataatttttttaaaaccctaatatcatgaaccatatctctctccatttctctttctaccaccatcaccatctttcccggtcttcctctcttcctcccatctccggccatcattcacaaaaattacactatctatcaaataatttttttgcaatttttactatgttttagattagatagatagtcattcacaacctcatacagcaacagatcgaccaacaatgatctctcatagcaaatcctctcaatgcacgtgggccttggcccatacatattggttcgggtatttattggaccacatctaatgtttttaggcctattcaaatctgatctaattatatattgaatgttaaatttaccatccgatccgatcgatccaattaattttagtcatttaatcgatccaacatccattaaatgttaaattgcatcgtttctatctattgaatgtatttcat

SEQ ID NO: 6571 - DNA, 628 bp, Cannabis sativa
agtgcagaataacgttaaattcacgaggcaagtccacaacacccagaaaagtggtgtgaaagaaattcatctttaaaatatcgaccccgagacattataaacaataatcctcttcagcaataaatttgtcttcaaagaatagaaaacctaaaagacctccattttcattgatcacacataaaagcatcactaatttgtggaggagccaatcagtcggtaacaagctataacattactgtctagaacagcacttccaattatcaggacaactggattcttagttaatcaatacgttcacatttcattcatatctgaagaagtatgcttcattcggacatgccacccagaaaacccaacataagttgtacaaaagcgataaacattttgtatcacttaaatatacaattgcactaatatcgttgcaacgtcatagcatcgataaagaatagacatttagagttgataaaattctagtttcatgattatataaaaatacaaattggaaactatacaagacagcagccatttgaaagtaagtatttcttctcattgtccaactatttactatgtatgttctcctgtccacaacaagttttattggtaactcaaacacaggaacgagacaagg

SEQ ID NO: 6572 - DNA, 683 bp, Cannabis sativa
tatatatataatatagagaaatactacatagtattattatattcccatacactaaattttctttgaaacggtttagcatatactcaaattattatagcacactcaaactaacacttatgaattaacaagagataatattgcaaaaaactttaatttaaacaagtggcactaatatagatgtgtcataaaacgtcatcataattactttcatattattatataagattataagtaatgtatatctctgctttttttgttaagaatatacctatcaatatacccttaagtaacacatattaaaaattcaacgcaacaataaccaagcctttcaagtttcatccatgttattataatttataatattttggatatatgtatagatagatatataaggcggctcacctcaaggaaataaaggtttttgcagccacaaaaaataaaaacaatagtgttgatggtaataatgttaataataattaaaaataatatgtcaaaattaataacaataattgggagtaatcttcaattgtgaataatcaattaattatgtatatatggtttcttgagagttatttgatgcgtgattactggcgttttggtatcttttttgggtcgttttaaggaaacaaaaatcaaagcaaagctatcgattttgcttgtactgaagatttgagatgttggct

SEQ ID NO: 6573 - DNA, 1480 bp, Cannabis sativa
caatgttaggtatggaatcttaattatgtaatactattaagaatagcatcttttgagttttatcatctcgtgatagagttaataagtattattatactcgtgcttaataccaatgctcttaaatttgtaatttaatttaaatataaagatgtaagattcgatattgatattatatcgtatagtatttctttttaactctttcctttcttgaaaatttttattttcatgattttttggaaaagttttaccaaaatatatttttttttccataaaattttttttgtgggaaaaaatcaaaataagattaaaaaatatggaagaaaaaaaaacaatttaagataaccaaataccttataatgttatttcatattttttaacttttatatttttatttttcttataaataatttttgaaaaataaaaactatattctttacaaaaattgtaaaaaaaattcataaaatatgtatttttttttttaattttctttattatttttttacgtaccaattcttagtgtaggtggtttgtaagacccacccacacatatctaaactcacttactcaattactcacttatcaatacttttttaaatttgtgtgcttaatttggttttgacataggtaggcaagatcacatgaaatatcttggaaattgtaactgttttttttaaaagataaaaataataattttattttttattatctaaaataggtcaggtacatctccattctattatcagctattttagcttaataataatgtcaaaaattactgatgaatcaattagatttataaactgttcttaagatggttgtcatccaaaactggagactagggtacacaaatacttattactcctatgacacgtttaataaattgagaataatcaatggaataaatgaactgatttaaaatataaaataatcagaaataatacttattatgttgtttactaaattgattggaaagaaaatagaattatttattttgtttacataataagcaaaggtaatcagttacaattttctccttaattatatataattaatataaagtaagttaaaatataaaaatgtattctttatgaaaatgaaaggagaacttttccgttaattttctccttaatttgtgtaggttccaatagtttctctcattctaaaatttagtaaacaaatgaatgccattttaagacccataataaatgctaccatggaaaggtcgggcctaggttacggcgggttagacccacgcctagggcccacctagcctaggggcaccaaaaaaaatttccattaaaattatacatatttttttagtaattttcaaaaatgttacatactttttaaataaagagtccaataattatttttctcctaaagtctatccaatctcaggaccagccttagcgtaaagccatccgaccatatacatcacacacttggtggttaaataatataggttaatatcatccagtcg

SEQ ID NO: 6574 - DNA, 533 bp, Cannabis sativa
tatattgagattaatattttgtaattattacaggctgatcatctgaggcaccaaacgttgcaccggctacaccaactcctgactacccgccaagctgcgaggtgtttgctagcgattgccgagtactttcatcgtcttcgagcgcttagctctctctggctgactcgttctcgacaagaatgagtagttatgatattgaaaaagaaaatgccaaaaccctaagccaattcaaagctttcatccatctctttttcttttattttgttctttcgttacataaatatatcattagttggcttatatatcgatcgctaatattatttagtatttaactttcttttgttttgttatattttcttttttctttttaatttcacacatatgatatcatgtatagtgctagacattaattataattaagtaacggttcaagaagtagactataatcactctttcagtatctctctctccctctcaattaaaattttaactctattccaagctttaaactataataaaattttggtaattaa

SEQ ID NO: 6575 - DNA, 517 bp, Cannabis sativa
ccatgcaaaaatgcattgttgacatcaagctgatgcaaaaaccagccatgaatagcagccaaggctaagattaatttgacagaaacgagcttagtaacaggagcaaaagtgtcagaataatcaaccccttcaagttggctgaacccttttgccacaagcctagctttgaacctctctattgagccatctgcattatatttaattttgtacacccacttgcaaccaatagcatgtttgtcagcaggcaaagtgactacaatccaagtatgattcctttccaatgcatcaatctcaatgtccatggctcgatcccattcaggaatgcctttggcttgactgaaacaaacgggttcttgatggctggaaatggctaaaacaaaagctcgaaactgtggagataacttggtgtagttgataacctgtgacaaggaatgagctgtaataggcatgttatcctaagaagaaacagacaaatggttagatgcaagatagcaatggtaatctgtgagatatgatg

SEQ ID NO: 6576 - DNA, 2859 bp, Cannabis sativa
tatatatatatccaaatctttattcattggcatatatagtcatttttattttcaatcaaacttttagataatttatatatataattgcatatatggatcttttgtaatcttgtcacagcagaatcaagtgcataacaaatcccacaatcgatttcaaagttgaactaatgtataagatcatattattatttatatggatggccgtactttcttaattaaaatcattaaaaattatcttaaaagaaaaacacatcaaaattaaatcatatagtattattaaggatgatagcttcattcaattttcaaaccacgggtgccatgatttttgtatttttgataatgttgttgtggactagagatttatttatatatatatgaagaatgtgatgatatgcaaagttgaatatcattatttgttgtatttttaactcaattttatttaggaaaccatacatcttaaaatagttaaaataacaaaagtaataaagtgatgtaatcagtagataattttcttctatatataaaagtttattgtctatcttaaaagcatgcagagataaccgtggagaactagacaataaaatcttaatatcaaaaaagataatctcataattgagagttgtgacttctgacacactaatagaacacctacaaaataaagaaaaaataataattaataaataaaaaatacttaataaaatatgaaattttatataagtagtgtgacataaaattctctcatgtaaagactaagacttatatgttcttgtctccattgctgaaggtggctacagtcaagaccgatcttgagtattggtaggccttaagaaaataaaaattattgaggtctttatttaaaatacatgtagtatttttaaatatatatatatatatattcaaaggtaaaataatttttttggcccttgggctaggtgagctctaggcgcgggcctagttcaccttagctcagatccaaccctagctacatcacatctgaagtgttattattaaatcaaactgatcttacaaaattaaaattaacttattttttttagcaataaacttttattgaaaataatctgaggataatataaagagaaaagataaaaaattatctatccaaattaattcatcatccatcctgagtacatgaactgttaattcatgtaaaacatgaatcagagatgcctcaaaaaaattgaatagcaaactagcaataaaatctaagaaacatcctacttcaaaaccaaaaagaaagatctcttagagtatacagtaataaaaaataatcaaccaaactcaaaagatttaataaatactaggcatattagtacgagttccagtctccttaataaaaaataaaatgaaaaataacacaacatagagtctccattgttaaaatgaataattattattaaacattgaaggtgtttttatgcttttcaaattttattttctttattaattatatttaccattttaataatatttttttatataattttataaagcagagttttatttgtatatgtggtatagttccttcaaataaaaaaatcttcataagactgtcccagtaatagaaaattagttgtctctcgaaattatatgttcctggatagctagcttgtccatccggaaggagtcttgtgcaatgctagctaccatctggaaggacgttctcagatgactatcatgaccactccgagtatagtcttcaagaaagttagcctccctccggaaagaaattctgaatggctagctattcctcctggaagggtgttccggatactcgattccaactgactctttttctatgcagccctttagcattcgcttatgtccattgtctagaaagtgtgtatcatccggaagcaccttgtcttgtgctgacatggagattctgttacaaatattttgttaagtttgttaagtcgcaacttataacttaacaacttaatggatgcaaccacactatcttaaaatttttatcatgagcccataaataccacccacacttatcagttcaaggcgtgattgatcagacgagtttcaagaggtgatttcaaagagagagaataagaggtagagagagagatgtacatagaaaagagagattgggtttgagttttgtatgaagaatattttgtagatgaagaagattattgggtaagagagtgagagaaaacactttgaaagaactcaacagataatcgatctcgactgtattgtaccatgttgttgctcaatcaataaagagatttgttggtggtgttccaaaactgagtagagtcatagatcacatttaatctatcagacttgaaccagtatatatcttggtgttaatattgttatttattgctttcatctgattttaatactctgttcatcccttttctttgattactattttttatttgctattcttgtcagtcattgctaactatttgacgattaacttttaattgatttaattctgtatattagtcctaattttttcacaatatctcaaaaattataaacgcacatcctaatattacaaaagatataaacttaattttaaaaatatatttaaatataattaatataatatcaagtacttttttacaattttttttcttcaaataaaaaaagaatcatattatttgacattatttttttcttaatttcaatattatttaaagaaaatcatatttttttaatcacttataatttcttttcaatttttttctaataacttttatacaatttttttatttttgtttttctattttaatatttaaatatattttattttaattttatgtatacctactttaagaatatgacaaggtagaagtctttttttttttttttttt

SEQ ID NO: 6577 - DNA, 829 bp, Cannabis sativa
attatcgttccttctttcctactgctttttctagggacttctgtggtttcatgtttatgtttttgatttcttgctcaagttctcgtggtgtttgggattatgatactttgagtttgtgaatctcattgcttttgtccatttgatgttgaaggtgtgggcccttgcggacaccaagcggcaagggtttctaggtcttactgagttcattactgcaatgcaggtatgtgcattcgcttttatttgtattttcgtttatttttgtgcacattttctcatcttactttgtgaataattttcttcttttcagcttgtttcattagcacaagcaggtcatgaattaactccagaaattcttaaaagttcaggtaagtacaatctagattgattgatgaatatgaacgcaattttgtcctacaatacgaacttttttcaaattgaccttttgtagcattgtaagagattataatatgttgatccattatctgcatgtgatgagcatgaatgttaacaaacatgtaaatgttaaatcttattaaagcgaagttttatattatgtataatggaaaatgagagtttagagaaggttgtcaacctttaattgggctgatgttactaaatccgtatcaagcatgaactttttctgtaccttattgcctcgaatgtcacaaggaacaaaccttgtagtataagtatatattttcctatttatgtaatcgaaaattttatataatcctatattgtgttctttgagatttatagtcaagctcaagacattgggtctttctaagagtttgacattcttgcctttcaaaaggtcgatgggagagtg

SEQ ID NO: 6578 - DNA, 2665 bp, Cannabis sativa
acagtaaattttccagacatttcataatgctaaatcaaccgatctacatctggaataatcgacaagggaatatctaagatcttctcaacatcaatatctaggaaaaattccttaagagtaggaatatgccaatgcttgtcgttggtaatcaaactatgaactttgagattcaagtcagtccctttgaaaaatagaggcttgaaaatagtgtgatttggtagccatgggttagaggcacaattgatttgaaatccatttctcactttccatcaaaggccttgttgaagtagctctttgccccatactattcctctccaagtgacagaaggataagatccaagtcgagcttctaaaaaagatccattcttaaagtaacgatgcttgagcaaacgacttaggagtgaagaaggattatcaaagattcgccatgcttgttttgctagaagcgcttggttataatgaacaaaatttttaaaacccataccaccttcaccctttgatttacatagagcattccatgttttccaatgaattccaaatccagatgcattcaaaccccaccaaaatttgttcatcatcttctcaatctgatcaatgagttttttagagagtcgaaaacaactcattgcatatgtaggaatggattgagcaactgctttgagaagcacttctttcccaccaacagaaaataatttttcttgccatgatgagagaagcttccataacttatctttgatttcaccaaacaaaatacttttatcatatcctgaatatgaaggtaatcctaaatatctttcgtgacaaggctgagaagacatattcagtagttgttgaaaaaaatccttagccgattacattgtattaggtgagaatgacagcactgatttgtccgtgtttaattgctgacctgaagcattacagtaggttgttattgaatgttgaatagctcttgctgagtccctagtggcacgacatagaatgaggctatcgtccgcaaaaaataagtgtgaaactgatggaccacttcgtgataatttcaagccttgtaaagcaccattgtgctcttccttttgtagtaatcttgatagaccttatgcacaaataaggaagagataaggagataatggatatccttgtctaagacctcgttgtggaacaatagtaccatggaccccaccatttagttgaaacgagtatgagacagttgagatgcatcgtataatcagatttaccagcgaaggagaaaatcccatagtgagcatcataccgtgaatgaaatgccattcgactctatcaaaagctttactcatatcaagcttaatagcggcatatttttgccttcctctcttcagatgcttgagcgaatgaattagttcaaaagcaacaagaatgttgtctgtgatcaaccgagatggtaaaaaagcactttgagccttagatattactgagttaaggtgaggcttcatccttagaacaatggtcttggacactaatttttacaacacattgcacaaatttataggtcgaagatggaacattgtttgaggctttttaattttcaggattagtgtgataagagtagagttgaaagagctcggatcaccaccatcattgagcactttcagaactgttttagccacattctcacccacaatatgccaataattggttaaaacatcacggacatgccatcaagacccggactaccatcttcactcatggacttcagaggtaaaaacacttcctcagcagtatacggctgtgttaaatccatattcatttcagctgaaacaaggcaaggtacaacagaaaaaacctcttgtgttgctgcaatgttaaccccctcagtagaataaatattgcagaaatgattctgaattacactagcaatgccagtcactgaagtgtgttcgaaaccacttggatcagtgagttttgtaatcttgttagtcgccttcctactacttgctttttgatgaaaatatttagtgttggaattacctgacttaagccaagaaatacgagaccgttggtgccaatattcctcttcttgcgccaaaagttcgtctaaaatattctcacttatctgaagaccagcaaagtgttcctggtctaagttgtatgaattttgaatagcctcaactttttcatgagaaagtttaatcttctttgagagatcaccgaacttattccgatgccaacattgtaaatgagaggcacaaatagaaatattatgtaaagtatcagcagtgggatcactagcaactgaattcttccaatatttgacaataacgtgtagacaatcttcctcttttaaccacaatttttcaaatctgaagcgagatttaaagtgttttatacggtgctggtcttcgtgagtaatctaagccattaaaactctgtggtctgaagcaaagaagtccaagtgagtaaggatatgagtagagcaaagctcgacccattttggattaatgaaaccatagtccaaacgttccttcacattagagcctcttaagttgttattgtgccaagtgaatctttctcctttaaactccaattcagtcgagcaaaaatgatcaatagtgtctcaaaaagcatcaatttgagtttcattccgaatagcacctccaagtttgtcattgtgagagataatttcattgaaatc

SEQ ID NO: 6579 - DNA, 577 bp, Cannabis sativa
aatgtggtaacctcaaccctttagggtatgttctataaacttatcctattggtttttctttttaatcataaaaaagatgaaatattactattaaactataaattcaaagctatgaacaaggtgaaatataagtaaaaaaatataaaaagcactacaagacaaaatatatttttaaaaaataaaaatataaagtagaacttaaaaataaaaaccataaaagggattaaaaatcattactacaaaaccactactctcgtgggtccacaaaacatttttcttcggggaccgtggctaataaaattaaatgagtgttttaaattgtcaggaaaaagtgggtactcactactaaaaaaggcttaatttgcgtaggtcaccgcgtctcaccaaaatggactactaaaaaactctaaatttttgttagttttacattgtcgggtaaggaattctcgacaatccataaaatcgtcgtctatacaaacgtcgcgaacactgggtagaatagaccacaattgaaaacagttgggaaaatagtatgcttatagtgagcactataggcgacaatttaaaactttggcct

SEQ ID NO: 6580 - DNA, 892 bp, Cannabis sativa
tcgcaccataggctggtgtaagagaagcgagcttactcagtgagttctagctcacaaactcgactacacaatgaggagatgaatgagctaagaataagcaatttgtagttggaagaaatagtcgcgaacatgcaaatggcattagaggagctccagagagaccgttctgaggcacccttgatcgggcaaagaggactagaaatgggaaaaaggggagcgagtagactggaggatggggagtatcaaggtattcaacaaataacacccctgaatcctccccgcaaagagatttaactagaaaaaatccacaaccctcaacacaacccaaaaagactgagtccaaggcaatccagggagacttgagaaaaaagctccatcaaaagaccacgatcgagaaatgcacgctaacagtggactcactttgaaataaaatgaaagcaaagcctgtcaccatggacctacgggagaagctaactaaaaggaggaaaaagttagatacggagatggaagaccttcgatgaaggatagctttggccgcatccgaggattgtaactaggatgaggaagatttcgacaaggaatccccattctcaagggagattcaagcggagactttgcctatgagctttaattaaagaacccaacatgttaccatatgagggaataacaaacccaaaattctacctggacgcctttaacaagataatgaagatgaagagggtcacaaggaaagcaagatgacagtgctttgcagtgacgtttaggggtgcaacatacaagtggttcaagaggttggcgcctgggtccatcacatcttggaaatagttcactgatgaattccttgcccaacaccatgcgtccagggacaatactatcccaagaaccagcttgg

SEQ ID NO: 6581 - DNA, 598 bp, Cannabis sativa
tcaaactttttttgtggaaaattgcccgtgagtgtttgatgttcggctcaagattacaaggcatctttggtagtgtggtggggaaatgctatctgtgcaatgtggatggtggtgattcggcgaaccactttttctctctttgctctgttactagagccatttggctttctagtaagtggaacttgagatttgatagaatccctctcgcttcgggtgtggaggttgttaattggattttaaatcctcatctgcttgtcgataatttcccgtctcaagactgtttggaattttccatgtttgctgctgttttgtatcacaatctttggtttttccgcaacgactcttttcacaatcagacccggtggagagtggaggagatgaagaagaagattgatggtgatttctctggtttttggttggctcgttcctcccctgctactgggattcctttgggttctccggtggttccgagatggatgttacctagacctggaagaatcagagccaatgtagactttgctaacaagaacggtgtgggggcagtgggagtggtgattcgtgacgaggggggttcgattctggctctggctgcggagaa

SEQ ID NO: 6582 - DNA, 654 bp, Cannabis sativa
ttagttctgccttgtaattcttgcttgtaaataaatgaagaggttcacaattgtgaactaagcttttcagtaatatctttcctctgttttctctctgagtttctcttcttcttctttctggttttgaccatttacaaagtgagctagttaagcttgtacagcctgtgatgcacatgcatctaacaatttcaactcatcaaggaaagttaaacttaaatccttctttgattatatgatttactatctctattcgaattaaaaactatgaattacttcaaaatcattatgtaatctcttgaaatgaaataaaactaagcatgaaacatgtctagcaaaacataaaagacattctattgcggactttgcatgcctttattttcccttgtattaatatctctttattacaacatgtaaaattactcgaatcaatctccattatgattgagctaattataacaagaaaattttgtcacaagtatggagcctgataaggattattgggccatcaaagcgggttttgattcccacttgttcttgatggcattccaaaacgcgggtatggcaacttcatcgggaacttctttgaatgatggtaagtaattcacatccacaatcacatgatcaccactgccttcatcaatctgatatttcaac

SEQ ID NO: 6583 - DNA, 1041 bp, Cannabis sativa
gagtttaacggatctgttagaaaatggaccaacggacttatagaaattacgaccttgaggactattaccgccaatttttggggagttttgccgcaattatcccaaattaaatttaactttacattattattatttaatattttttaataaattattaggtgaacattaaataatatattaaatttataattatgtattgaagtataataataaaagttcaaaactactttttataccacacatagctcaacttttacattttcggatagaaatctaataatatttatcaaattatctttagttttatggcttttgtgggtccgcctatacatgtaggaaattcaacacccatataaaatttgtaaaacgtatattatgtgaaaaaaaagttgactctttgtcgatcacgacgagtacattcgattgactagcacataatttgtactcataaatctaacttggtttaacatgaatgacagatacaaacctcgcttgtaacgacttttatatatggaatgattttttcaaacaaacataataataatgatacaccaaattttatttgacgagttaaatgacaaaatataccaccgcttaagctgaacaagttcataagtaagtttgataatggcccaaaataatggcattgtcttaaaaaatcaaaatagaaataagtggccagtggacaatcttaattagtagtagaaaatatgtaacaacacatcaatatcaaacctagctagcaccaagaatatcacttggtgacgataataaaatttcacatatttcgccgccaaagaaattagcatcggatgagcaagaatgtcatatgattggatgagaatattgtgatatgaaatctcatatcttaaagtctaaaacacccatttaaaaaaagaaagaaaagtaaaacaaacaaaaagtctaaaacaaagtccacccaaatttattgtgaagttagcagaaaacataagtctttattgaggggaaatacttatcattatgggttggttcagtattccatattgtattatattatat

SEQ ID NO: 6584 - DNA, 658 bp, Cannabis sativa
agatgaaaatcattaggtgtttttgattaatcattcatttttagaaatttgtattattattacaaaggagacccttatacatttttagaaattttttaataatttagaaaattaaaatcaagatttaaattaatagctttttataataattatgcttgttttgatatttataaaaacgtacaaattaattgaatcctgacactataaatttttttacttttagttataataaaatttgtgactaaagatataaaagttgtaattatttataaattatcattattgtgttatgactaaaaagtctgtgcctaaaaatattagtcataaaaattacgatttgtcaatgacattttacaattaaatattatattttagttataagtaactttttgttgtgaccaaaaattacaataaatatatattttcactaaaaagacgtcactaaaataacaatttttttttaagtattacttcggcatgctaagttatatgtgaaatttcttaaaaatttgtgttggtcccttaaattataaaagttaaatatgtacataaaaagatattattatagcaaagttggttgtccacactagtatacaatagacttataatttacaaaaggttaaaaattgataactttattaaccttagcagaatcaaa

SEQ ID NO: 6585 - DNA, 710 bp, Cannabis sativa
atttttttattttcatctaataattttataaatataatgtaaaataaatattttattaaaatataatataacaaaacctaataaaatcaagtaagatatgatctatctatctatttatcgtgatgtggcactttaattgcttaaaagtcttttttttttttttccttaattctctcattttctaattttttatttgacttataagtattaaatgattaattaattaatttaaataaaatcagttcaaatatttttatttactctttttttaattctctcacttttttattttttattaattatttaaacttatatatatccgtatcccaaataaaagaaaatatctcaatttagtcggcataatcctccattagtaatagtctgttatttaaaataaatacaataaaattcctcaatcttaactctaataataaaacccccatatacatgaatatactattttattattatgtcatctgctcaacatattctcattccaagtggcttaaattaaagaacttatccaattagacatttactatacgaaggaacaagtcattattatagaatgaatataaataagttacatttatataacaggtatgattcatttacttctgccaattttcttttttagggtaatagtttttttttaattatcattactgccgttgtaaaaaaaaaaaacatgttatatatgataaatttat

SEQ ID NO: 6586 - DNA, 569 bp, Cannabis sativa
aacagctattgcccactttagctatacaaactgatcaaacttgaaatgattgcttttggtcccaatgccttaatataatataatatttgtattttttcatatactctttccttttcttttaagtgaaaaaccaaatatattagctagctaagacaagagattgcaaagtaggtttggtgctcttgctagggtgttagttggtttaagtgctggagaaggaagctgaggagtattggaatgatggagacaaaggaatatttttgcttattaaccaaatgcactatgatgagattaattagcagttgatcattgagtctgaaaagttatgagtggaatgacctaacagcacttcctttattatttgtgggtcaccatccactgttaatggctggactaggcaaggcataaattgaagctgggttgagacttatatgggccacatgaatattttggataaggcccactaatcttttctacaaaagataccagatagttggtcaaccgaaggaattatggatcatatcattcatataagatgccatcttagtgttccatacatatgtatatat

SEQ ID NO: 6587 - DNA, 645 bp, Cannabis sativa
aggtttgttccaatcttgacatccttagttgagtctgtcgtgttgagggaatttccacgcgttcctcggtcggaccaactcttgagtcaatttcctaaaatagggggccaatgtcatccttgggtgcaccttcaagtggctttgggttccatctctgtcttctccttggtttcaaccccagagatcttcgttgcctctttggcttttgtaggagaggccttgcttgtccccctggtgtcgaagtagtagaggaggtcctcttaccaaggggtaacgaagcattataacactcatgggcagtcccttgactgccaagaagacaaccaataccagctgtcgttgggaatttgatagacaactggtattttgacgagctagcttgaaggtcgtacaaagcttgcctttcaagcatcatgttgtgcggagacttcacgtccactactatgaacgtggccatgatgatggtcttccttggggcagtgcccactatgattggaagtttgatcttaccacatggagctatgcttgctccactgaaaccatacattagttgctagcatggcctccaaagtgtagataggatcaaactacaaccttgacatggcctccaaaattatggccgcccatggattcaagaggcttgcc

SEQ ID NO: 6588 - DNA, 1887 bp, Cannabis sativa
  modified_base (309)..(316): a, c, t, g, unknown or other
  modified_base (554)..(554): a, c, t, g, unknown or other
ttaagatatattattaatagattaaattatctctcaactgtatagaaaaggaataataaaagccaataattaaaatatatacaacacattcttaattagtttaatactcacctaaaaatttattatatatttgaggaatcggcctacaactaggggaacccaaagagagtttttttatctagttttttattataattatatttagcataaatattttaattaatatatatatatatagttttttttttttttgatataactaatcaaatgatactacaaaaaattatacttttagtcacaataaaattnnnnnnnnaaagtaaaaaagttgtgactaattgtaaattattatttttatgttgtgactaaaagatctgtggcttaaggtattagtcacaaaaattacaatttattgtaaatgtgtttttagtcctaataattttttagtcacaataaaattaaattaataacaacttgtgtttaaatgttatgttttagtcacaaataatattttgttgtgactgaaagtcgcatttagtcacaaaaaaattatnttgtgactaaaaaattatcattaaaggtaacatttttttgtagtgtgagttagcggcactcaaattcatcttctttgaaacactacatggcattttaagaataagctaatattaggaaaacaagtcacttcttctatttataatatatctaattataacaaagtaggaacacatgcaattaatgtattgagtgacattaaaccaaataacagataaagaaattactatcataagtacaaaccaaatagcaaaaacaattttttctttttttcataactgaaaatttcattaaccagaactaaagaacaaaaaggccaaacaaagataagtcatggaagcaaaaaagggtgcaacctccctaacagacagaaagcaaaaactattcctatggctggattttttttaataagatctaatatatatgcaaagaaaaaaaagcaactacacatatacatcgtaacaccctcctagaaaacccgtagagtatagagaaaccatgtgattaattaattatcttgaaagctataatgaattaaccaaaaagtaacttaatgagaaatgttaaaaggcatcaggggtgtctactcttacatgtcaattcaaataaatttatttaatattgggactatatactaataattgaaaatcattacaatttactttctatacttaattatttagttcaatatatctatccatccattaatgaacatgcatactatgtaataaaatatatgaatcatttttgtgaaaggaatggcatagaagtagagttagatgtaaatatattccccatgcatgatatctaagatcttattataatatccttgctagacatgatacatcaaaccatgaaatataagaactcaataaatattaatataagtggtcataaacatatatagcctagtaattttacactttttttcacacagaaaaattctcaagttcgaatctccctacccaaagttgaaaaaaaagataaacgctactatgtacatcctctcatcaagaactaaatatttgattattatactactgtgattaactaacgctagactttaccagctaaaattctacatatatgtaaaatcaatgtagaagttaattgttaatacttaaaaatatgaacctgaaaagttctgccaattttgtaataagaacaaaagatttttcaaaagtcgatatcatacatttcagcaaagaaaaaataaatcgatatcatatggtcaataaaggctcaaagatgaagagtacaaacgtcattaatccgtatacttgtttctcagtatgagaaatgataatctttctattacgtctcttagaactttat

SEQ ID NO: 6589 - DNA, 527 bp, Cannabis sativa
gaaaatcaaggacctactgtggacgttttaattttaaacattataaaaagagtgttgttattgagtactaatgtcttgatacattttataagtgacgttttataattggttaataatattttttaaaaattaatttttaaattatacgagactcgatacttaaatactaataggaatatgataccgaagggagtactattagacataatcggtaccttttagcgtttggttggaaggaatgaaacgtagtaaaaagaatgagaatggaataaaataaattttaaaatgtataaaaaaatttataaaaaattgttaaaattgtttctcatgcatactacctaaaaacctaagagtaacaaatactctaaaataattaaagtgagaatttattcaaaaataacatctcctactaacagatcttagatacaattaaaactccttgaccactaaatcatattatttttggcaattaacacaagtttggccatgccttttaacatttgtcttatgaaaaggacgtggaatta

SEQ ID NO: 6590 - DNA, 607 bp, Cannabis sativa
tatttttataagaggcctttggacatctgcctacaattcagttttgaggtttgtttggtgtttaaatatttattttttagtatgatgtggtttgtagcataatttaaaagctgagccagtggttgagaatgggacttcttatcctgagacgaagacaattgccactgaaaatgggaattcagctgaaactcaggacaaggatgttgtttcagaaggtcttggttcagttgctgtctatgatcagtggatctcacctcctatttctggtcaaagaccaaaagcccgttatgaggtattggcatttactgtcttcacatttaaccattttaatccttgtgtactttttgtatgaatggttttatttttcagcacggagcagcagttgtacaagacaagatgtacatatatggtggaaaccacaatggtcgttatcttaatgatctacatgtaagtaagatacagttcctgcatgcattaacacgttctaatttttatggtcttaaatattggtgagttttgtgtgtatattgtaggctaagtgtgtagctgacaaggtctctgtttatttttggagcaacttctgaaacactctctgtcttattctata

SEQ ID NO: 6591 - DNA, 576 bp, Cannabis sativa
attctgaaccaccatatcagacataaagccaggctgaaggttgtgtaactgaacccagatgtccagccgattcagcttcatggtgaaaggatcatcaccttttttcactcgttcaaacaccaattggaacttgttaaaagtccatggactaccctctatcaccctctgtatatcattctcatgataaaactgaaacaagtacaaattagtctgtagttctttcacaaacataccttttccaggttgccaaagagaagccattgtatgctgcattgacaaaaaatcaatgaccctatttgttaaaaactttccaaccaagcaccacctttcatcaatcggttgcccaacatcagcagcaatgtcacacaacagagttccttcctcttcctcctctaactggatctttgaataatgaccctcaagatcattagccatagaactgcttgaagccataggacaaaataatcaaacacaaacaaccaacagagcaagactttcgaacaacgacaaacatacacttttaccactcactcatgtcataagacaagactttttaataaacatattaataaagac

SEQ ID NO: 6592 - DNA, 1309 bp, Cannabis sativa
tattttttcaactttaatttaattattttattagatattatactattttaaatgttaatgtgtttttataaattagtaattttgttctcaaaattttgacaactatagccttttaaataaaattgagaaagagtactgaatattttcttttggtaaatttttaaaaaaatatatattttaaatgttaaaaaaaattaaaaaataaataaaatctaaaaattaattactttttattataaaatttaatgtatattaaaaattcaatttgtgtctttacaaaaattagatttgtctaattaaagatgtattttggagaaattattttatatattattttttattatttttttttaatttacggtttgggttgttttggtggttgtttcagcggtttttatgtgaattttggttgctatttaacttgttccattgattgttatttaagttgttctgttgtttgctatgtgaatttttatgtgatttttcgtaaaaaaattactttgaagtgtaaaaaaaaagttttatattttttttggtataattttattttaaaataaatttgtaattttattgaatttttatttttttttatgatgagtttgtaaatataattatagtttgtttaaattatttattgaattttaaataattttttaaaatatttgtttatatatatattttggaattactttttatgagaataatttaggttttgttaaataatttttttaagttgttttttattaattttatactttttaagatttatactttttaagatttttttttttaagattttttttttaatttttaaattattttttttgttggtaaaaaagggaaaattttcgtattgataaaaatttagaaggtaaacatattaatctttattagtagaagaaattgaacttaaaagaagaagtatgaatatgtaattgttatattttaaaggaaaatttaatttattttaagagacatgactgtcaaatgttcatgagagtaaaaatattaattaattttatatattgctgcactttttttttttgtcttcataaacatggattagagaaatatttttttatgagaataatttaggttttgttaagtacacttatttttttgtatgttattttcttattaatttatacttttttgagttattttttttaatttttaaaattatttttttttgttcaaaaaattatttttgtttgttggtaaaaaaagaggaaattttggtatcagtaaaaatttagaaagtaaaaatattaaagaaattatgtaactgttatatatatatactaggtga

SEQ ID NO: 6593 - DNA, 1184 bp, Cannabis sativa
gagatgcatattaatgtgtttttaatatgttaaatgtttaatttaattaattctcagattgtatttcaacaacattttcgttttataattaaaatattcatgtgggtttgaagtagatagttcttatttattgatcatgctcatggcaaacttttctaaattgtttaatccagctgagctcgctactatagtgttgatttctaatcctgttaccggtttgtcggcgcaaggagtagtaagttgaagcacattgtataaatatttattttgcctaatttgattaatgatcataattttcaatcattaacctcacaactttaccttcttcttctattttgtgcatctcattctcactactggcactaccaactcactgttttatcgtcctcctccataggaggcaactttatcgatttcggcaccaataactttatcggaaaagatgtgcacgagtcgatcaccttgcctatggccgagatttcgacacacgacgcccaccgaccgattgtcaaacggaagaatcctagttgattatcttggtgagttgatagtttcttgattattttctatttagttagtgagaaaaatggtaaaaaaaaatgttaatttttatcttcgttgatattttttagtcgagttgcattttcctctgttctttatatctttgttgttctaggctcggtttctttatctctgaaaatgaagttacattcagaagattagtgtgattttcttaaagggaaacactttcttcaatcaaactttcattatatataagtttggaattttaattcttcacacagatgtataaaatgttttctttgatgtggtcgagaatgtacacagaagatgacagatgtataatctcttgcttgttttataataagagattttatctctcccaatcaccaattctctttgctttacgctatttagagaatgatgcatttttcttctttttttttactatttctttttctcttcaataatatatgtcctttataaactcaatgttgcagaaagatggttctctgaagcttctcataaccagacaggataaaatatatatcatatataattgtatatgtcataaaagattgttctgataagcttagaagtagttatgaaggaataccatcaaatttgttgttagagaataatgactccaatctgtttgatgaaat

SEQ ID NO: 6594 - DNA, 964 bp, Cannabis sativa
atccttgagccacaacaattaccatgacttaagctggtagagcagggagtgtcataagttaccttcccgacacttgagggtgacctacccctacgaatgattgatggtagtatgttatctaggaatacgtagctatccgtgaataaccccttaattgggatatatgattggaattttgacccattgtcccagatggcctactctgactagcatctcaatttcatccttcaagtgcttacagtcattggtggatgtttttgtggaggctttctataatggaccatattggatgttgctttatgcatattttctcgagtatccaccagactggagtactcggtagaccttggttcatactctttcttggcttctttggaactttgaatctgtcccggacactttcctcctctcttgttctgagactagctcacattgttctctagaacttttacttttgaatatccaggagtggaaatacatctggtctgtgttgctccatacctagagaaatgggtttatgttggggttttcaccgatgcagatggtccatgcgggtttccatatcctcgagccacaacaattaccacgacttgagctagtagaagagtgagtttcaaaagtttcattcctggcacttgagggtgacctaccccctacgaaggatttatggtagtctgctgtctaggaataagcatctctccgtgaatgaccccctgtttgggatatatgatgggaattttgacccattgtcccagatggcctgctctgacaagtatctcgatttcatcccttaggttcttacaatcattggtggagtgtcccacttctccatgatacttacacctctttcttggatctttctagaaattgcccccttgaggtttccttggaggctttctataatggaccatattgcgtgttgctctatgcacattttctcgagtattttaccaggatctagatt

SEQ ID NO: 6595 - DNA, 1229 bp, Cannabis sativa
accataagacaaatgaactaaacagaaaaagatgcagaaacatataaaaaggaaaaaactaaaaattgttctaatacacaaaatcatgatacagtggagaaaaagagccaaaggaaggattctccacaaaaaggttgattgagttcaagaacgaatcagttgaggagatgcattacatcgaagccataaaccataaattaaaaacataaatcaaaacccccaaatcacataccttaacagatatgatgtgtggtttaacactccaagaagaaaaggctaaaggaaagagagaaaggtaaagaaaaactagtggtagtggcggaggagggtcgaagggcatagggttaaaaataaaatataacataatagctcaatcactaaacaatgtctttctaaatggaagagaaccaagaacagttaaaacacacatggtgtgtagcaccaatatcaataatccaactagatttagggacaaaagagacattacgatagatgtttgatacaacaagttgatcagatggttgagattgtgaacaagtttcttgcattttctgtgctaacattgccatgagctttggacattgtatggacaaatcctaatcttcgttcatatcatcatttgaaattggttgatcttgttgatttcctggtttgttaagaattttcctaggaaatctgccatacaatcgatgactaggtggatatccatgaactctgtagcattttgcaataatgtgtccaataattccacaatgagaacaaacaggtcgattattagatcgattgttgcctcgattagcttgtgtactccttgcaaatttccctaaattgtcacttgtaggcttgggagtttcaggttgagaaatgataattcctctctgtttttcttcttggattatacaggcataagccttgttaacattcagaagtggatattggagtaaaatctgagatttggctttgagataaaactcattgagcccaatcaagaactcaagaaccttgccttcatcttggtactcttgtatgatcttcattgcgccacaggtacaaacaggttgtggcctgtattcgcgcagcaaatcccatagtcctttgagtcaagtgtagtatgaagtgacatgattggatccctgagttaatgtctacattgatcttttcacctcaaacacccttggagtattcttttggtgaaatctttcctgcaattctaaccagatgtgtgatgc

SEQ ID NO: 6596 - DNA, 2580 bp, Cannabis sativa
tggtgcaccagatgtatgtgagtgcagaaactgagaagacacatgagtactagcagcagtgttggcataaggaaagtgtgtttcatcaaaaatcacatctcgagagatgtaaattcgtttgtctttagacatgcacttgtatcctttatgagagaggctatatcccaagaagacacaaggagtggatctatactcaagtttgtttcgattgtagggtcttaagtttgggtagcataggcacccaaaaactttgagcatttggtaattaggaggagtgtgaaacagtgtttcaataggtgtggaatattgtaaaataggtgttggcatcctatttatgagatatgcagcagacctgaaagcctcatcccaatatttcaaagggagagaagcttgagcaagtaaggtgagcccggtttcaactatgtgtctgtgttttcgttcgacaaccccattttgttcatgtgtgtgtggacatgcaagtttgtgaacaataccagatgactctaagagtgtggtaaaagacctgaactcccctccccagtcagactgtaaagtcttgattttggttccaagttgaagttcaacttgatttttgaatttggtgaatgtgggaagggcctcatctctggtccttagtagatatagccaagtatatctagaataagcatcaacgaaactgatgtaatacctatatccatttgaggaatttgtaggtgctggtccccacaaatccgaatgtaaaagttctaatggtgcagagtaagttgtggtagagttgggaaatggaagtttgtgagatttaccaagacaacaagctttgcaaacatcaaagaactttttattagaaataggtatattacattgtgacaaggcctttgtgacaattctagcagcagggtggccaagcctgctatgccacaaggagaaaagagagttatttacatcagtttcatgactgttacattgagatatagtggggttactggactgagatgaatcaggcactggtagagtgttggatgtgggattgagctgactggtttcgaacttgtagagaccattgtcaaggttcccaaccaacaaggtcttcttggttgcaatgtccttgacacaacaagaaaaggggtaaaactcaaagaatactgcattatcctgagcaaactgagacacactcaacaagtttttagtgatagtagggacatgtagcagattagtaatactcagttgtttagatgtaaaaggagagttgatagaagagttacctatgttttcaatgtttagccccatgccattgccaacatacacttgctcattgccagaatatgggttgctggtgtttagatttgtcaagtctggtgtaatatgatgtgttgcccccgtgtctggataccattgttcatcattgaccgactctggtgtagcataaagagcttgaatctcagctatgttagccgttggattgaaattggtgaagcattctggccctgtaaaagacttgtcaaatcgataaaaacactgtttgacagtgtggccaagcttatggcaaagctggcattgtaccttttgtccccaattgttgttctgacccctaccataagatgcagagccgcctctgtttggtgcatttggtgagggaccacttgagccacgtccactgaactgaccatttctagctgctgagttgttgaatgggggaccacttgaggcacgtcctggaccattgtggaaacctggtgggacagctggtgcatgataggatgaacggccatagttgttttgtccaggatatcgagattgggagagatttgcttcagcttttgatatatcaagagtcttggcatttttctcgattctaaccgattgagccattaaaagagcttccacctctgctactgtatatttgtcttttcttgttgtaatagaggtgacaaagacatcatattccggaggtagaccattgaatatcgcctcgatgtgatcttgagtagtttgtgtttggccaatggtggcaagtcgatccacaatgcccttgattttgaggagatagtcgccaagagaccctgtcatttttgtgtttcgaagctgggttttgtatagaccgacatttgctgcgttcaaggctgtgtagtattcagtcaggttctcccagatctgagcagtggtgtcgcatccgatcatccgattggtcgttttctccgacattgaagacagtagccaagaaacgaggagattatcttgttgttcccattcttcaaagtctggattaactctgttggatctttcatcagtttctgtgaggtattttgctggtgcacgtgaatcatcaagaaatttttggagtcggctgcctttaatcgaagccataacctggtgtttccagggaagaaaattatgctcatcgagctttatggacaatgaatgattgaaggagatcggttgcgatcttggtaagtgaacttgttgattgttgagtgtttgagcattgttcaatcttgatgctccacccgttgctgagtttggattctccattgataaacgattgtagctctgataccatgtcaatttacaaagagagagaga

SEQ ID NO: 6597 - DNA, 980 bp, Cannabis sativa
acctaaaaacaataataagaaaaaggataatttcaaaagaaaatacaaaaataataaaaaaaaatacaaaatacagtatgtacgaaagttttaacatttttacggtttttcaaattttatataaatcttttggtgtatctttatgttttaattttgttattttgttgttaattttttgttatctgtatattattttttatgttgttttaatattatttttatgttatttttataaaatgccgtaaaaatataaatttacaaaaaattatattttatataattattctaaaaaaatacatgttatttgttccacatttgagtaatttcaaaatttgttatgtataattagtatattatactaattaatagttattaagtcttaattttatgataaaatttgaataattagatatttgttgtattaggtgtgattaaatttatcaaattaaaaaattaattaatgtgtattttgtcccatatcttaactgaatgataaaaaaaggtcaaattcaaactatttttttttttagaacaaaccgaaatattttaaaaatatatagatggtctatgtatatattggtggaatttttttttacgtaatattagaatttttaatattattaattttaatatataatacagtcaatattttttgttaccaattttatttaatttagttgtccaaattatatattttaattaattatcaaatattctcataattaattaaaaaaatttaatagaaaatctctcacctatataaatataggttattggtctctaaatagagtaagtgattcatattttccctgcagaaatggggccgcgaggacctacccctaatgagacagattttttcatctaaatgaggaatgagacagggacggggattactttttgtcctcaaatgttaaacgggattgggacaggaattacactctttgctcctacaggatctatttagtattttattttatatt

SEQ ID NO: 6598 - DNA, 721 bp, Cannabis sativa
attatcatatatatatataatattcgtgatagtctatttattttttataacaaaatttaattataatataaatttcaattaaataatatttaaattaaaaatgttatgctaccaaaaattcgacagcataacactttaccattgatcattctcaaattttaaacatctacacaaaatcacaaacacaataccaaaacagtttaaatattaattttttgcactcatctgaccgctgtatatttttcacagaacctacttcactatggatgaatatataagatattcaaactctacaaatatgtattttcgggtaaactttgtttttttattataaaatatatagtaaaagtatactaaccttccaatataatgaggagtaattttttcgagacaacgagcaaagagacactaaaaatctatttaccaaaaaaaatattaaaaaattaaataataactattgtactacaataaaggcatgcgtgctttccctttttctcccatggcgaagaagaaaaaggttggccgaaagccagttattgcaatctctacaggtcatggagctgaggaggaggaggatctccctttaatccaaggatcgctcactgaacaaaagtagctgaagagtttcacgatccatgcaagaatttggtgatgtagaatgaaatagaatgttgcgaagctgagaaaatcgttcgtgaagcatcgataccagtcagctggg

SEQ ID NO: 6599 - DNA, 1316 bp, Cannabis sativa
attattatttagaggtaaatattttgttgttttaatcaaatgctgtaatgcattgatgtcctttaggagagtattctgcctgggtttaatatcctttcagaaaatgcagaacagaaccataggcattttgtaagtcaaactctaatgaagttgttttgacttttcaatacaataatctgtgatgtctttgatgtcatctttacccaatcatatggagtatactttgtttgatttatatttgtagttgggctgtctttgttcgtacaagtcaaccacttgtgtctctctctcttttttgtgggtagaagttgaagtttggttaattaaattattcttttgttatttgatttaaaagaatgaaaaaaaaaaggtttgtctttgggtttctgtaatgtgaatgcattgaagaaaaaaaattggttattggggttcttcattattccttaaatgtttgttcttttctttaaattttgatgttcaggaatttcacttgatccatcaaaaggcggtaagatgagtatggagaaaaagagagaacttgtttatgaaatatcgaattggtcagaaggcgcgtctgagctgctacaatcatggagtcgtcaggaaattttacagatcctttgtgttgagatgggaaaagaaagaaagtatactggtttaacaaagttaaagattatcgagcatcttctgaaaattgtatctgaaaagaaatcaggagggagtgagggtgtcacaacagaccttgattcacaggcttctcctatgtctggtcaacgagctgctaaacggcagaggaaaactgagcaaccttctcggctagctactgctgctgctagtgtatcgaccaacaatggcatcattgatttgactagcaatgtaatatattgcaaaaactctgcttgtagagctactttaaatcgagaaggtgccttttgcaagaggtgttcgtgttgcatatgtaataagtatgacgataacaaagatcctagcttgtggttaatgtgcagctcagagcctccattccaaagtgattcatgcggcatgtcatgccatcttgagtgtgctttgacacacgaaaaatctggcattggtattaaggcgaaagttgggaaacatgatggtagcttttgttgtgtttcttgcgggaaagagaatgatttactcgggtaaatatttatgctatttgtccttgtttgtatcatgttgattttcttctttgcaaaagttttccacaacttttagatccttttgagttaatgatcattatttaggaacaaagttggtttttcaagttagattactggtttgtctaatgc

SEQ ID NO: 6600 - DNA, 1580 bp, Cannabis sativa
tttgggaggtttttggattgggtttctatgttgaatttttgagaaattaccttaaatttttgggtttcaaggtttggtaatttatgtgctatttaatttcttgtggtatgccaagttgtgtttgtggtttgattttgagctacttgttgagctcaatttcttactaatgttagattggatggatgatgagtaaatcttggtttgtgcataattattggatgtattttggtgcatgaaatgcttgaaaaacacctcattttgatttggaagcttgttgtcaagttatggtattttagtattaagtttggtgcatttttgggtacccaaatatgaatttttctgggtttttaacccatgagccacgacaaagttcttgagtgtcgcggccctcgatgtgtccagtaaggcagaatgtttttaaaacttgttttggccataatttttgactccaaactttgttttgggcgttcttggtattgttggaaggctcgtttcgggctctatgtgctagtctatgattggagtccgtattatgtgtatgtataaaaatgaatttgggattaaccctatttgtggaatctcgggaatgtgtgactaggattaccagcggttgctctggaacacccagggatttggaatctccacatacttggattatcaggtaagacaatgagttagcacatagagattagcatagtgacactcatgtatgttattttgtatatttatgccggaaaacaagactggggttattacccttagtttagctattttgtggtctagggttattactctagagtgtatgtgaatgtgaatgcaataatgtgttatatatgtggacataaagagttatgcggttaaggcataactaggatagactcggtattgaaaatcgagataaaccattctaaggccttattgtaaatagacgtgtggcatcaacacttaagtgattataattgttatactgtcttactgggccttggctcacgggtactctattgtgcaagaaagggtaagtcggtagttgagcagccaagagatggaggccttttgcggtgcattgtacatgtttaggccaagctagaccacgagggttgagtctgcagggggaattgctgtaatctccttttttgtcgtttaggttggtgtgtactaatgacttgtaatattttgaaaatgttttacgggatcccaaaataaaatgtactcttttagatgtattttaaagtttaattattgcaaattattattttattttgtgttttaaagtttaatttctgctcttggctctagtatatcctggattagcgggattagtgtatgtttagtcgcagtacgtgacgttccttttttagaaaattacaataagtgagttaaaaaccaattttttcactcttctcattccattctacacgccaatagcagttagtgagcacctcagaattttatcttcattaagccttcaagccttcttcactacaaggtagaaaaactcctcttttttttttttcttcttctcttcttgacatcgattttttttgacttcttcttcctcttcttctcttccttttttaatc

SEQ ID NO: 6601 - DNA, 732 bp, Cannabis sativa
tatgcagtcaaatatgttttaaactaattaaagaaaacacaagttttgcaagttgtgttatgtaaatttcgtaacaaaaatagtttgaacacttgaaagtagggatttcattttcaatttgttgatgatatatagtatctcaacatcaagtcattagcatgataatttgttggtgaaaattcttctagaaccatggaaagttatccaaggtgccctttcagtggcaacaagtttacataagaagaaggtgccatcaaatcgaaggttgtttggatcgaaacaatttaattttgatattgattatggtaaaacaactatattaaagtcattattggtcactctcaaactcttgttgtacatgactcagctccgactgcctccatgaaaaccacccgacctccatgctctcaagcttaacgtagatgttgccgttaactcaaactctaaggtgtaattggagcaattattctgaattttgaaggtattgagattgttgcactgtctaaatcagttcaagaatgctttcgatcagataaaatggaagcgaaggccctctttcatgttctcaattaggctatgttgagagtctcatctactttgaacaatttgttacgcgatttatcctattttctaaatttttgttgatgttcgttgtcttttatcagctttctttagtattgttatttttcatattccaagaaatactaaccatgctgatttataataacagtt

SEQ ID NO: 6602 - DNA, 767 bp, Cannabis sativa
ttttatcaagaaatatatattcaacaaaaaaaagaaagcaattaatatagggaactcgtgaatatttatatatatatatatttaaaaattccaaatgtaaggaggggccatggccccagcaggaagcaacatagttccgccactgaatatgtcacatcgagacttgtcaagttaacttgaagaaatgaacacaaatttacaattgaaccattttttttttggtgcaaagaacttcaaaagtttttttgttgaaaaattaaaataagattggatgatgataaaaatctaaaattaggtatttgttttctaaaaaaaaatggagtttattagattttttttctaacaacaaatattcaatttaattggcactacaaatattattaaaaaaataaaaaacgaccactaaaactagtttaatcggcattttttttttatattacactctcattctttattttcaaagatatgattaataagttataagttatatatattcattaattttttacattatatattctttaagactatgtttggaaattgaatgtgaagaaaataaaagtgcgagaaaaaaaaaaaaaatcttacatttggtatagaaaaagggttgatccaacaaaaattttcataccagcccaatattaaaaaacttggtttttgttattcaacatttttctcattttttttcaccaaaatctaaattttaaacataacttaatgatcatagttctactactactctcgtcctctttttttttttttttttt

SEQ ID NO: 6603 - DNA, 1100 bp, Cannabis sativa
cacctagtatatatataaatactttcttaacaaaaaagcccctcattatataaacacattcaagtattataaattttctttgcttcaatttttgcatgaatggcttcttattcagagatcaagatcaaccatgaaaatgcaatcaagaaacttctcaagagattaaaagaattggataatttcaaacatagtggctcaacaaaagaaggtgaaattgagaaccttcaacaaataggtcaaaccctagtcaacaaacctctttacaacaacaacaagaacaacaacaagaagttagaacaacaacgtttgaagattgaattggaacacatgaacaaattcaacgacactttagacaagtgtgaagaaagattcctcaagtacaatatcccgaaacgctatcaaaatggtcgaaaacaacctttggaatcgtacttaaaaaatttgcatgagttcatggaaatgacatggagaaaaaattccaagaaaaatagggcaaaagggtatatgaatttgagagagttgatgagaaaaattgatagaaaaaatgataaagaaaatgggatttttgcttatagttatcttgtaaattgtgtaactcaacttgggattaaaatctcaaaatttattattgagtacattttcttgattttggttgcttctaacacaagtaatgaaacggtgtcgctttgtcttaatgatcttgtggctataatagattgcttatctgttgaagagggtaatgaagggtcttttgcagtgaacattttggtaatgttgttattacctttcttcattaatgcattgaagcttgttgggccattttgggataatgatgattatgatgatggtgatgatcacaacaaagacaagaagattaaggtaataatctttatttgcccttcttcacaaaataaattattaaatttagttatgtatatgtccaagtttgtcatgaattttgacctcttttttcatattttttaaattttacaaattatatagaagatcaaagataagtatgatcatgagaccttgtatattaattttcacattttttttacatgaatataataatatttattgctcttttcaatttcaca

SEQ ID NO: 6604 - DNA, 523 bp, Cannabis sativa
gtaacatatttaaattttaaggtaaaatgtactctaaatttagtttgatgttctttaacttttagctgttatattaactagattaattgattcaataattataaagattacaaaaggtatattttcaagggacaaaatttaatccctatatttatatataatttcttttttccccaatcaaggcaatgtgccattgcctatcaaatttggggaggtagcaagtatttttcaagtagggatgtctcagtggaaaaactttcttttataatttttttttttattatgtataatattagttggatggaatggatgattgggtacttttttttctttttttttttaaagaaaaacttaatgatcataagatatgagtacatccaaagcccaaggtcaaatcaaaggccttttgcgaattaccaggttggattaaatacaccatgtggaggcaacatgtttctctatgattggataacaacaaaaacattaaagaattaagcaataaaatcaaaagaaatgacattaa

SEQ ID NO: 6605 - DNA, 623 bp, Cannabis sativa
ttaaatttttaaattccttttaagaggaggcatgctttagaagtagataatgtctcgagaaaaaaaaaatattaattaacaatgcgatataaaattttaaatgataaaaaaatgataactaacaaaatattatatctttagacattgcgaaattttttcaacatgatgtacattttaaatgatacaattgtataatattgtaagttcaaggaacaaaatattaattatttcttaaaatagctatatctaaatagttttaggagccactcacgtgcgattatattaaattgtataattttatcattttaaaatattagtggcagtagcagcgattgaacccaccgctaatgatgtatgacaattttgtagcgattgactaaaaatattagcagtgggctcatcattaatatacctgctgctactaattactattagcggttgattggaaatcaacatatctaataatcgttaatagcaaccagttattagtggcggaactctgtgactaataatttttagccacagataagaagattattaacggtgactctttccgcggctaataacctttttattttatttttgtatacaatatagtttgcttatattgataattctacttt

SEQ ID NO: 6606 - DNA, 3191 bp, Cannabis sativa
agtatataactacttgggcactccctcctctcttagtctaacttttgggaatgaattctacccctagtgtttatgtcaaatggcatcagagcggaaggggtgacctgtggattaggcccaaagttagtcaccgtagagtcagggccagggccgaccctgacatttaatggacctaagaaatggctttgggtaatgtggtgggtttatgcattattcagcctattttacaatattcataattaccatttttttttctttctacatattcatatatctttataataattttgggccctgagtttgggtgggtcctaggcacggacctagcctgcctgagcctatgatagggcctgcgtagagtaggtcactatggatgtcccctcctttaggggtgtattgttaggatcctacagtaactaaatataagattggttagtagtatataactacttgggcactcctccgtcttttaggctagcttttgagagtaagttctattcatgtagttgtatcaatatgccaaatattcaaatctatttcgatggtcatagtaggacaaaatttcatttgtgctctctttggaaagatagatgaggggctggattgttaaccataggaccaaaatgaacacatataagcttgtgtttataaggaagtgactggctgtttgctagagatcttttgtttttgttttgtttatgtacttttccccaaaatgcaacttataattgttttaaaagaaaatcatggacactgaattatagttggagttgatattttgatgcatatatgtttgaatttcttatccattctctgaaacttaacagagttgctaataatatgtttgagttctattctttgtttatgttgttagtttctaacaagcaccaatgattttgtggttccatacttttcatgaatgtctttccatttatatttttgttccttttcccatgcagattcttggatccattactggggtgaggttcataattgcaacatttcccgaaataggtcttgggccacgtttgaacgttgatatccatcgaggcgcattaacagaaggccttctcacttttgcaatagtaactatctctctaggacttgcaagaaaaatcccaggtagtttcttcatgaagacatggatctcaagtgtctccaagttagctcttcatatactcggctctgatctgaccggcggttgcatgaatccagcttctgtaagtacctaacactcttcttatctttgttgcttagaaacatatttattgatagatatattgaatgagtttgcttgactttacataggtactcggttgggcttatgctcgcggtgatcatattaccaaggaacatattcttgtctactggcttgccccaatagaggcgactctactcgcagtatggacattcaagttagtgtttccacaaaaagaagagaaagttgttagtagcagcaagactaaatcagaatgaacaaattaagattctcccacttagacttagaagatagatttggtcatctaatctcctcactttcaattcaaatgtatataagcttgttgtactttcctacttgcaacttatttgttatttttgcatcttgtacaaatctcaatctatgtgtgtgcaattggttttaaggccatggatttgtgccttttgtattttatggtaaattttctgagtaaattgttttgtttgttaatcttgcatatcatacaatggtttttgtcatattgtcacatttatttaatggcatatgacaatatgacaaacatacactttgttttgtatgggagaatttgttaaggatagattggtaaatctcttcatcaatttgataggaagaaaatgacatgacagaataaaatagttttgtaatgtggattaatttgggtttggaattaaaaaataaaaaattagagcgagttgggggatctttgtgtataacgtctcgtttcaagtttttattgggtcttccctcacaaattgattgttcttatatatgggtgtgttattctggttgctttctggaatgatgacaggttttacaaaccaacatgagtgtttttatcgtactttgttcttactggcacgccttcttaaaaaaacttctcaagagattacctattctaaaattactctaagtcaaacacgattaattttagagtttttaagtgatgagttactagaaaacaagatgtaccatgttgatataggtagtactcataatccatttaagtcttctttaactgtgcaattctaaacctatacagtctcagaatcatcacacttaaccttacacaggcaacatgggattgcatagcttacgcggtaattctacttatggatcacgggactacggacaatcactttaccttatgattccctaatcgatcgtgtgtgtggattttttaaggtatttatattctattttgataccactcattaatcttactatagagttttatgatatgaattaattgtgatagataaaaaaataagggaatatatatggttaggtgattaatattcatataattatggtccacatccaacctaagaagttcatgataagacatatcattgaagagtcaaattaaggagtttattatcaatgtaaattttattttaaaattgttgttaacttcgttttaaacttgcaattactaatacaacttgttcaaaatagaggtttcaattagatttatttatcatgacaaaaaattagattgatttattataatacatgaataaataaatattttgacaattactaagtatggccattttgtaatagaaactgaaaaaaaaaaaaaacaataaattaataatagaaaaaaagaatgatactattaacatttgaaaaatgaaataaaccaagaaaataaaacgtaatgttaattatcatcactcttcttcttatctttatcttctcagtcattcttaattaatcaacgaatacaatattaattataatacctcttcaaacttgactaatatgaatgattaaaaagaaaaactttacagccaaaaaaaaacagatgattaatattgccactaaggaaatatcctaatatatatttctaaaaaatgccaatttttatttgctgtaaagaaaaaatcacaaagagaaacaaagttgtcaaaaacttatatgtaaggttctcgtgtgttacaatttgttt

SEQ ID NO: 6607 - DNA, 1232 bp, Cannabis sativa
ccagacccaaccctagagaccctcgaccccaactttaactcgaacaacaaccttaacctcaactccgattttaccacaatacaacatgagttccaaatattacaatacaagctatgtgaactatttgttatttattgaatattacaattcctattgtatcaaaatttataattgtaataattaatgtaatacaaaattcacggctccttatacatacaacatgccaaaagtacccttaaatactaatcatcaaatatgaagaaatatcatgtcatgttcttgtcggtctatcctcatggcctattgggcttattaattctgaccatcaagccgggagagtcaaattagattagttttactaagctagactcaattcaatgaaataaaaagaattataaaataattttttcttcatgaatttgaaattatatttatttgacaattagtgctaattgctaaagtttttttttaaaaaaaaaatgaattaatgataaagttttaaaattgagattctaagttcaaaatgatattatagattaggaatcttagtcacaaaatcttgagtttgtgactaatatttgacaatgcatatattttttgttatgattattaattattaaaatttaaatggctttcattttagtacgaaaatagggtagaaagaggttaggtaggccaattaatttctaagctttacgtacaagaaaaacaaggaaataataaatgaccaacttgatttgtgaaaaaaaaaaaatctatacattataaaggtaaagcataaaacaagtttaggtgtaacttagatttttttttcattttatttttaaaattttgtaaaatttttctattagatcgtattgtattatattaaattgaattatatatcatatttttatataatattatcttaaattttaatttatactaaaatattatatatttaagtgtccataaaagttagagcattactattaggcaccagtggtacctaccaccttctcgacatgtcgcgttacgattgactaataatactccctaaaagctattaatttctaagctttatgtacaagaaaaacaaggaaataataaatgaccaacttgtttgtgaaaaaaaaaaaaatctaaggtaagcataaaacaagtttaggtgtaacttagattttttttcattctatttttaaaattttgtaaattttttcaattagatcatattatattaaattgaattatat

SEQ ID NO: 6608 - DNA, 784 bp, Cannabis sativa
ctctccaggtcgctcttcagagaaatgtgggtttcacagacaaaactacagttgcagtagtatactgctactcatcctggaatttgtacaatttttttttttctttttccagtaatttgattttgctagccaatgaaaatcgttcacgtgtacttaaggcatggatgacaaataaggatgttcataaattaaatttttaattttggctttgtttttttgtgcttgactgtagattagattttgtaccatttatagatattcaaacttttttattttttgaaattaccaaaatgccaacctagttgagcttatttacgttacaacacgttttttgatgtgttacacaactttctcacaaaaacgcctttagcgggcggagggtcgtatgaaaagtgtgagggtattttgggaatttgatatttctgaaaactattttggctaaataaaaacaaaaactatatgcgtgaataaaaattaaattaaattttgactacgtgagcggagcgtattggggccacatgcaaattgtttgcaacggtcgaaaattttgtaagacaagctgtcttgttgagatgagtctcttcttttgaataagattagccgaaaataccaataataatattattgttgaaggtcattttcttacactatgtttggttggaggaaaagatgggtggatggagagggatagagggatagtgatggaaggcgagtctaaattacttgtttggcaagagggagaggagagatagaggatacattctccgttcaaacatttaaaatt

SEQ ID NO: 6609 - DNA, 890 bp, Cannabis sativa
ttcattcatttttatcattaccatttaccagccaagtaaatggtccacaaaaacccagaaaaaaaaatacagtgaggagtgcaatgataggtttcgtacaaagttaaaacttttttgcttacttgaacaaaatcagtgtcaaataacttggtagcatcatcgagccttataacatcgtgatagacatacctccttatctgccattaaaagaagaaaaaataaaggcataattaaaaacaaaaaattaaaccctttgaaattaaattgtgaagaacatgagaagaattatgaacaaattatataaaaataaaaacctgcaaaagtctgtgagaacgatgagggggcaagcagtgaggacagatactgatgcaacaatccaagcagaagatgttcttctcgttctttttcgcgtcttcgtgaattatacaagcgttgtagaacttttcacagagaagaacttcaagccaacggggtagaacatttgacgagtcaaactatacaatatatcaaataaacttaattaaaaatcaattaaccaacaaaccataaaaactaaaagcaaaatcaaaatcaaaactagagagagtagagaacgtctaaattcaactactttcggtcaagattgaattttgaaaaattaagaaaacccaccatttttcttcttctccttcttcgtgaattaagtaagtttgatttgagcgagtaagtgaggaaattctctgagaattatggtcagggttcaagaagatattggtggagcagccattaaaaaaggagactgagaaagcgactttgtttatgtgagagagagagagagagagagagagagagagcggcgcctggcaacagttgatactagttttactgtacccaataaaattacagacaat

SEQ ID NO: 6610 - DNA, 1537 bp, Cannabis sativa
ttaaaaatataattttattaaaattaattgataattcacttacaaattcataacgctgagctgccattgattttgttccttgaattgaggggtacttcatttattttttgtttgttttttgttttgattggaatgctatgtaaattttggtctaaaaaacatatcaataatttccaatgctcccttgttacatactcaggcttagcattgatagccaccttaatattagtagggttaccttcgtaatattgttgaaagtaagtatgcctaatatttttttttctaaatatctttttcccatctcatgataaagagtcctcgtcacttttttgatttctgggtgaccatgaatatcataaaaatactacatttaatgaaattgatcattagttgaatgttcgattaattataaataaaaattatttcgaccatcaattatttactttcattctctacacaacttgttccttaaaatggtacatcaccaaaatctaagtagttccatggaaataacatacactttgacacccaactggtgaataaaagcttagttctccaagccaaaaacttttcccatcgcaagatcaagcatatatatgtggcaatagtcactgatttgccctcctttgagtctccaatggtatattactagcaaaactacgacctttttttgggcggtttagctgcctcacaagtttagggtaccctattaggatccaatggatctaaaccatgctgtctccgcctaagaagctatatcggttgacattatttatttattattttatgatgtttatttataaattttatttataatttatttattaaaattattatacaatactattaaatttactcatttaattaattaattatgtattcaatttatttactaattcattaaaataataatgacaaaaaaacatttttattaatattttaaataaaataaaaataattatttatttaatttataaataaataaatatattaatttaataattacataaatatatttaaaaaatactttaaataacatattaataaaataattacataaatatatctaaaaaatataattaacttattataaataattgatctgaagtttgttaaaactgtatttttttttaagtaaatttaattttcctaaactttttaaaattttcaattattttaaattagaaatatcaacaaatatatttattaactagatattaattatttacataaattatattaatttaatatttacataaattttttaaaaaatttacttccttattttaaataattacatatttcaaaaatcaattagagttaaaaatatttatttatttaaattataattttctattttcaataattcctattttaaaaattaaattaattttataactacagaaaatttattaaaaatatttactaataattacaataaatgttcatatatatatatatatttatttgtgattaagatgattgaattaaactttttatttttattaaatattcaaaatatattaaaattctaaaa

SEQ ID NO: 6611 - DNA, 850 bp, Cannabis sativa
gtaataatatggacgagtcaacgtgtacgtgagacattatttaacatctctatttatatacataatatataattatttttaattaatttttgatggtgctatttgcttattttcatgaaaataatgggaattgtgtgtgttttttgttaatgtggcacatttttcatggcttaacaagaagtgtaaaatattgtacatatggttcaaacttttgaggaagaaaattaaaattagggagtaattaactaaaaaattaataaatattccttaagtttgatgagttgtgatatatatatgattattattagaactaaaattaaggtaggagaaattgatggttaaccttattcacattaaaagtcgcttttgttgtgagacataagaaccattgaagttttcgtttcacccaattaattttcaattttcatatgacaaattaatctttttctatataaagtttgtactgtgtctaagagacatcaatctaaaaatgtcaatttcttaactttttttcttttaacaacaatttattggctttttaaaatatataaatgacctaattaaaattgattttgggataaaatctcttttttgattggggctcacgggagacggtttcatggagattgcatgactttttttgttacggggcgttgaaaggatttggccaaatagtttcgccatatttgtttttttggctctattattaatggcggatgtatctctgtatgtgaattttttgatcttgttgttatttactagctcttttcgagaatgatttattagttttaattttttcatgaattgtagcgttataaacattgttcttattccaattgaatgaaattaa

SEQ ID NO: 6612 - DNA, 1720 bp, Cannabis sativa
cacataatcccaaacggtccaactaataatttgtgttattgtatttctcctctattgtcgagtgctaatagtaatacagcattttttttttttttgttggaataaaaaactgtaatatattaaatattcaaatttaagatacaactgttaataatggagggagagtatcttttacctaaatacaatcagtgttcaccaaaaaaacatatttagccaatttatgagcattgatattagcagacttaaaatatgagatgtgtactctttaaaaataccgcatgtttgtctatgacttttagtttaaaatttggtatcgaatattagttagtaatatgctgaaatttgattgtacaaataattataattaacttaattaaaaatagtaatttaaacacaaaacgaagcaattattcattatttaaaaaaaatatcatagataggatcgatggcaattagctagctgtgtgcaattggcaattgagatggtactcactaaatcaaactaactattattcatattattatgataagaacggcatattcatcccacacactaataaatttggtcccaccttttagcagaaggcctgaaatctttttccaatctcccataattaaaaaatttcaacttttgggaccccatgcatgtggagcaacacaaaatcaatgcatgcgacttaccccacttattaagattctctaaaattcttccttacgaatttgtagctataaattggtattcatttctctcctcattttaccatctcctaattagtaataacaatagtccaattaagatatataagctatggaaaccacattatcttgcacaaattttgtcacactcctcatttttctttgtgctactttctacaagctagactcaaccttggccgcggcggcggccagggctggagtcaatccagtgtctaaaatcgctacagggttcatcagaacatcttgtagccaaacaacctacccaagactttgctttagctctctgtcaatccatgcccaaaaaatccaaacaagccctcaacttctagccggaacagccttaaacgtgacactgtcctcggccaaggccacgaccgccatgatgtcaaggctctcattgagccacggactgaagcccagagaggtttcggctatgaaggattgcgttgaggagctgagtgagactgtagacgagctgaggaggtccattggcgagatgagtaagctaaaaggccataatgctgattttaagctcatgataaacgacattcaaacttgggtcagcgcagctttaaccgatgagaacacttgttctgatgggttccaagggaaaactttgaatgggaatttaaagactgtcgttagaggcagaattgtcaatgttgcacaattgactagcaatgctttggctttgatcaacagatatgctttgattcgtggataggctagaattaaaaaatatataatttaaataattagtatattattaaggtttggttaagtttggatcaacttaattatgagttgtttaattgtgtggcgagatttagtagtgtggtcattaacattaagaattgtttttttcattgctatatatttcaacgtgagattatgaatgcaattcattgatatatatgtattggcgtgattattataacatgctagcccgtatgattggtatatatgtcggtaatcgcattatatttgtaaataggtttttgcc

SEQ ID NO: 6613 - DNA, 515 bp, Cannabis sativa
gtgcatgtgtgagctatttccttcacgcgttaatttctttctttgtgaattctctttaatatatgcgaccatggacactaagaaagtgtcaatggttgcgtattggtgatgtcatcttatcttttatactattttattccaaacaagttaaaccttttagcctcttattaaaattcttcttggattagaattttgaagtgaattaccttgtgctaaattaacggcatgttaatgttacattaataaattattttaaaaagtgagtaggatgtaactgaaaatatttgaaacaatttttatagtttagaaataatttttgcagcaaaaacaaatttagggacaaaacgctacaaaaatcaaaacaaatcttatttattcaagacaaaatcagttttttttagttgtggtggtgccaaataccgtcttatttttttagtcttcggaaagaaaaatatttacagatcctcctgatttttcatcaatttttctattacactttttcttttctaaccaac

SEQ ID NO: 6614 - DNA, 874 bp, Cannabis sativa
caaagtatatttataaatatatatattcaaatatcacattaaaaaaaaaggggaccattatattatacagtgccggaaccagattttaagttaaggggtgagtttttcctttttttttttgtaaggaataaggatggtatactttattttttgtatacaatataaaattaaaaaaaaatctattaaaaattgatataattaacttaaatttttatagtgttaaacataatatataacaatataagttgagcttctatatggttaaggaattcatgcaagttttattgataaggtagcttaaccattaaaaagtaatgttattcgttaataaatattacattttaatatatgttatgtaacagttagtagtctgccagtatataggtacaaaactatataattaaaagaatttaaatagattgatgggtactcatttttatacaaaaagatgtgcatcttatttttggtgacctatcacttgagattttcaaaattaagtgcatttaaccatgaaataatcttagaatacagtgtgaactcttaagaaagtttttcaaaaaacgtacgattaaaaacaagtcacaccaaaaatataaatcaaccaaaaaatatacagttaatcaaccaaaaaatatacagttaaaaacgtacgattagaatacagtttgcgaatagtgttgctcattatttggcttgagcttcctattctgttgctgatcgtattatcagaagtaatgatgtttcttctgagtttcataatgtaatcttaaagaattgcaattaataaaaggatgatttattttcaaaaaatataaatcaaatgtgttacgttggtttctatgtgtgtctatcgtctatgtatgtaatgtataca

SEQ ID NO: 6615 - DNA, 737 bp, Cannabis sativa
gttgtgtttgataggactgggggttttgtggatgctctctcggctaaggcggctgttaattcggctcttgaagctgaatgccttgccttatgtcatgccttttcgctgtgctcttcgtggggttgtgtggaggcaaacttcttctcggattgcctccagttagttactgctttaaacaagaataccatccctgtttggcatttttctcatctttttctgcatttgtttaatagcctttcttttgcggcccatgggtgtgtgttttggctgcctcgttcggctaacttggtggctcacaaggtggcggcatgggctgtgcgtcccataatgtttgccgtccactgctggagaaaggggagtagcaccctttgttgctacttaactgttttgttttgctggtttttcaatgaaatttctgttatcaaaaaaaaattaggcttaaataattaaatatataaaataatattgaaatattattcttgatattgtagattactcgaactttttaaaaattaacagatagtcctaaacaaatataacgtatgatattgtaaaaaaaaaaaattgattaaaaatttatgatatgttgaaatgtataaaaaatctaccgaaataatcatttaaaaaggtgtactatagacataaaaataaaattggtcatcttataccataatacaaggatgaaaattgtcaatcaaataacctcattctttatctatagtgtacatatgatgaat

SEQ ID NO: 6616 - DNA, 1283 bp, Cannabis sativa
tggttgttcaccaagctcatctcatacaaaatatatgcaattagtggttgttataagctcttaaataaagtatctatatcgtaccttacaaaaaaaaagcatatatatcgtgatgaaggttaaaattattgctcgagtatattatatggttaatattaataattaaatgctcatgcacttaaatagctaaaaaatgacaaaattattgatatgcaacaaactaaattaagatcttgatactaaagtttgagaagacacattgtctttaagcatgaagtcaattttaaaataatatatgcagaagcactagctagtacttatagttgttaattaattagcacaaaatatttttagtgtggtggcttaattagtagttctagatttggttccacatttatatattttattgtttgttataattgatcttgctgagggtaagagtggtagacaaggtggtgagagttgatctaattatatggtggcgcatcacttgataatgtatgctaaatgtttattaattgcttcataattttcaatttaatagaaaacttattaagattatatatagatatagaaacttaataaactatgtttgactagtttgagctctttatggtagggaagacgcaagacactctctttggactaaccttcaaccactataaataaataaagatatgactacaaacaagataattttttatgcatgattaaatgtgatttttaattataataaaagattatttttaattaaaatatagtatttaaatacaagatgatgttaatttaattttaatcacaataaattataatttttatagctaaattttttaatacaaactttttaatgataacataaaaataataatttataattaattataattttttttatctttactcacaaattttattattataaaaaaagacagtacagattaatatatagtctaccacttatatataaatgtgtgtagatacaaaataaataaataaaaaaaaaatacattaatagcctataccactcgtgcaatggaaaaagataattatcatgatcatataatataagataaatctctttttatatagagtgcatattttatttatgctaaagtgatctagagatcacgagactattattattttataagatcttgtttatatatatatatatatgcagtggttattatgtgatttatattgtagctagaattaataggagccataccatatatactatttgtagctgaaatctataggaagtttggctcttcaactttctg

SEQ ID NO: 6617 - DNA, 675 bp, Cannabis sativa
atactatatgctaaaccaaaagctccgaagattctctaggactctgcaaaggctaaaatctcaaacagaccgccattgtaaaaccctatacccataattttcagcttgggctttgagctcatgaaccctttttttcttttttatatataactttaattataatcagaagtgatttgaattctttgatgagaacccagtgagatttttcctttatgcatgcataatatgattattcatttgtacaaaatattatatatctaatataaatgggctctgattttgttctaaattaagaatattttttctttaaccaaaagaagttcaaaggaatctgttttttgcttctttaagttaaattctttgcttgcccaactaaatatatgtctcgtccttctttgttatatagcaggaaaaaggctgcttatattcatttaagaagcaaaattaaataagatcccaaaccactttaaataccaagatttatattaatatgtatgtacgtataaattcatatgatatatagatgtatagtgatctttatattaatagtataagagatgagcaatgaaggttttttcatcagtcaacaatgagattgatatatcaaaaccccagttcaggtataagtttcttaattaattacattttctcctattgatcacacgtgtaaaattg

SEQ ID NO: 6618 - DNA, 1135 bp, Cannabis sativa
gtttgagttgaaatgcatatcgtgcctagtagaagcatttacaatatgaaaacatttattggtgggtatatacccacagaacatgattatcagtagatgatatggtgaatgcttcgtcttaaatgtttatacatgttatcagcggctagcttttacaatatgaatacatttatcagcggatgataatcatgttctgtgggtatatcagtggcttgcaagtagctacatttatcggtgatagatttttgtggttagattagatggacatcaagtccatgaaaaaagtcattttaataatatgaataccccgttgaagaaagaaactgtttagtatgtcttctaccttcttgcatagtcattcatttcactgtagatagttttggaaacaactcttgccctacctatgatttttaactattaattttttttccttttcttttttgacatttgaattggatcctgcaaacatagagttcatatgtatgagatgaatttatttaaaaagtttagatatcaattaaagttttatcattttattggagatagttcatattcttgtatggataatcatggttgaggtaaatgcaatagtatgtgatatttttcacattagtggaacgggaatcatacctacctatacccaagccaagtaacatataatttgaattggatatgcacattttgtttcattctcattttatatataattattaaccaaaatattggtttttttttttatatagtatataaatttttgaaaaatgctattaatttggctgaggtgatttaatacttctatttgcaagtttaaaattgtcaataccttttcctgataaactctatttcagtctttttcctaaaagcgtttgtatgcattgagatgctggatgttgatggcgagatgggttatgataatccttctagaattgagccaaaacggggtcaatggtttatggatgccaatggaccacaagttttcaacaagaagcacgcaatggaggatgttaatggtagacctgtttcaggagtttcacatatgagtgtttctccttgggataacacttctggttttcagtcagttccagggcaatttactgaccgactctttggatatgaacaaatgcggaatgtaaat

SEQ ID NO: 6619 - DNA, 1034 bp, Cannabis sativa
aaggcgtatctcagaatgagaattaaattacattcaattggttttctgtgattagctgcctgacattgttttgtactttcacagtccttgattttatgaacttaaatctatacttagtaaggacttatttttgcttactgaagggttatcgtttttacaaattgaagttagttgcaatctcataaatttacatgttttttctttttcctatgctagtttctggtggattgagtttcttagtgattttactatatttattgagatttttttcctttgaccagggaagagtgtaataaattaataaagattattaaatcaagagttgtagatggtttcaacaccaaagatgcagaaaatgggagtgtgactttgatgccaaatgaagcatccataggtaggacttcttaaaagaaaataaatattttggcttgcaaaattattacatatgtatggctgatggtgttacctgtgttgcagaaacagacatgcaagatcttcgatgtagagctattatggaagcgagaatatggacgtccgcaaagaaattaaaatcagcttcaaaatctgatttgcataatgtaacctttcagtttgattctgctttgttccatagtcagtcttctttaatgttaatgctaactgttaaatttcatctaatatgactccctttcttgcagttttcatatctgtttgaaaggttaattcttgcatatatgttgattgcaccatttaattattaatatgcataaatgttaattttggaatatattagagtaatcattgaaaagatatgtgctccaaagttattagttgaactagtgctgaagaaccttttccccttttttggtggggaggtgtctaaaaaaattataactgagaattaaatatggataaattgaaactggtgtctattacttcaggctgcttagtaaaaaagaacagaagtagagagaaattagatatgcattagtaggaatggaagataattcttttcaatattttcgggataaaaagcttagagatactattgtaca

SEQ ID NO: 6620 - DNA, 1549 bp, Cannabis sativa
tcattaatttttcttttctaatccctaattgaaccactttcaacccaagtcgacttcccctctctcacttcggttcctactttctaaaaagagaaattaataaccatcacttctctgcaccccctggctattcatcattgccctagaattgttaaagccttcatgtcctccaggtgtcctttggaagaatttagtgggcactgacagaaacccacactcaatatttgatccccttggcttgaagagacccccatttaatgttctgcatattatgataattccatctttgtggtgctcgattaattccttttgctatcaatccttacatttaatttgcagccttttgcctaaccctctataaatatcccccccaattagtttactcttgcctaacccatattgcctatccctttacttctgctcgtgtgcttcatgtccttcactatgacatacttttgttctggtttttcacatcatccttgactgactttgcaatggaagatctctctcaaactctcaactctactcttaacctcactgacacagaaaccaaaatccattccctcattgagatacctaatgagccagaagaagatgcatgggaagagccctctgctttccttgcggtcaagttgttaactaattgtcatttaaatgaagatgctttcaagaagtgccttcaccaaatgtggcctgaacggtattctattaatgtcctagtgaaggaaccaaatttcttcactgtggaatttggctattttggtgatcacaggcgcgtccttattggccaggcttggcatttaaattacaagctcattgtgatgactccccttgaaatcggatccacagtcactgtcgatatgcttagctcaacacctttttggattcaagttttcagaatcccctttcttcatcggtcacgagccttcactcgaaagcttggtgaaatcctcggccgctttatagaagtggacactgcttcacttaaagaaacgtggggtccttatcttcgtgtccgaagagaaatagatgttacccaaccccttcctcgtggaaccgatttccacttcaccaatatggctgcccttgtttggcttgagtttcgctatgagaatctccctgacttttgccattattgtagtcgcctaagcaatattgtgaatcactatgccgagtttcttgccaaatgtgactcgtcatctatccctcccatgctctgttacgatcacaccctcagggctaaggttcgcattacctcaaaccctttttacattgccaatacgcgcacaacacttcgcccccacataggccaccctcacctaatgtcgactcaacaccttatttctttgctccaaggacaaaccatgccagctcatccttacaatgccccaacattggattacggcattcaacacttcagtcaagctcgcactgcttctgctggcctctttgtggcaagaccttcgaacacttaaggttccttgcctatccatacggcttctcatattccaacttttgtggcaggatggaaccctgctcttaacactcc

SEQ ID NO: 6621 - DNA, 1445 bp, Cannabis sativa
ttcacccaataaactaatatacatgtactatctattaatatttcctttattcaaaatacaagtaataataacttctaacctttaaataaaatttcaataaaatttaatatatattaattgaactaaacagattatattataatggcacataagtggttggaaccaagtacaaattatcttttctactaactacacttccaaacaactccttcatgtccaaatcttcatatttcattttattaggcaatttccaatcaaagtagtataacaacaatgcaagaataaactcaacattgatgacaccatatgacatgcctggacatattctccttccaccgccaaatgggagaaactcgaaattgttgcccttaaaatctacagagcaatcgacaaatctttctggcatgaaattctcaggttcaatccaatatttttgatctcttccaatcgcccaaacatttattataactttggttttcattggtatttcataaccattaataatgcaacctttttctctattttcccttggaagtaataaaggagctggaggatgtaaccttagagtttctttaacaatggattttaagtatttcatctcatttattgatgtttcaatatttactaaccctttctttccaaagatttttctcacctcatcttgtgcctttttcatcactcttggatttctcatcatttcaatcatagcccaatcgacagttatagctgatgtttcactcccacctagaaagatatcctgaaaatcaaaccattttgtatcatcaatttgtttcatgctaattaatcgctattaaaaaaaaaaacctatcttagtcatgataaacttttagttacagcataaattttataactaaatgcgattttataagttgcaacaatatttaattacgtgtgactaaattaatatggcatttaaatacaagtagtcactaatttaattttagttgcagcaagtattataattaaaaacatatttagtcacaacaaattgtgattattgtcactaattcatttagtcacggaccttttagtcacaacataataagaataataatttataattagtcgtaaccttttcacttttattagttacaagttttgttgtgactaatgttttgtagtgaacataatttatctattcatatcacactatcattacaaaaattcatagctttagttataataaaatttgtgattaaaaatgaaaagaaaaattgtagttaaaaaatatacattattatttttatgttactatactaaaagctctagttaaaaatattagtaataaaattacagttttttgtgactaacatcaaattagtgaaaaaaaaattgttgtaacttagtgatatttagtgataaaaaaatatatgttgtgactaaaaaattatcataaattttataataaatgatattgataaaac

SEQ ID NO: 6622 - DNA, 989 bp, Cannabis sativa
aatgttatcaagcactcactgctaaaggaccgttcaaggatgagttgaagagatggaagatatataggaccaatgtctccaaagcatatgtagaaatcaaaccatgatgagcaccaagaatacggctttcataatagcaccaagccttaatgagtataatactccgtttgaaaatatgatctttgctaatgaggcaatcaacctgtcacaacaagtgtataaattgcagaagggatgtaaattgccttcacatgttcaaaagcacccgtttcaaaaaagaacacacttgcattaagatttatttaagctgtaaaaaataatcttaaaaacacaaacaatcagtagatgctccagaagtaccggtattttgaaacacaaaataagaagagtaaatgaagaccaaaggcaaaagtgccacgaaagatcataatacaaatgaaatttcaatagtgcaccatatatttctattcctggaaacaacaacgtctaattatacctgttcgagaaagcatagtgtacaaagccctcccaactgattgaacgaaatatcaaccacaatgttctgtacaaggcatttgacaagtttaacctgccacacgaaagccacagttcttacagaaaacatgacagcgtaagtgactaataggaaaatcaatgtcaatcaagggcccaaaaaaatagacatttatcatacaggaagagaaggttataaaacattactaaaagctaaacagcacgtaaatatacaaaagctttcatgtatgaaccataacacctccaaaccaccaaactacagtagtagaaaacttgcagtttcaggtgactacttgtcagatatgatggtgtcatatagacaactcaattaagtttagccccaaatcttaattaatttggtcattccttaggatgttccactcaatattaagtataacgaaacgattattgctacagtaagggactgttagtatccaacaaaaggtcacccagaa

SEQ ID NO: 6623 - DNA, 864 bp, Cannabis sativa
ttacttaaaaatatatggttatcgaatacacatcatgtaataaatgtacaatttaagtgtgtacattattctcaaaattaaatgaatttatagatccacgtgtatatatagctttataagtaacggcaacaaaatggggctattttctgggtcgttatttgggtctttgccccgccccgctactttttctataagtcggggccgaactaccttggttcttttttttttcttttgagacgtggcctacacccgccccattttagatattaattaaaaaaaaaattaggtctatcctcttctacaacttttccactcatgttcttcttcataataatattattaataacaataatgtttatatagttatacatgtatgcttctgtgtatatatctttatttagttagattttgtatacataaacaatttctttgtcgataatggagtacttttgactagaaaatgatatcttttttcttttcaaaatatatatacttggattgtagtttgatgaaaatgattacaattggcctattttttttttttaaatattagcttgaaaaaatttagattgggttgggtcagacccaacttagtgtaagtgggatggactctctccggttcataaaacttaatgagctgttcataaaacttaatgagctggacggagagagtgagtcggggcgactcgcctcatttacattcctgagctctaattagtaataattattttttaaaaaaaatattgctataaaatactaataatgcattatttaaaagtggcatcttgtatataatttgtgtaatttatgtatttttattttaaaataaaatatgtggaatataatttagtgaaatatgaatgg

SEQ ID NO: 6624 - DNA, 2023 bp, Cannabis sativa
attatttttatatttgtgatatatattttcacataatatttgcaatatatttcctatgactatgtggtcaaaaataaaataaagaactttcttataataaaatggcatactatgttattttaaattgaatcttgtatttttttagaattgtttatttgaattttatatgttaaaaaattaactaaatagacattaatttccatttttttgtttaaaatatttttgaatataattatagaaaaatttacaatgcacttttaaaaaggttattttggtacaatctattttttttacacccctatctatttagatgtttaggtgcgttttgttaattcaatttatttttataatattctaccttctaattatttagaaaatacaataaaatattttaattttttttaagtaattaaaattaataaaaaatatatttttttttttcaatttgcaattattatcattttgtatcttgtattttacaaaaattattaattagactctctattttattaattaacaaattgaatcatgtatttttcaaattggtacaaaataatacttcgagctgacagttttttattataaccaacttgatgataatttatagcactgacaaatacaataagtgttatcatcacttttagataaaattactattaaattttattttaacaaaatatcacttcaagtattattttataatttgtgctattttaaaaaatataaaatttattttattatttaaataatccaatcaaataatttttataaaaacacataatttaaaataatatttttccatttatattgaaagataaataattaaaagacataatccaaattaaataagataattcttcagaaaaaaaagaaaaaaaaattaaataagataaaggaatgagacactcgaaccttcatacataaaataaatatctaaaaatcaattataaaaaaaaacccatttattattttatttatttaattttttttattattattacacacatatatatagagagagaaagtgaataagcaaagccaagaaagagagagagagaaagaaaaggaagagagaagaggaggcagagccactgaggcagacaccaatctgtatctatatgtgtatatgtgtgtatatatatatatataacatatagatacaatacaatacaacaaaaaaggcataacccatttcgattcattgatattatatattgataataatacgattacaccaaaaagcagatcttcgtcgtctcagaccacaccagctgatttcctttcttcgagactcaattctcaatcccatcttccatttctgcctctagggtttcaaaggtattgttattatattcattcatcgctcaaagctttaagctttatgctttatttattagtttttgggtttttttttcttggattgaatgtgagataccacttcttttccgccattgtttgtcttaatcgccattgttaccaatacgaatacgaattcaataatatcatttcatcaaattcattattcttcttcttcttctaacgctttaaagtttgcatttttatttatgggtttttggcccttttttcagctcaatttgattctgtctagaacacatttacaataataaagaaacccagattagagaaactggcaaaaaggtggcaatttggtttgtgggatagcattggttttttggggttatggtgaaaaaaatgtgcttttttagattttgtttttgtttttggtttctttctaattaataagttttatatatttttggtatgttttttccatcatttcaatggtacagcaatcaaattatgagaagttttactcttctctcacttcattcaatagctaatgaaaatgggatttttttatttatttatgtttgattattttaatatacttaacccctttctctttagggaggttggaacttaaaacttgtttgcatatacagttggagtagctagctgctcactgaaatgttagtcaacagtattagagaatcctaatcct

SEQ ID NO: 6625 - DNA, 1151 bp, Cannabis sativa
agatgagacaaatgattagacttgttaaacattcacttttgcttagttgtcaaataaaatattgaaaagcattacatgatggcgacttagttagatgtaatgttgattgactcttctcctacaactcaaaacaaaattattatgggcctaattgggctaaccaaacatgggcctaaatggcccgaattacacaaatgattttgctatttcaaaaataccatttttttttaattaaattacataaaagagaagaaacactatatcattttaacatcttttcttttatgtttgaactcatgatttacatctttaatatggtcaatagatgcacaatgatatacataactaaactaattaattgtagcaaaatcataattttaggtacatataaataatatcataaatgttacaaaatgaaaatatttcagcatggccaaatttcatttctttaagaagagggagaggcattgcttgaagtggaaggttcttgttcttggttaagtagttgagactcaacttgaatttgggattctggagccgagctctcgggctgctgaaccgatgaggacgacgacgttgcatctaaagtcggtgctgaggcttcaataatctcctgaggcttaaacttgttaatgtaataacttagtgatggtccactgtattctactgtcttcaccaaaggcgcaggagggtttttactaacttgaaggagtatcgatgaagctgcagccacagcgatgagagcaaggcctgcggaaattgctgctgtgttctcagctccatctgatgaggaacctgcagttcctgaacttattgcactttcagcaacataaactgcaggctgcgaaatttaaatgatattagttcctagtttatgccataatccacagtccacactcaatttgtgttacatttctcatacattgaaaatggttcatacaatgtgtccaaaggagactaaaagatctagaatttactttagctaatctaataacaaaacataacttattagagaaatatgcatcatttggtttatcaagtccaaatcagcctagagttctaattggttgtaaggctgctaagagttgtatcagatcaaatttccaaggattactaagaaggaaactcttcttagagaccggtacagctaa

SEQ ID NO: 6626 - DNA, 631 bp, Cannabis sativa
tttccaaaatgcaattaaccatcgaattagaatgaaattcacagagttactaattagtagataggtaaatctaaattcattgagttaggtggcatcccattcacattagttacttttttggtgtttttttttataatctatatcatgtgaatatttttgtttaatttgcgtccaaaattatagagttttatgttaaaattaattgatgataaatagagtattatttattttatataggataatgtccacaatgatatatgcatatacataaagtttaggggtatgagatatgttaataaaattaaattagataaaaattttgaaatttaataatcttaataattcataaataaattttactggcttaaaaaaattaaaaaagcataatttaaaaagtttaaatagcaaaattcttaattatagtataagtgtatacatacagacacaaaaccatatattagaataaatattgtacttcactgatcaacatgaattatatagttaaataaaaaacattaattatatatatagctcgtacgtatatatatagtcaaaaaggattcatgcaacagattttaaaatacatatcttttgttctagtataagtccaaataactttttgtgtattgac

SEQ ID NO: 6627 - DNA, 1121 bp, Cannabis sativa
ttcatgtcagcactaaagaaagtaaagacataaaaggagtgaaaaagtgtataacggagggtggccagtctaagacaatggctgctttctctttttcaaaatgtatttctgatttagcaataaatactgtgcaatagcacattttctcccctcacccgttattccaagtaagggcgcctcttttgcaacatctaatgcacatttactttatctagtgccactaattaacaaaacactttgacttttgacagaacattagcttttcagaagactttagtccaaaacaaatcattatggttctgatttgaagtgaaccaactgaaagctgatttacaagaaaaaatcccaccaggatctctggcttccacaatctactatcatccatcacattgagcaatctaagatgttctaactgttgtaacatctccaagagattgggaacttccttttccttcaagttccttctgaacttaaagttccaacttacaatactatttttacttgaagcaaggtccttagcaataatcttatacgcgcatgttataagattgataggtctgtaatctttttccatgcagctattgagtgttttgggaataagacagatgaaagtttcgttgatactaccctcaactcttccatctctttcaaaagccttgaacacttccatgagatcatccttaatgaccaaccaattagactgaaaaactgccattctaaaatcgtctggacctagtgctttgttgccttcacaactgaaatttgtccttcttacctcatcatcttcgaagggtatctctaaatgtgtagctaaaaattctgggatttttgccactcaatgccatcgattcctctccctcgtctcctctcggatgtatataatcttgagacgaaagagtttaattcttcaactatttcttcctccttgtcaagtatagatccatcatctcttgggatttgtgtgttttgcagtgttacatgtttaacatacagggaactatcatctttatagataaacatttgggaaaatgacaatttcatataaaggatgtactaatttaaaatgccataagtgatgtttgagtgatgtaacaaaatttctctctcctccttgaatgctc

SEQ ID NO: 6628 - DNA, 815 bp, Cannabis sativa
tgttgttgttgttaaagcttgtgtcttcattgcttggataatgagaagaatcagatccattataactctgagatacatatctcctagctcctgaattatggccagtctcctcattgcttggataatgagaatcatatctcctggtttctgaagatcttttgtattgattatccgtgtattgagagttgatcggggaaggtgggccatctggaatgaatcgatcagtagaagaagcaccggatgtggtttgatatccaacattgatgcttgaactgttggacttacgacggtcaaaagatgatgcatgattcgggtctttgttggcaaggaaagcagcagcattggcagcggcaattgcttcattagcgcattttgcagcttctttagcagcagaggctgagtccacgaaatgcttgttgccaccaccaccacccccacggttgttgtccccaattgttccccccatcggtaaagatgagctagagaaacaagttaaatgagattgacatgaaaatgcaaatacaagtttgtgaaaatgatggccaagttgttaccttgtggttgaattgttaagctcaacggattggtttggcttgggtgtcacggggaagcttgtagcgctaacaaaactgcgtggtccttcctgaaaaaacaagaaaatgaacattgtttgatatggtaaaagactcataattgagtttgagagtgaagagtgaggaacaaactataagctcttctggaggcttgagaagttcctgttcggtttctgttgtgtcccattcaatctggtattctttcgctatttccttcaagat

SEQ ID NO: 6629 - DNA, 725 bp, Cannabis sativa
tatatcaattttcatgaagaaaaattctaaaaaaggctatttatgggaaagcttagaagtgtagtaatgttatagaaatgttaatgagcagcatgttagggtgtaattgataaaaatcatgaatgtgaatcccacagattcaatttttattaattctaatatgaaagttactacctactaaactataccaataacaatatacatacaactgtactctatagctttgtgtcaccactttaatgcatacatatgatatgaaaataagatttgttacaatataattaatagtaaatttgattgttaaaattaaaaacatattacgtttatgtttaaattggtaaatttggtgggatgatcatgatggatctctctctaactctcaagagttctctcacgaaccctagcccttaaggcatgtcttagacatacgcggtgcttaggacccacctaatttaaagattcaaaaaatattttttttttttaaaattacatatatatttttaattattttgaaaaatacaattttttttttaaaataagggtcaaaaaataaatattttttatgacccactaaatttcagggtcaaccctaccctaaaattttctttttttctctctcttcacctgaatagggggcaccgcacattggcaattggcaatgggtgtgtgcccgaccgagccctggcattcttgttgcagagtttcacggctctcgggcgttaaaa

SEQ ID NO: 6630 - DNA, 1759 bp, Cannabis sativa
aacatttttatgtgatttcatcattatggtgttaaagttgttatgtttatctatacactacactttgtttcacacaagaaaataaaagtagaattcttttgagagacaatctctctaaggaattgtgtggtctgttggttcctaagacccagacaattccagcttaacacattcataattcttggcgggcctgagaaccagaacccgccccattcaagtttatttagaaaatatcatcacccaacaaagcattctcatgagatgtttctatatcagaataaacctcattattatgaacagtaaagcccatataaacctcatcctctctaataagcccagtttgattatcaaaagccattcttcttcttttaagatcaagaaataatagcccatcatttgaatatctcacatttggtgccaatgatttctcagcctcattgaccacccctatttgtagggaatttacttttattcttgacattaaattctccccatgtaatcccccagtattattgtcaagattacctggctgaacacgagattcctgattatgtgggatcactatacgtggaccatcatccccagctggcactggaggtgaactttgaccaccgtgattactgctctcacctccgtctgttgaagaaccaggtctcatggccactcccgatttaggccattttgagccattggcatagtgtcgtcttcttggtagagctttaagttcaaggccatagcttttaacgatctggtcttttagaatgtgaaataatctttcacaaaatttctcaaagtgtccaagtacaccgcatatgaagcaaaatgtgggtaagtcctcatatttaaaggacagatagcatattagaccccccctgtatgtccaacttctttttctttttcaatggcacatccacttgaatctgaacccgaatcctgaaatagtcacgcaaaacacccaagaaattgtttgggtcaaatttgacaaaagtgccaatgtaattaccaacacctcttataattctttcggacataaagccaatttgcatattatgcaattgtacccaaagttcgagtttggtaaggggtacaagatgcaggttttctccttttttaacacgttcaaaaatcaaaggggctcgatcaaaagtccatggactggcttcaataacccttccgatatccacttcatggtaaaattagaatagaaagagggtagggtccaattccttcacatataggcctcttcccggctgccacaacacaaacattttattttgcatagcttgaaagtctattgatctattcgttaagaaacttccaaccaataaccatctatcatcaatttccgataatccatctgctcttgcataaaaaatgaggctcccctcatcgtcctcatctatcgagattgatgcatattgtttatccatgtacgattggtgcgaccaactgggctccatagcaaaaggagagacaaccagaaagaactcgatcaacaaaagaaaacacactcacacgaataaagctagaccactaactctcaaactcactcacataaacaaaaccaccaaacaaccatgtcacaagcaagactcacctctctagatctaccttaatttcatcttacaggcttatacggtgagcctaaccgtacctgtcatcgtgaaacttggggactactgtgcactctacacagcaaatcgtcattgccctggtgtgttattgaagacatcaataatgttgtgcggcaagaaaataa

SEQ ID NO: 6631 - DNA, 1170 bp, Cannabis sativa
cacaattaaaatcaatgcacaatccacgaatgtgagaaactgattaatatatcctagagtgaactttcagaaaaataaaccatagaccagaaaagctaagtgcttctgcaaaaataaaatcactaggccttgataatttgaccagttacattctaaaataaagcttttgtgtggaacgagacctgccagtaattgcctgatttaaaatatttgagcatgttacctgaggaagcggcttctcctgagtcgtgaaggcagtcacagagcaagaagagtttctgaaaatggtgctatcaccataggagaagtcacctgtggacttggtatggattgtatgagtaacaccacccactttgagtttcaacttcttcagcttgttttctcttcccaatccatcagaaacagctactctattatccccaatatcttgatttttaatattgtctccattgctataaacctctgctgacaatgtcaaaagattgaagttttctagaagtgaatgtgaatcaacccgaggccttcgtgatgcgttactccttctctttcttataacagctaactcaggtccatccaaactttccatcattacaaatttgagggttgaatatcaaaatcaaacaacaacattactcttaacctgaacattgtattcaattacaaagagttaatacctataaaagtatctatgagttatatatatacacacacacaccacaagtagttactactacaagcaagaaattagtagaagatttctagtaaatgattaccaagaaaaacacaaatgtagattgcagactacttaggcaaaaaaaaaagtcagtgattacaaaaatggaataaaagttaacaaaattttagataaaaaattcacccaatataccatttacgtgcagaggaaaacagaacacagaagcttaaaacgttctacaaacaaaaaatagaaaagaaatcacaaaactcaaaaccctttttcactatcttccttcacttcctaaccaacaaaacagaaattccagaccctcattttagtacaagagttcattccatggactaccttaaagctcaacacaaacaaacatcccagaagaaagctaagtgatactcataagcaacaatacattttccgttaaaagaacaatcccaggaatttttttcaagagaaac

SEQ ID NO: 6632 - DNA, 905 bp, Cannabis sativa
ccacttttcaggcagcaaagaatgacatttcgtccttaatacaacgttgtctgttggtatttttttttatgatattttagtatacagtcgttgtttggtcgatcatgtgcaacatttgtccattgttctacaatttctctccaagcataaattttacaccaaccgaaataagtgcctcttatgctcggacaaaattggactgtttgggccacataatctctagagatggagtggcagtcaaccgaagcaagatacatgccatgcttgaatggatgatgccaaaaaatattaaacaattacagggttcttaaaacttacgaggaattactgtatgtttgtgaaaggttacagtgagatagcttggccactaatagaacaattaaagaaagataagtttcggtggagtgatgcaacaattttggcttttgaggctcttaagcaagccatgaccaccgctccaatgttaattcttccaaactttgacaaaccttttattgtggaaactaatgcttcaaaatatggtgtggggactgttttgatgcaagagcaacgaatggtggctttttacagtcatgttttgggtacacaagctacattgaggtcagtctatgagaaagagctaatgacttttgtctttgccattcaaaagtggcaaccatacctattgggaatgagatttgcagtgcacacagttcaggagagtttaaaatttggagcaacgtattgttggagcaatgtattttcgctacagagcatcaacgttggatggaaaaattaatgcagtataattttggcattcgagttgtagatgcttagtcgagagtcaatcaacctgtggaattaaaaaatctacttgtatctcaagggattgattggggtgttgtgcaacaagaaattgacaaaga

SEQ ID NO: 6633 - DNA, 1029 bp, Cannabis sativa
gggcttccggcgctcgtcacgatgaagcaacgccccactttttatctcggccgccgcatgaacagtggcgcggccaccgttattttccatataaaggtcaataattttctcagccacttcggcctcatctctgctctcttccaccaatttagcaacttgggctcttgggagcctcatcttgactctcattgggccagaattgggaacagctggcccaccggaagagacatggctggaggaggcccttgccatggaaatgtcggaaacagccctacgagacagcatcaggcactcgagtcggtccttggcgctcatgttgatcccggactgtacccttctcaccgatttgtaatgatcctgctgatgatcagaggaaaccttcggaagctccactagaaaatagagcttctttggtttcagctcttgttgggcctccaatggcttagctctaaccccaaaatgttttacagcttctgaatctaagataacatgacctgggtgatcctttaccacgtccataactgttactggcagtttcagtttgtatgtttctccattgattttcatcacctttactttctttcttcctcctccaatactgttgcccattcttattttgcttgttctttctctctctctctccctcactttacctttttatgtgttttggattggattcgttatgaggattgtggcactacatgagaacgtggctattttataaatggggttttctagtttaggcgaataatttaattaatggagggtgtgattgtgtcaaatcctaaggtgtgaaattaaggaaatactcctgagattcctccatcattacgtgcgtatatttctactaggtgggaacacatggttgaactaaggcaatgctaattttttatatttattttttatgaaaaagaaagacaaaactaattggcttggtgggttaaagtaaatcattttgttttgtcaatttatagggacatgcctaactttattaacagtgtatttgtatttattaatgactttcgatct

SEQ ID NO: 6634 - DNA, 929 bp, Cannabis sativa
  modified_base (794)..(804): a, c, t, g, unknown or other
agggcacaaaacccaacaaatagctccctcaatattgatctcattttcgcgattcaacttgcattttaaagctctttaatgtaatgtcttatacccacattgcaattttgaagatttcaagtccaaaatcgtgccaaagataagtgggattttttctacatatcacctgaaaatgattcgacggacgagattcaactccgaatattaaagattttcatcaacagtcaattttaacctttagatcatcatcaatggccaggattagcccaaagtaattttttaatattttattattattttaataggatctctttctctataaaatgagagctcctctagtttatttttcacattcaaaaaagagtccataagatcatagcatctctctctactttccctctctaaaaattagagctcttgcattagtcaatttcttgtaattattgtgagcaataaaaactcgaagtaggtgtaactttattaccgtcgcgacacagggaatgaattactgtaaatctcttatgtctctctaattacttactcaacttttattttctctttctaatctagcgaggagtgttagtcaaatttttaagtcaacaatagagtttatttcgctaatcgtgtttcattattatctttgagttaaggtaaatcattttattaaaaaaataaataaattttgtcaaaaaaaataatataaataaataagagattagttcataaatacacaaaaataacaaaaaaaaaaataataatacaaaaatacgattgtacagaattttaaatatttnnnnnnnnnnntttattttatttacaaaaaatacaatctctttatgttgtactcttgttaattttttgttattgttttgatgctattttctttttacttttatatagttgtgttattgtttttgtgttatatttat

SEQ ID NO: 6635 - DNA, 2030 bp, Cannabis sativa
aaggaatgatcatgggaaggaattcgaaaactttatattttcttattttcataatggaatgggaatacatcatgagtttttgccctaaaaaatcctcaacaaaatggagtggttgagaggaaaaacaaaacactacaagagatggctcgggtgatgctgcaagccaaggacatgtctaagagtttctgggtagaagcagtcaatactgcctgctacatttgcaatcgagttcatctttgtactggaacatctcagtcagcatgtgagttatggaaaggaaggccatcaaaggtaagtcatatgcacatttttggatgcatttgctatattcttaatgaacgtgatcacttaaggaagtttgatccttgaactgatgaggggatatttcttggctactctatcaacaatcggatttacaggattttcaacaaaagaactctctcagtaacaaaatcaatgaacgtgaagtttgatgatttggaaatgatagaagaatcggctgctaatgatgatgccctagttttgtttggacctggaccaattactactaaaatccatcaagtatatcccaaaactcctactgggtctctcaactctaaacctacatcctcaaatgaaatagaagcagacaccagtggtcaaaatggtgaaccaaaagtcagcagtgctatgcccaaagaaatacaacatgctaaaccatacaaaaatggtccaccctcctcggttcaaaaggctcatcctctagtcgttgtcatttgaaatctgaatgacaccataataaccaggagaaaacttcagaattcattggcatttgcatgctacctatctcaaattgagcccaaaagcgtgatgccctattggatgaattttggctggctgcaatgcaagatgaaatgggaaacattagaagacttggtgtctggattatggttcctcagcctgatggagcaaatatgataggaattaaatggatatttaaaaataagttaaatgaatttggaatagttactcgaaataaagctagacttgtggctcaaggatacaagcaagtggtgggaattgattttgatgagacttttacaacagtggctcgattagaatcactaagactgctacttattattgcgtgtttactgaacattaaaccataatagatggatgttaagagtgcgtttctcaatggtgtaatttgagaggaagtatatgtcaagaaacctcaagaatttgaagacccacactttcccaatcatgtgtacaagctcaacaaagcattgtatggattgaaataagctcttcatgcatggtgtgatcgtcttaccttttttctcatttcccatggatttactcaaagaactgtcgataacactctattcattaaaaatctagaaaatgagatttttgttgctcaaatatatgtagatgatatcattttgtagatcaacttgtgaatgagaggtaagaacatttctgacattaatgactagtgagtttaataggggaccttagtttttttctaggactgcaaatcaaacaattagatcatggcacaatcatatcacagtccaagtatgttaagtccatgctagaaaattttgggtatacacaagtcaagcatgcacacacacccatactgatgtgtgatgagtctggagaccctgtaaatcccattctttactggagcatgataggcagcttaatgtatctcacagccagtcatcttgatatttcgttatgtataggtctatgagccagatatcaaaccaaccctgaatagtcacatctctttgcaatgaaaagaattttcaaataccttgcagggataattaactatggtctttggtattcgtgtgatactgacatatttttggttggctatagtgattctgactaggcagggtgtctagatgataagaaaagtacttcaggggttgtttctacattggtaataatttggtttcttggtatagcaaaaaataacagtctatctctctatccactaccgaggcaggatagttgttggaaattatttt

SEQ ID NO: 6636 - DNA, 1316 bp, Cannabis sativa
ataataataatatataatattaaaaagaaagacattttggtaatagtggggactatggagaaaacgttgtcctaggatgctaattcattggaaagagattctagggaagaaaaagttcaatatagaaacaataataatacaaaggacgggctacataaagagcaaagcctcttgaagcaattaaagctagaggttggcaataatttatttatttatttattatattctcataaaaaatcacaagtaagctttttctcttgtgttttgaaaaaagctaaataaaatccaaccatttcctttttaaatggtatttttaagcaaatattcttctcatggttgtgggggtagaacccgggaaattctttctaatcatcatcatcatcatcatcatcatcattattatcattattatataaacaaatattcatatattatatatataaaaacaaaagtgtgcaatatataatggtctgtatgtattctacaaattaatttggacgtaaaaaaaagatatatatcattatatatacactacacgtcacaaatttaaactaaatataatagtgaaataaataaaatgaaagcattaactaatttgtttattttcaatatcagattatgttggatttattctttaccttcagttttatatataataaaaaaaagagagataagaatgtaaaataaagcctgcgaaatccctgagttatacatatagaaccttcctacgtttcaaagcttaattaactctccaaattaatcattatttctcccactagctaattccaaagcttaattcactttaattttattgttttataatttgctgggagctattgtactttattattgttggcatgcttcaaagagtacaataatacaatataataatcgtaataatgaaggaaatattatttataaaatatataaatttgtggtataaatatttaagattaaattctaattgtaaattaatacttaagtttaatttttgccataataataaccaaattataattatagaattttggtaagtatataactattaagttgccacgtggtaatcactgattgatttaagtaattaattttgttttttaaaaaaaatatgtttaaatatactaataaaaaataaatgtggataataacttgaaatttaacaagtacttcaagaatttttaaaaatataacttaaatattattactcttaaaattaaatttaaatatttatgtggtaaattataaatatagtaaattaagataaaagggttatggataataacatatataagagcctttgttggatttaattgcat

SEQ ID NO: 6637 - DNA, 1754 bp, Cannabis sativa
tcagatatcagtggtgcctaatacactttctagatatgtacgttttgtgattgatcctagtgatactccttaaaagttattacattaaactgtgtatgagacccaatagctggaccaataacgatattgacatataagtggatgctagattggtgccatttagcatttctcattaatatatattcactaataacttaatttttacaagattaattattactatatataatttatatctcatctaatttaatgtttttttctatatgtattcataattaattaatttatttataggctgacagagatcctactcctattcatcgtgctgcaaaagtgttgatcaattctcaattagaggatggtgatttccctcaacaggtaattaattgcatatgttaattatgatatatataactatatgaatttaaacagtgttaattaatatatatcgggtgttctataatgcactctctagaaatttagataaatttacaatataaaaagcagtgttcaacacactgtttgattcttgttttctatattatatgttgaacagtattttttatattgtaaattattctgaatttatcaaaattttacaagatgtcttaaataaatataacatacataatcaaaaaatattagactaaaaaaattcctctgaatactaatttaattttcctcgtgaactatttgcagtaaaatttctcaaagctaattggctgttttaatgaaaatttacagatggctttgggatctttcatgaaaaatggcattctaaattacgtttgctacaaaaatgtcttccctatttgggcgattgctgagtatcgtaatttagttctactaccaactaaatgaattggacaaccgttataagatacttgtgtacgtattgagctttaaatttttaatcgagtctgtgttgtatcacattgcttatgtgtaagtaatttgtggtatttatattatatttagtaactatcaaagcttaaacggaataataaggttttagtaattgaataaataatatgtttggtgtgattttataagaaaataaaaaccaatttctataaaacataatgaaataatattttattttattttttcccaaaaataattaagtgttaagttttttttttttctaatggaattgaagtgtaagttaaggccgagtgtggactgttgttggaaggtacaatttgcaatcttttgtttgtgctggtaacgaggcacttgtcttataacacgtcgtttgtaacaagtattcgcattgtgattcttggttttagaagaatgttgttaaaatcgagttaggtattcttagaaaaaggaacttgcgatttcgaacgtgggtttatttctagacggctgagaaagtcttgcagtgtagggaaatgttggtttgcggacctctttgatgatcatgatgggaatttaggattgtagcaagctattttgaaagtaggtaagccttgtggcttaatttggtgatgatgaatggatttatctttcaaataattacttgctaacattgcaaaaaattacaattaattaatccgatttgaaagagctttttaatgacttattgttttaattaacaaattaactaattaatgaaacagtacactttatgttggttaattaactaatgacagatcacatcaaaaattgttccaaaacattaactgttattatatcatagagatttaatagaaatttatataattacattacacaaattatatatatat

SEQ ID NO: 6638 - DNA, 730 bp, Cannabis sativa
gctcaattatattacagttctagtggggaactaacaatgacaagaaaaaaattgcatgggtgaaatgggagaatatttgtcagcgaaagtctaagggaggattatgatttaaagatttggagttgtttaatcaagcggcaaagcaagtgtggtgattactttaagagcctaattcattacttggttgttatctgaaacataagtatttccagaacttgtctatcttggaggctaaggatagaaatggctcttcccatttgtggtcaagtttagtttgggggttggatttactgcgtaaggggttgaggatgtttgtgggagacgacatgcattttaaggcttttagagatccttggatgccgcagcctagaactttttgtcctataatatctaagcctggggtagattggttagttaaggagttcattgatgataatggttgttggagtttaccagcgttatgccatgtattcttgccaatggatgtagatataatacttggtattctgttaccaagtagtgcttgtagagatcgttggtgttggcattatgatttcgatgggtgttatacagtaagaagtggatatgctctggccttagagttggtgagtgaggagaagggttgttcttcaatgaatttaaccacatggtggaatggcctgtggaatttacgggtgccaccagaaagtcaaaatctttttgtggcggatgttttatcgtgcccttccaa

SEQ ID NO: 6639 - DNA, 1611 bp, Cannabis sativa
caataattccaatgtgatgctatagttataaccaggcaaaccaaataaatcatatttaacaaaattgctaaaaagcatatcttatattaaatgactaaacataccaacaaatatataaccattgtcatgcactcacattattattattattatgaaaaattacattatttaattcttaaacaaatacatatatatttagtattctgatttctatatatatccacaccacagcaaataaatcaacaaacgtgagaaaaagcttttttctattttcctttttctagtgtgtgatgtctgtcactcaagttggccataaaaatgggttggcatataagaatatggagtaggttatttctttttcttttgtttctattatttatttattaattgagattatctttatgagcattcctattaatcacctgttaatatacactaatgcaacgctccataattaattaacagttttcatattatttataatcaaaatatataaaagttttgataatatatttatatatatataaccccatattaaaataccctaagcatttctcttaaattatttgagtgaaaatatacaatgtgcacacattattaaagttgggcagccctttgaaaaaaaaaatattttgggatgctcacaagttgagtacagccatcgattggtcggttggtaagataaagtataaattaattaaataaaaattgattatgctttaatttaaagcctttaaatcatgcacctatataattatatataccaagttaaagacatgtggtgtatatataaattataattagtgacgaatccaaaaatttattccagatctgttattattatgacatcaaaaattagactccttagcttatatataaacggaaaaaaacaaattttcttactacgaaatttttcttgaaaaataattcatcatattaacttggcaatatttttataaactaaaaaagtttagaaggttataaattgtacattaaaaagaagaagatcaagaagaagaaaaatgtaaaatagaagaaaatcaacttcatacgtacatcaatttgtgctcctcctctctcatatggcttttgaaggttacaaagagagttttacattgttaatgtgtggaaagataatagaatatataagatagatggattactccttccattgccaattagttttgagatgaaaccacattcactttatctcaaattctaacaattaacaacaaataccacacatataaggcaaggtgactttgattgagaaaattcttaatgaaattaaaaattagccagccaaaagaggaagatgaagaaaaagaatgattttgacgaactaaaggttttggatatttccatgtgctaatactagcttgattaatacaataaaaaatataaataaaaccattgtgaaagaggctattaatataacaaaagagctgtactgcattgtagtactaggtgtgactgtacgtacccaaataatagtttaaagtgtactaaccctgcttttgaaggaggccagggtgatgtagactttgatttggagtggtaattcagtttatgtttgtgttatgttgaggtataagtattataagcaaatgt

SEQ ID NO: 6640 - DNA, 536 bp, Cannabis sativa
attctgatttctaaactttttcttataaattttaagacaactattcgacaatgcgtaaataatgtattggcaactactttacgaagcatgcaatcagatattactaacaaaatgtagaatcaactattattaaactgatcaacaatgacttttagtttcaggttaagaatccactgtaagaacatggtaaattaacatcaactcaaccaacattatcatataaaaaacttatcgtattagaattgccttttatatgagcaatgttttggattttctgtatgaaatacctattaaaaatattaaaaatagtgtagcttcgatcaacattatcaattgtttgatcatccataaaacgaaaagaaaattgtacgaaaactatattacaacaacattatctaaaaattgatattgtaattttgtatcttcaaattctaattcttaattatcaaaaaaaaaaaaatctaattgctttgctttggcatattattgtagtgtttaccaagatgcctattgaccaaattgtctacatttcatga

SEQ ID NO: 6641 - DNA, 1655 bp, Cannabis sativa
tgtgaagatattaaaatttggtttagtaatatgtaatgaaataaaaaatcacatgggttgggttgatcgggttagaaatatatatttataaatgtacttctctataacaatggcattttttaggaaaattttcaaaagtagttaagattttaaaaagaatgcagaatcctttttttttactacagatattaacttttgtaactaatatttataaaaaaaaaagtttgtaacctatatatatatatattacaattttgtaaatataatatttataaagtaaatagcaaaattaaagctggccttgagatttggtatgccttaaaaaaattaaaattattgggctctttatttaaaaaatatataataactttgaaaattatagaaaaaaaaatatgcatatttttaaaagaaatttaaatatatttttggacttctgtgctgagtgagccctaggcgcagacgtagttagcaaggacgggccctaagcaaaattgatggtacatttgtaattttaatactttccccaagtatataagggttagaaattagaatggttcaacccagcaatatacaaaggcctaatatattattggctttaatatttgaaccactttaaaaaaaataaaaataataaaaataaaatagttacataatcaattataatcatatacagcaatccagcccataataataataataataatatagggttgttattattaattaatcctaagcacaaaatattattgataaaaacaatcataataataccaataaaaaaaaaagcacagtttgttgtttttggcagccaacaaactattatggttcatacctggatattctgttctatctttgttgatgctttggaagaacctgtttagtgttttaagtatttcgatactactaatcttaaagcctatttattacctcaacaatattaatacacttcaatatatagtgtgcattattcaactaatcttgatgaaaattatttaaaaaaaaaatgaaaacaattggtgtattaattaacatataatactgcaattgtaagttgattaattaataatatataaatatataaatctaatacaaagcagccatgacaacgtgagctcattgagttggtcaacatatgcatgcatttttctttttaataatataataaggaaataattggtcaacatttttcccatgtggtgaccccatcaattaagcatttctgtaaatttgaaaattggatatattagagaaagaaaaaaaaatatattaatttcttcatttaattttcattgtattgtattcctttttctccatatttctccatgaaatattttagacaattttttatacttgagagagatataatccaacagtaatactcaaattaattccatttagttttggaatttatctactttttgttataacgactctcaagcattaataccaaatcaattatatccatggaataattccaacgaaagctcagtgcatgggatctctgtccaaattagaacaatatttatctcaaatttttcacaaacatgattccaagtttggatgttttcttttcaagacttaatatataaatatattcgaaattttatagtgtggcccctaaaaataagtgtatgctttctttttgtgtttttgac

SEQ ID NO: 6642 - DNA, 902 bp, Cannabis sativa
gtcaaccaagtgtctagagactaccagacaaatggagaaaagatggttcgttacatagcaaataccaggacgctatttcaacattttaagaactattttgtgaagcacatcccttgggataaaaatgccttctcaaacatgctagctaaattggcaacaaatcttgaagttgagaaatatagactagtccccatcgcacatctacttactccaagcacagagacactggggatgtcagccattgatcattcaacttccttgatggccccaatactaaagtatttggaatcaggcacaatcctggaagatccaataccaagccccttgatctgtgatcatggatggaaagttatacagaagaggattatcgatgacatacctaaggtgcattgttggaactgagataatcactgttaagcatgagatacataaaggattttgtggggatcacacattcgaagcaagtctttccaagaaaatcattttccaaggttatttttggcctaccatgcagaatgattgcaatgaatatgttcgtaaaaatgcaaacaataccagcatttttccaaagttccatgagctccaccaacagagataaccctcatgagctgtccttggccatttattgtttggggaatgacatagtggcatcatttctaaatggaaggggaagagtcaaatttgccatcgtagttgttgactacttcactaaatgggtggaagttgaacctatgaacatagtgacttccaaaaaggcctaggacttcacaatcaagaagattgtgtgaagatatggacttccacaaaaaatagattccaataatggaaagtagtttgacagtgatcaattcactaaatttatgtcaattgtggaatcatcaaaagctttttagctatggcca

SEQ ID NO: 6643 - DNA, 610 bp, Cannabis sativa
tggatcacctttctcgtgttcttcttctaatctctccagtttttcccatttatacttccgtttctctttgattttcattcatcatggatcccctcactagcaagatgaaggccaaaattactttaactgaagacgaggaatctgtttttgaatttcatgactctgaagctatttcaccatcggtctcaattgacacagtcctatatgcaaggatcctcactaaaaagaaagtgtggctgtccactttgcaaaaccaaatgtccgatcactgggatggaaggtaccctgttaaagtctctgaatcatctgatatgttcatgttaactttcggttgtgaaggagacaaaattcgtgtgctacaccgtgaaccttaccatttccaaaaccaccacattgttttgcattctcctgaaattgggaagaattttgtctctgaagatcttaagtttactccattttgggtgcaagtttttcgtcttccattcctcagcaagaccaaatctttggcaattgctcttggtaatattattggagagtatattgatgtgtttgaagattccctaaatgaaggatgggggccgttttcgcgtatccgagtcaaaattgatgt

SEQ ID NO: 6644 - DNA, 2731 bp, Cannabis sativa
aaatttataaattttattatgaagcaagtagactaatgtcactaccatgcatgattattaagattattgactcaattaaataaataaaaatcacccaaaataatattaaataaaataaaggacatcagcaacaaatgatgatgactcacatagcctccttttgcatgcttctattttttaagaataaatttgagtcaaataatgaagaagcttatttctatagtagtctccattacgtgttgaaacttaattattattattattataattagaaaaaaatatataaaattaattatttttattttattttatatttaattaaagttcatagaaatatatactaataatcaaactacaacaacactgcttggaatttttaaaatggtatcaaatatttcttaccaatcaccacatgaacccaagaatttaaataatggtaattttttttcttgtaaattaatttttattatcattgattacacatagagatcttatcatatttcctaggaatatatatatatatatatattatatatatatatatgttaggtagggtacgtatatcatattctacttattgaagtaaaaaaataattaaaattttcttggtcttaaaaaaataataatattatagagctttcaacaaataattaataaaaaggattatatataattaattaataaattatattgccattttcctaaaaataataaaaaaaattacaaggtcattttgtataggcaaccaccaccttcaaatatatatttgataatgacttaatatgtacaaaatatgactttccacatcgtttaaccaacaataaaaaaataaaaataaaaatattttagaatatgacattataaaaataataatagtaaataaataaaaaataatcaacaataataataataataaaaaaattaagggtaaatataatggcataaattcttaaaattttaagtttataagcataaaccaatgattttttttagcagcatagtactcaatctttgtaaaactgtaatttttctccaatttcatcaatctatactttgatattgtcttaaacagaacacatataagactcatattctatatcgagtctggatgaaaacatgtagtattagtatcagttacttctaaatcttcttttaataaattcaaaacagtctgtactgataaaactggaaaaaaattacagttttataaacattgagtacttatatcactaaaaaaatcattaaatttatgctacttacaaactcaaaactttaaatacatgctgtagtttaccaaaaaaaaaaaaaaactcaataatataatataatataatataatagaacatgtagctatatttctaaaatgttatgccaaaaataattttttttgaataaaagtaactataaacttgttcaactaatcatcaaatttcattcacaaatttttcaaattttctttgcataacactacacttcaaagtctctatcttttaatcaatctatgaatcttattgagactaatcaaagagcttaattaagactaatatatctatttttgcatcaacaactacaatttcaaacacttttatttctcctccttcccaagattattttttttttccaatgcaaaacaaaaagaaaattgccatttttccttctgttcgatttttatttgataaatcacaccaaatataacttttatccaagtattaaaatcttatcatagaattaagatttggaagctactaagtataatgacaagttgattcaattatatttcaaaactagacaaaaatttcaacaactagataagattactatatatcttgaaatataattaaagcttttaatatcaagtcattataagataaagcaagaattataaacaacttcaacattaaggtatttggtttttgtagaaaagtatgtagataaaacaaccatctttatcacaaagcataagaaaaccaaagaatgaaaaggttgtgacaacaaacaaacaattactaaacaacaaatagagaaccggttcaattcaacaatgcttcttactacccttttctatatttctagcttttacctcatactttaaacttgcataaaaagaaataataaataaataatttaagattgaatgaaaatttaggtagctcatgttgaccaaagaagcttctaaattaaacatatgaaaagaaaaccaaatttaacttgttggaaccaattacaaatagctttcgcactaatccccgcgcggtgaatagatttcaaatcatgccatataaaaccatctaacgagagcattccagtactactcttctccaaacacgcttaattacggagttctgatgacatctggtgcattggtgctggtattattgcacgcgtttcaaagaaaacatcttctctgtgctataaccataaggattgattatctaaatgatgctgcaatgaaacagctcccacagtcaataaaattcttcacacaataaaatgcaaagtttcatctttttaactttaatccacaccaaacaagataagaagagagcattgtaatccaacagacacaatagactacatctaattcaaactagcttgtatactagaagacttaaacagctatatctatgatgagcatgaaagaaaacagcagcagaaacattaaactctctgtggttttaaggaaatgtgcatgcatacatacattattcgaaaaacttgtataatggcaagc

SEQ ID NO: 6645 - DNA, 748 bp, Cannabis sativa
aaaatcatgagatgtgtcacatctgatggtttttcatttatgattaatggggaagttcaaggggtagttgttccacagcggggtttgaggcaaggggatcccctatcccctatcccctatcccctatcccctttcctatttctattttgtgcgaaagctttctctagtttgattcagaatgaagaagttatgggaactctctggggtattcggtttggtaggcgaggtgttaatgtgtctcacctttcatttgcagatgatagtttgattttctttgatgctactagagaggactgccaccgattttaggaacttttgagaaaatatacagttgcttcggatcaaattatatattttcataaatttgagatttgcttcgcaagtttgatagaagatgataccaaacaaaagttggttgacttgatgggtgttcaacttgttgcaaaccatggtaagtaccttggcctgccctcctttgttggtagaaataaaatgaaactttttgatgtcattaaaaataaggtatgggcaaaactacgaggatggaaaaactccttgttttctgtggttgggaaagagattcttataaaggctatcattcaagcaattcccacatatacgatgagttgttttcgtatgtcaaagagtactatttagtagtctaaaatgggaacaaggttttggtggggctcttcaaagaaaaatgataagatacactggtgcaaaaaggtgggttgggctttcgaga

SEQ ID NO: 6646 - DNA, 559 bp, Cannabis sativa
ggagccggaaaccatcgctttcgatttctctcccttcgaaaacaacgcagtggattcaattcggagatccgaacccgagagaatctgtagaggagaaagctagcgaggaagaccagactcactacagaggggttcggagacggccgtggggaaagtacgcggcggagatccgagacccgaaccggaaaggctctcgggtttggctcggaacttacgacacagccattgatgctgctaaagcttacgaccgagccgcttttaggcttcgtggctcaaaagccatactcaactttccgttagaagccggtaactataaatgcagtagttccgttgtccatatgaaacgacgtcgtgaagaggaagaagcagctgaacgcaatgcggtagaggaagtgaagaaggagaagttaacggagtttgatgatgagacaatcagttacataaacgacatgccgttgacgccgtcagattggacggaagggaagggggctctttggccgttatctccacatcctatgttgggttattcttattcagagttactaattgcataaaggat

SEQ ID NO: 6647 - DNA, 912 bp, Cannabis sativa
ttaaattgttaccttttatgggcatgtcaatcaaaccatggtagttaatcatctcaaagataaagggtaaaaaattgtccttattcttcgactcgacacattttgaagaattcaaaacaaaattaacatctccaagtgtcatccaggggccaccaaactttacaccaagattcaacatatccaacttgaattttttcttttaataaaaataaggtgggccacacacaggacaaaagccaatggtgattagcagggtcaaagtacacaataccataaatttaattttcggataaacaaatattctcaaaaataaatccaaatttctaagctaacaaaatacccctacacaccccaaaacagcaacaacaatattattataaaagtataaattttttagaagacgtactaaaggagtagcttccactttcaattcagtcaaaaagatgaaatccagagagcacgaccgaatgaggctttcagttcaagaaccgtaaaggtctatcccaaccctctacacttccttgcgacacctctcatggctcctttggacgggataccaaatcctcctccatagatgtaacactagcaagggtcaatccaacttgtgagccttcatcttcaattataacaacttctctctctggggtgataatatcagtaagtcgagctcttttcttccaagtcgtgagcctagaggactgtcctagagaaattggcttgtccacatggtaagattcagcaccaaaatggtttgacactttgtcctcaatctcttttgagcatttaaaaggttctttgaatgaggcattgtgctcatttgcattgcgttttgatagtcctagaccaactggaaaatctcttctaactaggggtgtttgtggtgcgggaagtgcggtttttgactattttttc

SEQ ID NO: 6648 - DNA, 729 bp, Cannabis sativa
caaacgtaccctcaacctctcacccagaaaatgtcccacccttacatggtcaaataccaccctaaatccccatctaacattaccataaatatcttctcataccataaattcttctacccttttccctcagcctactgttacaattgaacagaatgcatattttgcatctgatgtgatcacagttcctacacctgagatgaattatgtcgctacatttgagatgcatcatgctcctgcacctgagatgattcttcttcttcctcctaaatgcatgcaactgctgatctaacttccagcacagttcctagagttcatgcaatgaagactaaatctcaaattggtgtttacaagccaaaggcttatctatcaacaaagcatccattaaaagaatctcttctaccaattgaaccaagatctatccagcaagctctcaaagattctaaatggtttcattctattaaaagagaaaatactgcattaatcaagtcaaggacatggacattagttccccatgatcctcacatgaatattattaacaaaaaatgggtctatagaataaagcttcatgcagatagcacattgaacacttacaagtctaggcttgttgccaagggataccataaatttatcatgaagagactttcagtcctttggtgaaacccacaactgtttgaacagttctctccagtagtctcatcacattggtgtgtcaaatatgttagtaatact

SEQ ID NO: 6649 - DNA, 1076 bp, Cannabis sativa
tttgacatatattgcttgtcacttttggtagtatctttacatactcaaaaggggatcttcccttttgattaactgtaatgagcatatcaacaaattactctcctctgctaagtaacaagaaatgtttgtgtcaacatttatgtttaggtaaaatgaaaactaagagagtcccacaggctaatttgtcagttactttttaaatggaaccccataaatcttaccatacacaaaactctatcctacttttcaactacacttccacattcttaacgagtatcaaatcctaacctactttctcaaccacacttctacataacaaaaacaaaatccgaaaagtagaaaatttaatcaaggtgtaatatatcaccatagtattaaagtcatgccatcttggtttttaaattatctcactttattaagattcttagaaaggttaccttccccacccatcccaacggggttgatatgtctctcgaataggagcgtctggaaaggcgcatgagaagcatggtgctcctttgccaccagttgtacgatactgattggcatagcttaagtctcccaccattaaaatcattgagggattgttttgaaccaaatgatcaatagttgtggtagtattgctagtcagtcccaaatctccaacaacagctatccggttaggatatgcattcgggctaggctttggcaaagtttcaaacatgtgttcttcactcaaagctggaatagagctatccccacacttgtaaaaatatttagttcctggttcaaggcctacaacagaagaaagataagtacccttttatctctttcctttcactaatcatctattaggtgttcaaacaatctcaagctctaactctaacacatatcatgaactgaaaccagttcaaaagaaaagaaccaaattttcattgctagctgtttagaaagagataagaatttgtgaccatatcagttaggtaatgagtgatttcaagggtttgaacaaggaaaatttcatgtatacacagttcttcaaagcattgaaagatcagtaaagcataaattactattacttgattattaaccatgaa

SEQ ID NO: 6650 - DNA, 776 bp, Cannabis sativa
agtttataaatccacaaagcatacattttagataagtgttaacgtaaatttttattaaccaataaataagtttttatataataaataaactttaagttattaatgaataataataataatttatataaatagcagaaaattttttaacgtagttttgaagttaattcttcatactcgacaagttcatattatttttggtattttacgaagtttatataaaatgcagaatacaatatattatttgtgagttctcttctttctttgtaaattggtcgtcctttgttctttgggttctctccttgggaatctttgcagtttcatatttacgtcacatgtgataataataataaataattgctatagctgctctttgtttttatttataaacggttatgctgattacacctctctttcttgcaatacaaaatgatcatcttaggatgctttgttctgaaagtaacttttgcgtataagtataatttgggacatgttcctcacgtgttttgtaaatgttgggagaggcgaatgcgagacactaccatgatgtaataactctgatatgcattatactgggtgtacgtatttttcttagtctttcaacatactcccgagtatgtaggtcaacgagttgcaaactcttaaagaattcattatttatcatttccatcacactatcattatgttatgtactctgtatatttcgaggtagacattctatattgattattcatctcgttagtcttataaagcgataattattatttatggctcgtcct

SEQ ID NO: 6651 - DNA, 1597 bp, Cannabis sativa
tagttcttacatatttcatatatagagacaaaacccccaatgcgtttatgggtgttgaccttgatttctatacaatattgtatctttctcccactccaaagataatatatttctttgtgaatacttattgttcttttgaatcaaccatttgggttaggtatattcttcatttaggcaaaacaaataattataataatatccacatctcaatatagattttcactaattactatgaagccaaattttattgataaagtattttgccaaacaaaatagttattttattctctttttccttttaaaggtaaatggaaatttcattaagtaaaccaaatatagtttattacatgcaaaaatggctcacttagtataatcaacaaaaataaactaactaaatcgtttacattaaacatgctataaagttattaggtgattctacaatgcaccttcttaaatggatatactgatgcgttcttttacttgtttcggcattcagaagaattttttagtctattttttttatattcatgtacgttatagcaatttaagatatcctacaaatttttgagaaattcaaaataatttacaatatagaaaatgtttaaacagtctatgttacatgcgtataaaataaaatagtcacgcatacaacacactatttgaacgcagttttcggcgtgttaaacttttctaaatttcttacaattttgcaggatatcttaaataactataatttacatgatcatgtcatgagaaaaaatttgactaaaaaattatttcggatactaaaacggatagagatgtattagtgcatcctttttaagaggatgcattatagaattttccaaagttatttattagttatttaatagttacaattattctttttaaatttatattattttttctagaaaataatatttaatatatgagtattgttataaaacattagtagtgtttaacaccggtggcggaggaaatgggagcatgtggaatcatttgctcccctcaactttttattcatataaatttttgagtattttatattttaactccataatttttttttatttatgtccttacatatttttatatttgtcctcataaaatttatcttttttatttttatcccatatatttttatttgtagttttcattaatgcttcaaaaaaaaaaaaaacatttttgcccccattaaattattgggctaactccgccattgtgtagcaccatggtggtgccttgcgattgaattggttaacgatattctataaaaattattttattaatttatatggattcaatacttaccaataatcatatgacgtgttgtgtcttttagcatttctctaaacacatatatttactccacactcaacacttttttggaatgtcattaattaattttctacaaagattatcaaaagaaaagtgagaaaaaatcatgtatgaggtaactatttcaatttttttttcttcctctctaagttataatattttttttcttattaataatacttttgccaaaacattatggaaaactagagattacaatatcacaagtaaaataataatgcatatcttgtacaagaggatt

SEQ ID NO: 6652 - DNA, 779 bp, Cannabis sativa
tatctctctatttcataattttattatatatttattttatataactattaagtacttaatttttgattggttgacttgatattagagtcatcagattttccaatcaactaacctctcactatatagttttactattttgatgttctcatgaattgtacggacaccaattgtttttcatgccttagcacaatccaaatcatttgaagtgaaagtatcatcatcatcatcataattatataccaaaaggtctaaatataagaagaagaatataatatatatatatatatatactataattattaagagatcatacattaattacacaactttataatttactcatcaaaattacaaggctagaagtagaaaattcctagagctcataacaaagacataataataaatatgaacactatgagagaaaagactacttgattaatatatatctactcttaattactacactacttttacatatttatatatataaaaacttaaaccataatcaagtgttgttgtgcttcaattcttaactcttctttcattcttctaataaactcatcaaacttcttgttcagttcttctgtgctaagctttccatttcccaattcttcttcttcttcatcatcttcatcttcttctgaccaactaaattcttcttctttttcttgaacttgtactagtgaagtttcttcttcttcttcttctttttgattattcgaaacggggaattcgctttcttgttcttcattcttatgatcttccaagatagttttcac

SEQ ID NO: 6653 - DNA, 766 bp, Cannabis sativa
tgacttcctaggaggcctgggcgagtgacttcctaggaggcctgggcgagtgactctgtcactcccagggccatgtcactttttcgctctcatggccgagggactttgtcattcttaaggcctttctcacctaacctcaaaaagtacatatgccatttttcggggttaacacttgctccctagtctccaagaattcatttaagtgttcttgggggactagattttagtgtgtcttttggatgtcttgtggatatctttccttggcacgtacttcaagacataacctactagatacatgggaggtttctctttattcaccttcacttcattacttcatctttggcctgatgtaaatttgctagccttttttccgagacgtcccaggtttgactcccctttaagtcattcatttgcgtttgtttatatttattttatgtcaccaatttttttggtgacattgtcactctttgaggccaagtgactcttcatgaggcttggttgagcggctttccacgaggctaggcaagtggctttttacgagacttggccgagtgacttttctcgaggcttggcagagtgaattttcatgagacttggccgagtgatttctcacgaggcttggccgagtgacttctcacgagtattggctgagtgacttttcacgaggcttggctgagtgactttaaggcttggccaagtgacttctcacgaggattggtcaagtgacttctctcgaggcttgaccgagtgacttctcaagaggctt

SEQ ID NO: 6654 - DNA, 1233 bp, Cannabis sativa
tcacctaaacaaaaccccccattttcgagccctatagttctccacatttgctcggaagcgatcatccaattccaaacacttctagccgctcatacatgctcgaccgcaaactcctttagagtcaaaaaaatgctcaaaaatttgctcctgaaatcgagcccttatgctttcctcttgggctcgaatctgtgcttggatatactctccccattctgaaccttcctcttcatctaggctcgacacatgtttcaaacctctagtcttatgtgagtcgtgcatctactattttggctcccaactccaagccacactcatgtgatgtgtggtctgaaatttgctcctatatatctcttatcatatataaatataaataataaaccatatttttatcttagtataatatattagtcaatatgggttgatcaaagctttcaattgaattaatgatatccaagaagagatactacctcattatgtgatgatatttattggaaccaaaaaactgatatgtgctatgcttgacttatggtacctgatacattttagtgttgcttaataaaggctctaccaatactccctcctcctcaaattttttgcacattctatgcaagccaacgtttttgttgagacacgtatcagctcagaatgtactatgggtttagaaggtgtggatttagagaagaaggtgtgggtgaagttgtcgagagaagaagaaaagcaaaacaaaaggaaaaaaataaaaaaaaaaaaaagaaaaggacaaaaaaaaaataaaagaaaaatttattttttaaaatttaaataatttttttactgtgtcacttatgtttggacaaaaatataaaatgtaaaacgaaatgtgaatttagtagattttaccgtcaaattactaaaaaataaaattcaaataattttacgaataatatctctatttttaataaagtgctaggaacttagaaaaattcattaaacaattgtttaacttgtagcttttggaatatttttatgaataagaattggttcattaaccaagattttttcaaatagacatatgactggtatggtatgaaatgtgactttttactattgacgatttagcagtccaaaaccataaaccgaagagagcctgcccttcggttaccttttattttcactttaattttcatactagcttaattatttttgcaattattaataattttttactttaagattattctttggttttgaatc

SEQ ID NO: 6655 - DNA, 1335 bp, Cannabis sativa
acataagttttcacctcgaagtcgggcttacatattcattggataccctttaggaatgaaagcatatttgcttcttgacatagaaaccaaacacgtttacatttcccgagatgtcgtgttctatgaacatatattccccttctcaactattaacactcacactgaactcaataactgtcttaatcaggctattttaccctgctctagaccaattacacagcaatctggtgctgtacctcaggtttcaccaccagcaaatccaattcagcaaaatactgctgcaattcagcaaagtaatgctgcaactcaggcaaatcctgatgcacttcagcaaaatcctaatgcaaatcagcataataatgctgcaattcagcaaaatatcgctgcacttcagcaaaatcctgatgcaattcagcaaaataatgttgcataccagcaaaatcctgatgcaaatcagcataataatgctgcaattctgcaaaatatcgctgcacttcagcaaaatcctgatgcaattcagcaaaataatgctacaattcagcaaaacatcgctgcaattcagcagcatcctgatgcaattcagtaaaataatgctgcgcttcagcaaaatgttgttgtccttcagaaaaataatgctgcctattcccaagataatactacaattcagcacaccattgctgttacacagcaaaacactgctgcaccaagcaacaataatgatgctgaccacaatacattacacaccaataatcacccctctatcaagtctaacacacaacaaaaaccacatcctacggctcccattaccacaagtgacagacctagaaaaaaaccagcacacctacttgattatgtatgtcacacatctaccactgctcatcctattgagctatatctttcttacataaaactccatcctactttctgtgcttctgttcttgctgcctatacccaagctgagcctaaaaattatgctgaagcttctctttttcagcactggctcgaggctatggacaatgaaacccaagccttagaaaaaaagcacacatggatcattacaaaacttccccaggcaaaaaagctatcggttgcaagtcggtttataaagttaaatacaatgaacatggtgatgttgaaagattcaaagcccgtcttgttgccaaagacttcaatcaaagacaaggcatcgatttttcccaaactttttcccccgtggccaagtttaatacccttaaaatattcttagcattggctgccatgtacaattggcatgttcatcaattggacattaacaatgctaagaatattctgagcatttatggtctcaaacaagcc

SEQ ID NO: 6656 - DNA, 658 bp, Cannabis sativa
aaaataaggaaaattctcgaataatttctccagaaaaagtcccaaagtgcccccgattgagatacgtcaacctaggcacccattatggccttgggcatgcactgggcgcacatgtaggggtcaacatcttcgaaattagttttattgatgctcaattttttttttctggtgacaagtgctccacagatttatattttgtcaaatttgcacaggtagaacttggtaaacgaaatcggtacccaggtggaaatgtcaactcaggcacccaaagttttgtatgggcttcttcgagatgttgttgatgaaaattaagtcatgtccttgcaatgttccctgatggatttgaggaattggggtccaaatatgtctctagaaacctaaaatctaaccccagtatgcccagatcgactatatgtcaacttggacgcccattaggacttttgggtgcccagattccgtttcatgtagacttaaatccaaagtctaaaacttggttggaacatgtctctcatgtatcttaggacaattgctaaatagatttcccataagaagttgataagaactagaacttatgcaagatggggcacaggatgtcaacctgggtttccagcactgatgttgtacctaggttaatccctgggatgtcaacgtgacatcc

SEQ ID NO: 6657 - DNA, 561 bp, Cannabis sativa
aaaatacacaaaattaatgctaaaaacgaaaagggcacgtgaaaaatcaactagaaaaactagaataagatctcgaataagaaattaccatcaaaggatagtgaattgacaggaggattgatgatggtgatcaaagccactccatcatcaccgacttccatgacagtccgaccctttgcattggtacccatgattctctatctctctctctctctaaactctggttgtcgaagtgaagaaaaagaaggtattttgcaggttaaattgaaaggaaggaaaatggaaaggagtgaaggaaggaaggaatgaataaggtagttggaataggtatgaatatgattttattattgtagcggccgtgggaatcggtgtcgtgcccgacccgactttggtagtgtgacgtactaaatgcaacgtttttggaactaaagttgtcagctttgttgggatttgtattgggagagtttgatcatcacagtatgtaatgtatgtatgtatgtatacatgttcatgctttatgaatgcccatgctcctccactactcgccttttctgccgtctg

SEQ ID NO: 6658 - DNA, 1054 bp, Cannabis sativa
aacaaaattgaatgaggaataatgattcgaattttacacgcttgtgtgtaacattattaagagatccacacagttacagttacagtgtctatttgactatatatggtgggtggggtgttaatatgctaattatataatatttaacattattattgtataagagttatttaattttaaaatatgtttgaagattagtttaatacccccatttcaaccccatttcaaaaaagtttcaaaaaagaaaagaaaagaaaaaaataataatttaatatccggcttcctatcatgattttgatctattttccaattaaaggacttatatggttttggttggttttacaatatgcacctcacttaaatagttatattctaattaatttcaaattgtttttgtatcaataaaaaaaaattagtctaaatttttctataattgcatacgttataattattaaaaaaaatttaaaataatttataatgtaaaatttaatgttgaaatagtttatatcacacgcgtataaataaaaaaatcacgcatataataaactctttaaattctatttttaacttgttaaattttttcgaatttctcaaaattttaacaaatgtcttaaataattaaaacttatacaatcataaaaaaatttagactaaatatttttttaaataccaaaataaaaaagtacatcactgcactcattttaaagggtttcaaaaaagtgtattgtaaaattttacttaaaaaaaaacttatattttattaagttttggtatacaccattcattttattttcgtaggattttttctagttgcaagttgcaaattaataagtaacttgagattaccaaatttttcatgaactttatttgttcactttttttttttttcaataattataatatatacatgtataattgtagcatttcttaacaataaaataagtatttttttagctaaataaaataaaaacataataaatattctatattttaacattgtgaatttgaattagtcggagaattattaacgggtaaaaaaaattcaaaaattcgattc

SEQ ID NO: 6659 - DNA, 558 bp, Cannabis sativa
taactggaaaggaataaaatcacataataagcaaaacacacatcaatgcataccttgcagaaggaaacagccaagggcggagtcacatcgccgttgtgctgtacagctacagccccgatttctttgaaacacgaggaggcgtcgctgatatgcggtcgctttcgaactgaaaaaacactcgaagcaattagattcagctataaacatataaagattagaaaatgtatgtacgaagggatgaagcgagatggatatatttacctctgaatccgcttagctccctcaatctaacgtcttggaaaagtgattgaggattgaggaagtccattgaagagtctggaaaagtcagtgagttgagtagagagagaaggagagaggtgtggagtggtggatctgattctgaagcctctttcttgttctttttctttttccattttattttctctggcgttggcgggaactcgctatttcgatgttttgagtaataaaatggagggaaatggtcgactattcccggcactcttccttcccctaaacggaacctttttaattattttg

SEQ ID NO: 6660 - DNA, 633 bp, Cannabis sativa
catctcaatcgagtcatgaatgtggtacgtgtcagcaacgacgcaaagtgcttgtgctttcctctaaccctgggatgctctgctgaagaatagttcaaaaaattggaaccaggctccgtgagctattggaacaaactacagaaaaacttccagaggtaatttgtcgttgccagaataatcaacttggaggcaacgtgttaacaaacatcaaacaactacccatggaaacactaaagagtttcattagaccaaaaaagtagacgatgggcaataattggccctattgcgtgttgggatccagacaggttcccttttctggattgaactataacgtgtatcctaataattaagtatttgttatatctaatatctaactatgaatgtcatgccacattattgaaatgactagtatttttcttgtaaaaaagaaatcaataacaatgtcatgttcataccaatatgatttactacgtgtgatccactacttttttttttccatttattgttgataagtggtttccttaagttgatatagtattcaatgttggtggttttattaatcttggcagagcttggatgtgcatcttttattttctttgacaaaagctaggaagaagtaagtattgctttctt

SEQ ID NO: 6661 - DNA, 1043 bp, Cannabis sativa
atagacaaagataagaatcaggtttcgactttctgtcattaaggaatgaaaattatctttccaaaattttagatcctcaagtgacaaaagatgcacttgagaaggatgttgaggcaatggcagagctagcaatgagatgtttgaggttaagcggtaagatcaatggagttagaaggccggagggaaagaaaaagtagagccatggcaatggaggaagaagaaactgaaattttcagagatgaagagaagtactggtgtattaatactaccagttgttataccatacaaaacacaatacaggaccagagtattgatcatacatcaatggtcaatatgtaagaattggcattatatattttctatacattcacgtacctgttaatggtaattgtgaaatatgattgacgattctagcttactggacattgaatgtctgacagtgtacatgttactgcttaaatgaggaaatagatagagttttataagaagtaatatgtaataactagtattatagttttattggaatggtgatttttgttattacatcataatggctcgtgaactttcttccttgctatttatgaaaaattatagaggtatagcaaaaacaaataaaaagtaaagttaatgctttttttagcaataaaaataataagtgatgcacatgttccattttcaatttgaagtctgaatacaaatcttttatatgtgtaagggatctcattctctaatccggtagtcaagatacagataatgactcaattgtctctatatacattcgactatctagtaagtaaggctatttctatctttgagaagattaaactaatcatgaaaacaaattacgactaaaaagccaaattcaattgtcaactacagactgtacatcaaattaataaaccacttttctacaagttacccgacaaataaaagacagcacctcaaaatcagcttctatggcctggcactacgatcatctgatattgtttcttcagaagatgcatcactgttgataacaatcacttcatctggcttatcagcat

SEQ ID NO: 6662 - DNA, 785 bp, Cannabis sativa
taattagattaaatgactttgtgtacactcctataaatatatacattcaatgtttaaagattaaatcattaattaatttactaacatgttttgagaaataggtcagaatgaacttaatgtctatttaattatcactttgctatgcatatatcccctttgacttaatgagtgttgaagttagattacacagcattaaccatatgaacaacttttttttcccttaaaacaaaacaatataaattgcgtatctgtagctagggtggcaaaacgttgtaccactcaatgcaattacaagcaaaataattttaaggagggttttgttggattcaaataaatttaagccaattcataacatacaacaaatatttattaaaattttgtcctttgtttgtttctctatcatcatgaaaaatgcaaaggctgtaataataaaataaaagagatttattacattttcttcaaaagggtagaaaaggaatttcagtataaatttaaatttagaataccaaacttgtaatttgctgaaaatatgagtgctaatcacataaaacgccacttttgtccaatgcacacacctctctacttgtcaggttataaccaagtgttccacttatgttagtcccagctcatatgtttcaaatttaattgtttttaaatatttttaataaatttttatttttattttcttccttatcggatccaaacggtcctctcaagaaacgaatgttaaatccttgaaaggactcatattattacatcctccaccaacaaaaaaaaaaaaaaaa

SEQ ID NO: 6663 - DNA, 1951 bp, Cannabis sativa
gaaagaaatatcacaaagaggaggatacgttctgtgttccacatgtctgtgatgctaacatcagcagcatctgttaaaagccagtagtctgcctcgctctgagcaaagaaaacagaaaacaccaaaactcggattaacttgttcctttactagtcacatattaatatattcagagcattttcttgaaaattcaattataaacttttgaaagtgctttaaatataaaaacaagttgagtgattctgtgagtgatatcccttggacaaggtcaaaatcaaacttacatcaacatctgagggaacaatcttcatgatcccactcacagaatcctgtggggcattaggatcagcacaagtttcgtgatcatgttgtctctgcaatttggtgctatcatccttgcctccatcagccatatccattgttgctgggttctcattaactccagaacacgatggaatgttcgcagggacctgaaccccatcaatctcctcgaacttttcttcaaattgactataatcaaggtagaataaagatgggcattattaaactcatccaaactcaaagtgatgcaagcacaaaggaaaaggaattaaattaactgcacactgcataagatcaagtcgatatataaccaaaagcaaaatagtacctaactaggtaaacatctattgggcccattgtgctccttaggactaccctatatctcctctggcgataatccacatcctaataagaaattgaaaattcttgctgagaaactcaaagtgtatataaatgaattgaataaaaatgaaacattgtcatatgtcatccactttggaactacctcatcaggatctggaacttccagagtggtaccatgtggagccttgattgctattaaggtttcattctgacaaaagcaataaattattagtttaattcaagaaagacaatgtaagaactgtgccaagcatgaatgataatttgcaagaacagcaataaaccaacctggaagcagggtaaacccttgatatcatcttcagtgacaaacagccacctgaaacaggaagttgtcggagtaattaagccttttgaaataattgtgtaatgttgaagtgactgaatagtgaagaatataaaagagatgtaaacttacttctggttattttcatcttcactcaggtctcttaatctttcttccatttccctgccaaaatttagatgcttctcagcataatcgaaatgttaatcccaaaacaaaatggaagcagaaaaactacaaaccttatttgctcgtctgctgtgcgctcttcaacagataatttctcaacttctgcctgcaaagagagaatatttctgtaaagcaacataactgcaataagatgataaaataaaaatccggttgtttacagcatgacagatgtggaaatgaattaacccgtcctctaactgatatcatcataactaaaggtataaattactcaaaacaacccaccaaccacgcgtatctgagttctgattactttcatcaaatgtattgctaggaatgtgaaaccagtgatgcaagtattgagaactttcaagttccgattacttttgtcaaatgaattactaggaatatgaaaccagtgatgcaagaactgagtaacttcaaggtagaaaaaagacgtgccaaatgaatgagcagaagttctcatttacgaaattaaacgccaaagtagaattctaaccaacccacgggtaacaaagtatattaaatatcagatcatttcattctattactttcacactagtttttgctattaactaaaagtgtgcatccagctgaagaccaacaacactggcagagtgcgctgacactttagaaattaaaataataaagaaggaatactttcacacttcaatacacaaacaccaagctgagataaatgatcagtaagccgagaaaacagattccataatttctgta

SEQ ID NO: 6664 - DNA, 603 bp, Cannabis sativa
tttagcgaaaaaattactcaagctcttcggcggtgacattattatcttcattgaggtttggttttattccactctcattttctctcgatgtctttgaatttcttttagctagtacagttaattactattctatgctttatggggtttgtgaggattttgatttggtgaaccaagctgcacgatgacctaataatatatagtaaattgcttataagctgtttgttgaaatgtctagctgaattttacatggactgatatatattcaacttgtgaaatctctaagcaaatagatatactattttgttaatgaatttgcattcaagtttcagtttacttctgtggacattgttaaaattgatactaaagtaatgatacaagtatgaacatatatgttgtgatatttatatatctatgtatattacatatgtatatgatttttggtgtatgcatattaaaaggaaaaaaaggagacatatcttatagagaaggtattgttcacttttagttgattaaactgtttgccactttcactttgatatagttttttttagtggttcatcttgcctaattttggctccacaaatcaagtttttcgaattgtgt

SEQ ID NO: 6665 - DNA, 598 bp, Cannabis sativa
tcacctctctcgttttctctctcggctgcatagctttcctctggcgactgggaccaaaaatccaccccgccatcttccctttttggcatctctccgactcgccatcttccctttctggcatctctccgactcgccatctctcctcctcgcctgagacaattattaacctctataaatgcttatcttagatccacaacccctaaacccaaaggtcagcacttgttctcattttcttttctttatttctcaacttttcttatctttatctctctcactctctcgctatctctcttgtgcaggtgacaacattcgagctcgtggacgtcgtcgttgacctcgatcgtccgtgttcgacggagcttggtgtttgacagaggttttcggttcctgtatgtcagagggaaaatggattgatttttttaggtttattttgcttcaataatatttttttagttaattaaaaaaaacaatttttatttggtgactatgtttttacatgaaatttgttttaattttgggcgagaaatatgtatagatgtttggatttatgggtaaatgtatatttattttttacctgtatgttgactgaggcggtggg

SEQ ID NO: 6666 - DNA, 525 bp, Cannabis sativa
aaataaaacacacgattatatcaatcatggtagtattagtatacactaatttaaaatttcggatcgaagagctagtttatagggaatcccaaagtgaataattggaattaaaatagaattgtgtcattatccaattctttctctaattttgattaagataaagcatgtggggagtggggtccattaatgaaagtgtggtttagaactacttgtacaatttgattttgtcgttaagatttaactgatagggccttctactactacgtacctacctggaccaggatttggagtctaggcgtccgtacgtgcaaaacagtagtaatataaagaacagaattaatgagtggtagtactgactataattacactgttgtaatgtgtaccatacagattgaagcaccgtggtccagactggagtggtctataccagcacggtgactgttacttagctcatcaaaggctagccatcattgaccctgcttctggggaccaacccctcttcaatgaagacaaatctgttgttgt

SEQ ID NO: 6667 - DNA, 759 bp, Cannabis sativa
aaaaaatatacatagaatgatttaaaaaatttcttaaaaaatacattaaataaataattagtaaattcccgccaacggaatgcggtcacaaaagttgtaagtgaaccaacttcaggaatgcgcgaaagacataaactcttccaaaactcttccaagagcgtcaaagagtgtctccctttcagctctcggttgggagtcattttcggtaacaacactggtaaatgtgtcctttgtaatgctgatggctctgattttgctgctcactttttgtctctctgtccgattacccaaggcctatggctggctagtaaatggaagttgaagattgaaagtatccctctgcattctgatatgcagaggtggttaattggctatctcgctatgcttcgttgtgtagtgggggaatcacaaaagatagggatgaatttctcatctttgctgctgttctttatcataacctttggtttttcaagaatgacatataccataatcacacccaatggattcatactgagatgatgaaaagggtacaacaggagttctcttgtcactggaagtgctatgtggataccaacgtatgcaatgaaggtggttcgaaccccataatgacgagatgggccttaccaagacccggaagaattcgtttgaatgttgattttgccacgaataagggtataggagcggtgggggtagtggtcagagaggctgggggtaacattctcacgctctttgctatcaaaaccacgttcctgtctatta

SEQ ID NO: 6668 - DNA, 602 bp, Cannabis sativa
atcttcatcttccgaactaatgtcatcttcaaaaccgtactctttggctgtttttttcgctgctatcctactcaattcatcttcttctttaaacttaaaacaaggtccaactgtcatatagccacttaatggatttctttttgcgctatcagctagtgcttttaggtcatcatcaacaacttgcttagatagttcaaatgcttttacaatatgaggagcatatcttgaatcttccttagagataaacgttatggcaccacctttagggccaaattgacttgttcggccaacatggtgaacgtatacctcataattaattggcacgtcatagttaatcaccagttcaagctcctttacatctaatcctctagcagcaacactggttgtaatcaacacattgcaaacaccactttccaggtctgatatagttgactcacgatccttttggttcttggcaccgtaaagagataagcaatgataactatgtttgagtagatccccgagcaaagcatcacacttttcccgggaattaacaaaaattagaattttcccttttctttgccattctccaagtatttctaacaatctagaaaacttctcat

SEQ ID NO: 6669 - DNA, 1093 bp, Cannabis sativa
taaaatttttggtttattatgtgtaaatttcatgatttatatcaggaaaatttatacatactacctaaaaaatcacattatttttatgatatttatctttttctttacacttttacagacttttttttttttccacgttgtggaaagtgaaacatagtataatattgcagataactgtaaaaagagaagataactgtaactgtaaaaatcacaacagtttttggagaacaactattaaataactgtaaaaagaaaatacataaaaaagtaacatttttgtcatcgtatttaatttttttttcctcttttggctacttatatagacaactcaaaagagaagataaaagactgaaaaatagtatacatgcatatggtctctacaacttaataaaattgtttgcactcctacaattaagatatttacagcaaattaaactgcaatcgagaagtgaaatcaatgaagaagtcttctgtacagggaatggtaagtccttccggctgatcaaatccgaattcttgttcagccatgcttagcagttctcgaaacttattctcatttaagtacgaaacaggtactgcataacgcttcttttcttgttgttctccaacatagactgcaaagtggtatttaggaatggaggattttttagacttgatcaaataagcaacttctttattaatccccgaaactggtattactactgcaattcgaagagctttgatggtgttgttcaataatccagatgccacactcatcattatcttcttcttcttcttattattattgttgttgttattggtgtggacattacaagaggtagataagtaccctattggcattgccattaataaattctcttaattaattaggtttaattatcagattagagtgcttaattagagaaaatttgattatctagtacttcagttcgtatttataggctggactatctcggttacctacctagtgcatgatctagtactattcaaattagatttattatctaaaaatatctttttttttttttttttgtttgagttagcaaatttttttttttgaaaagagattatttatatttttaaaaatatatat

SEQ ID NO: 6670 - DNA, 987 bp, Cannabis sativa
  modified_base (311)..(311): a, c, t, g, unknown or other
tttattttatcaatcttctagtagaatctggctttgataaaacgggttttgatgttcagggtcaatccctcacatactccctcaattgtttcaatatctagggtcaatccctgacatatctcggggttccaggtaaagcaatcctagttttgtctttggttgctactttgacgaccagctttcctcgtggtagtttgatatggcaaccatagcgagtcgatatctactcacgtcgcaatttttttttaaaaaaaaattgctttaccggagtaactaccccttatactcttgtgactcgctccctctcgagntaaccgaggtgtcccttcctcctacagtggagggttataatctcaggtcactcaagttattgggcagatcgagctgatcatggacatcgtcctgcccctttatatatcgtagaaagtgtcattgcgatatgagaccttctatctcatctttaagttgaagacactctttcgtggtatgaccaatatccccatgatattcataccgcttagttggatcccttttatgcctcgcaacaagctgtaggaaatgaacatgaaaccaggcaatgagtaaccatttcaaccccctattacacctgggacaagaagaagagattcgaacatgcctttggagaagtaatccatatgtaggcagacaatttgacaataatctcaacagcatatctttaattttggaggacatttcaaggcccataatcctccaaaaaccaggactaatagaggagacgggtgaaggtttcaattcttgaattaaattgtatgccgacttgattgaatagacccccaaaacctcattgccccaatgctagatatctgccataattgtgggggatataggtattttataaattaatttcttgtctatattattgaacaaaaatctaaaatgacttccacatcccatgttttgccattaacatccaataaacagctcactttttgatcaaaaagagta

SEQ ID NO: 6671 - DNA, 1207 bp, Cannabis sativa
ttactgggttagatttcacaattaatcaagacttgaagactaccactgatcatgacaatttgtataggaaagtattggagatatcacttattgcctaggagacaaaacaacaaattaagaaatagattgctaaggatgccatcatggcatcaattcctagtgctggtggtaatgtcagtaaggggaatggcagtggcatttctgatcagaaaaaaagaatgatatttttggatcatctgggatgaataagagattttggggaaacaaaggcaaccctcaaggtcgtggtcatacattcaagtcatacccggaatgtcccatgtgtaagaaacaccatcagggtgttgggctaagacttgtttttagtgtggtatggtaggccactttatcagggactttcctcaagctaagaaggaggaacccaagaaaagtaacaaccataatctgggatgtgtgttcatggtaactcaggctgacgctgacgcttgtccatctgttgtgacatgccaaatatctattaatggtttcccttatacaatgttatttgattcttgagctacacactcttatgtgtcaagtagagtgatagaaagttttcataaacctcttaaaggttatgcttcggggtttggaaccttgttaccatatagggagttaatgatctctactagatggattagatccttatctttttggattgaagattgtgagttaactgccaaattgattgagctacagttgtgtgcttttgatataattttggcaatggacttcttatccaagtatggagcaacaatctattgtaagcagaaaatgttggtatttgaacctgatagtgctgacctagctgggtttggggtaaggtatgaggatcatgtatacctagaattacaaatttgaaagctagagacctaatgcacagaggctgcatatggtttctagttaaaattgtggatactagacaaacaattacgactggacccaagagtatgattcttgtatgtgaatttttatatgtactttttagaggatttgtctggattacctcttcacggggaaatggaatttgtcattgagttagttttaggagtagaatcagtatcaaaagcaccctatgaaatggctcttgctgagctaagggaattaaagattcaattacaagagtttcttgatcttggattcattaggctgagcttctcactatggg

SEQ ID NO: 6672 - DNA, 1229 bp, Cannabis sativa
caatttaaatagcatttataaaatgtagtacgaacctcagagtaattttgcttattttagttatatttttgaaagtatttatttattagttgttgtaggtagtggtactcacatgttattctatactttgtgagtgatgtaacttattaggagtgtaaatggatcgggtcagatatgatatgtctatgatccgacctgattcagatcacgtaatgattcgctctgtcccactccgttagagtagatactcggattggattagatccgacccgacttattcggatcggatttgatctaaactattttttaattttatatctattttaattttgtattagtattatttaatacaataatatatttgatattgacttgtattaatagattgtgtaaaattataatatattttcaataaactcgaccttaacaccaattacgggtcgggttcgagtccgggtttcggggtcttgggtcccgggtccaggttccgggtcgaggtccccggtgtgggtcttgggtccaggtccctggtttcgggtccaggtcccgggtgtggatcttgggtccaggtcccaagtttagtctcgagttcgggtctaggtcccagaactcgagtccaggtcagggtcccaaaactcaagtccaggtttgggtcccgggttcaggtccaggtttgggtctgggtgtccgggtccgagtgtcgggttccaagttcaggtttgggtgtccaggtttgggtctgggtccgagtccgggtccaggtcatgtgtcctaggttcaggtttaggtcacaagtggattgggtccgattctgagtcttgaattaagtttttttaatatattgaaaccagatcggatcaaatttgatccagaaaagaattagacgggccagagcaaatttgatttgagatccaataagtctccgaatatatcggatgagaagtgatccgtcagatcagagctccaacccgatccaactaaatagatctttttgacatgcctataacttatgcagttgcaacatatgttagtagatctattgtctcgagatatatgcttgtcttcgattttgtaattagtcttataacaatttatttattgaattgatgtcatctttacttattagtcacttttgattaaataatcacactacaaagtgtctgttaatccctaatttcttccttttttttaactaacacaacaatattacaccctaagcaaacaaaatc

SEQ ID NO: 6673 - DNA, 1465 bp, Cannabis sativa
caattggaagattctattttttttttcgacaaaatatgtttttttttagctaagtaaaatttttcatcctaaatttttacatatgctacattataatttctggaacatttaaatttttatgcataactttttttaataaaattggacaaaaattcttaaatttaacaatctaaaattttaatatgatttagtacatatcaaaatttaaaggataaaaatttaaattaacattttttttagatatataaaattcatgtcatattcaattgatttattaatttttttttagatagtacttctaatatattaaactttaaaacaagattataatagaaatatgacttttttttatggtagatggataaattacaatttatatatttatatgaggatgtataaaaattctgaaaaaaatttacagttcaatgaatcaattgcaggcatgctaacttttttatttcaaaatatattattattatttttttttaaaggatttcaaaatatattataaatgtgcagcaaaatattttaaaatgagcttactaattattggctttccttttctatgaaaaatgaactttttattatatcaaaatttactaatgaggagaattgaattgctcatttacaattacaaattacaaatacctcctaagtggttaacaaaaacaccattaagtttaaattcaaatttgatatttggtgtgtaaattaaattatcatttttcttttagaatttctctaatccgtttgactatcataaattataaatcctttagtaaataacacatatgcaatgtcattatattttaaacaaaagggcaccaacacaacacaacactctttcaatcaacataaaaatattcttacaaagattcacaccaaaaaaagaaaaatcacatgctcattcatattcataagagaatagaacaaggtaacaaagatagataagaataagagtgggataagattagatagttgaacatttcaatgcttgaaaatacagaggttatatcatctttgcttgcttgtgtgtatttgagtagaaaagtaatatataagtatatctatatacactaatcaaactctaaactcaaagccaacaattcttatcctattttgatatgactaaacttgttattctacaaaatctccttagtgatgccctatttgcatatattaagtaataggagtgttaattacaattttttagtcaacattcatgtttgaaattatatgttagaatattatttatcaaattttttttcatagctgtattcgttataattacaatattattcttgtaaattttaaaaatttttaaatagcttatagtttcgaaaacagagaatgtgatattccggtctaccacgcgtgttcaaaaaactttaaatccattttaaaaatttacagagataatattataaataacgaacaccggcatgaaaaaaaaaaacgaaaaaat

SEQ ID NO: 6674 - DNA, 1360 bp, Cannabis sativa
tatattagagaaaattagcttgggacaccaagtactcaaaatgtgttgaaagccgtaaaccaaaatctcacatatggagtcacgaattatcatacttaaactacatctatcattagaagcttcgatactaagagaactatgtgtagatccaacaagctctcccaaccgagtaagaagcactaggagaattgttgagactctaataatcgacgagaaaatcacaaaacattaagactaaatagaatcattttatttaagtaacattaagaacaaatacaaccaaaatataatttaaaaaagaacataaatataaatataggtaattacaatattaattcaaatttcagtgtcccaataaccattttgaacccaagaagaattatcccaactaaggtagaatccatctgtttttaccaaccaataaattgagttgtgaccaatatctctttgtggttcataaacatgaattgaagcaatgaatcttccccaaaaagcttgtaagtaatttgtactattactttgtttaacatcaaaaatatagggttttccaccccatttcaaagtgtcttggaatcttccttcactattctctgcttcaattctaaactcttttgggtttgtgttatttttaggcaatggatttgaaattatatgaacggtagctaatgaatcaccaaatgttgttttcaaagaaattgaaaataaaaataagaagaagaagaagaagataatatttttagacaaagacattttttttcttcttcttattgttattattgcttgtgtagttttttgggtgctaaatgttatgagtatttatataatttaagactttggttgttaattaatgtcttgatttgatattaaatgataattaaaaaaaagattgtatttagtgatattgtactcatttatgttctaatatttttatttatttatttcaaccatcattaattaattagataccaaaatctacactcatttcgttaatttttttaagaaaaacaattattttattaattaggaaaataatgaacctagctataagaaagtgttaccaattagaaaaacaagaacggaaatttaatttaaaaagattttgaatgtggggcttggtcttgtctaggttcattttgtgatcattaagaatataaaatcaaagttgtcctttttgtaataaagtcattaatatatttataaatgtatttaacacctatgttcattatgatgattatatttcttaatatatacgattttaatgtgctattgtagtggcccaaaataatacaggcccaaagcaatggcccagaaggctcagtgaaaaataagtccattaaactttcatatcttaagaattttt

SEQ ID NO: 6675 - DNA, 3642 bp, Cannabis sativa
catcagccacgaccattctgagtaaagaacaaatgttgttacgggttgtcaaagtggtattgttgctgaagaaaattgaggatttaccaaaattaacctgttggcccgaggcttgttcaaagatagtaagaagatcacgcaccctagaagcttcatccatagtggctttacaatagaggtaactgtcgtctgcgaagagcatatgagacaccctaggtgcaccatttgccactctacaaccatgaagccatcccctcagttcatagtttcgtatcaaagccgaaaaaccttccgcacataagatgaaaatatagggcgaaagtggatcaccttgcctaattcccctttgaggagcaatcggacccatcttcttgtcaccatgaacaatgaaatatgaagcagatctaacacattccatcatcagagtaatccaccccggatcaaagcccaatctcactaacatggcttccaaataactccattcaattctatcgtaggccttgctcatgtctagtttaagagccatgaatccttcttttccttgtctcttacgtttcaagtaatgcaacacttcaaaagacaccatgatattatccgaaatgagtcttcccggtataaaagcactttgatagtgcgagacaatactatccataaccggttttaaacggttagccattaccttagtaatagttttgtataaaacattacacaaagcaatagggcgtaagtccgtcattcgctccggatttctaatcttcgggatgagaacaacattggccttgttagtctcattttcgaacttcccagttgtgaagaaacgttgaacaagcttgacaacatccggaccaattgttgaccagttcttttggtagaatgccggcgttaatccatcaggacctgggctcttgtcaggatgcattccaaaaattgcttggcgcacctcatcctccataacaggcagcaaaaaagcttcattcatctcgggtgtaaccctcctttccacacactcaacaactggttggatcaaagtacgagaagagctaaataaagatgaaaagtaatcagtaattacattctccaaacctgaattccaagagacatccattccttgatcattctttagctgttggatggaattggttttacgtcgtgtattagcagccgcatgaaagaacttggtattttggtcgccttccttaagccaaaactgtttggctctttgcttccaaaacgtctccttttggtcaatgatgtgaagaagttgtttcttaatctccttatacctttggaccgaaaccatatcccttcgactcttcaacgaatcaagctcccttttgcacgcattgatacgttttctgaagttaccagtaattgtttttccccactctccaagtttctccacacaaagttgttgtttgccccaaaagtcatcgttattagtgtcctcccagcaaccttgtataatctcataacacattggttctttgagccatgcattttcgaatttgaagcttcggattccactcctttggatgataggctctggttccaagaaaagaggacaatggtccgaggttgagtggtgcaaattatgtaattttgcatttgggaatttttgcaaccaacccgagttgactatggctctatctaatctcacttccacccaattatcacctcctctatttttctcccaagtataaggatgaccaataagctccatatcggttaaatcacactcattcaacgcttgcaaaaaaccttcaatgagacctctaggatatctattgccaccacgtttatcctcttgacaaacaatgttgtttaagtcaccaataacgcaccacggatggtttagacgggtattaagctcacgaatcaagttccaagtttgccatcgtaagtgtcttcgaggttcaccatacactcctgtaagtctccaatgctctcgggtaccaccagtaacaataaagtctatatggctttgagaaaagccataaatataaccatcattttgtcttttccacaacaaggctaaacctccaccacgcccctgggcctccacacaaaacaccccctcaaagcccaaatatctcccaacccaatctactctacttctcacacacttagtctcacacaaaaaaataaagtcgggcttcttttgagaaacgatctcttttaagaattgtacagtccatgggttcccaagcccacggcaattccagctgaataggttcataatccttggcgggcctgtgcgccagagcccgccccaattgagtttttttgcatcagtgatgtattatactcacccatcacgtgatcaacatcatacacttcatgcatatcatctcccataaccgaaacttcctgagccacctcatcaccacttcccatatttattctccttcttttttggtcaattaccaactgcctatcactccccttctctccattctctcccattatcattttgccttttttatccgcattcaatcccccctcattcagctcaccattaaggtgcaggatcttatctcctccctcaatctctccaccaatcactcccgtatcaatcacccttgattgcgcttgaggatttccagtcgacgatctaaccggcgccggagaagcagaggactccccaccatgtttaaccgcaatttctggacgtaaccacctcgcgccaatggtgtgtgagcgtctccgaggcgctgctttcaggcccaaatcataggctttaaccagtaagtgtggaggtgtgtcgaaagccttctcgcagaacctttcggagtggcctaacagaccacatacaaagcaaaaagtagtcaaatcttcatatttgaaaagtgcagtacactctgggccatttttcatttgaagttttcttccttttttcagaggtttgtctacccgaatacacacccttattctcagataatctctccatcccccgataaaattgtttggatccattttaacatatgtaccaatgtagttgcccaggtccttcaacactctttcggatcgaaagccagctattaaaccatgaatttgaatccaaaaacataacccaacaggggcaatacatcgtggattctcccctgccttaagtctttcgaagatcaaaggaattctatcaaacgtccacgggcttccttccataacacgatcaatatccatatcatgataaaattggaacaagaatagattcggttcaagttccttaacaaaaagcccacgaacaggtcgccatagagaggccatcttgtgttgcatagcttcaaggtcgatcgtgcgatctgtcaaaaatcggcctacgaggcaccaacgatcatcaaactctacttcctcaaccgtatcattgtcgtatatcaggaacccatcatcatcatcccccagactcatagcagcgtattgttgatccattccagaaagcaagatagaaataacaccaacagcaaaatcaaaatcacacaaccagcaatagaaacaatcaaactctcatatgaacatcaaacacatgtcaaaagacaagactttaatatgagagtatttttgattaatggatacaaaaaaaaagtatttttaaacttatccctaatgttattaccacctaggctaggcccaatatattttttctct

SEQ ID NO: 6676 - DNA, 1232 bp, Cannabis sativa
aaacaaacaagttacatttctgcacccaaaacaatacatactattagatcaattatatgtataacaaaatttgcttggtatataacaaaattgaactttaatggctcgtttagtacactgtataagggtcgcattgtattaaataataaataacactatgtttggataaactaatgtattgtgttaattattaatgtaagttgtagtatttaatacataacaaatagtatgtattagcttgtattataatatttacaaagaatccacgatcaacaccaatctccgacccagaaccatggacctggacccgaactagactcagactcagacttgggacctagacctagacctgaacctgggacccagactcaaatctaggcccaggacccgaacccgaacctaaacctggacccgacctgtagtcagtgttggggtcgagtatattgaaaatatattataaacttacacaatctattaatacaagtcaatattagacataatattgtattaaataatactaatacaatagaatacaatacaatccagcgtaccgaacgagccttaatagtagtgtataatgtggttaacacatgctaaaagttatgccaagttataacacaaaatataacacgaacaaaattttataccacaataaatatcactttttaatttactcttttgtcacttattaatgcaataataactttttatatttttatttatatatttaatatagtttttatatacttttaataaaaaattaatatttttgttgactttttacacatttttattaaaataatttattttactcctaatacattaaagcacaattataattaatttgaaccaaatacaacatttactcataaaatttacactattcattgagaatgtggatggtaagaatccctatatatggacatgaatttagtaacatatttaagaaaaatacttaatatgatatatattacctcataataggattgtgcattgccaaaaatgaagtctatatcaccttggatatagcacttctcaaaatagtgacggccaagggcatcaaacaatgtgtcttgtacactaatgaaagaacaaccatagaagctcactttgtctccctcaacaagtgcagctggtgcccatgtaattgcctttgcatcatcatcatccctactactctttcttacttctttcttatgattaacgttataagaattctgcacgtttaatta

SEQ ID NO: 6677 - DNA, 1395 bp, Cannabis sativa
atatataaatatatttatatatttctttaaaaattatatataaaagaatatatacatattaatggataaatgtttatataataatattaatcgcaaatgggaaatacctagtaaaaaaagcatgaaaaatactatttaattttaattaataataaaattaaaatattattaattaatactctatcatgggtttgactacaattggactttttacttccttcttcttcttatttgttattattttgaaaaaaaaaaatcagattagttttggaatattttatagaaaggcagtatataatattttatacaataattatgtagggaactaaaataatattttctttcgataatttaatgtatacttttttgtttggattttcattatattatattttaatttaatatgtaatattaatggaaactcttaagcacttaattttatttgaatgaattttaaaattaaatttaattataattgctaaataattatttaattaaaaaataatttactttaagtaataagtataattaattaaattaatttaactctaaaagcatatattttttttttttaagaataacctgttgagaacatattataatagattataaaaaatgtaattattatagctacatttgtaatatattcattgagtagttttaatgatctttgactccaaaacaaactttaatagcatagcatttgaaatcaattaaagcatgtaaataatttgtagtaccaaaaagtaattagaatgtaaagattatagtaattatactttcactgatatagttatatattatttatataaatatgttcaatcaaatggttggttttgcagatcctgagagatttagatttacaagagacacatcatttggaagaaggcatttgaacatttggagccaatcaccaatttcactttggattgtaagtactgtatatttttactataagaaccttattatagagaagaaaacaacaattaattttgtcaaaagttttttattatataggtctataaatataatataataataacatttttctttttcttgtttatcaaatgatcaggtatgctttttcagacaattcttcgggtcagtcactaaggttgattacatgacactgaggcatggatttgtaatggtatgttgcacaatgatcttggcctgaaaatggcttcaaattacacatatattgatcactaaagctcatgaatattagctatgcttttcccatttcaggcacatttggctccagaaagtgaaacaagatttgattttcagaagtacatcagcaaatcacttgatgaggattttgtagtaattgttgggataacgttagtgttttctgcctttgaaatcagcttataatataaatgtatatatata

SEQ ID NO: 6678 - DNA, 1250 bp, Cannabis sativa
caacctaatcctgcagtaagaaaaccacgaggacaacctcgaggctctaaaccaagagacaggaaataaaccagggaaatcctcaaaacacccaggaagaacaacctggggatacaagggatgtcccaatgaataatcaaacaaataatcaagaataatggcgagatgttcctcaaagttcccatggatttgcaattcatgggaatgagcaaactgatgtgccagaggcatctctaggtatgaagaggcgagacagcctcaaccagggaactagggaatgcttcatagtaatgagagaaaccctggaaatcaaccgagatcaagtgggctaccttcgagacacccttaacgtccatcttgagctgagagagaggatgtatagacgtacttgaatagaggacgtgtatctaacctcttttgtaggagaaggccggtacaaaatgaagcaagttcaagttcgggacgttcaaggcctcgaggacatagttaatcgagtaggccaacgcgagaagaaagtagatctcgatgttatgctgaccaagaaatattagctatttgcaaagttatcaattcaaaagttactcgaagacgagatctgtgagtaattatgagcgaaggcagccagacctttgagaacacttaaatcaaagacagctagatcttcgcgaacatctgaatcaaaatgcacttgatttgcgccatcaacttaatcaaaatgcaaatcaacaacaagtagaccccatccaactgcgaataactgaactagaagataagttcaggaaatatcaagatggagaacatggtaaattgccaggctatgactcggatgaggaaacagagccatcacatctagatatcctaaattttgagttttctcagggattcaaaaactcacatgttccgcagtatgatgggaccacaaacccagtcgatcacttaaacaattttaacactatcttgccagccacaatgtcacaaataatttgtgttgcattttatttttgacctctttaacaggagctgcgagaagctggttcgataaatttactcatcattccataacatcctgggagcaattgtctagggactttaaaaggcaatttcaagccgcaagggatcgatgacctgaggcatcgtccttaaccaatataaaacaacaaccaggggagtcacttaagacttatttaagtcgctttagcacagctgcagcaaagctcaggaacctaaatgacagtatacaactcacgaca

SEQ ID NO: 6679 - DNA, 707 bp, Cannabis sativa
atataattcctacagcagatgtctacacttgtaagaatagattagattgaatattaattcacgtctaaaaataactaatcaaattcaatttacatatatttatataaattttaaaaaaattatataacaattaatattttaatataaaaaatattaatttaaaaatttatcacacataaaatatatttcgaaagatcaaatatatattctacatataatttatttattttttaaacctaaatatatatattttaataaatattaaataatttaatattaaaaaataacttatttaaaataattgatctaattcgatcgtactttgaattgtagatttaaactattgtgcaaatacattataaacaaaatagtatgaattgaattagataatcattcctaattacattcattcacgtataacttatataattttgaaaattgctaaactataaactataattttagtattgaacaccactttaattattatatatatctttaatactataattttatattacatggtatatattttaatttaataatataattataaaaaaatcattaacacaatacatatcacaacagattatggaaattaatacctaataacaatattttataattttatagttaatgaagagaaacaataatgagtcatgttaatgtgactgaataatgcaacatctaatattggttggctggta

SEQ ID NO: 6680 - DNA, 1021 bp, Cannabis sativa
taatatacggttgttgttgtcatgttcatactgtttctcgaaggttttttttgttatttatttatttttaatttagagactatataatctactttacaagttgctcatgtgatttcgttgggatatgattttgttcattgcttttggggacgtctcaattaaatttaatattcataattagtatatatataaaaacatatatataaactgcaaaaagacaaatataaaatcatctctattcaaatatataattcaaaattttaaaatgacaactatatattaatattatacagctttcagcagatgatgatcacaatttcaatttcaaattcaattttatacataaatatatatatttacatacaaaaattattaatcaaactctgacgtctaatatataaatatactcaattctcataattctcactataaaaaaatataagccattcagcttattctagatattactattaataaataaatagtatttaaatctcttacatatgccatagaatcaaattacactaacaactaataattaataataataaaattttaaaaatcataacatatcatgatttacaccaatccattataatttattttggaagctgggggagcaagaagtcatggacttgggtgaatataatcaatataatcaatatatttatataatttattaaagaatggatggatgcttattgtccaagtgatgagaaaataaattgggtttgtttttaaaataagtggggaatatatattatatagtatgaatctgttgaccatttcatcaaattatatatatggaaaaagggtcaactaattttgatcaattcatataaattaatatagtgcaccaattttcccggaaactttagcatataatataaatatacataatatagttataggtagtgatgagaggatatgcatacaaaagaggaatgctttgcttagctggattggccatcaaatgaggtgtacatattataaacatatactatatatactaataatacta

SEQ ID NO: 6681 - DNA, 1356 bp, Cannabis sativa
tattccttacccctcccatttttaaaacccgcctctctcttactctattctctcttgccctcttctcggactaaagaactaccactgacccaacccctaacatcaaacatctcagactctatcaccaacccacgaccattacgacatctcagcctctctctctccaatacacggccagaccatcataatatcgaaggtaagatttcgagccctgtctttttcatttcatttcattatatttttggatgatttaaggttaaaatgtatgagtttattaataggtttattgatttagaattagaatgtatgatgaatctcagtgatttgtgaatttatgttagatggtttggtgagatctgtgttttggacaaaaaaactagtttttacaccaggtacaatgcctttctgttattaacgtcctcgcttcaagccttaattgggtttttcctcactaattcatagctcttatacacaaatacgtcactctagctgtctcctggtcaagcatgcttaactgtggacttctttcgtgatgggctaccagaaaataaaatgcaccttattgatataggtagtattaatcaatctatttaagccattttaaactatgcagtcctatacctacacagtctcagaatcatcacacttgattttcctcaagtggtgtgagattgcacagcttactggcattttttcttatagatcacaagactactgattgtcacaaacattgcgatgatctggtcacgatggtcgtgggttggaaagagagtctgagatattgtgatagttgtcatttggtgagagagtctaagacatttgatgttagggattgggttggtggtaattgttcagtccgaaaagagagggagcgagaatagagaaagagagagacgggagtatgttaaaaaatggaaagaacaatttaagaaatagacaaaaattagcttatttaccaatattagttatcaaaatttcctactatgttaaataatacgtaacattaaaagaattagaaactattatgttaattaagcatagtaaaaggctaatatattatatgctagactcattgaaataaagtcaaaaagaaaaggaaaaatgaagagtaaaaacactcacttttctaatctctctgttaagactttgtcagtagtgagtgttttttacgcattagacaatgatacaaatattgggtcaaaaagctaaataaagattaatcaagttctattctagtcctgcttttaaaggtccccactactacaaacaataacagattttgttcatataaagacagaagagaatgatatagatacacattttgttattttttgatccttttgtctcatctttctt

SEQ ID NO: 6682 - DNA, 2724 bp, Cannabis sativa
ttatgccgctatttaccttttaaaatgtacccctaaaaggggtttatccatgccccatttctatttcggtatttgagagaattttttactctatttttttttttaatcatttatattgtagttaattgagacattctataaaattttgaaagattcgaaaaaatttaacattttgaaaataggcttcaaacaatatgttgcacgcgagactcacttattttagacgcgtgtgaaataaattgtttgaattctattttcaatattttaatttttttttgaatttatcaaaattttacaagatatcctaaataactgcaacctaaacaatcatgaaaaaaattataaaatattcttccaaaaacagatagaaattacatcataccacttttttaaaggtgtgcattgaatttttgtataataagagagtagatggattgtttcttcatagtattcatttcattatattaaaacaagatgaaaaaacaaaaaaacttaccaccacaccactattattggctattagagtgtttagcgcataactaagaattaccatcgtttagccaccataatgacatattgtgtcgtagtatgttattgttatagtagttagtagttgggtggatgtggaacttgaacgtgaatcttcttaggtaaagtttgaaacataacctttttccattatttattttggaagagagtttgtttagctacaaatttgacaatgaaataattgaatttcatttatagcatcaaagcaaaaaccaacacgcatgcaatagagagaaatatcaaattttacacatacaagttttattaagtctattcatagtgcaatcctgaacaaagagtctattcatagtgaaaaaaaactatttgggaaagggttttgagtgtgtagcaagtcattataataattttatttcaattcctgcgggccttaataaggattaatcaacacaacagtatttgtccaataaattacactagggtattgccatgccatgttaagaactaggcaatttgatcccaccttggtagaaaaactagtaatttggtatagtaagcaatttttttataaatatacaatcattacaacaaaattcacacacaatgtcacaaaatgtaaagagagaaaagatgggagcaattctgggtgaaagatttgaataaggaagaacttaactataaagtaatataattagcaaattttgtataattagttactagaaagaccttctacacttatacaaatgcagtttcatggatactacctaattcgttggttagtttctagaagtcgtcctatataagattcaacaagggtaagaagtaggagattgaactgtacactagtggaagagaaacaaacttatcttctattgtcccaacccatcaaaatgtttcttacattggcttcaatcttgttccttggcagagataatccagacccttcatcgaggagaattctgtacacttcccactctcggccacggatcatgtgtctagcaatctcaacctgagtgagaatagcacagaaaattgaatgccaaggaaaagtataggtgggaggaatatagtgttataattattagggaaaaacagaaaaagtaatcattggtttgaaatattactgagaaaattcgcatgttgagaagtttgaaagcaagagtaatatcatgaaatacaagaggacggcccctgccagacaactccactggattagctaccacaagttcggtatcagggccacgactcactacagctactctaagtggacgcagaagctccatttttaagcgagagcgtaatgagtcttgtttagtgggatcaacaatcttcttgccatctgcttgcattatgaacaagtccatctcacagttcccttttggatttgcaaagaagcggctatatgaaatctgtaataccgtacactatgttacaaattaatgaactgttataaaatttagaagctaatagcagctaaggcttgatgattttacataattccatgacaacaaagcatggacataagtccagtcattttttctcacaacaaataggcataataccaaacaattgcagacaaacaaatttagatgttaccagcaagcaccatttaatgaatttatacaaaaacaaatacttattgactttattctaactacgaatcatttattgtgttttgcaaagtctttagaaggactgcagaagaggccaaggagaagttgttttctacctgaatgttgtaatcctttagggttctcataatatcatatatgagacctttatgatcctgacagaggatttgaacaagtgtgtgagaagggctgaacttattgtccattgttactgaaatcgaattagaggcaggacatccataaaagtttttgcctggaagctctaaactgaacatttcttcactgatttcagaaggaagatttggagaaccttgtgaacaagctgtaagttctggaccagccacatcaatttcgcaactgatcaaggcatcccctagtgcggctttcagatgatgagttgtttcatcttttctattttttgtatgaagaagttctctgattaagatgatatcaacacatatgcatattagtcataacctagaaacataataatcacaaggattctgaactctttaagtcttctaactactctttttgctaagtgaagtgttcataccctacccataaactaaccaaaagtataacc

SEQ ID NO: 6683 - DNA, 822 bp, Cannabis sativa
gtgattttctgcaattctttttcactccttgctattagacgtttgacaaaatcgtatgtggtaagcctaatgctgcaattagaaaaaggaaagaagagcaagttagagttaagtttgtactagtcccacaataataaaataagtgtttccatgtgggatgttaaatcatgaattgtaaggcaagaaagatgaaacacctgctgtttggtagagttttcaaagcgtttggcaagaaacctcgatataatcctacaaatccatctcgagccacaattcctgcaaaagaagagcaaatacaacaataaatccaaagttcccaccaacaaatggtggtaatacttaaaacactttttcatcgtcaaccttgattctcctcggctctatttaggaggatagagataaaacatgagtgtgttttgatgcatacatcgtaacaaaaatggtggtttggtcaatcaagactagctgaatcaattaggattcaagggggagtttgcgtgggaggggaggaaattaaacttctaagataaagatgttagtgttttacttatatttaattagacaaaaaggctttgctaaaaagttgaagagcgaaatggagtggttccagattatcaaatatttaccaatttgcaggcggtaaatttaacaaactagagcctcagactaacctggaatggcatccaatacagtcttgtaaggtgtgcccctcatttgcatctgtcttctcacagtatccaaaggataacatgtgagtgtggcgagcgaagctgacaccagagctgttagcatcgatgcttcagctttcttttgaaaattctc

SEQ ID NO: 6684 - DNA, 1104 bp, Cannabis sativa
ctatatgaaaagtcataagccacgcaatcaagtggttatcaaggaaataagaaatgagatttctaaactaaggatttcagcaccattagttgaacgaccgacagcggttactacagttcctgaaaaaggcaacccaatacatcatcgtaatgggaggattataagacaacctgtctgctatgaacatgaaacacatgttcttatctgtgagacagacaaggacgattcattgacttataaagaagcaatggattaccctaagtcatacaagtggagcaatgccatggttccaaaaatagattccatgagcaccaataaagtttgggaatatgaaactccacctgaggatattacgctcatagggtgtaaatagattttcaagaagaagaattatgttgatgggaaggtagagacctttaaagctaggcttgtggccaaaggctttacatagtgagaagacatcgactatgatgaaactttctcttctgtggcaatgcttaaatctatttgtattcttctttccatagctgccgcatatgattatgagatatggtacatggatgtcaagaccgttttttaagtggcgatcttgatgaattcttttatatggaacaaccgaaagggcatgttttaccaggaaaagatcgaaaggtgtgcaagttgcttaaatttatttatggattgaatcaagcctctagatcttggaatatctcttttaataagactattaaagagtacgacttcgaacaaaataaaaaaaaagcatgtgtatacaaatacattaaaggtaatacaattgtattcctagttcattatgttgatgacattctatttattggaaacaatgtagaacgattatcagatgtaaagaaatggttagccgaaaaattctaaaatgaaggatttgggataaacaagctacgttcttgggatcaaaatctatagagatagaaaacagagaacattagcactttcttaagcaacttatatcgataaggtgcaagaaagattctcaatggagaattctaagaaaggacaattaccgtctagacatggaattactctatacaatgatcaatatccaaagactcctcaagaggaaga

SEQ ID NO: 6685 - DNA, 744 bp, Cannabis sativa
agtttgagaattttgttgaccttctttctttgggaggcgtggcgatggaagaatttggtgtttttgtcaccttgggctagccattgagttcaggccatttgtttccagtacgtctcttccttgtatagaagagcatcaagcctagattggatatctttgatgcttctaatagtatgatcgtctgaagtgatgctatttctagcatgctccaggtctctctcaagccttttaatttgagctttgaactgaaaatcttttttccgtgaatgagggcgggttatggtcggattagggtgggttggtggtatggggttgggtctctccatgagtccatgtcaccaagtcatgagtatgcgtggaagatcccgatttgtataggcccgcaagttgggtttggccgtgggttgggtgttggtcaagagggaaatgtgtggggaatgaaggcatggtttccgagagggagacacacatggcacttgcagggttagaagacatgaaagtggccaccagtgggttggcaaagttgagctgttcaggagtcaacagagaattagttgtaaccttaactttaccagaaatagttttgatgtcatacctgagctcgggcggaagacgagcttcatcacaagttttcatatagtccacatagcctttattgtagctgtgtcccattcgaccacagaaaaagcatatatcaggaatatttttgtactttaacttaagccacaccaccttgttcatgcc

SEQ ID NO: 6686 - DNA, 621 bp, Cannabis sativa
gttgtccaaggcagccgtgcaactctcattaaattcgtgggtctggctatgccagcctatgctatggaaactactaagctctctagtcatctcgctacaaagattgatggaatggttcgtgacttttggtggggatttgataaaggtaaccatgggatacacttgaaatcttgggacaagatgtgcctccctaaattccgtgggggtcttggcttttggaaaactaaagaaatgaatttggctttcttggttaaatggggatggaatctgtttacaggatcccaatctttgtgctgccaaattttaagagcaaaatacctgagaggaacatatatgctcaagtgcaaggccaagtcttctgactcatgattttggaaaaacgtggtaaaagctaatgatatcctgagacgacccttggatcactcatggtaagaaattttttccaaaggctgagcgggtgcatgttcctatatctgggaaagtggctaatcaattgattgataggggagagtaggatatccagaagctgcataacctatttgataatgaaataattgtggccattttaaagaggggtagacctacagggtgggggaaagtgttgggatttgtgccctaaat

SEQ ID NO: 6687 - DNA, 3326 bp, Cannabis sativa
aaaaatcctaaacatcactgtccaatgcatttagcattttgtcgatagtctctttgcatgtagatttactcattcctttctttgcatcaatacactggctcatgcttactagttaaattttgagggggcctctaggatatgatccagcttatcccttttagcaggaaattcagtttttaaagattagaagtcgtatcatacatgattgtatttccaataagtaaaagatagttaatttggcctgatctattacatttgtttgagcaggtgagttctgtcgagattgaacgaatctgtaatgaagccgatgaaaatgttcttgagacagctgccattggggtgccacctcttactggtggacctgagcagttggttattgctgttgtattaaaaaattcagacagaacaagagtggacttaaatcaattaaggctgtctttcaactcagctgtgcagaagaaactaaatcctctattcagggtaccacaactgatcattcattggctttttcaatggtctcacattcaatacagtgtacaattgtactgatttccttcttcgataattgatcagtcaaattgatcgagaagtgattgttcttacttaccagttttcttaaccattgttgttgtaattatgctaacttagtgcttggttgaacaggtctctcgtgttgtgcccctatcgtcacttccgagaacagcaactaataaagtgatgcgaagaattttacgccagcagtttactcagcttgataaatcttctaagatttgatgttgagcaattattctattctgtacaaaagtgactcattcctctctcacaatcacagaatgtataatgataacaaatcattactttaagtaatgtagtatttatttttattcaccaaacaaaagaaaagggttgaagtgttgaacaatgcgttgccatgtgatccaaataccctttgttagccttcctttttaattatccaaacatgagatgatatttattttctttcgatttctctcatttggcttcttcactcactttacagcctgggctttaattgtttatgaaataaacagtttattgatcataactcttctttggaaggaatttttggtgtttgttttgtcgcatatgctttaacagtcagaagtcatatgtatttatttgctaattgaatttctcgtgctgactatatttttgggaattttacactaggtgtcaattttttttacatttttaacgtttatcaatttttaaacatttttacaaaaccatttttacttttttaagcttaaaaaagtattataattacaaaaatactatattgatgatgtcaatacaccatttgatttctctcattttttctcacgtgtcttctctatcttcaagttttcataactattttatttttcttttcttcccacaatttttctgttgaaggcaaactctcaagctctaacccttacctttccaccattgtcgttcaaatgatatgtgttagatcatcttcttcttcttcttctgctaaaattacaagaataaaagattagatttgatagtttttattagagtttgttgtttatttgcttattagctattgatttttctattttgctcataaattttatgaattttgttgttattctgaatgttgagtttttatatatgtacatataaaagtacacctgctaggtgtttgttgaaatgcccaagagaattcaatcttttttactagcttaaaggaatatggcatattcaaatttgattttatttaaactttaagttaagcattttcgtgatattattttgatattacttgtattgatctaagttttatctttttatgaattagagattttatttaaatattttaaatgggtttgttgatttaacgttgtttataagttgttttatagttgtttcatcttttagttcattttgttgatgttgtttcaccaagtcattaattgaagagttgataagggtaaaaggcgagataatgatgtcgagattgcaatttaaaagattaatgtatagtttttgttgtctttgtttagttttaaagacttgttttgttatgtttatatatgttttttttttatgtatttagtaagaagaactattcaaccttaaatggtttatgtctctcacttttttgtttttaattagttattttttagttttattttagttattatacggttcttattataacatgaaaacaacttagttattcttttgtagattttatataattttgtttttgttattttcaacaaaaataatatcaattgatgaacaaataattatagattcttcaatattcagcttctttgggggtttgagtttggttgtttctagttgttttacggttgattctattttcaaagtgccagcatcaaccaaaataagatcttttgaaattgatcccctctttggagcagataaaagttgtttagttgttgttattgtgttgttgtcaggttactgcacagttcagtgtcctaagtgaagttcacttccagtcactgtcatattgttgcacactattgcttgggtagctacctaaaaggattgttattctattttttgtgtagttgaatgtgttcacacaatagatattgtgtgaaatcggttttctttattaataactttatgtaaaacaacaaactttcgtcatctttgatttagagtggttgtcaactttccttcagttgtatttgagttgttttagggttgtagtctagttcctacaatattatcttcactaattcaacataagtataatcttttgatattaattctccacttattcgtaattaatatagtgcttgttgtcatcttaatgaccattgctctgtaccaatacttgcagaggttccatatatatcctgaaatttttatatttgttatgagtatcagtatttctaaacaactattttaatccataaaaacgtgtaaacaacttttcctgacaacaaacaacaaatgaccttaaatacactagtagttgttcaattgtaaattgattgcatcaatttcttcatatcaaccaatttaccctatgaattatgcttgatatgacaataacactatataacaacctaattatgaaaaaaaaaatactaaaaatattggtaccttgtattattttttcaaattcttctaaattatttttgggtatgcttcaattctccttttttttttttttgtattgttatcaaattatctgcacaatataattcgaattattatttttgggttatttttatgtattttcgaattaatagaggtagaaatatatgttttcctcccttttttttttttttttt

SEQ ID NO: 6688 - DNA, 2808 bp, Cannabis sativa
tgaatatgtgtatgctttaatgcttgcttacatatggcatctataattctagaaagtgtttgatagtgtgtggaccattggaccattatctattagaaattgctacacatttctacacaatttagtctagtaatttttatatatttgtagaaaaaattatctaagaaattaagtgatttctagattaaattaagtctagaatataccagttatgttgaactcaaaaaacatttagatggtttggatataaatctttttactaagaaataattctaactataaagtgtaaggagtgagcaactataaatatctcatcaaggattccaaatggtgtaaccagcacccaaaagccaaagctacaaactttcaataagagcttactactttacatacaattctctattctaagccaaactattttcatatactaaatcaacaactactcttcaacatcactacttcactaaattgccataacaaccattaaacatttattcctcatatccaccaattcaaatataaactaatacaaattaattcttaaaccaccagtgatatccgagcttcgttccatcatcacaggtcataatcttttccgctcatcaacatgagtttggagtccaaccgctcttctctacctcttctaatttttcatgggaaaaactataacttttggtccatcaaaatgaggacctattttcgatcacaaaatctatggaaaattattgaagatggaatcactattcctgaagatattacatctcttttggaagatcaaaagaaggtattggaggataatcaacaaaaggattctcatgcattatactgcttgcagcaagctatgacagacaatctttttccaaagattatggaagtatcaactgcaaaagaaacatgggatacgttgcaagaggagttctaaggaacaaccaaggtacgcacagttagactacaaaagcttagaagatattttaagaatttaaaatgaaagataatgagactgcaaaatattactattctagaattaaaaaaacagtaaatcaaatgagagtctatggagaaataatttctaacaagaacaaaagatactaatttcttgtacaaaaaaatatgattcaatagtttctacgatggaagaaacaaaagatttgaaaactctatcaccaaccgaactaatgggctctcttgaagcatatgaaagtagacgcgaaaggcataagaaaagtgaaactggaaatgcttttcagtttaaaatcaatccgcgttttcaaaaaccaaaagttgatagaaaaaagacacaagaaaaacaaaaaaaaaataaataacgataactatccttcatgagtcatccgtataaaaaaaaaaaagttacttgaaaaaagactattggttaaagaaaaactacagtaccaaagttgtaaaaaaaaattgggcacattaaaaaaaacttgtttaaaaaaatctcatcaagctaattttttttcaaagagaaaaatgatgaaagtaatctcttctatatttgcacctttcaaaaaaaaaaaattcttctatgtttgccaagctgcaacaaaagaagaaaaaaatatttggtatcttaatagtggttggagtaaccacatgacgaaaaatgaaagcattttttgtagttttgatagatccaagactaaagtcaaaatcgataatggtgatttcatagaaggcaaaggcatcattgctattgacactaaaaaaggcaagagatacatcaatgatgtactcttggtacctagcattaattaaaacctacttagtgttatgaaatataaaaatcataacagtatttctacgtatgattacatgtcttttcgtgatttaatatgaacaaattcaccattagaaatttgaaaaacaacaaaaatacacaatgataaacattttactatagtattgtataattttttgagatctacatttcatgtatctacagctcctgttttaggttgttgtatgattgctcgaaagttacatcaaatgaagatttcaatcccaagaagtatgaatcctagaaagttacatcaaacaaagatttcaatcccaaaaagtatgaatcctaaattgaaagtgtgtataactagtatgtgtaattttttttatttatttgtttacttaaataaaagtattttttgtaatattattatttttttttggttaaaaaaaaaaaaaaccctaatatttattgtgatacaaattttataatttaaatcgctttttattatatttgcaattacaattatattttgtatttggatcttcacgtgagataccattggagataataaagatgatccatccataatagttctgtcactgtttatttgaaagaaaatattgaccttgatgactcaatagaagtgaataaacaatgctttaatgcctgcatgtaaatatggcactttctggtcagatgactaattatgggcatctttttttaacttttcctgaacaattatgtgcatcaataattatatttccctttaccagtgactacgggttatctagaatgtagaccattaccactcatcatcaaaattacacacttaaattacaattctttttacaaacaattacaatgtgttacaataaaaaaaaaatcaaagatatcatacaatttaactttgttttaacatcttttaattttttgggccatgtcatgtatacacatttttccttgccacatctaacacatttttcgggatcgcctttcgtgttaaaaaaactcaacctgtatgtgttagtttcgtgtcaaaaaactctgacctgtatcaacac

SEQ ID NO: 6689 - DNA, 1122 bp, Cannabis sativa
gttcctccattctatgaattgacgcctctattcgtcgaatgcgagatttatagcctctcggaggtcttcttgatcatgatgcaaagtgttattatgaccttgcatgagcccgagtgcctctctcagattttggagttcagtttcgtcttcaactagtctttgagtattagttgtggatggaaccttggtatagggagtggaatggtcggctgtcgaactggtgtttctagtttcttgtaagcctggtgtgatcctagccagaggggaagtcactccgtggcctacagcaggaggttgtgtagtgacttgctcggggtttgtccctggtggtcctctcgtgtttccaagagtttgtacgttgggatctatcaccgttgggtcaccctaattagcaaggctacctctgtaggttggtacaaccatcctttttacttgtcaaaacttaagacaaaatagttgtgtttttgctctcaatgaaagcaccgaaatgttgacctcgcttctagccaacgacagtgagtcaaatgataaagtgattaagtgatgtaattaaaagaaagccaaaacagtaaagtaaagtgaacaccaggttttaaagaggttcggccctgtaagatggtaatagcctacttaagagaaggaacagagtgtttttccccttgaaagctcttataattgatctctgagtaatttctctcttagatcactattttctctctagaatgtattttagcagcaattctctcaatccccttcataatgaggctaggtcactatttattgggacttaacgcatgagggatggtttcccttttgcttacagtgcacaaaataggaaataacaatgattctataatgacaatatatacaaaataagaaatagaataggttgccatttctctctgactcaatcccaagattataaggattgtcttcgcgtttggacaatcaagattaatctctgaagccatgttcgtcgctcaacaccaacatgcttctacctagtcagatatcttctacatacccctgctcggataactgactattacagatacttattagtcgtgtgcaagctattagggatattttcctccacacaggtatcaaaaatatgggacacgt

SEQ ID NO: 6690 - DNA, 757 bp, Cannabis sativa
atctgtttttctctattttattttctcccgtttttcttctctaccaaaacatagagttaaattagaaaattaatctaaaagtatcatacatcaaaaagcgtgataatataataatagtaataaaagcttagttaatttttaaaactaaaatgactgtaagagcactctgaacaagctctctactatattcttcaaactacctcattaattttattttattttttattttacctcacacttttacattatatcatacactaatttttttattttttatttacattatttaaatatgatactttaatatatttcatttattttataaaagaaaaatataataatacaacacacgcatgaaaaagagttaaataaaaataataaaatatttgtagttcaatgaatagtaatctttatatttagttaagcactttttattgagttaaaaaaaaattgtataaattttagcttatttgatggaagctcaaaattataattttttttatgtatattttaatgattgaattattttaactcatctattgaaagtactctaaatattcatattctaataattgtaattatattttataaaatcacgtgtaattattgttaacaaattatatgatgtgtgtaagtatggtgtgtttggtttgtaagacaattaaggtcaattttaaagtttggtttgcatgccattatgaataattttgttttgtaagattatttgggttttatttgactatgttgagaatcatgg

SEQ ID NO: 6691 - DNA, 1033 bp, Cannabis sativa
atatatatatatatttataaatgctctattttcactcttagctttagggtttagataagataaaaatttataaaaaatatgacatacaacatatgtttattttacataattttttagatgtagaacaacattattcgtatagatctaatttttttttattatttttttgatttaagttgtttttatttttctgctcatgtaaatgtgtgtatatacatgatgagataatttaaaataaatattattatataatatcaaataggtaaatattaataaatatgagattttataaaagttggagaatatatttaacataaataaaatatattaaaaatataatataaatgatataaaaaaattagaaaaattcatgaatgatgtgatataaaaaattattgtaaaatagaaaaaaaataatattttgattatatatatttttaaagatagaaaaatagcaattaggagtgctcttagtatcaacttactataaaaaatactggccatgtgagcttatatatagcctttcctttgtttcgagagatgagttatattctagaatctttatttatttattcattttgaaatcgatcactttatttttaaattgaacataataaaagtatattacaacatcctaaatgttgaatataacatatataattaatgaacaataaattaaaggtaataacaagaaaccaaccctagagagagtatagatcagaaagattttagttatttttattgtgtttgtgtgtagccacgtgatgtcttctatgtaccaaacaaatctaccaaaggggctttttatgaaaagagtattcttatgaagtattaatggtgtttagcgccacaataaagtatcgctttataattggttagcaagtttttataatatttattagaataaaataagtgggacttaatattaaaatgaaccaataataatattacactttacaagaatatttagcactataaataccctttagcatttctcttatgaaaatggtaatgttacctttttctttctctt

SEQ ID NO: 6692 - DNA, 565 bp, Cannabis sativa
tcatctctcttgagactaagtcttttatagtgctaagtagagtgaagtgtttcgggaatatttactactacatagaggtgacaattcgtgtttactggtcgtgtttgtgtcatgtcgtgtcgagattcatgtattacaagtatatgtttgatccgaataaaatttatttaataaccgaattaagaactaaaactcaaatatgcccgtttataaatagcttgacacaatacgaccagtaaaactcgtttataaataaatattgttactacaaaccaacccatcaatttgttgtgacttgattaaaatgtttataacatatttaatacgtttataatatgttgaaatcctaattaattttaaataagtcaataacgaattagtagatgtatcaacacaaacacgatccttttattaaacaagttagacatgttaactcaaaaaataatccaaaaccaacctgttaatttcttgcggattttgaatcgtattatcacgtctgactcattttaacacccttaccactacatatatagttatatactcttgattattttatacctcttca

SEQ ID NO: 6693 - DNA, 2071 bp, Cannabis sativa
tttttatgaacacccctatcggtgaccttgtatgagttttgccaataaaaattgattagatttcattattggccatgtattttcggtgacaaaaatatattggaccgacaataaattttatttatggcgccacataaccaaagcattggtaaagaaagaatcgtcatgtaaaagacccgcgagatatgttttggtggaaatcttaacttttatgggaaaaatatgatgtcgacaaaataaattttgttagcgatgtgatcttaaacatgctagttgaaattctatttttataattgccaactaaatttaacaaacaatttaaataatacgaaactattataattttttttttatcataatcaaaatatgttttatcagaaccaaaatttgaagattagaataataatacagaaagtaaagtcacaaacaagatttttataattggtatcaatatcttttagatattactagttcacgacaccacgtctaaaaaataaaatctattagtaaagtctcaaacaattacaaaagtatttgacttatatatacaatataagaatttcttttaatatattgtaataatatcttttgtaatccactcttctaattagatttcttgagagttgatgtattaaaatctcgtcaaacaaacaacggatgctctcctcctggtgagagactttaaaacaagacttctcccaaagcttgtatcaacgtctaatgaataatacaacttgtaaacattcaaaacagaaagaaaatagagtggcaaatacaaaaaaacatgaagataagattagaacaacaattaggtttccaagagagatggaagatgtaacattttgcttctggtttaagtgctatttatagagataatggatacttcaaatcagagctcaaaaggtttgaacacaaagagaactcattagttaattttcttacagaaatttattataaatgaccaaaattctatctgaatagatatagaaaaggtgtagacgaaatgtctagtcagtattgtaaatttaaactccttcaaagtcaaattcatctcgcaaatactccttgactgctaataattcaattagccgtatatttcaattcaaacaggatcataataaataaataaataaaggaataaaacacatttatttaaatttatttcaattttaaaatatcatatatatataagatactatttatgtttatgaatattgactaaataaaataatttatcatttccttataaaaataaactcaacatatatttcaatttttaaacaagaaatttagtcaataaatcaaacaaaattaatcaataattataaatgcttttctaataaattagccaaaaaaaaaaaaacttaataatcacccccacatgaaaacttgttaggaaaaacacttgtctatttttttgacataacacgcaatgtcagtgataggcaaaactcaaaacacttttatcaatttttaaccgacagcaaacaacattaatgttagtgatagaaatgaagttcataataactccccttgagaaaatgcaccaataattaaaatattaaacaaaagccattgataatgtcaaacaaagtttaacaagaaataccaaacaactcctcttgaaaaatatgatccaaagtcgtaacaattttgtttatcaagtagacaaagaagactaaacaaaattgacggaaacaaatacatacaaaatggaaagaaaaattaaagtgaaattaggttttcaagagatgaaagaagtaacatcttgcttctagtttaggtgctatttgtataaataaatgtgttgatataattattcgtaaattgatcaaagaagaccataaatgaagcaattcaaataaatacttagataaactagtttaatgatttaatagtaaaaaaatgacgcaaatatttatagtggttaattccctttggcgatgatagactagtctgcttgtgtttattattgctttcaatatctcaacaacaatgccaaaattatgttcccaaagctctctcctcttaagtaattacaattaagcatggtactctctctctctctctc

SEQ ID NO: 6694 - DNA, 610 bp, Cannabis sativa
ataaaatttgatagaagagccgatttataataaaaaatgctaaaaggcatcagtagtgcataatgtatctagaaccctcttaagtatcgtatcgcatcgctaataatgtaaagtattaagtcatatatataatttaatatataataatttatagggaatatcactaataaatatacctgccattgttagtttttgttttttttttttttttgttttattatgtcatgactattaataataaattcaagataatttttgttggtcatggttgacattgacaaagctagctagtgttgaaaataaatgaagaaaaaaaggattaagtatatacttattattgataatgtgtgtcatgtgtcactatataaatatgtttatatattttaataaggccgacattttcactgatatttgtagtgggtgttttcttagctaggttatatatattaattattctaataaaatataattatagctagctagtcttttgttttttattttactttaatttatgtccttttaataatatctataaataaaaagaaaaatggagaattatgtgtatgtaattgtaagagaacatgcttatttagtatgattgagcaatcat

SEQ ID NO: 6695 - DNA, 728 bp, Cannabis sativa
cataagaaaatatgagttgtgtcgtgccgtagcataaaataatataagtcgtgtcgtgctgtacttagaattgtgtcatgctttactcaggccaactcattttcttatataaggtcaaattcgttctctactatttctacattttatttttacaattaataagataattactaaaattatatctttttatagcttcaattacttttaaataatttttcaacaatttttcataaaattcttataactattaaaatttgaatatttattaataaatgttcaaattattattagaactattatcaaatataaggcttttaacatgttatattttcagaatagattattcgtatttacgtatcatgcattttgggcttgttatgttgtgttgtgtttaagctcatattttttttttcgtgtcatgtcattctcaagctcatattgttcatgttgtgtcatgccaatttgtagcatcgtgtcatgttgtgcccaaattcatattttttcgtgtttggtcgtgctcgtgtctcttgagcttgtgccaatttcataccgcgtcaaaaagctcgacccatatatttatagcactagtttgaattagcattgtaattatatgtgtgttgtgctgactcgactcatattttttgggctttttaaaatacgggttgtaccatgaaaatatagatcatgtcgtgtcatgcaataattttatagagtaggcccgacacaac

SEQ ID NO: 6696 - DNA, 1130 bp, Cannabis sativa
agggcataaaacccaacaacataacattgaggatctcccaatctctctagtatgtataggtgatcatcttttatttgtagcagtaggccaacaatgtttggtattttttttttgggggggctagctttataattctccctaggttatatttcacttaaagtctccaaaaattcaaaaaattattttgaagtataaaaatgaaaaaaaaaacttataataataatacaacatgtattttattacttttaattaatttgattgcatagcatataattttttttctttcatttgattggccatacatagttgacctgactcaatttcacatcatttgtgtaaatagcaaaatttgaatatatagtaatattgtatgccattaaatacattgtacattaaatatatgtgaacacagaacacacacatgtatatatatgaaatattcatatatgttaatgtcacatcttatcatctcatatataaaatatttattaggaaacaaaaacagaactcttactccttgatccaatcagtgaaactccatcaccaacatcattaacttttctacaattcaatctaacttctccatcagaaccagtaattggattcaaattccccattttgatcatggaaatcacaaaattttcaaagaaagcagtttgattcccactaaaattgttgactatttcaatggtatcagctcctggtgttgaaaacagctcttggtcactttggaacaagcccttgagttgttgaagatttgtatagtagtttttgtcaaattgatctggtgtggtagggtctatatctgttaagatggagacgtttcctccttcagggcatagatcttgtagtaattttaagtagttttgttctatggttggatcaggagagcctgtgtcgttgaaattgaataatctgttactgaaggctccacattgaccccttccaaatgtgtgagcacctgtaataataatattcataaattaattaagaaatatatagtatatatcatagggttttatattaattaaattcctaaatataccaaattaatcaagttttcatcacattaaaacttcatctaattaaacaatacaaattctctcgacttagaacataacaagatgcat

SEQ ID NO: 6697 - DNA, 1388 bp, Cannabis sativa
ataatgtgttcatcccaaaggttcttatacaaaatttgggtttgatgcagtgtacaagtacatgtggatataaatagtgtgtacatgtgtgtgttcttatcccaaagtcctattatatatataaatatatagattgtatttatagagaacaaatatattaggaaatctttgtaaattttgtccaaacattgttttgaaggaggcaagaaaacgggtaaaccggaaaaagtggtttcgaagttcataaacaacacttaattaatattaattaacctatatatatatatacttaattatccccttaaatataagagattaattattaatgatatatataagtacaagacaaaaacctagctacctctcttgatctatatatatatatctagactaatatatatatggtttgatattatcagacattggaattccaacattgtcaattagatatattaaaacacatatgcaattcattattcaaagcatatgcaagatatttataatgatcatgacaataattaataaattaaaatctcatctccatacatacttaaatagaaaagagaatttttatgtacaattaggtataatttttatgtattgtaatttttttttttaataagactacataataatatatatatatttatatgaattgaaaaatattattaacataaataaaattaaggagaaatttaatatatacataatatatattaatgattattattattattttgtgtttgggaaaaattgcataccgggattattaatgaaagcattagtagaaccaaacatattcaacggtaattgatgataacttgaacttattgtactacttgatccaacggtcccaattaatccacgaccacctccatcatcaacatcatcatgagatttattatcactaacaaaataatctataggcaactgctgctgctgctgatgatgatgatgatcaaacccttctccggcggtggtggtccggtcaccggcgccggaaacagttttattattattaattatttgttgaaagccttgatcatagagaatacctttgaacacgtggcctcctatggtcacagccgtctgatatgcatactgatcatgattttggtcaatcccattgacgttgactcgtgaactcactcgtacaacttgaaatgtcgccgttgttttcacctccgccgggaaattttgtgccaattcttcttcttttccaaaccctagaaaaattaaaaataaaataaataaataaaaatagctaaacctaattttaattaaataatatttttttaaaaaaattgtgtatgtactagaagctatttatataggtaattttttttccatacaaagaaagtgatattttgtcagaatttatatatata

SEQ ID NO: 6698 - DNA, 588 bp, Cannabis sativa
tagtgttagtcacacattgtttgtaaatgttttttaatatttcacaatttatcattctaaaattaatttatttatcacttaactatacaccaaatcaatttcttatagtaacgaataaatttataataataattgttgagtttaatgttaatttttacagcgtttagtaccacataaatgcttttagtatttatgaataaatttttgatctcaaccttccattacaatttcttagttaatctcattacctaacttgaaaataagtgttgaatatttacaatattatccacggaaattttaaataatttatagtaccaaaaataaattcaaactttgaacacacagactggaatgtacagtaaattattcaatttttttcaaaaatttaccgaaattatgttataactataacaaatacagctatgaaacaaaaatttaaaaaaatattctagtatataatttcagaggtaagaaattataattaactctcttctaaatttttactagttcaaaaattatatacaactatcactctaaaattatttacattattacgtaattatagatgatttgttttttttttttttt

SEQ ID NO: 6699 - DNA, 595 bp, Cannabis sativa
tatataacatataatacatacgtaggagacagaaaagtggtttgaattagatgaaccgacaacttagagccccaaatttaaatgctgccgccgtcaaagcatgcaactcaatcggtatccgtggctccacacgtgcacacgtggcacttctctcattggtccttactgcttctctctttctatatatatacatacatagaaagaaagcaaacaataatattaacaaccaaataaagccgcaaaacacacatataattaatacaaacagagagatttgtgtagagagtggtatgcgtttcagacaccggaataatggctttcaaggatattaccgaactcactttgggaccccctggcggcggccgtgagttatcggtggctgaggcggcgagtcttaagtgtaacaaacgtgcgtttgttgagagtactgatgaagttgaagttcacgaccagctcagctctactgaggaggataaaaattatcatttaaacgacatgtcgtttcatgctgacgtcacctctcgtactgttagtgcatctgaatccccacctgctaagtaagtcaacttttttatttgttcttcgtttttttttt

SEQ ID NO: 6700 - DNA, 806 bp, Cannabis sativa
aaaaaaaaatgccattaaaaaaaaaaggaaaaaaatcatttccacttataagacaatagataaaggttattgaagcttcattttttttaaaaatcaaagtataactgttgcgaggctcgtgaaccataattttatctcaataacattcaatttaattgttgcattaagaataggcactataaaattccaaaaatagttagatatggagttaatttagtagttgggactctcataacaaatccaactaaccaaactatatcttctcacatgtcttttcatatagggagtccacaccaagagccccttttttatgaagaaaaaaagtatctttataaatcacaacaacaacacaaagaacaaaagccaaaaaccttacattgaacaaactcttaacaagagaccacatgcttgaaggcggtcattatgaagaaggaagcataggtttcgctaatgaataccaatattttagaggagaatcactctctcattcaaccagtctaatggttggatatgaacaacctctaaaaatgccaaaatgcaaatcagtacttaaatcaaaaaaaataaaattattgataaatggagtaatgtgcaatgtatagtacctatgcacttgaaatcataatagccaagtggaccccatacctaaaagaactcatgcttattgtcaagcggcttattgggaaggccatctagtaatactgggtcgtcgtacaactaaggtagtaaaagtcatctccatgcgtcccccttccagcgggactagccctcagttggtgcatgattaatactttcacaggcattag

SEQ ID NO: 6701 - DNA, 568 bp, Cannabis sativa
atcatgagattatctgtaattagacactctaggatgaatgcgctttgagtttcagaaataacttggtcaagaatttttttcaatctgttggcaaggacctttgagacaatcttatacaacacattacacaaggaaatgggtctaagatcagccatagtgacaagatttttcttctttcagatcaaaacaatgttggtatttgtgagatgctcttcgaaaacagctgaatcaaaaaaaaaaaaaaaatctcttactaaattaataatatcttttcccacaatattctaatttttttgaaagaacccccgactcatgctgtcggggccgagggacttatccgaatgcatttggaataaagcattcgtgacttcatcctcctcatccgcctctaataactccatattctgatctgctgtaatagagggccgaatacaatgaacaacacgatcccaacttgtatctaaagcttgaaacaagttatcaaaatagctaatcattaactcttgtaaattgtttttctaagtgactttttgaccagcttcattgcaaaggctgctaatatgattgg

SEQ ID NO: 6702 - DNA, 1507 bp, Cannabis sativa
agattctctatttattttagcatttagtaaagttttttttatttttttataattgtttatgttgaaattatttataaatatttaaaaaattctaaaatatttatatttacaaaatattaaaaataaaatttaaacaatttcttatcatacgtataaaaaaatataattataatgtaataaaatatttaaaacttatttttaacactataaattacggaatatgaaaaaatttaggagggtgtagtgtaaactttccacttcttatgcaattattattcatctacaatcatgatgaataactaggattatattcatctatgattttatatgtacaaaaattatataattatagggtttgatgaattcattacataaacatacttattattgttatttttatgtatgtcactatgtaagagagatgatgaagaagagagttggatatatataacccctcaataactttggttatggacttattacttattagtatttggaaatgagacaagttgcaaccaatgaaaaaccatttcataccaacccaatccacacttgttttgagacaacaaactgaatttggactctcctactcctcattttttcttattcttcttttgtcttcttatgtcatatacataattaacaaacactcacactctttcttactcttatatatttatatatttatacacgataaaaattttatttaaaaatattctattaaaagcaacttctaatttattataaaaataatgaagtctgaatttgaatcagttataaataagaatataacttctaaattataatttattatacattttttaaattatatgcattaaaaaaatatacctctacataaaaataattatatcttaaaaaaagaaatacatatatagtttataaatttatttatgtagaattaataattttatttcaaattgtaatacatatataaatattatatttatttaaaaacaattttattatgatataatatttattggataatattatcccacatggatcgaatataaaaatattgagttatatataagaatatagatgactctattcattactaattaattttaccaattgattttgagatagaacctatgattaatgattatttattgttattattataacatttgatacttttttgtatttaaatttttttagtatatttatatttagttataatctctccattataatataatttgattgatttctactgtatcacaattacatataatttttgtttttttttttaaagaaaattagaatgcaatattttgatatatatgtactataaattttgtttaatgtagtttggttaaggtatctactctaatctcggtttgatatatattttaagatcaacttaattttaattcaatagatatggaaatcacaaaatgcataccagacaaaatctattcccatataaatatatagaaaaatattcacattgtgtcaccaatcatgcatgcttgagatcttt

SEQ ID NO: 6703 - DNA, 1180 bp, Cannabis sativa
ttcacgacaaacacctaccatctccggccacatcgttggtagcatttgccacttgttttacaagactagcaccgacattctttactctatccttgaattcaatactttttgccacagtaacaccatctttagtaactttaggggcaccataactttgctctatgacaacattgcgaccctgcaaaggaaaaatgaaattgaaaaccatagccacaagttgatcacctaatcaaaccaaatactaaaaacctctccaaactttgtggggaaaacaaaagaaagcaacactataattcatgtcaaattaaccatctaccacaaactaaactgccaatcagacaattgcattgtgatcaaatccatatcacaacaaaactgattgtgaaaatactacactaacgaatcagtcaaataactcataactagtaatactaaagccactcactttaggtcccattgtcactttcacagcatcagcgagctcttcaacacccctaagcatcaaagcacgggcctgacccccgaatttaacgtcttttgctgcatagttcctcgtccaactcaatctactaccaatctaaatccaatgggaaacaaaataaacatatttgaatttgcatttgcatcatcaaaaacccaaattcacatccaaatacagtcatatataaacacatttagaaattaaacgacctagaaaactaaagaagagtcaacaatacctgctgagtgccattcttagtcaacctacgtaccccaaacaaagaaaacacaatgagaaaaatacccagatgagaaaacatcaaaatgagaaatacccagatgaaaaaaaggccaaaagaaacttaatttagcagtgattaaagtaaaaacctggttttggagacgagggtagtggcgaaccggtgcatggtgatcacttagcagagtagggaggtattaagtttagagttttgacgaagaaaaaatgggaaagaacgaaaaatacagatgcagaggggggaagggctgtaaagaatctttctttcttcacgtttttagggtttaagggtttaatgttgttgaaggaggcttaaccggccgagaccaagtacggtaacgatgcagaaatgttgaaggagaagattcatctacacatttgggccttttcttggatctgggcctagtgaccatgttagagaaa

SEQ ID NO: 6704 - DNA, 767 bp, Cannabis sativa
ggaattgtaggaacaaaaaaatgactccaactcttcatcctgagtacaaaacattagattgattgggatagatgtgaagtggttgagcagctccattattgcaactccatcaaccctctcatctcaaacttccagttgcccctaggatcaagtgggagaaccctcccctaggttgtgtgtgttaaatagtgatgcaagtgttccaaaagaagattcttactacggtttaggagctattctcttagatcaccatgggaaagttattaatgttgcaattcgaaggttgaagggccatttcaaagtcgagcttattgaatctttggctcttcttctcggtcttcaattagctaaaaatatcctctattcaccttttatcttacaaagtgattgccttcgagtagtgtagtatctcaatggattgttggaggctgcgacggattggagtgctcttcatgatgaattttaatcttctactataaagactgctaagctttgttttggaattaacagataattagggtttaattatgaacttgaataataattatgatttatcattttatggagatttattcaaattcaagctgtattacatatcatatatggaatttcatattttttttttgcatgttttgtgcccagcaacatcgaaatgcggcatttagccattagaatcacattttagcattttagtagcagcgtgacaatatagttagatattgagaatattgggattagttaagattttaaaattgaccaaattaccc

SEQ ID NO: 6705 - DNA, 1285 bp, Cannabis sativa
gcatactacttaattaaactataataatttaacatcttatgatcataccattaatattttttaacatttcactttttaagtgacaaaattttattttcagtcacaaattttattataccaaaataaaataagatcttttgctagattattcaaataataaagctttagaatcttttgatgttggagtaagaatccaaaattgaaaaagaggcaataaatagaatacaacaaatggaaggaccacatcatgtacagttaaaattggttattggtgaattgtaaattattttaatatatataaatatatataatttctttgttatagtttattcacgtacaaagtgaacaacatgaatcacgattcaatttatatcccatcaagttcatatagcttttggatttttttaatgtatagactgattaagaaagaggaattaagtaaacttgtgtatggtgaggtttgaatgtatcttgtagcaagaaagttaagaatgaagagagaagaacaactgagaaaccaaagaaagggaaatagaaatattttatatatagacatatttttgatagtgcaagaaaaaacattgtttgatatttttgtaattaagtagataaatttagtatagaaattaatttttttttattattcgatattggattaaaattaatggtttaatatttttaaaattaatataattaaatttgtttagtaattatcaatatatactcatttacagatttttttttaacccaatctatttttgaataaggaaaattcattaagattaacaggcctcagccttaacaatgtcacgcaaaaaagacggagcattcaactcattatacgtacaacctgacgataaataagatgtcctaacaacacaatgaacagctttatttgcaaatcgattaacataagaaggttacaaagaatttagcaaatctcgctgttccagacgtgttagttatatacataaatatatatatatattatatattatatagtactaaactcctaattcagttaattttaaagctattcaccattaaataaaccccacaaaaataaataaattaaataaagtatacctaaattttttttaataacaattaaattcctacataatacaaattttgaattcgtcactagctacatatacttattaaaggtactaaacattatttgtgctcgttaataataggataaatatgtattcacacagtcataggcctttataactcccatgcatacacacacaacttcactttcttttcttttcttttttct

SEQ ID NO: 6706 - DNA, 1977 bp, Cannabis sativa
agaacatatagaccaaaacaaatttattaaggagaataattagccgtaaaaaaagtggtcacccattaacaattataataactcaacagaaaactaaagctaaaataaaaatggtagttacgggaaaatagacattaaactgcctcatgagcactgactagtgactatgactttttccttaagtaaatttaaccgaaaaataaaaaaaataaaaaatgatgaaaaataaaaataaaatttttatatataaaatatagaagtctacccttttgatagatccgttttgacaattatttataaattttaaaaaaattcaagctattagaagttcaatgttatcgatgcattttatttattttggtatttaaaaaaaaattagtctaaacttttttttttatagttatctatgtcataattatttagaatattctacaaaatttaacacatcgaaaatataatttaaacagtttatttcacttgcgtataaaataaaggagtcttatgtgtaacatactgtttaaatccatatgtacagtctctcaattcatacaattttttttcaggttcgttagctctagtgacgactatcaacagtgagaagatgtatttcaatgagctaagagtattgtttgcctttcaaaaaaaaaaaaaaaaaaagagtattgtttgaagatattatagttttattatctaaattttcagagacgattttgttctatggggctcgctttgataatttagtagcccataattataattagacgataagctatgaagagattcgaacactaattaggaatatatgcattgtaaattctaatcacttagacatttcaaaaaaaaaaaaaattctaatcacttagtaaaacaatactgaaataaatagagagagtaaaatggactctttttttaatgcacccaaaaaaaaaaaataataataaaaaagcaaccgctgtattgtattgtagaggagaacccaactattttctcttttttcttttttttttttttgtaattaatttattaaaataaaaatcatccttacttacaatctctctttctctgaccaaaaattttgcagtgacctcttcttcctctgatggcttttccgaaagccatggcaccaatctctattccttgctttttccattcaataagctctctcaaccctttctgcaatgtctgattctccctcttcttcttcttcttcttgttcatccttctgagcttttttcctttcctcccatggcgttggctcaagctctgcctcgcattccctctacctgttggctatgccgaatcaacaagaccggttccaaaaccaagaccagtaataccgccaacactaccgattgttattactactacagttccaattttcataaggaagatcagaagaaggcttcttcttcctcctctgggatcgccatttctagggtttatgtgtggaggaagagtaattgtggctctccttctgttaatggacggtggagattgagcgctgttgatacccgcattgttcagaatgctgctgctgctcctcgtaccactgttgagatccctgttacttgctaccaggtcaatttacccctaaactctctattctttttcatgatttgttttgtagctggaatttttgttactttgcaatgtataggaagattatgtctaaaattgttattatcactattattttcaggattagcattgtctgtggtaccagtttaattataaatctctgtgtcattgtaaatcatgtgatgacagttatttctctgtttagatttttctgacaatgaataatcttgtagcttattggtgtgactgatcaagctgagaaagatgagattgttaaatctgtcatgaatttaaaaaatgctgaaattgaagagggttatagcatggatgttgtttcttgtcgtaaggtagggacatgggcttttaatgttcttcttcttatattttaaagaataatcc

SEQ ID NO: 6707 - DNA, 1650 bp, Cannabis sativa
aaattattttggttataatgaacatgatcatcattttaattacaaaaaatgtatccacaagtataaaagagtaccatttctaccatagttatgtgtataaaagtatacaccattatagtggtgctctacatgtctatgcatgtatacatacgtatatgtatagtcatatttctatcacatgtaagtgtattcattcaaattaaactcatattgttaaataagaaaattatgtatcccaactattagattgcaccaatacacctagcgttccccttcccctcgctgcttaataaacctaataccaacaaataatgttaataagaaaaataaaaatcaaaatatagaaaaaataatcatacaatatatataaatatgtatgtttgaggcatgtatatgtattcatataaaatatatttatacatttacatgcatttttttcctaaaatattacatgatgaaatacatatatattgttaggaattgacctccctcatcaacttcatttacacttaagataataaactagttagctagtaaaacacaaccttgcacaacaagaaactaagaattatatagattcaacccaaaattctcttaactatgaacaatgaagatcacaatttgtcgcccaaatacactttaatgagttctcatttataagttccaagtattttcttttacgttttctctttacaaatgacatgtactcttattaaaaattgttacccattttattactttttagaatttttttataaagtaatatgtagaatgctatatagatgtctagaaattttctaaaatcttttgttattgtaagagattctagttatatgattaaaatagaataatcttcaataaattatattaattacaaatcaatcttggtttggtatgaaaccttgaccatgacacatataaacaactttaagtagatcatttaccatcaaattagttagaaaggccattaatactaaacaagtctcttacttgactatttcccatcttctatattcacaaatacacactcttttataagatgtcctatatatcccactatcatcgataacaaacatatagataaataaagaacaagtcattatatacctatctcccattattcaatatatatatatttataaatttttactaaaccaattattcacaactacacataattctttcatcattaatttactgaagcaatattctcatctaattattcaacataaaccatcatgaagcgagagtcatcattccaaaagatattacatcttcgaaaacccacaaaaatgacctaaaggagagtcaacaaaataattctcaagtattattctacttgtagaaagtcatggcatgtaacgttttttcattaattatgggcacagtgacgacaaaacaagcatgtgacacgttacatgaagagttccaaagaacaacaaatgttacacactgccaaactattgatacttataagagattttattaaaaatcttaaaatgaaagatagtgagagactccaaaaaattattactctagaattataggtttagtaattgatcaaatggatgtctacagagaaataatttatgacaagaagatagtatagaaagtactaatttattgaattgaaaattttgattcaataat

SEQ ID NO: 6708 - DNA, 900 bp, Cannabis sativa
tggccccatcatgggtttctttcccttctcttgggaaactttctactgtttcttagacaagtcgatgaccggatgatcgacaacatcacttctcctcttctagggggattcgcacaagaaggagtcgcgagatctttgttagttttcaacttgcaattgaggaccgaaacactcttcaaaaaattcatatctacaaaatacactaagtataaacaatcatatgaactcatagaaaattatcaattgaaatggaggcatattacctgcgattttccttggagtttgtttggaaaaatgcttttcaatctttactttttatttctcagaaagttctttatacactggttctcgctgaaatctagcattagcttgaatttgtttgtgttctcgcaatttagcagagttgcagagaagatgccaatctcgatccttaactggaagactgctcaaaacttctgtaatttccacacgatcctgagccaactcagatcgagttggtctacttacgatcataaatagatgtcagcattcataagatagagggaagaaaaaatactaagtataaaactctgcgacgtatgaggacgacaattaaagtctatcctaactccaggcaatgaaaatgcataaaaccacttcaatttcattagtattaaactttttataacagggtttcccgaaatacatttttactaccgttatgatgtttgttttaaatgttttactttaatcaagtttttagtattaccacaatttttaataattagctaattcattagtattaactagttttataaatcacatgtggcgtccctatagaaaagggtgttacaagctctatggcaagcgttagaagagttgtatggagcacattctagagccaatattgatgaactttgc

SEQ ID NO: 6709 - DNA, 1505 bp, Cannabis sativa
gaagtaggaaggggacaagtaggctgacaaatccttggtctctagacctaatcaattgaatagcgtcaccggtggtgcttcctcatgccaagcgctggcagagggaattctctctcttctccagggtcctcgcaagcctggagaggaggatgtcatcatccaaattaggtgtatgcccacctcttagacaagtcacctctactatcgggacatcatctgggcctccagatgggccctcaactccctcaacattaaacttgggagggtactgaccatacttccgaaagttggcctcgcaagcaaaccttaatatattcctcctctaaatagggagaaataggatataatgttctctatctctcatcccgagagtgggtatggagcgtgagtaggctttcaccctctagaagttgtggtggacttgtgggatatcccaggcaatgaaataagtcccggtgtatcctgccactttctacaaagttatgctgttggtgttacctaaccactaataaccaagctgactgaagaagaagtatgtagtcttgttcttcctcgaaacaaattttagcttaagatagtacccaatctcatagggggggctgaagccagcctaactctggataaagaatgacatcatcgaaaggtactttataccttttggggtgatcagatccagacacaccctgaagtacatggctatatctctaaagtaatggtgcaggggtagcactactccctgctctttgtggcgctctgaccaggccatccatttgaattccaactaacgtgcttgttggtctcttaaaggcataccccacttgaaatccccccattacccctcctgccttgatcttgttaagcttttgggtggaaatagaggatggaggagatatccactagcttttctagtccccatgatcaagtactcggggtgatgtagcctcctctagaacatggtctaccctaacctcagaaagatgaccaaggctgttcaaaggccatctgacctcatcataaaaacacaaggggttgttggggaatacaacacaagtcttgtactgcctcctggaaagcacaacatcctcaatctcagatgcactatctgagttctcctcatcttggtcatccatgggtcacccagccataggtttcttagcttcgtttgcccctgggtatctatcatactgaggttgtgcaacctcctcaacaatgcctacgctccctctagtcactagcataggaatgtgaaggtcataaggtggtgccctgtgacacgtctgcttggtcctttccataatggacctcgagtgcctagcaatagtaagcacgatctctacggtaggaagaactcccaatggagaaattaccctagcaataggcaaagtgttgggcacatcatcctaaacaatgtaagtacaggaaccaggaagaaactacgtccactcgaggctcaactcccatatgaaccagctataaaactcattgcctatgtgctctgaatgacg

SEQ ID NO: 6710 - DNA, 685 bp, Cannabis sativa
tatgcacatgtaaactaaatggagaaataaaagagagaaaaaaatgttgtcagaaatgttgatgaggttcttgttgagaaaataaagagagaattatttggagagggccagagagacagagtaggaaagagaatatttgcatgaaatgaaatgaatgaatcattaatgatattctattgtatagttttatgaaaagtacttgtaataaatgttaaggcaataaatttagacacatcttgtgactataagttggtattatattattgttaagcacatgaagatggtcatctttggaccaagcaccaaaaaacaccattaaagagaacaccagaaaacaataaaaagtgtgtttggaaagttatagttggaattgaatttaggtatgctaaaaggtgatagtcattactgttcaatgaataacattgagaaatattaaaaaaaatattaaaaaaatattagtggtgtctaacacccttttacgtgtcaacatcactattagtataatttaatatcgaatcttatataatttaatataaaaatttttagagagtatcgttaaccaattataagataacatgattaaaaaatactaaacactactgatgatcaataacaatattcaatataattagagataattatatataattaaagaattggggagttttaattacattcttcaatt

SEQ ID NO: 6711 - DNA, 631 bp, Cannabis sativa
ttatttatttattattactattatattaattttcaaattcagttttggcaggctcttggcatagatgggtggtctcagatctgtgggatttttttttatataaatatgtgattattttatgtagattttgtggcaatttttagtgtattttttgagaaatattttgaatctgttgtttttataaattgtgggacattatgttgttgtttattttgatctgaaatggtagttatttctttgggctcagatctaaaatggtcaaatatatcttatttttttaaaaaaaaaattaaccctttcaacgactgtgcaaaatgattggcaataatactatagccgaaggttttgtactatcagctatactatagttgacagtccaaaactgtcaacaattcttcctactattgtcgacggttttcaactattggtaaacctcattaccgatattttctacaaacgcctattccacccgattttgcgacggtcgaataggcatcagttatagagaccgacgacaattcaatacccgactattttaaactattaagaaatcttctttttttagtagtgctgcaataactcaaaatttcatcagttgatttctagtttgaagtttatttaaacaagctaa

SEQ ID NO: 6712 - DNA, 652 bp, Cannabis sativa
aaaaaaaaaaaaaacaagagttgataagtggttgataatatacatgcagtaaataataattaattacaggcattaagttaattaattaaagctcaatttttttatagataaatgttaacatcaatcattttatttcaaccagcacatacattaatcttatttaaagttaaaagttgttatccatggtgattaatataagttcaaaagttttatttatattttttttaaggatttggattttagaattaaaattatttgcaacaaatccaaaatagcatataaaaccaaaaacgagattaagtaattaattaaagtttttgcagtcacatcaataaataataataaagtaagaaatactgttagtttgtttttatttgaagcagcttggaaattttataaggtgagttgtgctattttggccggagtggctcacaatgagaatatattttttttttatttgttattattattttttatttttcattttctgaaaaaacatatttgaagattttatggcagctagtaggtgtgcacatagattgagttgggttggctctcggttagaggtgttttaatggattaacttaatgattgcagtttgaaaaagttataaattatttatttttttaggagctaattagaatttttacct

SEQ ID NO: 6713 - DNA, 841 bp, Cannabis sativa
tgaaaatgtgccttgaaatagaacctttatatgaatttctcacattctttatgtaacaaaattctgcattattctctctacgcttcaagagttgactgataagcaacaatattttccttccacactacattcagtttctcagacatccctcatcacccgatatagtgccgaaaaatgaaggtaaaagatgcgtaaacctgccttgattgctcccacaatagatcatcatgaaggcaatggaacaacagaacttcttaataatcaaatccaagaagaagatgtaagtaactacttggctttctttgtgtcagaaaccctggttcctgcaatcttacaaacaggctcttcttttggatgaagaggcattagtgctggatggaccttcaaatctccaacaactaacttctggcctacgtccaactcgctcagatcaacatcgatgaatggtgggacaacatccgcaggacaaagaaacttcactgttctctttatggtgtttaaataagagcctgcaaagttgtttaagtcatgatttaaaccagaatctagaacactaaataaatctgctaaacagaatgaatgaagtgattccaagcaactagaagtacaagagtagaaaagtcaagtggggaaactatgacgaaaacttgaatatagagctgacattaactaaataaatccttagatagatgttatttcttataactagacagtttagcaaattagttgtaagcctgcccattaagttagtaaagtctcctgacataaatgtaatagattagatgtcactttttaggtataattggaaaatggtaatggacaacttgacagcaaagacaga

SEQ ID NO: 6714 - DNA, 1266 bp, Cannabis sativa
gtgaagcatcaacttttagctcaaaaagaaaaataaattcaagactgcacgaccaaactagggccttaaatttgtgaactgtagaggtctgtcccaaccttttacagtttcaagccacgcccctcatggctcctgtggaggatatgaattatcctcttccacaggattaccagccgacacacgcgaaccagtatcttcagccacagtcgaagccagagcaatattgttaatagagcaaactcccaatggtcttccacaagcctcaccattatccttagtaacataggtggaacggctactaacctccaaatcttgttctgacccatcattgtctcaaggaaaatgacgaatgacccctgggtgttgacaatgaattttcatcggtatagagcacacagaaatggaactttcaataagctttcgtttctttagtggggtagttctttcgttttgctcaaaagtgggttgggctccaatatcccctcctatcttctttatctcataaacatccatctctccaaattttttaattcttgtaaaaatgtttcttgggcctaaaaaaattggacaaggccctactctcatccccaatgaaactaacctcctgcccgtaaataaaattacttttagacccaatagcatgacccaatagagccaacccaatccttttatttttatctaaactttcgggcccaccaggcttagagggagacacattgctcacgtgatccacaccttttcctttcgccagctcatcaatagcgtacacattcaaacagttatcttttgaaatcaatatatcaagaatagcttcagaaccacttttatcatttcttcgttgagcacccttgccattaataaaaatggaaagagcattatcaagctttttattaatggttttgggaacacaaacttgttttttattcactgcctgaggaatatgggtcaccatcttgcttttcctcaaaccaggtggagccgaacccagctgtgtcccaatcttgccaccgctagagttactcgcaagtaccgtcagagatacggtgaccggcctaccaccttcagcagcactgctagatcctgtggcagtgactttacgtcacttcttacaaaaaaaaataatcctcgtacagtttcgtggtgaacagccaaggcccatacaaaggaaacaaaactccatgtccattcagaacgacatttggggttgagaggcggcaaccacggcgttgatggcccagacggccacagttaaaacaaaaaatacca

SEQ ID NO: 6715 - DNA, 804 bp, Cannabis sativa
  modified_base (167)..(168): a, c, t, g, unknown or other
tcaatttttttcttctaaattaagttctaagttagttattacatttaacttaatgattttttttttaatttattactcttgtaaacaattttttaaactaattaatgctaaaataaaatattttaaatattctaatttgacctatttatatatactagtaaaaagtnncgtgcgaggcacgtatacttagttttatgttaaatatttttaattttatttaaaaataatagaataaataattaataaaaatattacttttggatcgcttacacaatgaacactataggtattgtctggacagagagccctacaaaacaaattgtatagaaattttggaaggaaacaataactgaagagaagaggacaaaatcacatgataatctagtactctagtagcactacaattcttggtgcacacaaaatatataatattagagatattctaactactttttataaaaaatttaatgatatatttaaaataaataataatcaaattcaagatgttatctcccaaaaattcggcaacataacaccttaaaattgatcattctcaaatttttaatgtctataaacaaaaccacaaatacaatactagaacaatctaagtattaatatttgtcacctatccgaccgtagtatattttttcacagatcctacttcactatgtatgaatatataagatattcaaactctactaatatgcatttttattttcaaaactaaagtaacatattataaaatcatactaacctctaaatacaacaagagctgataaaatcaactggcacaacaggtaaagc

SEQ ID NO: 6716 - DNA, 671 bp, Cannabis sativa
gtttttcatgagtagaatacacatggcatcgacctcttatctatttgcctgtggtttgaccacgattgaaaaagtttttataatttagtgtttggtgcaaaaatcagtaaagtggtcactatcaaattacttttcattatcggacacgatcttatgtggaatgccaaaacaacatacaatattcttgattacaaaatccaaagcctttttgggaggtgactgtgtttattgattctgcttctatccacttggtgaagtagtcaactaaaaatatgacgtatttcactcctcatttcccaattagaagagaccatactaagtcaattcccaattctgcaaaatgccatggactgctaatgagggttatttctgttggcctagcccgagggaccttggcataacattaacattactcacacttttggacgtagtcaatgcagtcccctttcatcgtgggccaaaaatacccttgccagatgatcttcttagatagacttggtctagatgtgtgatctctacaaaaaccttcgtgtatctcatagataactacgttgatttctgtcctgactgtgcacttcatatatggtacaaataaccctcttttgtacaactttttgtctaggatgacatatctagtgcttagcgtagcaagatgaactatggggactacc

SEQ ID NO: 6717 - DNA, 1991 bp, Cannabis sativa
gggtatggtacactcgattgctgataactgcaacttcttacgtctgtttgctagaattattatttcgaaatgtacacatgcaaccaaaagcaggaagccatttcaactaactcttcttcagggaaacatgcttgaattctttcctcaaaggctaaacttaagtacgaatttggagataagatgcgtattcggccaaaattcttggaaaggaaaaaatatgttcgaattccttcttacaaatatttgtggacttcctataagtttagtccatcgggttgcataattggctaaaatgacaggctgacaagaacaaaagtaagaaaagtgcctaaaagtgtaaagcaatcatgggcatggctcgtaggacttaacctcgtaaaagaaataaagcctcaagaagatacgtgaagttgcgtaggctccttttttgcgaaataataccatctccaggataactcttaatgggggatttcttcccaataagaggttaagtggtaggaagaagtagtatagctccgggaatgaaagggtaaaaccaagagaccatccctagattgaccaaaaaatgatttagactagcaggaaaggttgaaacactggctgctggaaccaaatgctttgatgagacaacaagaccctaaaaagtctatcaaaataaatctccaacaaaaaaaggcaaaacacacaaaaatttatctttgcatcttaaaaattgtagtaaaaggagggcatatatacacacaaaaaaacaaacaaacaataattccaagaggcctaccaaagttcaagactgggcgccactagatgggtcagaggaccccgctctagacaactgctccactgtctcccggtataggtcatgaatgaccctcataccccgtatgagacgagtctatcgagcatgatcgccctccagcaactggttctccttctttaggcctttaacctgaagcttagcctcagtgagctcggccagaagggtctcattagcactatgcaagtcctggttatccgccttgacttgctccagttctatcaccagcgtgtctcctaggcagtcctcttcgcgcaacaaggccacctgttgaaattgtccaaagtgaaaggaccctagaatcagaacagggggcagaattaagaagaatgaaaaaaagggaggaagataatgtctcaacgccttaccccaactgcctgctgcttggtagagtgggccagtgccaaaacatctatgctgctgcaggacgcccaggtctccatggaaaactctgaggtgttcccagccatgtggcccagaagctcggtagcgaaaggtgcagcctcactccccaccttgaaagccaattgctactccaaggccttaacctccatggttggccccgcaaggggcaaagtgtgcatgtctgaaatcttggcctttcacaccgccgagagtacggtggcgcttctcctaatttgcacctctctgccttcaagctccccttcaaggccctgttcacttccctttccttttgcaggtcaagagggttaaaagggacgggcttccatgggaacataaaccccactgaaggtattcttggcatggctaaagggttgtacgatcggggctggtctagtctcaatggcagatcatgacgctggggtggggcccagtttcagaggaggctacttcaagccttcatttttttctaccaggcctactgtcacatatcgctttagaagatccagtattctccatcactgccgtgacgaatttgccagacattaaaatgaaagaaaaaatgggtcaacatgacaagggaccacaaaactctccacctctcatgataaaggtaacaggcatggtaccgatatccccagggcaaataatcgcatgtaatacacacaattccctcataactcaaaaacaagttaacggtaaagagcacttactagttgttaagagaaaatgaggttggtggtcctaacactgcggccttgctgacgggatgtat

SEQ ID NO: 6718 - DNA, 524 bp, Cannabis sativa
tcatttctctttgcttccttggtctttccttttagtttaggttaaggtaaatgcttatttggctaggaattaggggctgtgagtttggttttggtttggtattattttctgaagtggtaaagtgattatttaggttgttctaagcttaaatggatggttatgttgttacttgaatcaattggagctcataagctcatgtgggagctttaatggtgttttcttaatttgagttgtttgttgtggtttgaggcttggaatgagttgtttggggtataagcaggtgctctaaaaagagattgtttagtttgggcttgaattgaatcaaagggctcggtttttaggttccctgcatagaaccggtcgaccggttctgggggactcatagaaccagtcgaccggttacctagaaatcgggattccggttgggaaccggtctgccggttggggctttttcccgaaccctagtttttcccgtttttgcgtaatttacggtattagcttcctatctatcgatagggttatcc

SEQ ID NO: 6719 - DNA, 720 bp, Cannabis sativa
cagccgcagcggcctgagctgcttgtagagaggctgcagcctgagctgcttgtaaagacgctgcagccttattcctctgtctctcggcagcctcttcatccataattgtactcatcacactagaataacccttctgaagtaatctgtacagcaacaaagcagacatctttgctctatctctgatcgaatcaacatcaccatcatgagaaatctcacaacgttctataaacccagttgccttttcgggcttgtgcctcaaacacagcaagagatgtgctctctcaagctcagacctcgaacaccctcgtctaagaccgatcaaagaatagtaatccacattccctgtttccccagaagccaccctctgtttcagggtttggattttggtcgtgagagcacatagcttcccgggtatttctctgtacctaacgttgtggcgtttccataccggaccggggagcttccggtcgcgtaagatggtgttgtagagaagcttcaagtgctctagatcgtgtaagcaatcaggcaagcaacggatggtttccagcaacgaagctctggtgtcaagagcttgaatgcagctctggtcgagagccagagttctgttgcagtcagcaatggcctcggcgattctgcctgcggacttgtacgcggccgcgcgatgcatgtagcactcggccaggaatccttgtggggcgccgcggcgtccgtcgacgatct

SEQ ID NO: 6720 - DNA, 575 bp, Cannabis sativa
ctccctcgaggtgagaagaaagggataaccctttccttttttgagcaaacttgtattgttcaagaatggttcttgctgaaaaaacgatagtagcagcagaagaggttttattttgccaaataaactcatttcgagacttctaaattgaccaacttatcatagcaacttcctccaaaacattctcactttctttctcaaacaccagcagcaaccaatcaaagaaaactgatacatcataggctgtcatattaacagccgaacggttccagcaggcacgagaataagaacagctcactagagcatgcattgttgtctcagcctccaagttgcatctggaacacacactgctaacaggaacatgccgatgttgaagttgtgcacatgtaggaagagtattcgtagcagcacgccataaaaagttgctgacttttggtggaatctttaaatcccacagcttcttccaaaaaccagcatgattagacgtattactatggcctttcaactctctctaccttttataggcactctcaacagtatacacaccatggatatcaaacttccaagcccaaaaatcg

SEQ ID NO: 6721 - DNA, 560 bp, Cannabis sativa
tatacggaacaaaaatatccctactaataaagataaaaagcaaagtttgtaatgatgataataaataaaagaaaattacgtatgtgtactactcaactcagtcccttcacaataattcttgattatcttaacctagtcgttacccacactgcccactttcacacaagtacttcaataatatggccccaaaaaaggtgtgaaaaaagaaaacgaaagaaagaaagagtgagaaaagcagtggttacaattaaatactctgtctcctcattccaagccaatcgaaaaataaaaacacactaaaaaattatatatctttggcttacatgtgttgattagccataagtggcacaaataataaaaaaaaaaagcattattattagataaccgtagtgcttagtttaatatattttgtaagtggcgcttcacgattaattattttcagtataacatcgaaaaaagtgctaagtactaataatatctttcagtatttctctaataaaaaatattaaagagtgaaatttgtggttataggagaatgagtatttgaaaaagtagatatg

SEQ ID NO: 6722 - DNA, 1386 bp, Cannabis sativa
tgttcttttgtttttttggtttacctcagtggttgggtgaattggaaggtacaatacaccagaacctattgtgattggatcaaaggtaacattgtaagctttgagaggttgagaaattgatgatctgaagttgttgagagcttcatcaagactcaaacttatggccctaacgactgtgatgtggggttggaattggggtccaccgaactcagctcgaagaaactccatgagtttcttcactctggttacaacctcatcaggtggaattgcccacactgaatacatctccttcttctccattacaacctcttctggttcttgggtaaaacagagaaagtcaatatcaatttgagtgtgaaaatgttaaataaaaaaaatgttacttagaagttttgtctcaaagtattattggaattgttttattagttagaagaaaatggtattatggtttagatctcttccccactcattttagcttagacaatctcggagaccacgtgtcagttataggagtcttatatctcattgatatgtatttcgtgggttcctattccattaagattggcactgccacatctaactagccttccaaagaatcaagcataatccctcccgtgaggagttgtggtagattttcatcctattaaataggtcacaatactataattatactaaaagttcgtggcgacattaataaatcgattcatggtgcatatccttttcttacttattcggtagcttagataatcttagagatcacgtgtcagttataagagtcttatatatctcatcttctcttaattgagacatcagtatgcacctcatgggttcacattctattaagattggcactgccacaactagctagtcccccaaagggtcaagtataatccctctcatgaggagatgtggtgagtttccatcccattaaataagtcttaatactataattatactaatagtccgtagcgacatcaataaattgattcatggtgcatatcacttccataccctttcagtagcttagacaattgcaagaactatgtgtcagttatataagttttatatctcattttctcgtaattgagttattagtatgcatctcgtgtgttctcatgttattaaggatggcaccgccacaataagctagactctcaaaagaacaagcaaaatctctcctataaggggctttgctgatttttcatgctattaagtattatagatattgttggattgaaagatttttatttaaattgtacccttttttttttatttatattaagtatccgtaataaaattaaatggaagttgagtaaaaaattttagtatgatttatatatatttttaattgatctaaatttcatctaattatactttttttttttt

SEQ ID NO: 6723 - DNA, 1041 bp, Cannabis sativa
tggctaaaactcttgcagctcttctgttttacttgtttccttcttttacaacataaagttgctacatgagaaaccagcattgaccagttttgggaattttttcaccaaccatttgtatgggattaattgaatgaaaatgtcagatggtgtgacaaaccttgaggcaaaaccgtgcagatacgtcttggtcaaagactcccaaagcaacaaccggaagtgacgagaagaaaacattataaagcgacaaaaaccaatcattgtaggcaggttgtccagaaaacgatgcgtgtgcctcgtataagaagagagtgaaaccaaaagtaatattcttgtagaagaaatagcatatctgcaagaagatgaataaagcagtcaatcatttgttatacaaggtaatcgatgattcatatattttcaaaatcaagtttcttaagccttaaattacagagaacttttttaccatagatgaaatccgtctataacaccaatgtccatgcacaagaagcaaacgctccaaatatctaaactgtgcaattgagatatcacttgacatgactgcctgcattccctcaactccactgattccaatcccaatatctgcttcttgaagcattcctacatcattagcaccatcgccaatggctagtgtcgtttttccagttccagatttcacaagtcttgtaacctatttgttcccacaattttaatttttttgaaaaataataaacataagctaatccaagggaaacataagaaattacaacaaacgaaaagtaacctaccagtgctttctgttttggtgaagaacgacaacaaataacagatgcacaagcagtggcaagctctagaaacagtttcttcatatcatcctctagtgcataagcaagtgatttaccatcaatgattaaagcaaatgccacagaaccaacacttgctgcagcatttatctgtgcttttccatcttttatttggagaaggacactctcctttgatgcctaaaagataaagtgacaacattcaatcaaaatgcaagtgtgtgtg

SEQ ID NO: 6724 - DNA, 743 bp, Cannabis sativa
aagtatagataaataacgtgtttactaaaatatatatataataaggttaatttggtgtaatattaaagggtgagtactagagagaatggatgtgacccacatgggtcttgaaaagtggagaagaatggggtaagacaaagagagattgttatgattatggcagtcttatatggccaaaaaggacaatattcaaagcttactacatattctttgcaactctccacaagcaaagccaatttggagaaaattcaactctaccgaaaagatgcataaaacttaactttgttttctctttttctttacttttcttttcttttttattttggttacttttccaatattaagtcacattttcacactcatgactacaacgtaacctctcttttcttctctctctctagatctctcaatttattttcaacgaatttagtaaaataaaaaaaaaattatatacaatttaagtttactgcaaagcaagaaccactattataacaataattaaaatcattattgcattatagaatttacagaaaaacaaattaaaaactacctaccttgaccaaaaagctagatattgtaatattctagcgcataaatgctttactaatttttgtcacaaacagtcatctaaataatattctagctgtgtatatttttatgtatacgtaattgataataatttctccattataaaagatattaagtctacgtacctttgatcattaatcgtaaacctaattatt

SEQ ID NO: 6725 - DNA, 1379 bp, Cannabis sativa
tctcccgttgtagattggtgttgttcattcttccgttggtctagatgatcgactatttcctcgattacacagcttgtggaattttccttatttttcccaatgacaacaaacttattatgcagatcaatagccaactcaataccattcgcattccacaggttgcgatattggctattattttccttggatgaggaggctacaccttttttcttgaaactcttcggagtagcccctatccaggatttagacttcgtcggcctacctcttttagatgaagaaggagttggtgacgagggagggtcttcaacttttcttggtcttcctcttctcctctttggcaatttgctctcagatgatcctggtgagaaggtagtggggttgtcttcaagttcgatcgacttttgaacgttactttcagatgaatcgtgagcagtaccagatgatgtcccttcatgggctgggataacaccaggaaccataaagaaaccatccactgctttcctctttctgggcccattgtcattatcaaaagacttaaaatcatcaatattcaggattgggttgaagagagtaggttctctttggaatttatccacagtcgcagatccagttagaggcccaaaagccctggcccagcaaattctagatggccattccaaaggttgggcctgaggcccaagaagagggttaacaaaagccccaacagtgaaatcactttgcagagtgaaattctctttttctgtaacggctatatcgcgtggatcattcaaaaggggattagtagcattagcagaggacatcatcagtctgaccttactagctttggcaaatttactattctggtgttgtggctgagtgtcgggcaatccctcctccttgttttctatcccagaagggttagttgtcatcaggccaatgtcggacttcgccagctctgtatctggcttctctgagtcggtgttgggtggtgcagcttggaacgtcgccatctgctcaacaggccgttcagggatcactttttcgacgactccttccgccgtgttttcgaacggtgtgatctcacccgttcccggtaagtagacggacgggaaacgattgagaaccacctcacccgtctggaccctgttttcaatcactacctcgacttgtcttcgtttaccaggcatctgtcgacgtagctctctgcactcataagcctctgcttccttccaacgtctctgcatcttcatctggttttttatttttggatcctttaaaacttgttgctgggcaatccaatccttaaaccagtttggaagggggagatggaacgacgatctttcaacagcatcttcacccatccaagaaccgaacatggggtaaaaagcccctgtttcatc

SEQ ID NO: 6726 - DNA, 612 bp, Cannabis sativa
ccgccactgtctgtccatgtcgcaccgagctggcgggtaggtgggtgtcactttgtttttctagagaaaatgtatttattaaattattattattatttatttaattaattaaaacagtttttttaaaacgtgtttaattaattggtaaacaaaggcttcttattttttagcatcgtttccacgatcccacattctaacgtcctcttcagtaacgtctttcttcccgctactaccttcggtgtattgcctttataatgcatcagaactaacgggagaaatacatctctctttctcactgaaaaatatatacgatatatacatacaattatttacatatatattccgagcagtaatcggttttttgggtatggtatttcgacggttctttatcgtaaaataaagttttgatacagtttgttcgactgtgctattttatcatgaggatgacgaggctgatagtttacttgcacatgtctaggcagtgcctcgaacgtcttaaagagaacgatttaatccgcaacttaatctaaattccaattcaataaattcgttccttttattttctgtggcaactatttttacaacaatacatttcatttcaaactcagatca

SEQ ID NO: 6727 - DNA, 572 bp, Cannabis sativa
atatatatatgtatatagaactatacagcaagtcactcttcatcacgatcataatcatcatcagaagaagaagaagtagcagctggtggtggttctgatgataacacatcaaccataatctgcataactctaactctcaattggagattcaaaatatagtcagcggtttctctgaaaagcccatccaacccttctgattccctcccattaggaacaagcctctttagggttttgacctttctcacgattccaccacttccttctgttgttgttgttgttgttgatgatgatgatgatgacccttttctcttcttcatcaagatcctcttattattatgtactccacttctagtacttgttctccgggaaacgacatgtcgtttcatcaacaccccttcaaccaccgtcttgttttgtgccacctcatcatcatgatgatgacttcctcgaacgacagcgcattgatcagtaactcccatattatattaagatgttttaatacttgtcaatgcaaatatatgtatgaatgagcttgtgtagagagcttttttttctatgtatatacaagaata

SEQ ID NO: 6728 - DNA, 1111 bp, Cannabis sativa
ccaaaaaaaccccagcccattttccactttcgcatctatgtgagaaaccgtaaacgagttgatggtgacctcccaactatctttccacaaaagagccaaaccaccactcttccctctagccgcaacaacaaagcaactatcgaaacccaacacaattctaattctttccatagccgcttcattgagtctcgtttctgccaagaaaatcatcccgggatgatgatctttaacatgggaacaaagagtttttaatgtccaagggttcccaagcccctgaacattccaaagtaagatattcatttctctcggcgacccagctccgctgagttcgccgcttccaaagtcaccccagagatcaaatccaatacactggaaattttctctggttttaccactttagctgccttctctatgattcctatcggtccttcttcctggtccataggtgggagtttaatcttagcatcactctttttattcctcttagtcatcacccttggttttcgtcctcctttcagtcctgaattggcacttccatctgttgtcccaaaattgattgggatgtctttccaatcgttcccagtttcagggttatccatcggtgctttcaattttgaattatggctctccctgtgaatttgtttcccgttttccttctgtggctcatcttcatttcttccaaattcccaacaatcagcccttcttttaatacctgagctacttccccccacaaattttcctttagttctatcttcattaatcaattccataaggttagtataatcaaaaggtagaaaggagttagaaattggtacctccacaagattggaattcttgttagtgattctcggtactggtttagctccttgaatacccgaagtagaagtcccagccgtttccttcgatttgttaatcgcaggatcctggttcttcttggaaaaattaccgccttctttgccaatctccatatcgtgtctatggttgaattcagagttcatggtgaccttctttacctccttctccttatggttttggggtttatcctcaaatttcagccatgctccataggctgggaagctattccccactccatcgataacattcacttgtt

SEQ ID NO: 6729 - DNA, 1346 bp, Cannabis sativa
ttttagtggtttccataattttgtttctttcttcacaattgaggcccttcccaactcgaatttggttgggtcttgatgtagatatgaatctcttccacctcttccatgggcttgaggttggcttcgactcccattcggggatctaattcatcctgtacctctagtgggtgccctcttctaacaggttggaccatgaggattgctaattcggaggccacattataacaatttcttgcttccccttcgttccctcagacagttcccacacccatagagagagtagggaatttgagacacaaaaacatgattgaccttatggctttgaaatccactagtatcagttgcctaattattatgttgtaagttgtttgacagtctacaacaataaaggtgcagtacttgaatgtactttgagggtatctaggcacaaagtcattgggatcctaatttttcccatgggaatgagagagtttccattaaacctggtaatttatgagccactaggtgacaagtctcggtctatgaggccaatgacaaggaaggcctttttgaacaatatgtaaactaaactcccattatccacaaaaatttgtgctactatcttgttggaaatgggagtttcaattaccagtgagtcgtggtgtggaaaacgtatcgtcttggcatcttcctcgataaatgttatgagttgatccatgagacgaggtctctgagctggtagttggcccacttttcatacttatttgtcatggtccagggccttggcatacatttttagctcattaagggttgaaccttcgatgtgaggacctctagagatcatatctactcttccatttagtctaggaggttgtcctagcaaagtccattatttttggggaagggctccctgaggggcttgcacttcaggagcttgcgccacgcctccgggtggtagctgaatcctaaaatgtccttttttcatatggggcaagaagttttctacccactcatacaagtggccttgccgtattaggcgtttaatcttgtctttcaagtttttgcagtcattagtagtgtgcccgatatcattgtggttccacatactttgttggggtcttgctgggagctgtctcgatataaaggaggcagtctctagtagtgaacatttttccttgtggccaaatacacatgctcttatgtatccactagattagtatattgcatatactaggaattatacctggttatttttgcgtttttgctcactctggatgcttattttggatgaccgtttactttgcgaggcttttggagctgcaactacacttgccatcagggttgcagactgagcaagatattgcatg

SEQ ID NO: 6730 - DNA, 676 bp, Cannabis sativa
tagctagccatcataggataaccaaaggacatacacgactgtcacatctcctatctgacactcaaaaccatctacatagaagaaataagagaaggtgagcaacttgacaaaactacgtacaaacacattcaggagcaaagcttctgtcacaattaagaaaaattgtgagagtagtatatattttcaaaaataaaataaaataaaaaaatcatacccaatatgagagacttttttagtgttgatccgaaagctcaaattttctttcaacattgacagttttgtcttagtaggacaaatatttatttgaaattatatatttgattagtacaatatttattactataattaactatccttattttatatcttcttttgtttcccttctatgggatccttcaacctccaatacatacaaaccagtagcaaaaccaattcgaatacacaaaccagaaaatagaacacaatataaacgcttggtgatcaaaataaataaatgcaagaaaagtaaaaccaaataagaatacaatcacatctactagtcctactaatgcagatggaacatgagtccgagaagatgagttcaacaaaagttcagagaaagaaaagtactattctccacacctttattaaattatagagtgcttctattgtgcatccaattaaaacaaagtgatgc

SEQ ID NO: 6731 - DNA, 1209 bp, Cannabis sativa
gacggtctcagtggcgacgacaaggcaatccaaagggtcaagaatgccaaaacaaaactaacagtcggttctaactcatgttggcatgaagcttaccaagggattttcgcagcctgctccgaaatcgcaggggacgacaacgaaaagaggaagaggtttgcttgggatttaagtaactgctttcataaggattcgggtagatcttcttttccgtcatgccacaccggctcttccatgaaggagtgccttcaaaagcttgacgacaatgctattcacacgtaccgtggattctttcttgaaactaactccatttgtcatcaattacagtaagtgcaataattctatatactcgacttttaattcatttatattttcttaaatttgtttatttctgctacgaatattgtgattaattagttgttgtttgcattttccagcctgaagaaataaaaatcattatggtattttgagcgttacagacttttcataattccttgtatcttcttgataataaattaggaatattttagaaattaatgtaaaccaactacaaaaggagttttagactttatttctgaaattaatgtagtaattatttcaaataattaaagtagtaagtattcatactttttttaacactctaaaaagttcataacaaattaatatgatcgaccgttaagattttaaaggtttttcccttcataatttcccgataagataccccttttcaataaaacagagataccaactttttttttaacaatctaatagaaggtattatgttgttacatgttcataataataagaagaaatttacatgattgtttttttctgagtcaggtcagatatattcaggaggcaaacagagagactagtaaacgatttgaaaaaatcagcagaaaatgcagaggaaaggctagaaaccatacaagagaagtcagagcatctattgcaggacacaaaagacattcataattcgatgacttccatcgaagaacaaacccaacaagtggttcactccacaaccgaaatccgcactagaatcactgacatttcgaaacaatcagaggccgttttcgagcaatcccagaaaatttctgcttcccaattagaactggagaagggccaggacataatgaaggttaaactagaagaggggattttaatgattcatgattcgtacaataatctagataaagaaataggtgg

SEQ ID NO: 6732 - DNA, 601 bp, Cannabis sativa
atttactttaagtattcctatatatataaatatcaattttgtctaagggaactcttttcagataatataatatgaggtacttggaagaattttaccttgggcgtactactcactgactttcttctcatcttttccgggaattattggattgtgtgttctttttccgtagattatttgttgggatcttgttttgttttgaaatatttcaattatatattaattatattaattgcttgaagcaattgaaaataaaatatatagttcttgtgttgggatattattttgttgtttttgatacaaacattttagttgcagctgtctaaaaccctagtctctttcagagaagaaatgtcacagttcagaaagctgacttagggtttatgccttgactggcaactcttgcagccttttcaataatgtggatgttgactacttttctaactttcttcatatctcaataaaattaaataaaataaaatctcttctctcgtaataatatttaagagcatgggaaactagtaagaaataactctacactacaccccataagataagagggtgtgtagggctttccactagggcattaaaatcttaaaatagt

SEQ ID NO: 6733 - DNA, 747 bp, Cannabis sativa
tgtaccactgccagctttctctgcttgatcatttttagccttttcggctgttgctgctgctgctgtatcctcaccctcccagataacctcagtcactgttaacatagtacaaagatgactaagaatttaattttatgaacaatttaaggttgatacatattctcttactgtaacagtaacagcaggaataacaaaacatgaatcggtagaaatcttatactctataggagaaaaaataaagctcaggatgataatagtgcacacttctcccaaatctagttgaataaagaaaccttttttaaaatcggttatctaatacagttaacaagtgattcggtataaaaaagaaatattttgaaactgaggcagcagtgtaccttctcttccacgatcatcaattcgtgtcttcaacacctttcttcttttaggcgaatctggagtagccttcgatggtttatcatttttgttcacaccgttttcctgaacagagctgtgtgttactttatcccttttattcacaccattttccggaacagaggtatttgttagtttatcctttttgttcacatttttatcctctttgggggaagtccctttagttctgtcagtgggaacagttgaagaatcttctttcaacaatgggatagattgttcgtttattgtcacatttttcttgacctctaatttatcttccacacatttgtcaaggtctaatttcgatttctctggaaacaaagtttcaatact

SEQ ID NO: 6734 - DNA, 550 bp, Cannabis sativa
ctagccataagtaactgttggatgagtaactacccctgattattagtgacaaacaagaatcacaaaaatattaacaatcgcattgatttggtcacgcatcaacaacaaacaaacaatatacaaataaatattttaaaaaagaatataatttttaatagagatatgcagtgctctaaaagatctttgagagcaaataaattataaatacataccataatcacgaagagaatatgtatttttttttgaatatatgaatataagaatttaagaatataggtaggaacgaaaaaacctggaccttcgatgctatcataatacactcaatttgattacataaacctttccctttatatttggtctcaaacctacgaagccaaggaataaatactctgttacagaatcgccaccattgccatcttctcccacacgacccagcctcgcaccattcctttagctttgaccgagatggcttcacgataggggacttcttaacagtggaaagaattttatgtgttgacggagattgcttcgagttcgaatctatcgtggg

SEQ ID NO: 6735 - DNA, 604 bp, Cannabis sativa
atatatatatatatatatgttcccggcccctactgtattcttcaatttatgaagaataaataattagctcatcaccacctctcttctttattttgatttttctaatatatcattacaaaaagtacgtaccatttcggtggccaacaattcgattttaaatgaataaattagtgtcaagcttaaaatcacaaattctaacaaatatctagttgattttgatatcttacgatataaattctttaccaatttatttaattcgtagcatttatcaggtccagattataaataccttagcagctacagtctctcttaaatcttctgtgtttggtcattttaattctcaaaggacccatttccttcatgactcaaaataaattctcttatacaatactgtcagtaagccataaattaaattagatatatatatctcttatacaatacacatatatgtgggaaatttataacaatatatacattatcaaattttattacacattatatgtgcaaaaaaaggtatttccaaaaagttgtacattttcttaactatgagaaacaatattatgtagtccttcagtttaagaagtgaggaacgtcccacaattga

SEQ ID NO: 6736 - DNA, 667 bp, Cannabis sativa
ttcttcatgaatgtgtatgttgtagttattgagaatcacctacattttgaatagtgttcagtgccgaatataaagtccaaatatttcgttgtaggtataattattttttcttatacgcgtagttagcaaatatttaaactttattttttatattgcaaactattcattaattttatgaaaatttacaggtaattctaaaaagctacaatatacgcgaaaaaaatagaatataaaactcttttaaatgcaaacagatagagatctttcgaaacactctttacgagagtatagttcatatatctccaaagtaatatatacatgtatcccacaaaaatttatcatatttcaatagaactatttgaaaaaaaataatacatttaaataatattttttttttgttaatttagggtaaatattaatcaccccacctaaaataatgctctaaattcatcactgcatgttgtgttaaagctcatattttgcgtgtcgtgtcgtatcgtgcttaaattaatattatttgtgtcgtgtcatgctaatttaaatcgtactatgttgtgttcaaacttatatttttcgtatagtttaaaattggaccatttaaataaaaacaaaccatgtacattaagactacaatttcgttaccagtttcttttttttttttaaaaaa

SEQ ID NO: 6737 - DNA, 793 bp, Cannabis sativa
gatgatttgagaagagaaaataccttttttagatttttaagtataagcaaaatactaccatttgtttctcaatttaaacaaaacaaaaggtagtatttcactttaaacttttttttgatgcagcatttcactttaaacttaagaaagctaaaaatagtacattttacaactttttctttgagctatttgagtatattgaacatgtatgtgtagctgtaaatacttctcaacttaatcaaaacccttttatgtcacttatagaaaaatgtaatcattgatttcaacataaaagaaaaaaaaaacttgtccaaaataattggcttgcctttcgagtacatacatgacttgactagtgttcttcctcataaaacaaaattgactagaagatatatatatacatatacatatatatgaaatctacaattgaatagtaaacaaagaaaaccaatcatccataagggtagaaagaaagaagaagaagagtattgtttgaaaagtttggtatacaagcaaaatcattgaaaccaaaccccaaataccattactaacaaaactttgttaccacaacgctttatcttatataatataataataataatattattaccaataaagcctaatagtaaaaataataataagaataatataattatatgcagtcttggagagactggtcagaccaaacagcctaaatttatgagacatgacattataataaaaaaaaagcaaatcttggaaactcaaaacgttttctttactaactctctcattacgatcccccaactagaataaa

SEQ ID NO: 6738 - DNA, 841 bp, Cannabis sativa
taaagaaacccaatattatgagtatatatataatcaatacccttgatgataattgtagaaaagataagtctgttgtgtggaaatgaatggtgaagactaaagaggcagttgtagagatggggtctagggagtaagcatcatctttgagcaatcacatggttgtgtcttcattattattgttagttgtaggctgttcaccaagtgtccatgtatgaatcagaagacaaagccatgtgaagctccaaatgcttatgtttctttacaaataccaaaccaacccaattgcctaaacaagtcagagaaccattcatctatatatacagacacattaaatattttatgttttctaagatgaaaactgaaagcaagatcaacatggcatatgaatcggttttgtccatgggaagaagaagcctgtagggaggtcaatttccaatgttaatgaagcaaatttgaagattacaaacactccagaaagctttatgtattaccttatgttgctgaaagtacaattctttgcagagatgatcaatgacaatatcttcactgatctaagttctcagacttaattgtaaagagccatactaacaatattgagccactgatctggagaaaaaaatgcaatagcattcatttgtattggcatttccttttggccattctaaggaaaaaaatctacattgtattggcattgtttgtcatccatcttgtttgcactcataatttggcattcaacttagaataagaaaaaaaatctaagagaaattctaaggaacttaattaagtctctataaaatcaatgtacttggtgggatattatttggtaatatatatatatata

SEQ ID NO: 6739 - DNA, 702 bp, Cannabis sativa
gccctcactgggttaagcaaggatgcgaaggaggaagttgctgcttgaacttccaccggctccataattaaaataactagagaaggataaagaaaatgaatgaaatggtcctctgtgtgttatctaccagtaacagaattttattatttcatattaccttctcctgaaatttaaaccatctaaaatgttcagaaaaagaacattacatttttcaagtactttttcccacgaacatccattttatccatgcagataatgattaaacaagacaggtcattgaccatagatcttatgcacagagaggagtccaccagagaaactcgtcctcgacactgtggaaagattactgttcgtgctgaagagtctgttagctcaaagactacagtagagatgatactaagttgtatagatttggagtacaaggatctattttcaagaagtgtagggcctactgggttcttattttatctcttttttcttatgttttgtccctgtttgatatttatttaaatgtcattactgaatataattttcttgcattttaggacccttttttggtaatctcgaaggttgttgacagagacatcacaattcctatttgcaaaacagaagttttaaaaaatgagctcaaaccacaatggaagccaatatatttgagtattcagcaagctggaagcaaggtgagttatctttttggaggtg

SEQ ID NO: 6740 - DNA, 1266 bp, Cannabis sativa
tatgacagcttttcgtacaactttagatcaatgctctttgaatgaattaccttacttaggtgatgatttcacatggactcgaagtaaaaagaaccctgctgcactaaaagaacgaatcgactggtgttttgtgaacatagtttggcagacttcactctctttgcctacggtttcacaccttgattattatggctcggaccatagagcggtcttggtggatatcaaattttctcatcaaaatcagcctgagaaaaggagatcgcgatttcgtttcgaaaaaatttggttgaatgatgcagaatctgctgccatcatttctgcaaactggaataaaactgctggttcttcgagagatattttccaacagcttgctgatagtcttcaaatgtgttcgaacaatttacagcaatggcataatggcaaatatgggcatatgaaacaacatatcaaggaggcgcaagctcgagttgaacatttaaataattgtgttgtacctgactcaaatttctcacaagaagttcaatctgctgaagccattttagatgagcttttagccaatgaagagcaatactggcagcagcgatcacgagtggattggcttaagtcgggggatcgtaataccaaattctttcatgctaaagcttcctctcggaaatctaataaccgaattaccaaattgcaagatgaaaatggacaatatgtgtactctagtgatgatattgcctcggttattacacaatacttcacttctcttttcaaagcttcaaatgaagaccattgggcactctctcatgtcctttcaacaatccctactactgtcacagatgcaaacaatgattttcttcttcaagaattcacaccagatgatgttactagagctttgaaaacaatgggtgtagacaagagtccaggaattgatggcttttctgctatgttctatcatcacaactgggatatagttggtcctttggtgactgaagtcgtgctaaatgtcttaaattgtggtggtagtccagctgggataaataaaactctcatcactctcattccaaagattaaaaagccaaacactatgaaagactttcggcctataagtctttgcaatgtagtgtacaaactgatttccaagatgttggcactcagattgaaacatattctcccactggtcatttctgaaactcagagtgcttttctaccgaacagattgattacagacaatgtcttagtggcctttgagatggttcatagcttgaagaatcgtaaaag

SEQ ID NO: 6741 - DNA, 1078 bp, Cannabis sativa
taggacagtcttgttgcttggaaaggcttgtacgaaaaggaagaaaacgtagcaaaacatttttatagattgtcctttttgacttttcatcatctcttgattcagttaccacaaatgaataatatcacggtaccatgctccaatttggaactaaataattaactcgtagaaaattgaagaataaatcaactagacagaaattattctttttaacattaatgttagtacatactgttccgctgatgtacactaacaagaagcaaaaagattaacgaaaaaaacaaaaagaaatagaaaagtggagtgcctcttacttcttctttcctgcttttccttcctttcttctaatgatctcatcggcatacttaacacccttacctttatatggctctgggggtctccattttctgatggaagcagcaaactggccaatggcactcttgtcatatccaccaacaacaattctggtgttgtcttctaccttcacttgtatgccatcaggaactgtcattcttactggatgggagaagccaagacttaataccaagtcttttccttccaacattgcacgatatccaacaccgactagttgaagtctcttctcgaatccttttgatactccaactaccatgttgtccgtaagtgttctaaccaagatgaaatgtacatgtaagagccaactaatataaagaagcatcacaatgtattaagtgaagtataatgcctgtgtatcaaatgacactaccctttatttactacaaaatggtttatgcaatgaactaccttaatggaaaattaggattcaatgccatacctctagaattttgtgtatcagagaataataatgaaaaaaaattctttatagtaaaacaagcataagaaaaaagctaatatctagcaggatttgcatagagaatttaatcctttctacgatatcttaaaaatggggctagcaagttgttaaaagacaaatttctacacagaaacgttattctccatcaaaaaaatagcatgcaacacaactcttcactcaggttggatattttatgtattatgtctgtcagtttcatgtggcttt

SEQ ID NO: 6742 - DNA, 536 bp, Cannabis sativa
atattaagttttttataaaaacttgtgcttcattagttttgtggtgagtacaaagccaacaacttacatggaaggtagatgactattctaagctaattcattatctagttctaaacctagcttagcaactttgtgagccaactcatttgactccctaccaacatgactaatagttaagttaggattgaacgataacaagttcttaacacaaattaatatatcatcaagtggactactatttcagctacaagatttaagtttatccacaatagttttacaatcttttttaataacatctatgggaagaagatgaacatttgagcccatggcataaagaattgcctttgcttcagccactgtaggaggaacacttccaacaaaaggtcttgagaatcctactttaacctggttcaactcatccaaaacaatcctaatgctatgtttcctgctttggagatcaattgctgcatcagtaaaaacttgaaaaattatccttagaagagcatgttaagggcctggtatgcacaggagtagaa

SEQ ID NO: 6743 - DNA, 599 bp, Cannabis sativa
atcaaaaataaaaaaactaaataatagtttgaaatataaaactaaatcacttaaaccctcacttacaaccactaagaacaaactctaagaaaagagatttttaccttttgttgctagggtttcaggtagggctttgggttaagctttctatggtttcaccactgtcccgagattgatattttctatggaagagagtataaaaactcagaatacaaagtagaaaaaggagattaaggtttcagcactatagataagacagagaaaccaatgaaagcacccgcctttaccttgctctttgctactcttagaaattagaactttaaggaagcttcaatggagcttttagccttgagaagaaaagaggagaacataaataagagatggaatagcctctaaaaatagattaaatgatagaatgaagagagagagggagaaagccaagctcttacaacttcatgcagaaaagcttcaaaagggtcttcaatggagctctagtacaagagatgagaacttctcttaattctaggtttattttctgaatagtgtcataattagaatgaaattgataatgatggtaagagagagagagggagagagag

SEQ ID NO: 6744 - DNA, 912 bp, Cannabis sativa
taagaaattgataaattcaagaatatgatgcccactaaaggcataaacacgtgtaacaagggagttatttattagaatacaaacacgtggcagggggcaaaaagaataaaagaacgagaacacgtgtcaacaaaatgataggtagatgatagataacccatgcaatcaaaaaaaggacgtacgggatatataggaaaagatcacgtaaaagaaaagctattaggaattggaaaaagaaaggcccccaaaaagaaatcttgactgttttcgaccaaaacagttatgttatgattgttttaatgtttgtctttacttatttactatctaaaaattttcacttatttcgagtcgactgtttaaaagtttttaatcttctttgtcttaatgtcgataatttatcgacattctatcgataaattgtcgacaaacataaacaccagcaaatatttctaaatatcgacaacaatttaaattaaataggtgtattatcgacaaaaggtcggtgtcatatcgacaaactattgataaaattccaaatatgtacattttatttaaattactttattcatcaacatatcatcgacaaactgttgatatcatatcgacaatggtcatcgctgaccttccttcgcatgttatcgatattgcatcgatattctatcgaaaaattgtcgataatatctggacaacccaaatttcaacaaaaaatcagatctaccagatgacacatttcagaccaaaaactactactttcaacaaatactacacacatataacgaaagcaaactacatactattactaatatctaacaaaatgattaaaacacaacttacccattataatggtgtgaatgattcttgagtgattggtgtggtctgattttgcaccatcaagagagagagagagagaga

SEQ ID NO: 6745 - DNA, 1646 bp, Cannabis sativa
tagtgggaaaagaaaaaataaaatgtcttttaattttttaaaaaatgtgttttacggttaattaattttataatcttatttaatttattaatttataattaaagaaaattaactaacaacgtttttttagaaaatgttaccttttaaaatattgaactaagagacaataacacttttattagaagtgttgttgtatgatgtttaatatattatttgaaaaaataatttgaaggggataaatctattgcaacacttaattattaagtgttcctaatttaaaaacataacatatttgcatcactttatttctaaatgttgccaaataagtgttgcaaaatatattttttctagtagtgacatatgctaacatgcttgtagtagcagaagaaggtaaaacatctgtccaaacattagatacttgggttaatctagcccacctagctaaacaaattagccactttattacaatttctaagataaaaaataaagtctatggtattaaaattgctactgatccttagccttaggatattatgaaccaagttccccagtccgttgtaaactctttccgttctttagagctttcacaaccgactgacaatcagctcctacccaaacatccaaacaagaccaacgcaaagccatatcaatatgcccaattgaatggcagcagtttctgccaacatcactgaaagaaacccagggataaactgagtttcagccgcaactaaagctccattatgatcccttattatcgcacctataccacaccccaaattacatcggcaagatagatgcatcaatatttattaagaatttaccaagaggagggggctggcaggaacatatgactgcttatttttctacaaattaattttcgttggctctctctgcagatgggtgtgcaagacctccagcgcctagggaatctaataaacattagtaggggttttattttggaaaacaaatcggttttgccgtttccaaagcagccaagatacagcaatataaattggatcatttcatcttttgagagacactcagccaacattaagaggaaatctggagccttattgagggatggagagatatattgagagaaaccaacttgcttccatatattgtgaatagcggggcaaagccaaagggcatggcacaaagattcttcctgcaatttacaccagtcacattgagcatcgatggtcattctgcgcgtgcatagctccactttgactgggatccaatgattgaatactcgccaaataaagctctttattttcggagtgagacgagatccccaaataaacgaccaccaagttttcaaagttgaattatcagagcaaccaacaatatctggattgctctctcaacttatatccactagccactgtatactgaccagtaggagtgaggctccaagtcattgaatctaaactatgaatattaggaagagtgccaagaacccaagaaatgtcatcatggtgaaaccaactaagaatctcattagttttccaacttccgtcttcattcagcaaagtatgaagagtgactctttcaagaatcctaacccttgtgcaaagggtaaaaggatatcctctaagaatccaaggatcttcattcattcagatagtgcgaccatcgcccac

SEQ ID NO: 6746 - DNA, 574 bp, Cannabis sativa
aaacatgtattcaatttttgtgaaggacagtaaacagatatgcaagattacaatgatgcaaaaaaaaaaaaaatcacatgtaacctataaaaagaagttctaaaaatcgcacttatcatgtaaagtgtaaactgataacacatagataaaatgcaacaaacaagaaacaaaaaagaagaagaatagatatctgggttaaaataaggaaagaggaacagaattaatacacaaaccattctgctagttctactcagaatatatgacgattgcctactccagcttccacagacttctatgcggccatcactaccatgtgcgagaggcccatgtgcaggcaaaccatttgacaacaaacttgataatgttaaggataaactgaaacatttctgccagcaatgactatttctccatgctaaaacagattggtatgagttcagatcagctttcagggtatctaagccaactagacatgttggggacatcataacatcatagtacttgggaacttttgctgcatcacaataaatattttagaagtaatataaattgaactaggcagtatgagaaaacattg

SEQ ID NO: 6747 - DNA, 680 bp, Cannabis sativa
cccccccccccaagttggagcatgaggatcataaatgcccaacttggaaagtaaaaactgaaattgacgggtctgcaaaggcttggtaaagatgtctgcaagttgaactgttgtaggaacataagaaggaagaatagtgccatcttgtatagcatcacgaacaaagtgacaatctacttcaatgtgttttgttcgttcatagaagactggattacgtgcaatatgtaaagccgattggctatcacaatatagcccaatagcatcagtatgttgaattcccaagataaggagaagccctttcaaccatttcaattcacaagtaatagaagccatggagcgatattcagcctcagccgaagaacgcgccacagtatgttgtttcttggtcttccatgaaattggtgaatgaccaagaaacacaaaccaacccgtgagagagcggcgagttaaaggacaagctgcccaatcagaatcacaccaaccagtcaaagaaagagagctatcagcacgaagtaagattccttgtccaagagagcctttcaaataacgaacaacacgcaaggcggcttcccaatgttcatgtcttggttcttgtaggaattgtgataaaatgtgaacaaagtatgccaaatcaggacgagtgacagttaagtaaatcaaacgaccaaccaaacgatgat

SEQ ID NO: 6748 - DNA, 568 bp, Cannabis sativa
tatatatacattacagtttcgagatttgaccacttggtaataataacttttgaagtagatcggccctaattataaagtgacaatcagcagtctttgttgtctgtttgagtcaactttattttatcagtaataatttgaatatttttgaaacaaatgatcttaaaagtaccataatctgacatgatgagtttcatgttttcggagttgaacactgtgtatagttaatatccaatgtatatatatagttgtttttaccaatttacatttactgtatatatatgtttctaaaacttgtttcatatgttaaaatatttggctatacaaaaatcaaattaagtttgagaatattactgatttttagtagttatatatactgttatgcaagtactgattgtagataatagcttaacatcaatgtgttttcaaaaagctgtggaaggtgataataaaacaaattttcaaaatactattatactaagggacccttttaaaaatgcaaaagtttatcgtttgtattcttttgagtacaccaaaatttctccaaaaatttgtgtttcttttttttttt

SEQ ID NO: 6749 - DNA, 1675 bp, Cannabis sativa
cttaaaatctaattcactagtcactaaaacaagttaaagggcttctcttttatagtagttggttggatcagattctgacttggttcatcactaacttttttgttttgcgccacataggacaagtatttgtggctgatgtggcagggagtaagagagccaaatccaccacaaattcacctgatttggttcacttgctcattgcctaggtagagttgttagagttagtgacattcttacagtttagtatgctcgagttggacttgtgactgctctcaaagttcttcaattagatccaaaaattcttgatttaatgcatgatttcgagttgggtcataagtttttcttctgtgagaaggtattgtagtttccactaggattactgcttcacacccataggccattgaatatggggtgtgtcctattaaggttctttctgtggttttacatgcccaaagaactcgtgaaagttctccgaccagtgtgctttgcatgccagaagcttcttcttcaactttatttttaagatcttgtttacaacttctagttgtccatttgcttgtggtctggccacagctaaaaaacttttgatgatttcgtgcttgacacaaaaatcagtaaattgatcattatcaaattattttccattatcatatactattttatgtgaaagtccataacaacacacaatatttttaatgatgaattctagggccttcttagatgttctggtgttcatagagtcaacttccacccacttggtgatgtaatcaacaacaacaatggcgaatttgactcatccctttctagttggaagtgatcctaccaaattgatttcccaaacaacaaaaggccacagactattcatcaaggttatctctaatggcagggctcttggaatcttggaataacgctgatattgttctcatttatgaacataatcaatacaatcctttttcatagttggccaaaagtatccttggtgaaggatctttttggacagactaagttcgaatgtatgatctccaccaaatccttcatgtatctcatgcatgacaatgcttatttttttttctagctttgcaccttaaatagggcattgatagccctcttctgtacaactttctactcatgagcacatatcttggggcttgatattgaatcttctgtaaagttgctctatcatttgaaagtgttccagattccaaatacttttggatggagccatctaggaagtggaaagatcaataactgttacccccagtgtttttgtgcttaaagtagaaagatgggcgatggggaataatctgtacttatctatctttgggtctattgctaactttgctagcatatctgcgaagacattttgacatctgggaattttcttgacaaaataatgcttaaaatgttgtaatagatctctggattttgctacgtaattaaccatattctcccatttagtttggtattctctagaaatttggttgactactaattgtaaatcactatagagcttaatattctgggctccaaattctttagctaattgtaggtgagatatcattgcctcgtgttctgcttcattgttggaggctttaaactcaaatcagagtgcactctaaagttgatcttttgcgaagagatgagaattaggagtgggcattcgatccaatccaac

SEQ ID NO: 6750 - DNA, 1090 bp, Cannabis sativa
aggacaacacctgacttgtcatgggattgcctttcatttttacccttcatgaggaaaataacatgaaatccagttagctaattcctagtttagtgatattccttttcacttatttgccatattagaactgaaaatttatttattgtttgctggttacagctgagaaagaaggggacaatagcaagaaggagaagattatgactgctaccaagaagggtgctgctgtattggaccaatggttacctgataatattaaaacacagtatcatgtgttgcaagtagtaagtctttacattggctttcttttctttcttcttttatctttacaatttttattcttttagcttctatgttttagttttggactgacctatgtttccatatagggagatgacatttatgatgccatgttgaaccagacaaatgttggagataataataacaagttctatgtgatccaggctcttggttagaactttgtccctaatataaaatttcacttactttatttaagatgtatccaattcagtcttgcagaattgagtttcaagtttcaatagtagggttgctgatataatgctctagttagtgttttgacttcttggactttagtacttacatttacctcttttattgagtcttgacatgcattcatgtcctatgctgatttatcggctatattctaagttttggtgcctttctccatttcattttcacctcaatcttacttgaatttcttttaaactgctgcagaatctgatgatggtggtagattcatggtttattttagatggggaagagtaggtgtaaaaggtcaagagaagttacaaggcccttacacatcacaagaaagtgccattcaggaatttgaacaaaagtttcacgcgaagaccaagaatcattggtcagatcggaaagatttcttttcttacccaaagagctatacttggttagaaatggattacagtgaaaatgaaaaagaatcaagtgtaagtttcttgacacttagttctttgatatttgatttttttcaagtgcataagacactcattgtgttaagtaactggaaaccatctctctctctctctct

SEQ ID NO: 6751 - DNA, 778 bp, Cannabis sativa
ttacttgaagggaacttagaatataggatcgtgagaatgatgctaaaaatctcagacttctctgtttaccaaaattaatcaaacacatttttaaaagaaactattttaattaattaaataaataaataataatttaataaataatttttctttttattttgctgtttttgtcttttctaattacaaatcctaattaacccttcattttgtttccaacagagaaaacaaaatgacacaacaaaaagtaacaccaaacctaaagagacacaaagaaagtaaaacaaaaatgatgagagaaagtgaaaacaattaacttatgtggaggtggaagtggtggtatggtatgaccgtgtgagagagaaacaaatagaagaaggatttaggaatgtgtctttaaggaaacatccgaggatgactcggtgctcccttaattccataacatcaaacatataaacaaagaacactatcacttacacctctacctctacttaaggatggtgggtggggatcaccaaaattttaacaatctttttaatatttttgtgattcatagtaattaggaggtttcacgtaaccatgtaattaaatgtattttctaatgatcactactaaaaaaaatggtttcttgattgtttaaaatagttgggtgagtattaccgtcggataatataattgacgcctattctactaacgtaaaattgggtgaaatagacattgctgaaaaaaagttggtaacaaatgttacttaccttttaaaaccaacaagtatacataacga

SEQ ID NO: 6752 - DNA, 643 bp, Cannabis sativa
ctctctctctctctcctccaacaaagtccaagtctttgaatcctcaccaagagagaggcatctctagtttgtttctttgaactctctcccttacgtctcccatccatttcaaatttgggctacaagatccttcccatcttccattccttccccaaaagaaaggtccaactttttctccttaaacactttctccacttcttcttcatattttcatcccaactactgggttgaaaaatctcgaacaaaaggctataaaccaaatactgggttttggagttagaagctaattttcatctgggctatcttcattttcagagaaaaacattctgaacacctcatttcattgcaagatcatatttttttcatctgggtaattacaaaaaatgggagagcctactcggattggtcgaacattggatgattcaaaagccgtagagctaacagggaaaatcatggttgtagcgattatagtattcttcgttgtggttgtgttcgtaatttttctccatctctacgccaagtggttctggtggcgcattgaggaagatacggcgtcgtccggtcaacagagcagcactcggcgcaggcgccgacgcttcgtctttgctcctggccaagacccaaacatcgtcactctacgaag

SEQ ID NO: 6753 - DNA, 972 bp, Cannabis sativa
gggggggttaaggaggaaatcaaaagcaaagtcttggatataactcaaatggaagaagggtcctttcctctcaagtatttgggtgtgtacctcagaccgactaaatggaaggcctcggattgtggtgttattttggataagctcagtttgaagttaaatgggtgggcaagcaggaacctttcctttgctggccgtgctcagttaatccatttggttctgccttttggatgagccttttcattttaccccaaaaaatcgttgcagctgttgataagaagtgtcgtgattttctttggggtgtgaatggtaataggagcaagcttcacttcccttcatgggaaaaagtttgtcttcctaaacaatttggtggtattgggttcagggaaggaaaaaagtggaacatggccatgatagctaaacacttgtgggctctctcgaacaaacaagacaacctttgagtgaaatggatcaattccatttacttaaaggagcaggatgtgtggtcctttccgataaaaccagacctgagttggtactttaagaaacttttgaagattagaagcgcgacaaatagtagcatgttgaaccaggctgctaaaggaagcaaattcaaagttaacaagttctataatgagttgattggggctgccaagacaccttatgcagctacggtttggcataaactcatagttcctgagcatagatttattttttggcaaatctttaatgaacagctgcttacccgagatctcttgagcagattcctccccattccttcaggtctatgcgtggtttgtgaagatgctccggagactcatagtcatttatttatggagtgcatctttatgaaaaaactgattgatcttgtggaaagttggtcaggtaatctaaactggccgaataatctcagtgagcttcatcaacgaactctgcctgccaaagcagacttagcttcaatgatcatgaatgcag

SEQ ID NO: 6754 - DNA, 911 bp, Cannabis sativa
  modified_base (549)..(550): a, c, t, g, unknown or other
cataatttattacatgtcaaaattaaaagacaaaaatccatattataacaccattcttattcttatgccaactattctccatagtccatactaatatctaaaagtattcccttataattatttagtagtatttttttataaattataatcttaattaagttatatttgattagattattaattgtaacaatagtaatataacattgagaagggtatttgatactactaataataaattttaacattatttataatatataattaaaaaatgaaaaatgttaaaaagcatataatcatcgatgtaatatcattattggtattgagtcctacataatttaaatctatataaaattttataaatcataagaaaaagaaaatatttttaagccctaaaaactaagtagactctagacacaaacttaatttgtcttacttaagattagatctgatttaagttagagcattgctattaggcatcagtggtgtctagcaccttctcaacatgtcgcgttgtgattggctaatgatactccctaaaagctattatannaaattatatgggactcgatacttaattggaccaagatcgatacataagaggatgctaggcaccactagtaccctttagcatttctcttttaagttaataactttcaaaaaaaatattactaactaattataaattatcactaaatagcgccaagtacaactttaactctcttaatttcttttttattttttttgtcgccttgtttctctcgagctccaaactatatatgatcttcatgaatcacaacacacgtgtccatttccttttcactaactacaaactacaaaacaaaactaaataaattttgttaacttcatattcaaattaatgctattaattaattataaacacaatttttttt

SEQ ID NO: 6755 - DNA, 1370 bp, Cannabis sativa
  modified_base (911)..(911): a, c, t, g, unknown or other
ttttttttttttttggtagtgtattaacaagtattacaatttcttttgggatcgaagttgctaataaggataagcaaatgccatgcaatgaatattagcaaagtttcacattaattaagttgatatatagtggctatactatatttaatataaataaactcattgtgatatatactatgctttataacaatgaatgtctggcttagaaagtaaagaaatgacattaaataacttgtggaattgacaatagttgaaggacaatctaaatttgacttaagacatgtcactacaaaaaatagttacttttagtgactaaatgtgacttttaggtacaacaaaatattacttgtgactaaaatatagcatttagtttcaagttgtcactaatttaattttagtcacaagaagtattgtgacttataaaaatatatttagtcacaacaaattgtaatttttgtgattaatacctttagccacggaccttttagtcacaacataagaatgatgttttataattagttacaacttttatacttttagtcacaaattttgttagtgactaaaagtaagattttttgtagtgtgtccttctctgatctcacaaatcccactatcgcgtgtattatttttgttttattttagattttatttgatttaggtaattttgttgggtatgttgaagatgtaaaattatgttggcaaaattttattatcataaaaaatggagaataatgaaaaaataataataaaaaagtataatttaatattatacagtggttctaggatgtttaatgtacgtgatgattagcacgagactggacataactcactctttaagcatcttaagccggttcatgttgaatccaagcatggaacattagaaagaccttaaatggttattgagatatttnaagggcacttgggattatggtctgacctatatatgagaaaataaaacagagaattagagttgaaagggttcgtggatgcggactacacctcgaatagagataccataaaattaaccacttcctatgttttcttaacaaaccaaactatatgagttggaaggcccagttatagtccatggttgctctttcaacaacagtagtaaaatttatggcgactacagaagcttttcaggaagcattgtgctttgcggaattctttatgagctgaaacaaatcaagggggagtgactcttgttgccctcgaaaagtgatcaaccgacaacagggtcatataaatataatgtttgccacatgtcacacaagaagaacagtaaagtaaatgagacaaggatttttatagaagcttggccccctgagagataatactattcagatgatcactatagatgggatctgata

SEQ ID NO: 6756 - DNA, 650 bp, Cannabis sativa
tatactacatttttgccccattcccatttaatacttattgaattcaggtagagaaatactcattggttataaaaaactcgttaaatacctatttagacaaggtgaatggaatgtgactgtgacaattagtagttctgagacctataaagaaaaatattaagtaaattgtacaatcttacattgcttggggaatgtcaactgtaatgattctgagactgtataggtatgagtttatataattaaagaagacttaaattgattaattggtactacctaatatctatatcaataaggtgtatcttattttttgatagcccaccatgaaagaacttcacagttaagtatgctagagttatatactcgtgtataagtgtcatacatccgtaggaaagacccaataaaagcttgaagttggatgttacaccgatactatttattgtactaataataatgtgatacttaaaaaaatactaaacactaataatactttttaatatttttcgctatggtatgaccctaacttaataaccttatttttactaatatcacaaggtagtagattgagtggtgatttgtgtctcgacacactaactggacatgaacttcacattataatttacatgttacagtcaatatcaaatttattacaa

SEQ ID NO: 6757 - DNA, 1052 bp, Cannabis sativa
tctctctctctctcttacttttgttctaactgtacttattttggtctatactaaaatgcttttactttttttcaactggttgtaagatttggatatatgggaacagcttcaaatcatctttagttgcagtggttatacccaatgaagaaaacaccaaaaaatgggcatatgaaaagggtcatatgggttcattttctgagctgtgtcagcttgatcagctgaccagttatgtgctttcagagctaaagttaacagctgagagaaacaaggtaccatcttcagagagcttcaatatcataactgtatcatctcaagtcattattcccatgttttgaagctctaagttacatatcactatttgtacaagttctgagcagctctcatattagtaactacatcatttttgtacctcttctttaaatattctttttttaaaatatcattgaaacagctaagagggtttgaaattatcaaaggcgtcattctagaacctcagccttttgacatggaaagagacttggtgacagcaacattgaaaaagaaaagaaaccaacttctcaaatgttatgaggtaaatctaaatgctcttacttggtctgtttaatataatgtacatttatgtctacatatgtgtatgtgtgaagaaaaggatctcaacaatgtcaaaattttgacaggttcaaattgatgaactatacaataaattgggtggtcgcaaatgaataattgaaagttggtgatgaagaaaggaatacaatgtagcaaaaaacaaacattcaaatcccttcatttgatctttagaggtgttattacaataattcctgctatgcttttttttttttctatttattctatgtaatagcgtgaattctattgaaaatgctctttacttttaattaaaacaatgcctttcctttcttcttattttctgttgggcgtcttggaaaagtaacaagttcagaatctgtacaattttcttttagctaggccttgaatttgccaacaccatcctaaaataagtccttaacaagcttttttttttttttaaaaaa

SEQ ID NO: 6758 - DNA, 606 bp, Cannabis sativa
cgatagattcttgcatgacgatcgaagagcaaataataactttagcctgaaaagatgacattggaactccgcatgcatgacagattagtagatctattaataatcgagtttgttctcttttgatttgggttgctataataaaataaaatttttagcgttttgaaatatgttagtgttactccgtttaatattttaattcatattttgtgggtaaggtaaaaaagaattaagaggacctaaaatacaatcttaaaagaaatttttatatcaatttatatatgtaacataactttatataatttacaatatatgtacatagtaatacctttatgttacatttgtttatcaataatattatatatcaaatatgatatatgttaaattgataattaattttgaatcaaattaatatgtaaattttcaatattttatagatataattctatcaaattataaacttctcatagtaataatacatcaacattatcaacaaaaaaaaatttacagtacaaatattttttcccctcatatgtttagggcggtcgacaaaacatacagctaacttcattcccaattaatcacaacattaacatttatcttgtgaaa

SEQ ID NO: 6759 - DNA, 653 bp, Cannabis sativa
atctgaataggataatcaaattgtcgaataactaaatgtaaattgaaggtgatattgatctaaattaatattttaatactattgcgttaaataaaccaaatttagatttcaaaattgaaaataaaggtgataggattgaagaacaaacccgtttcttgctgtataaatcgttgaatattgctttatgagtgtagttgaagttgaataaaacactcttatactttgagtcatgaaggtttgatgtttccaaaatgcattcaacaacattaaatacttcatagtccttttttgacactgagaaaaaaaaacaaagatatattttcaattagtaggcacgatttgacaatagtaaaacttcatagaaaaattctaattctatatatccgtcattatgagaaatgctataagacactcgtcgtgactaatgacaatataatgacacaattaagaacaatattggtgcctaatggcaatgctgctgtaattataaccatgttaagaacaacattggtgcctaatgacaatgctcctgtgattatttactaagtaaaatgataggagttgtagaaggtagaagaactcttacttgtgatagcaaatatatctaatcctgcagaaggagcagaacaagtattgttgatgtactcattcag

SEQ ID NO: 6760 - DNA, 1798 bp, Cannabis sativa
tataatgagaaaaaaacaagaaaatattaatgtttaggaggtacaaattaaatctattggctagagaatgtatataataataacatacaattatgactatgtatatatatatatatatattaatcaagtttagttttatttgcttttttttttttttgctttcaaagtacgtatattttcaatatagctcagggggtccatatgcacttttgcattattattctaattaagctcactacaggctctccgtgtactattcatcattagtggatcagtcatttgactcatttgactcatttcacatgttcatccacctctctcatgagttgtctctcattaatttaacaataaaataccaacaaaatataattattggacatacgaacataattgcatatcttggaaagaggccatttgtagaagtattttttttttcttttcccttttcatttggcacaagtataattattcttcttctttcatttgtttgtgcttttgaatgctgctaattatatgtaaattaaaaatcggttcgaaacatcttacataatagaaaaggaaggaatattatatatggtgattctagaatttacacttcaaaaaagatgtattgatatactttttacttgttttgctattaattttttttatattataattattgatattttataaaattttgaaaaattcgaaataatttataatataaaaattaatattgttcaaacgatctattttatacgtgtataaaataaaatagtcacgcgtacaatatactgtttaaatcttatttttagtgtgttaaatttttttcgatttacttcaaattttacaataattcttaaataacaacttacaaaaactatgagtacatcccttgaggggtgattcctacaattttctaatatataattatattgtctcgcatcattagacatttaccatgatctgttgtgtaataaatagcctttttttttgcttaattttttttcagaatcacaaaatgttggtagtagaatcggatggaaactacgtgcaaccattcttagtggatgatttagacatttattcaggcgaaagttactcagtcctaataaccacagatcaaaacgctagaaacaactactgggtttcagtaggagtaagagggagagaaccaaagaccccacaaggccttaccctcctaaattatctcccaaattcagcatcaaaactccccgtttcaccacctccagtcacaccacaatggaatgattataaccacagtaaatcctttaccaaaaatattttggctcgaatggggtccccaaaacctccaacaacttacaaccgtcggatcatgctcctcaacactcaaaacagattaaacggtgtaacaaagtgggccgtaaacaatgtctccttagtactaccagctaccccatatttgggctcagttaaatttttactaaaccatacatttgaccagaccagcccaccagaaaactacccagcaaattatgacatcatgaagccacctgtcaacaccaacgtcaccactagcagtgggatctacaggctccaattcaataccacggtagacattatacttcaaaacaccaatgctataaccccaaatgttagtgaaattcacccgtggcatttgcatgggcatgatttttgggtcttgggttatggagaaggtaagtttaattcgaagaacgatgagaaaaaacttaacttaaagaacccacctttgagaaacactgcagttatttttccatggggttggacagcacttcgatttgtggctgacaat

SEQ ID NO: 6761 - DNA, 728 bp, Cannabis sativa
ccacctctttgtttaggctgacataaggactcccatttctttgtagccagaaaatgagttttctcaacacctccagtccaccaaaacctacaaaccagagaattcaattgattgcataaagtagctgggatcttgaaagtagacatataatagattgggatggcaagggccactaagttattagaaaccaatctactagaatacgatagtgtcttcatcctccaaccttccaacctatttttgagcttgtaccttttaggaaaataaagtcctgaatttttttccttgaagaaacataagggtttcccaaatatggcccaagcgacgcgtccattttaatatccattaggtcttcaatatcattccttttgtctactgtacaattcttaaaaaaaaaaataatacctaatttatgtttactacacaaactagctagaccacacgcttcatatttctttaagcattcccttatattagcagcatcatggtaagtagctagccaacagaactgtgtcgtcgacgaacataagatgagaaatcgggatacaacatccttggaaattttaatttcgtgaatcttacccgatcttctcgcgccctctggattaatcgagacaaaatattgttgcacaaaaggagtttttttaggggcctctgagttgagtgagttttaggtgcatgcctgacttgttttagtccataattggccttgatctcgaacaacaact

SEQ ID NO: 6762 - DNA, 755 bp, Cannabis sativa
gataacttactagataacttactctttgttttttcgttcaacaacagatcagactcatatattgtactattggtataaattaattaatacaacatagggattgattttatatatatatataaaaaattagtattaccatcataattacaaattaaaatcattgttaaggtgggacacgtgtaaattaggtctgacaaatagatttctagtcctgtgtataattaaagacatagatttaattattactattattacaatatatatatatatagttcaggtgacatcgtcatgctaacgttctgatcagatctcttccataaaaacactcattcaattaaaatcttttgcttcacaatacttattataactcatatcaattatcacatcaccctaataaacaattatatatatttttacctttttagttttaaaatttaactttttttattaaaaaaataaacaaaagaaagaatcgcccgggtttggcgtggctggacggaacggagatctctttctctcacgtactaacctttttagactctattctttacactttgccacagactcttcgtactaactcacactcttccttttttttttctctttttttaataaaacaaaaaacgattttctttttctttttattactactacttcttcttcttctctagtctctgtgtaagctttgctcagctttcatgtttctaatagttcttcccacgctactaatttttattgggttaagagaaaaaaaa

SEQ ID NO: 6763 - DNA, 783 bp, Cannabis sativa
ttcttgaaataccaactatcatcaatcttcttggggtagctccatatatcatagttcctcaaataaattgaattgatctatttagcccataggcaatcttgtttgcttgcaagagcccataagtttttagccagaagggccctattccacttcttcccctctctgaacccaattcctccaagattttttgggagacacaccttctcccaagaagctcggtgaagtttgctcctattcccagaggatccccacagaaaatcctgacaactcttatcgattgcagctattatcttcgaagggatgatgaaaatactcatccaaaagttccttatcccaagcagaaccgagtgtatcaactgagctcgccctgcaaaggaaaggtttctactcgcccagcaattgagattcttgtttagtttgtctaaaatgactccacagtcctcagccttccatttagttggtcttagattgacccctaaatactttaggggaaaacccccttcttcaatcttcactatgttcagaatcctagactttatctcatctcgaacacccccaaagtatatgtgggacttcgaggtgtttgcagataaacatgtgtcattacagaatctctcaaacgcaacttgagtaagactaatcgagtttagattacccttgcaaaagataacaagatcatctgcaaaacacaaagtcatcaatctaagattcttacataaagggtgaaagccaaaccctttttcctttgagctctgccttagcaacctggtgagataatccata

SEQ ID NO: 6764 - DNA, 1722 bp, Cannabis sativa
gccataccatgccataatttgttttacagtaataataaaaatggttgttggaaatcaataagaatgattatgatggagtatgattattgtgttattattattggcctttaattgagttgattactatatatgccttgagcaaaatttaaatatttgggaatcacatgtctttgttctacacacacataatccatgcatatataagcaaattaggaaccttcccccaaaacaaaatacatgtgaaaattcatcaaaaagctctaatgtgatgatgatgttgattccataacttataattacaaccaatctcaccaaccatatatcacattacatatccaaaccaatttcacaacttgcttgcttcttttccttttttttcttcttaataataatttaattagaaggggtttagaataataagtcataatcttgtattattacatatataagaggagtattgtattacatattatgaatcattcatagttattgggtttttaaaatttcattacatgttaattttattttagtgattcttaattgtatttataatttttcaacccgactcaacttatcataaacttataaaaaaagagtgttaaatctttctaaattgaaggaaggaaaacagtaataacaatatttacgccgaccaacatcgatcgctacctaagggtgattgtataggctttgattttcatagtaaaacaatggatatggacattgtagcttatgaagaaagtgatatgccagccaattttgatatgcccttactttttttcaaatgaaaaattggcatttaagccaaccttcaaatttcaattttttttttctttctttctttaattatatatgttggatttacatatctgccctgggctgtgtttgtttgagtagtcaccaagttttttttttctttttcaattagcttggataagaagaaatacactttattatttcataaatatatatgatttaaagagtttttttttttttttggtaagaatatgatgtaaagagtaaagagtttgaaacgtgctaaacagaaataatggggttaataggatccgtaagagaatatccatgctactaaatagtagttgatgtaacatttaatatgtataaatatataataaatatagtttaagaacaaaaagaaatgttctatagaatagtttaaagttggaatttaaaaatatataaaatgggtatttggttaaaaatggtatgatatagcagtacttataaattataatatacttgcaattgtatatataagaaccaagacattatccttattaagttattatttgttaaattgttaagggttcttctagtttctagttattataattgtttttatattaactagagaaaatcaataatatctttaaaatagttaatcaaaaaaataaataataatatctttaaaatatcatagtctaatataatgacaaaagagtttttgctaaatatctacatatacatagtctacttgcactaatgtataaataaatattatagagacattattttaattataataaataaaggaataattaagcaagtcatatttctttactatttttcttctatagtcaatgaagaagaaatttgaataaagggactgtatgtgaagagactacactcaaagaaaaataaaataaaaatcatatgtctaaattttgtaaaatattatgattatgtgtaattacagtactt

SEQ ID NO: 6765 - DNA, 1084 bp, Cannabis sativa
tgtaaggatgcattctggtttcactctagttagcttcagagatgaaccaaccagggatatcattcttgaaacgggagtgatccattttgataaaaaatattggttgtccttaggccatggtctacagatttggatgctaatcaaatggtgcgttttgttcctgtttgggttaggctaaatggacaggggcttcagtattggggtaataattccttgagtgctttggtgagcacaataggcaaacccattatagcggataaggtaacacttgagaggtctatgatcaagtttgcaagagttctagttgatgtggagatttcgaactgcctcctaaaactattacatttgtaaatgagagaaagcaactaatagaacaaagtgttgaatatgaatggttaccatcaaaatgcacagcttgtgctctcttggggcacactgttgctaattgtaacaaagacaaacctttggtttggaagaagaaacaacaaacaaccaagatagaaggcaaaatgaggcaggggaacactgaaatgatggaatcgggtgatgaaaggaagcagcagagtggtctcttgtagcaggaaaatcaagatcagcagcttaaggctgatacaaatactacaggggctatgaatttgattaatgtgatgcaaaagaagaatgaagagggaaatatagagaccaacaggggggctaatttagacaagaacaatgatgcaaatcaatggattacacctagaaaaaaaggctcaaatagtatacagaatctgaatactaaagctagcattagtaacggttatgaggtgttgaataaggtagaggaggaggttgttggtactgttcaagattgtcttaatgatggatagatacaatgttttggggtggaatgatagagggctgaataaaaaagagaagcagattgagttggtcgacatttgcaggattcataaggttggttttggtgctctctttgagaccaaaatcagccatgacaaaatagatagtgtgaggaagaacttgcctaattggaattgttattctagttagaatatgtcctatagaataatgtgttgggttttatgcc

SEQ ID NO: 6766 - DNA, 664 bp, Cannabis sativa
ttccgatctggcttgttttgttttgtacggccaacgtggctaatttttttttttgtgtgtacgattaatgtgactagttttggtttttgtgagctagtatggttatttttagtatttgtaaggctagtataactagttttgtttttgtaaggccagtatggttagttttagttttgtaagaccagtatgattagtttttagttttgtaatgtcagtataattagtttttggttttgtgaggcctgtaaaactagttttatttttgtaaagctagtatatatgtctagttttaattttgtaaggtcagtatgatttaatgaaaatacatcaaatgtattgtagccaccttcagtaatggagaggataacagataagtcctagtctttacatcagaaaaatatgagtgacagtatatatataaaattttatattttattacatatttgatatttattttgtgggtgttctattggtgtatcggaagttacaactctgagtttagaggttttttttttttatattaagatttttaagattttattgcctagttctccaaaggtatctcgcatgcccttaggatagacaatgaacttttataaatgaaaaaaaaataaatcttcatacttttcgttattttaatttatatcggttaaaaaaaaattat

SEQ ID NO: 6767 - DNA, 1417 bp, Cannabis sativa
gcacagcttagaatacttgttggcaaatgggatatttgagatcaagggccaattaaagtgcaatgaatgtaagcatgagtacgagatgaggttggatttggtgaaagaattcaacaaggtgaaggggttcatcgtcatgaacaagcacaaaatgtatgacagagccccagccatttggaagaaccctccttaccccacatgcccaatgtgtgagcatcggtactcggtcaggcctgtactcattgatggccatcatcttaatatcgattattacaattttaactggctgttcttgctgttgactcaattcttggagagttgtactctctatcacctcaagtattttttaatggttaatcagattcatcgaactggggctaaggatcgactcctatatcttgcttacttgaatctctgcaagcaacttgacccttcaggcccttttgaccgttgaccctctcttgttcatcaattttgttacgtgcttggttatcgggaatatgtgttcattaattcatcaagaatatactagaggtttttacttagcttcttgaatttcttgccaagaataaagtttctgtatatctttttggcatttttgtttttattttgaaacttaataatatgatattagaatttcagttattaattatcatgtgtgagaatataatatagctcttctatttactgcaatatcgaaacatcatataaaaatttattattcatattatatgatacataagagcttttaagcatagaaatataaacacttttattactctctcttgtcatgtgaaaatctaattttattctaattaatataagccattaaagaaatggaatttacatacagaatttatattggtctattttataaggatagtgttgcaaagctctcctagttattgtaattcatgtaaagagactggagatttaatatggtgcatgactgcatatgcttaaagaaggttagccaaacttttatcaaggatgatggctatggtgctagtactaggacatatgattctagttttgctagtctctttctaaatacatagcacaaactgattagtcaattagtaccggagaaaatgtgttgtatgaaaagctcattaaaaaatcttattgtacagaatttaaataagtttctagaaaaacttctaatagagttaatttgatgaaaccttatcaagctatgcatacatagctggctggtagtctgaatgttttgaatgcatctattattttccacattcgatatttggaatgctcatcgattcagaacggaggttggagagaaccttagcccttgtgggagcaaaaccacaagcaaattctctgaattggcatttaatttttaactgaagttaaaacaggacctacagaagacaagaaggaatgttgaacacaacactca

SEQ ID NO: 6768 - DNA, 589 bp, Cannabis sativa
ctagcatggtatggtgggccactttatctgagattgtccacttgctaataaagaagaactaaaaagaacaacaaccaaaatctagggcgtctgttcatgatgactgaggttgatgcttaagctagtccgtcagtggtggcaggtcagttctccataaacggtcattcttattttatattgtttgatttgggggctactaattcttatgaatagggtagagtaattgaaagtttccagaaaccatgtgatgtgtatgctttgaggtttggtaccctattaccctcgagagacctaattatatctactcagtggattaggttattgtctttttgcattgatggttatgaatcaactgccaacctaattgagctgcaattgtctaattttgatataatcatgggaatggatttctcgtctaagtacagggcaacaaatgactacaagcagaacatggtggtgtttgaacttgacggtgcctagcagtgtttgagggtaaagtacacggatctggcatacctagaataacactcctaaaagctaaagatttgatgcatagaggttatctaggatttgttggaaattattttac

SEQ ID NO: 6769 - DNA, 1432 bp, Cannabis sativa
attcacagcctaagttgcacaagcttaaatgcataccgcttctgcatcccgcctttgcttgtcaacggattcaaacacatcaatctccgattcactgcagattaaaaaattagttggaaatttcaactatgaaaatttcacatttgtttctggtcctatatggaaggacctagaggacaagtcaagcaaaccaatgcaatattgcttcaaggctatacacagaaaggacaaaggtcaataaaaccaacagccaacaaaaccatctggttataaaaattttaacccactgggaacattttcaaggatactttaagacttgatcaaaccagacaatcacagtgaacagatttcacataaaggctaaaaagtagtagtgacaacttttgtaagcccaatcaaatttaagttccacataatacttacctgcgagctaaaatatcatttaatgcatcatcatctaacacaggtgcagcttcctctttcttacactctcgtaaaagggactctagatattcccttcgatcctcagcgctgtaattaattaatcaatgtcaaaattcttagaccctagtttaaacatgaaaatatagtagtctagtttacttgacattacaaaattctaccttgtattattatcaaagaaaccagcagtgatactctgattagcaacaccaagtttatgctcagccgaagctctcacttgttcttcaacagtttggaccttattatgacaaaaaaacaaaagtgagcaataatccagtagcaacagatttggtcagatagtaaaatttattatggaaaaaaatatagtaactagtgatgaaccggtaaatgagaattttaagaggcaaataattcaattgtcttgttattgctgataatgtaataaactgattaaattagcttcaaatataatgcaataacattacttggaaaattctccgaagtttttatgtaccgtgtgaacaacacacttcaatcatttttttgacgacccctccaaacaagcataactcatgagtaacttttgagagtgtttgaataaatttttaaaaatgcttactattatatttggaaggttttcccaagaaagaaggcacccagctacatctctagaatgtcttttaaaggaaagctgttatgagttttaatgaaacttgatttttccattttatctaattactaataataattttcctgtcttatcgttgaccaaataaattacaaaaaataataatccatagcttgtttttttgatttggaaatatttattttttaatgttgaaattttatttatgattttctaatcctctaattataaaatgtatacatagattcacttttaaaaattactcacttacgaaatgagatttttactataaaaaagaataatctaacaaatatgacagattctcaaaatgagaactttcaa

SEQ ID NO: 6770 - DNA, 1172 bp, Cannabis sativa
aataaaacagctccctatcagtttgatctgatcttagaaaaagagcgaattgcaacccgcgaggggtaagctcaaatcgttaggcatgtggtttgctcccacatagctattgacgtagttacctggtccccaaatattgtaaggttcagtggggattctagtttcaaaaaaaaaaaaaaaaaaaagagcaaattgcctgccttctgagatctatttggttcatttactaaatgaattcaccaagttttatttgtggtaacctcggtttcttgcaggttcttgaccgtggtgagaagattgaattgttggtggataaaactgagaacctccgctcccaggtagttattgagcttcgtattgtattcaaacatagttatttggtccgaagtttgggttttagacgaagtcgattgtcatggtctgatattttgttacaaatgctgtgttgcaggctcaagatttcaggcaacaggggactaagattagaagaaagatgtggctccagaacatgaagataaaattgatcgttttgggtataatcattgccttgattctcattatcatattatctgtttgtcatggtttccattgttaaattccctagaggagtatcccggggtatccccggatactcttctgccgctgctgctgcatactgcatctgaacctccacgctgctgttctcaacagcatcgtttttcgtcacttttcgggggcctttactactgtttagattaaccattccctccttactgatatagcattttaggatgtgggagcgttttgtattttggattgtttgtatagtgttcatgtgaatttttttttaccttttctagctagatggtctctgcattgcattgtgtattggatttattttgtttaagatgtaattgaggaatattttggagtatgtccttttgaaattattatttatatctatcccatttattttcatctattgttattattattattattcttttttggggtgtttctaatctctagtttaagtactttggttattatgattatttatcaatgtgaactgttatgataaatacaatttttcattattattattattattatgttattttatatatggtatgttttacttgcctttcatttcttctactattagtttgaaattttacataattgctaaaaaa

SEQ ID NO: 6771 - DNA, 723 bp, Cannabis sativa
aagttggtatcagagccaaccattgacccctgtcaatggctgcccctaggatcaaaaacctgtcgaagaaagttctcagaccccctctgctgtcagcacaaacaaaaatggtgcatctgcatcacagctcccaaacactctatcccaacaacctactacacttaaccaacccttatctctaaaattagatagaaacaatttcacactgtggaaaacaatggttttcaccattgttcgaggccacagattgcatggttacctgaatggtactaaactatgaccaccagagttcattccagtcgctggagaagccaaatacgaaggagagatggaaaccaaccctgagtatgaacactagatcatcaatgatcaactactcatgggttggctctatagttccataaccgaagggattgccactgaagttatgggatccacttctgctgtaggtctttggagagccttggagagcctttatggagcctattccaaatcgaaaatggacgacaccagaaccttgattcagaccgtgcgcaaaggttctactccaatgggagaatatttacgtcaaaaaaaaattggtctgacattcttgctcttgcaggtgacccgtatctagaggcgcatctagttgttaatgttctttcaggtctggacgctgaatacctctcgatcgtggttcaaatcgaagccaggacaagcacaacctggcaagaactgcaa

SEQ ID NO: 6772 - DNA, 942 bp, Cannabis sativa
cgagtaagaatgatcacctcaacgggtgttgctaaaactaacaaatattgaatagcttcaacaaagacaccaggttttgattttgcaagaccgacagcacaaatagcttgctcctccccactgtattctggacactgaccatccctaatgtaaaaaaaaaaaagacagaacaaacattaaattaatgtagaaggtagaaaaatattgccatcaatgaggatacattaattacaaataatagtattcatttacaaaagagcagaataatcatttgcatagtcttcgtatgctgcattgtctcctacatcgagcatcgtatatattatataatgttttgcacaaatcaagcgacacaaacatgatcatgaaatcatgacaataaatatgcataaaatgtatacttggatagaaacaagggcacaagctgaactttacagaaatcatgtccatgctaccaaatgctcccgttgaacctacaatttttttgaaggtatgaaattttggcatgtctctatgaacgtcccagaaggaatcaaattttaaatcttatggggggcaaatcatgggcctataggctatagaaagaataataataacaataactcgaataataatttcctataaatataacagcaaaaactaaaataataaattttcttcagataaataatagaaatcaacatggtgaccacattataaaatagttttctttcaaacataaaatttgcaaatagttatagaacccataaaaaaaaagcgaataatcattatttacttgcttgactactccttcgtactcaatatataattgactatctgaccatatttactctgattgtaaaaggaatggtccaaacaaaattggctcttataaacatgatcagctaaaagatgtttttatacttcctatagcatgatacagcttgcaaaaacataaatgac

SEQ ID NO: 6773 - DNA, 1487 bp, Cannabis sativa
gtcataaaaaagtaataataatagaggacaccaatacgagaaacctctaaatcaaatacaagaaattaatatagcaagttcataaattatattatttacgacttaaaacagagagttgtgtgtgacatcttgaatggtctaccactccaatacattacaaagcacatgcactcatccacctaatccttcctttctttctacagttttttcaattttcttttaccctcttttatctattatatggtccacatctcccaaagcaatgctgccaatatttgtttttctcataacaatttatactttgtttcttcttacatttttgtaaaaaaaaattggattaattcagatcagataagagcttttggagttgctttatcatatttagtaaatatataatagtctccaacccatgtactgatgatgatgaatcaacattattattaataataatgcttcttaagacaagagcacttattaattgggttaattgattttatacttctaataagggcgggctaattgattttatcagtacattcatggagcttgctaaccttaactcaaccaaaattccaataaatgcacctgtcttaacaagcattattaataataataatgttggttgattcatcatcgtacatggtttggactattatgcaaggctttatttatctactaaatatgataaagtaactccaaagcccttaccagatctgaatttagaccaaatgggttgaaattgcaatgttgaaatagacaaatgtcacaaatctatggttttggtccctaattttttttgaatgtttttttagttctatgtgcatataagtgagtcattatatttattggttgcaaagaaaataagatttgtagcaattttacttcaatatatggagatgataaataagttgacacttattttcatactctaagtaattattatttgttacgtataagtacaaatatatttcttcaaagttatttctataggcaccaattacgtcaactagatatttttagaatgatacatactagtgatttagcttgtatagaaaatactcgtatgtataggagaatatttagtattttgtgtcactaactaaaaactattagaggtttgaaaggaacaaaaaatatgaatgttgaagaaatgattgctatatttttatatattgtatctcatgacattaagaatagaattgtgagacgaaaatttacacattcgtgtgaaacagtgagtagacaatttaatgttgtatttgaatgctttgttgtgtcttcatggactattattaaaaaaagcctgaatcgattcttgatagttcaactaatgagaggtagaaatggttcgaaaattgttagggagcactagatggtacacacattaaagtcaatgagttggctgtaggtaaccttaggtatcggactggaaaatgtgaaattgccactaatgtattaggtatagtctcacaagatatgcaatttat

SEQ ID NO: 6774 - DNA, 1247 bp, Cannabis sativa
  modified_base (1129)..(1138): a, c, t, g, unknown or other
attgaagataatttattagcaaaattgatcatctagagtgatttaggcatcacaaggtagtgccttgatgataataaaatatacttatataataattattaaattaaaatatatgaaattaaatatttaatgacactaataatattataatatattgtgatggtatttgcttggcataaattaattaggtttgcgcttagggcacacttagtttagagctcaattttttttttcttttaaaagtatatatattttttttattaactttaaaaataccatattttttttttttctaattatgggtctaatttttttttttttcttataacacgctaaaatttaggtctagccatatgtaatccacctataacaattacattgtactaattttctatatagaatgattaatccaataagtattgtttctccaagcaagttttgcttgtcaattaatgttcttaaaacaaaaaaactctaatttactaatcttggttttaaaaaggaagaaatacacaaagacgtgttaagattaatcatgaaaaagagatatatcttagggaatttttgtggtcaattcattatcacttattgacaaaagataatatattatatattcttagcacatgactaattgtttgaaaatgatcgttatggtatgatcattaatttctgagtttgaaaaagggtataccaacaaataaattgaatccttataggcttaaaagatatttactaaataaaattgaaaattagagaaagtaattaattattaggtacatcagacaaaaataatggcggctaatattgaatatccatctagaaatgcaataattttaaaggaaacgtaataagactttgaaaaaataattctctaaaagtggaataattaatatagagaagaagttgtagtaattattgatacatatatatacatacagatcaagtgcacatgcagtacagttaaaaacaattggaaaaagaataaaaattaaagttaattgaataattttctaaaataatttggttcaatttaggtagtgttgagtgtatattattgactttattttttttactttctttctttctttctaattattaaaattatcaaacaaataataataataataannnnnnnnnnaataataataataataaataaagtgtgtggagactactaacacccaattaataatacggagtttaatgtattgaattgaattattttatatatcatatttttatataat

SEQ ID NO: 6775 - DNA, 558 bp, Cannabis sativa
tatataattataatttatataatcgatcgattatggatgtaggtagttagttttggtaacatacatacaaatatatgagtacccgtaagatcactgtcaaatataataattaattatttgagctaaaaaagtaacacgatttaggagactatttaagggagacagacattattgtcgttatacaacaaattagaaaatgcctccaatatctcttaacaacaacaaaagcataccaacaaaattttcagacatacattacttttttccttattttttcatatcagtattcagtactactgtccacttgaaaccattataaatattatacaataaattaacaaatataacgagaacagtataaattcaacaaccaacccactaccatacatctatctatctatgcttcaaatagtggtcataataaatctataacagtaattaaatattgttatgattatatgtaaatattattttggacttttattttttaaagttactgttgaactttttattttactaaataataatttagtcttttcttttaaaaaaaaattatat

SEQ ID NO: 6776 - DNA, 1718 bp, Cannabis sativa
tatatcatcaaaattctactttttattttatttattttatagcacatttttaattacaccatacatcagtttctataaaatacatcattaaaatcttttttttctttctaaatattaatacactttattcatttcaaatatataatattaatatatacacatatcttcatacaaaaataataaaatatgtttagatgaatgaataatattctataaatgtagagcatgaatagtaaattttaaagaaactttaaaatgataaaagagtttagaacatctgcgtataataaggttttaaaagtttttctatttcaaaagatttgttgtgagtgatcggtatttgaaccgaacttcatttagaaaatcaaaatggtatcaactatcaagaatcaagcttaacctattttttttttttttgtcagggccaatcacgctaaactttaaaccatattctatcatgcgaattaaaaaattaatagtaaatcttaataatacagttttgttaaaataataaaacaaatttttaatatacttaacacacaaaaataccttattgacattttgatttatataaaaattaatttcgatagaactttgttgattaaacaggaaaaaaggtctattttttaaagtcaataatacaacaaattgcatattttacaatcaccaaaaaaataaaataatataaaagagtaataaataacctaacgacctcaaaaccttgaaaatggctttgatattgaaaaggaccctatgacactttaatttggaaaaaatctaaatttgtggacaaaattgtcttgggcatttggccgctggaagaagcaccacaataaatataaaattatttaagcaaaaaaagtatatataaaattatgataaaaattggataattttgtcttggaacaaacgttgagtagttctatttttggatgtgatgatcccaagtaggacccaaacaaagagaataagaatcccataattccatgcaaactatctaaaatattataattgaacttagaaagttaattaatcaaatattattttatacactttaatgatcaatctttctttatgtccaacattctaaatgtcattattttaataaataatatcggaaacaataaatgtttttttattattttagaggtggaacttgaaagtcccacatttcactgattctccaataacacccatacttcacttcacccatgtgttaggagaaaattaaagttataccattgtattcacccaagagattttcactatttttttaaaaaatatttaattcagtcttaaaaaacaaacaaaagttcatatactttttgagtttatttaagcaatattataaacattcctttaaaactaaacaaaagtatttattaattagaagagtacatgaggtccatattttatgtggaagaatttgattgatccaactgcataaaaaaaccacttggtagagctgtagactatagagagtacataaattgtgtcattctgcattggactagattatctagcttcatgtttgtgaaaatattttactaaaaattaatgaggaatggtattagctagaccctcatgaagtgatttttttttttttgagtggttagtagttgttgggtaattctatagtataatttttaattggaccgtttcaatatatcttttatttgtctcggtgtttagaaattttttttagtctatctcatttt

SEQ ID NO: 6777 - DNA, 1074 bp, Cannabis sativa
cgatctttgggacaacttattgtattttgtatattctctaggcgacaactattgtattaagtattttaaatcagttgtaactattttaaactcaggataccgattatataaaaggaatttatttttaatattgttagtacgtaagcaaaattttaattactcacgattttcaataaattcgttgattagaaatgaactgcacaattaatataaaatcatgaaaacacacctaaactagttggatgttacaccagttcaccaagttttaggcacggaggagattccacgagaaagaggaggaggctagatactaaccgtcaacaagccaccaatccagcctcatttgattcatcgccctatgctccataactataccagtaatatctgtataagtgtctgccaccgcgaatagcctctgcatcaatcgtttcaatcgtagtgccaatgacctacctcttttcttaagattctttcagtaggtttaaaattccccacaacaattattttcatagaatttgcttctttgtagaggacaaatgatgttgaacacgctttgaggaggcatcatgaggaagaacagaggattttgcgtgtgagagcaaataaactttcttttgtgaagaggattgaaacctctgaaggtcttttcaccactgttcctcttggaccaatggtggacatttaagccgtagaaaatcagatggcacctcaggtaaggaaggaagccacaccttttgcagccaagcttctcgaccaattagccagcagtgcgttgagttgcccttggagacatgggcaacctgcaacagcactaacgcattcaccctttccgatgccaccaagcagtaagtagtggggatgagctttgatctatatattctcgttcttattactttgtactttttatgttttctcacatttgattcgtgtgctagccgaccttgatgagggagagcgccgttaaagaagtaggcacccttgtcataaaacatgaacatgtaagatcagagaaccaacagctgcatgttgtcatcaacaacttgctaggcaaaaaggaagcactgcggagagatc

SEQ ID NO: 6778 - DNA, 949 bp, Cannabis sativa
ggtggtttgtcactttactaattttgattttaatcttactcagtaaatcatgcatatatttcgcttccagcctctaaatgaaataatttaatatattttgaaaagttaaagaaggggcactattattattaattttgtaatctcttcaaaaaaaaattatgggaacatgatcaaaaattggctaaaaaatctcaattaatcacaaaatcatcttttgacttttaatatctatacatttcgagaaaacatatagaatccaaataaaaactcaaagaaaacaaataaaataaaataaaaaataagggtaaatgaatgcataatatacacattcatcaataatactagatagattaagcacaaaatctacaaatcttatttttagtgaaataataacttaatatttatgtttatttagacttagataacacacattaattcatcactctttaaattaagaagcgattcattcaagatattttcttgccatgtcatcacataatctccaggagaagtcgcaagaagtcgagaaccttctgcgtacccatacaaccgagtcacgaccagaagcggcaccggtgggtcgagtccagaagtgtcgccgacaagtcgagtccaggtgcgtcgccggcgagtcgagttggtttctagtcggcccgtttctgcgataattgagtcagctgtgttgagtcgaatataacagcctttagtcgaatacatattgatgtttgctaagtggtgttatcttatatgtatcaagataagcaactaattcaataagatttgtttgttctttatatatgtactgaatatttaagggatccaataagaaggttttgtaacttaattaaatataggggagcaaagacagtttttgatttgattaaggaatggacagttgatgaagaaggtttaagaaactggttattagtttttggttttagtttttttt

SEQ ID NO: 6779 - DNA, 985 bp, Cannabis sativa
cattgagatcgatgtaaccatgcctctcccccgtggtacgggattccattttcatggaatggcagccccggtttggcttgagttccgttatgaaaatcttccagatttttgccattatcgtttgagtcatattgtgaaccattgtcctgaattccttgaaaaatgcgactcttcttcgacccctcatttccttcaatacgatcagtctttaggcacaaagatccgcatcacatcaaactgcttctacattgcgaatacaaggactcggctgaggctgcatattaccaatccaatctcattggccccaacccctcactatcggctacattagcctttagtcctttctaaaggccttttcaacgagcctacctcgacttatgggatacaacatttaggttagccacacactacttttgttggattctatatggctagctcctcccacaatgtacccattccccactcccatgatcttaaccaacctccacttccgacttccccatggccttatcctcaagttgctcctactaccacaatggctgctccttcctatgggacacccacacctaccaatcctagccactccatgaccaccgcccctttaccttcacagtcagtgaccacggctgagcaactaaccatgccactatcaaaaattatatcgaccacatctgctaccatcatggccacaactgtggcctcaacatgttgtccttgtttcccaagcttgtttctactattttggcggaccttaactccactcaaccccttcgttttgctattggcgctgcaaacaactcaactcctgctccatctaccaaccacaggggtaaaccaaagcgccctgactgccttgatgctgctgaattttggaaaatgcttaaacgcacatgcgacttagcgaaatcccttgaggaaggttcaattgaagaggcgggtgacgctcagcgtacccgcctagagccatgaatatcatcagctggaa

SEQ ID NO: 6780 - DNA, 2081 bp, Cannabis sativa
tcagcaacctcaaagacaagtacaattaaaaaaaattatgagagaaaggacataaggaaatagtagaatgattgaagatgatccaatatccttttatcatggcatgaaggttcaaactctcaaaattatattcatatcataaataaggagtacaaattgagttgagataataaagttttgtattttttcctattgctataagctgtaaaaccaattggttataaatgaatatttatgaccaagaggatgcaaattacaatgtagagaaatataagtatgtaaataattactcataaagcatacattcaccttaaatagactttctttttgtttaaaagaaagactattttaggacaagcatgtcactaacttctcattatagttttgaaatgaattattaaagtttcatttatcaatggtaatattgatgacaataggatatggtgaaactagaaaactttgtatccattgatccaaagaatatagtttacaaatttggaaaatctatgtataaactcaaataagcttcttgtcaatgattatacaattttcattaagtattctcatttaattttgagataaaagcttttgatgattgtgtatatatcacaggttcagtgggagtaagaatatgatactagtattatatattggtgaaaaattattttccattaatgatatatacccttttgtattaagaattcaacatatgttgagattgttcttgagatatctgaattataacaaaagagatatattcattaagtattcaaatttattggcatgaaggttactataccaggtgatacgcttgttgctaaaagaaataagttgtgtaagtcattacactgaaagcaaccttagaattcaataaatatagatttttctttttatttatatttagaatctaatgtatgcttaagcatatatgtgaatttgtacttaacatatatatcaaaaatgttggatagataattaagtaattctataaaaaacttttggtatacagttaaatgggttatagggaatttatatagaacaaactactatatgttctcctatcaagagagaaaactagagaactgtaaatcttgtatttttggaagattattactcaaaattaccacaaatatcatctctattagatggattaaaatcatcactatctatagattaaggtatactttcgctatttgagttcttttttaatcaaaaaaatgtattttttagatgtatatttttgagcttataacaatatgaaattaaatcttattattaaatattttataagtgataaaagtttttaaccactagagtcatgtccaaatgaaattgacaagagttgcatagtgcatacactcattgattataataatgtgacacatattattggtttaaattataattagttgcacaaaattagttcaagtttaggcccataacatgtctcaatcaaaatttaataaatgcaacttgaaagattgaaaatatgttttctatatgatgccaatttgttttatcctacaactatcaactatttatatttgattagtggaatctaatccaaattaaatggttaggtaaatcctgttacttgcaccctctaaacattactttatgtttccaaatcattgattttcatgtgttctcctcttgaagatatacactaaaatctttactgataatgtttgttctaagagtttattttttcacataaataaaaaagatatttacaatgtaactggctaattcttttgttttgttttgtttggatgacatactacagcttcaagataagtcatcatcataatttttaaaactttgagaatactcctaacaagattatttcaaaatttctcagaatcaatatgataatgatattaattacaatggtacataaaactggaccataccaaatcactacactttttttcatgtataaataagattgtgtgagaaaatatagtacacactttcatgtcatgcaggggaaaaaaataaagcttattgtagtgtaccccaaagttgactcagtccatacattaggccccccatgcacacaacaaatcatataagtgtgt

SEQ ID NO: 6781 - DNA, 742 bp, Cannabis sativa
agaaaaaccaagccagccattgaaatcccttgtgaagcttagctaatagtggaaaaaggtgatggtaattggtttggaacctggatctcaatgttggaaaaagctaaatggatattagtttattatgtgacaaaatatttaaatatctcttatttttagtattagtttatgcgatttttattttatatttttcataatttttataatataaattactttttatcattattattattactttttaaaagttatttggatagtgaaagtgtaatgttttagtattttgagtattttttattgaatgttatgtttaactaattttgagtattttttaaggtgaattaaagtatttaagtgttacattttttacatattgagaatttttgtagcaaatattttttaaatattaatattgtaatcttaaaattagcatatttctatttttttttttttttggaaacacatatttgtaaaatgagttagtaaaattgtacaaaataattaaaattgttataaattatatttttaagaaacaataaagacttttatttatttgcaactcaaagagggtaattgaggacgaaataccgttatgtttttattttgtacttagttttttgatttttttgtggtaatattttttttaattatatatttattttataaatttaaggcgtttagtaaaattttaatattaaacaccaattaaaattgttatttgtacactttttttttttttttt

SEQ ID NO: 6782 - DNA, 880 bp, Cannabis sativa
aaacttaatgtttatttttagcggactcaatatttataaaattataaatttttttttaatttttttagtataattctcttttaaatttattaaaggaatatttagaagtaaatcatactatatgtttcagtcttagacttaatgacctagaatctatcttatatatggcttgttcaaaaaaataacagagttgtactgaagaaattagagagaaattacagttttacaaatattaggtacttatgccgctaaaaataaatattaagtttatgtcacttacaaacttaaaactttaagtatttatgccgctaattaccttttttctttattttattgttttaattagtttttctctgtaagggtaaaataagagcatttttattattgtgtgtatatttaataatgtaaagaagatgagtcgtttttaattagtttctcgataacgttttatcagtgtattgtaataatgtaaagaaaagaaatcgttttgaattgggaatctttatatgtatatagttaacggtgaagagacgaaatgggaaacagaaaacaagaaggattttatttttattttttttataattagtttatcttaatgttgtttatgagtaataataataataataagtctacaatttgggatttttttctcaataaattagaaattattattatacttctcatcgtgtttttttggagcctatgccttcttttgatgtttttgtcattgttaaagtcaaagttagtctaattgaatttattcaaaaaaaatatattattattattattaaataattatataatttaaatgttttaaggacgtgttaagaaaatttttgtgtaattagaattgactgtaattaccaaattctatcagtaa

SEQ ID NO: 6783 - DNA, 665 bp, Cannabis sativa
aacaattttgtatatgcaatttgcaaacaatatgaagtagagtccccacataagtcttgaagtggggcccacttaagtgccttttctagacattcttcagccttaatcatcttcatctattgcatggtgggactaaggtaccaaataggttcttctttttcattattttgtcctttatttgagattatcttaattattaattttttactctttgctaacaattatataaaagttttgaatttaaatagttagcacactcaaatcttatagctaagctataatgaggactttgtggtatggtaagtatatagtaggtaagaaataatgggtcttagtgctttaataattatatgtattctttttttcttgatttaaaattagctcaagggctaaaaaaagtctacacttacaacctgtagagagtcaacatttgcagatgcaataagggaatcaatccaaattcaagttttgattaaattaaaaatatattagatagtgaaaaagatttatataccaatataataatattattataatataataattaaattatattatcattatattatttcatttgtcaacttatcagtgattcataccttaactatgatgtagcttaaataagacactctctgtctctaataaggttttagaagtatatataa

SEQ ID NO: 6784 - DNA, 1120 bp, Cannabis sativa
tttaatttttttaatcattcaaaacatttgttattaagatctaaattaatttttttagatttaccaacaaaaaatgtttaatctttcttatgtttatttggagtgtgtacaatgtgatagttatcaaagtttataggacaaagttgttaatttataaaaatattaaacggaataatgagaaagaacctaacggaatatgtaaatttctataaatgtaaaagttgaaggagaatttttagcatattttaaaaggcatgattaaatagtgtcaaaagttaagatgacaaaattactaattattttaaataaaaacatagattattatagagaagactactgagtagtggcatattctaaagcatatacaatgaacagaaaagataaagatgaaacaagaattttaagctaccagttctcaagcttagtttttgtcaatattttacttctctataaatatcgcactatgagcttctctcgagttggaccgttagaatttgtgctacaaacacaacatattgaactgagatattacaacttaaaattcgattagaaggtgaaataataaaagggagtatatttatgtataagtatattactttatgtacaaaaactttgtgtgtttttatttttcaacattatttgttttctaattttattctgcagttgcagagttatattatgtagctacttatattatgtagctactgaataactatttcaataccatatttattattcgctttgaatctaaataaatattatacattatagatgaatcatttttaaaaaatttgagctatattaaactatctccaagcatactatctaacacaattttttagctaaaataaggagttagctttcaaaaaaagacctcaaaccatgtaaaaaagttgctcatagatagggagcaatcttagtaatagctccctatttttttcaatttttaataatattacaattaaaagtactactacttttttattatattaaaataatttatatttaacaaattaaaattaaaaaatattattgaaataattaatcataacaaaagtagagagcatgataacaaaagtgaatatcatgattcgagtagctcactattttaacattttag

SEQ ID NO: 6785 - DNA, 879 bp, Cannabis sativa
ccaccttgcccaaaacccaaaaaactcgaaaaagtgggtttcaattttagtaaactgagttcgggttacacccagttcatcaccgacagggtttagatttcattaatccaaaacctaaaaaaaatcgaattacactcgagcccacccaaaacacggatatatataataattttttatagtttttctgaaaatataaattttttaaaaaaaaccttaattctaaacaatgatttataatttttattttcttcttcttttatttttttattgtcattttttctatttttttttaagaaaaaatgtataaaaatgatattattcaaagaaaaagaaagaaatgtcagcccaacccaaactcggtcaaaacccccccgaacccagttcaaccttaacccgacccacctgcacttgaaacccgaaaacttagtcacacaaataggtgggttcaggttactaattctatacacacaaacttgaaaatctgaaacccagtaaaaccacctgatgtgcacccctaacctgaacattgtatttttaatacttaaccacaaaaaccgattttcttaccgtaaaactacctaaattgtacttctgttttggtcattactcttttatccaaaagtcttagttaactgccactatggattgcccatgtgtacacaagtgtacatgtggcacgtttttagtggtccacaaaatattaatgaaaaaaataattttaaatatcaaaaaatttaaaaaattagaaaaaaaaataatttgtagaaatatttttttttacttttactttactttcattttttttctttttcttattcttcttcatctttcatctttcttgtctttgttctttttatgaaaccctctctctctctctct

SEQ ID NO: 6786 - DNA, 1560 bp, Cannabis sativa
tctcttgccaccatactcgtaccaaaagagcgatcgtcatcaaacaaggctgcgtctacattaaccttaattctgttaacaagtggaggggaccaatgctccgcaccatcatgaacttgaaaatcagtacataatgagccaaggacagtattttgagtattattccattaattaaggacagtatttaattccgatattctaaaattccaaaaatcttatctcgctaattctaagatactcaaccgtatctaagtaactttaatgaccaaattgttgaattccactattaatgggcataaaacaacaaataacaaaattcataaataacatgcacgccacacctaaaatttaataaaatttccgtaattgagaaattatttctctaatgcctatttctgacagtatgtcttattttctactaaagcacatatgatcataaaacactaattacttaaattactaataagttgctagttttatgtctaaatatgcaataattacaattatccccccttaaaaggattttattctcaaaatctaacctgaataactttggatactgagtcctcatgtcgaattctagctctcaggtggcttcctccaccttgttgttcctccagagtactttgaacaatgttatggtcttgtttcaaaggactttatccttcatatcaaggatctgaattggttgttcctcatagaagaaatctagctgcaactcctaagcttcataggttgaaacatgagttggatttgacacgtacttcctcatcattgatatatgagagacattatgtattgctgacaatgttggaggtaaagctacacagtaagacacttgtccaaccttctcgagaatctcaaaagtccatgtaaacatagggctcaacttgcccttctttccgaagtgcctcacccctttcattggtaaaactcgtaggaagcaattgagccttgatcttttctatagcatcactagtcctttgaacttaggaatggtaatttagggcattttcgcgggtccggttggtgccccggcccaacagggcgacactggccggcatgatctaggtttttattgagctcctgccctggcccgcgtgtgtgtgagctttcgttatccacaaatgcttcagtggtgccaggatgtgggtttgtgagattgggaggtgtagttcatgatggtgcgagtgtcgtttgggcttgataggctgttggagcagtgggggattttggtgtaagtgtggtggagctattgacagactgtttgggacttaagttttctttttggatcctccatctccattattgaatgtgattcaacaattgtggttgggtggattaataattcccatttaaatatcatgaaaattatcagtgaatgttcttgtaatgctatttcacattctatgaatgatatttttcatactctagctacttctgctactattagtgtaggagtgtgtatttattagaagaatgtttgtctataatttttaagtttttatgtaattgttaatttatcttaatgaaatatgatcctttctaacataaccttat

SEQ ID NO: 6787 - DNA, 768 bp, Cannabis sativa
ttttcaaatgaagttaagaccaatttggattacatttcagcatacctcgttagcaccagcagtgaaatcttgcgtcaactttgcagctctcttttgataccttgaaggaaagcatgaattgcttaaactttatttgcttgcataactataatgtgcttagattattctgaattatatttataaagaaaatataacaaacataattatatccaaagtataacttttttctctaaagactgtaatagtactcttttgtttcagaaatatgacggaaattttaaaagaataatccaaatgcaaaactcaagttcagatagtgtagttgagatgcgtaccaactatagtgatgaaaaattgtagataacacagagcatatcacaattgcagataatgcaagaggccaagataacatcaacaaattaaccaatgcccctgtcccctaaatatataagtttatcttaggctctcgtcattgaaaagcaatgagacgtaatttaaccgagaaaaaaatattaataacaataacctgaagtagattccgtaaaattaagttaatatcattcccaatgacactagaaagccgttggcaatctgccccaagcctgcttgtcaaatccccaatagcttctctatcaaaaaacgatatatcctacatcaagaaagcagacagaacagtgtattccttcaattattttacctagaataacatgtccagaaacacaatagctcaaatccttgctgaaagttttacaactgctataggaggca

SEQ ID NO: 6788 - DNA, 897 bp, Cannabis sativa
gaaatggaatgggaaaccttccacagctgtcatcagaagaagaatataatttattcaacatgtgaaatgcatgaacttaaaattaaattaaacagttggttccaatacatgatgtgatgtgatatgatgatatccaaagttgaagaagacagtactactcactcactcattcattacaacaagtacaaacctcagttacttgttacagttgtttttattattggttcattcattcatatatctatatctacatgttagagtggccaacacgaacttgaacccgatgccatgaagtgttgagtattcctctcaagttccaaatgtcttccacattttctggttggacatttgctgatgaatccacctgccaaaacaatcaagtgtacgatacaaaatgacatcttttgttaatcttctaatttcgaatatggaatctaatatagtggttgtgtacgtatgtacgtgtcaatcaatgcacgtgtggtcaccaacaataactgtacacactacttcaaacttcatacacgtggacatctatctatcttaacttcattttaactaacacatttctcaacaactttttcatgtacttcgatcactctttatcagcttttctaattttttttaaaagaaaaatttcattttattaactattaactttggccaccaaactagatagcatagaactgattccaaaactgaaaatataaagtaaaatttctaacaatattatgagtcaccatattaactgattgatcgtaacaagacaatgtaaacatttctcaaaaagatacccgttgcccaaataagatagcatagagaaagaactttgcaaagaccatcaatcgccagagatacccattgtcaatgttgatctttaatctaattaacagtctc

SEQ ID NO: 6789 - DNA, 1017 bp, Cannabis sativa
atggtgaggaatggcataaacaaagcaatggggatttctgtacattgtctagtggtcccaattattaagacaactcattatttgtgtaataattgtataacaaattttgttaggaaaatattcattctaccccctgtattgtattgttaccctttgtatacgtggccatctataatattcttgtaattggaatttgcctatataatgaaagcgatacagcttattcttttggagctaagcaaaatattcattctacacacattttctctctgtttttaagttagtatcagtgccttcactgatgcgttgtcatctatggcggctccaggagagaagacaccaaaggcctctattgaaggtcacaatggtgctcagaaagtaacaacatctgcaatggcttcgaatgttgtagctggaagcagccaaccacagacttagtttttcaatgctgtcgtgcctcattttgggagaacactaaatcaaccgtttgcttaaagttggatcacaaattcacactatcgaaaccatagcttttgaaataacgtatggacacagacttgatggctatattaaaggtactcttcctagaccgcaagattttctctatgctaatgttgatggtagtgaagtgtccacaagtgaaattaatcctgcctttcagcaatggattgtaaacaaccagttgcttttctaatggttgtatggctccatgactgaaggaatcacatctaaagttatgggatgtgattcaacaacctctttgtggtctgtactcgaagccttgtatggagcacattcaaaatccaaaatggatgaatatagaactaggattcagacggttaggaaaggagctttcacaatcctagattacatttgacagaagattcaatgggttgatgctcttgcccttataggagacccttacactgaaaaactacttgtaggtaacattttctcaagattggatattggatatcttcccatagtactgctttttgaagcaaggccatccaccac

SEQ ID NO: 6790 - DNA, 649 bp, Cannabis sativa
gctccgtacggcgagtattggagacaggtgagaagcatttgcgtgctccacctcctcagtcccaaaagggttctttcctttagatccgttagggaagaagaaacgtcgttaatgatcgatttaataaaacgacagagttgtgagctgtcgttggctgtaaatttaagcgaaattttctcgtcgtacacaaacgacgtgatttgtagggtcgtttttgggaggaagtataagggaacacaagatggggttcggtttaaggaattactaggagagttgatgaggttgttggggagtttttgtgttggagactatattacgtggctttcttgggtgaatttcgtgaatggtacggataaggcagtggagaaagttgctaaagggtttgatagttttcttgatagtgtagtggaggaacacatggagggttttaattataatattagtgaaggtgaagatagacaaaactttgtggacattttgctcgagattcaagaaaacactaaaatggctgggtttgcagttagtgaagtcaatattaaagctattatcctggtaagaattgcctctctctatttatctttagtgtatggctatcaatatatatcatttttgctatattattacaaaatttaaaagataatttgactct

SEQ ID NO: 6791 - DNA, 1174 bp, Cannabis sativa
ttttacgttatacgttatgcacaactttatttgtcatagaaattttttattttatttttttctttacctctttgctcaagaaaattagcaattactctctttatttattgctatcaacttactattgtttttttttaaatatttatttgacttgtcactttctgccatattaatgagattaacttgtccatgcaacaagcttcacttaattatttcattaattcatattacatttacatgtaaaattgtgtgagtttttttttttttttttagaaataaaaaaatcagaagattctttctttctacaccaactatatggcctcatatagtctccattcaagatttttattacaagtacacatatcacaattaattaggaaataattaaaaaaaaaatacatcttacaagagtgaacgttttgtatggagtaagaatattaattagcatataataagagaaaaagtcaaaatattactgtatttctaacaaagtttttttttctttaattaccttcaattttcaatataatgctcacataaaagttaattaccatttaaataattataataatttttatatgaaaccaaattaatatgatgattatctaacattttcataatcaaataatgcaaaattttcatgcaaaactaaatattaagtataggaggtttgttttttatggagatttgagttcttagcaatcataacactatgaacacaaattttgcatttgattatctaacacaaaactatatatatgtttctaattttaacttcttagcaatcataacactatgaacttctgtactaaaactcatacatttggttgagagtcgtgaaaacaaaagaatgagaaaaatagaattaagggttaagtgcatatatatatatggaagataataaatttaatgtaatttttttctaattatcttttagaattactacattttcatttaattttaaggaatataatccttttaccaaaatagtaattataattttaaccaataatagtgatgttgctggtcacaagaattggccgaaatacctgattacaaatagagtcagcccaaacatagataaagaactattatattaaaatggctcattttttttttattatctctttgtataatataataaatatatttttgataatatatagtctcaata

SEQ ID NO: 6792 - DNA, 759 bp, Cannabis sativa
aggagaccaaagataacataaacaaacaataatatttacatacataatgattagagagtacataatattatacaaaacaaagtctgcatgttgcagtgaaatttaaggaatactcatctaaataaggatataaagccattccaattttcactactcccatgtattacagctcaaaatactcatcacttggtaaagtaagatttgataaatctcacctttcaattgtgtcagtgaaactgaaaaccagtaatgttgtagtgctgcatcaacacacatgaagtaggatttgacaccatatacggcggtgatgaaatgtcacatttttataccccaataagagcagcattgtaataccctttacctttaaactattaataataataaaaatactaattcaaagaaaagaattcattgttttgctgagttatagtaccaccagcttcagcaaacatgattgcaggaaccaaactttgcccttgaatacatggaataagtatattccagagtagagtaaaactacatatcaagatggattctgcttccacgaggtgaagaaactctgacaagaaccttgctaagttcaagtgctccaaaatttgccactttgagcctttctgaaacactgaacagaaacagggtgttctgcagcttctttggcctgctaagacaaatcataagggtttattaagacaacccggaacgtactaattacatacaaagtttcagtcattaagtgtgagtttcttaccttatttccac

SEQ ID NO: 6793 - DNA, 553 bp, Cannabis sativa
ttttttttttttgagaaggaccttaaattcaaggttgattacatacaatttacgattcatgctaacacatatgttttcaatttgaatgatttatatttttgaaattatacaagaaacattgtaggcttacttgtattcacttttctttaaaagtgcaatggggtaacacataattctcatttctcatatatttttgagagatgcaatgcaggataaagagccttctatccttgactatatatactaataatttatgggaagaaatgtcctcctatatttaaacccagattcatagttttttatttgctccttaattattctcaatagttacattgcattaggtaaattgttatatattcttgggatatttacacgacactttattaatatttataattgttacacatataactttaataaaaaaatagtagcaaaagtactttatcgattttattgcaatattacccttatttagttgttaaatgtcaattaagcccattaagtgtcaattcaaaaacatgtaacacagtgtaataatatatcgtcacgtgtt

SEQ ID NO: 6794 - DNA, 668 bp, Cannabis sativa
gtatatgtaggaatggcttgcacaatagccttaatgagaacctccttcccggccatggaaaacatcgatcccttccaccctctcaatttattccacactctatttttgatgacatcaaagagttgttttttatttcttccaacaaaagagggaagacccaaatacttgccatgattgtccacaattttcatccccaagaactccgcgagatccgtcttgagatcagcttgcaccgttctcccaaaacatacttctgacttataaaaattaaccatttgaccagaagctttggagtacttgtccagaattgatttgaaataactgcatgcctctcttgttgcatcaaaaaacacaagactatcatccgcaaagaagagatgagaaaccattaatccattcctcccaaatttaattcctttgagttgttcattagcctcggctgcttaaatcaatccggagaaagcttcagcacaaaagaggaagagaaagggggataggggatccccctgcctaagtccccgctgcggtgtcacggaccccttgatctctccattaatgaggaaggtaaattgaacagaagatacacatttcatgactttctctacccattccaaccgatacccgagcttaagcatcaccgcctttaaaaagcaccactccaccctatc

SEQ ID NO: 6795 - DNA, 668 bp, Cannabis sativa
  modified_base (89)..(89): a, c, t, g, unknown or other
aattagaccgccttgtcttattcctcaagcaggtataacgggtctcatctccctcccttatgaatctattagagttagtctcacattgntaatgtgtgaaaataaattgtcatgtataaaataaatgagctacttctcccattgtcaattagtcttaagatggaatctcattgattttaagatgcaaccttatttatcttatctcaaattttaacagaaccaaagtgtaggacatgaaggttaaatattgcataattaaaccaatccaaccacaaagatatccccatttcatatgatcatatgctttactaaagtttaaagccacgtgactattcttagtttcttacgtcgccttttccgttttaaataatacataattttgaagaataccatgagattattcgaaataagtagacccgaaagaatcacactttggatattcgaaataacagacaaaagaatcactttgaacctcttagctaagactttagatatgattttatataacacattacacaatgatacatgtctcaaattttccatattaacgggttgttttctctttaaaactccaattgcccatacttttgataaaaccctaaggtcattcttgttaagtcctgacgacttgtcgggatatatttgaaagagagttttttttttttttt

SEQ ID NO: 6796 - DNA, 727 bp, Cannabis sativa
tatctaaaaataatatctttttattgttttttttttatttaaatctcttttgtattaaatgtaattatatacagaaaagtattgtttctccttaataaaaaaaaattgcaatttaaatttaaatttattgtgcatatctaagaaaatattttttttaatatttttttaaaaaataaaataaatatctacaattataataacccaaatatctttctattattatttttcttttatattaaatgtgactatataataaaaagtgttattttttaaaaaaatactgcaattcaaatttaaactcactacacatatctaaaaaaaatttctattattgttttaaaaaaaaaaacaataaaactttctgttatattatccacgagtccatgaaaatttgaaaagaagactgcaagcctccaccactattgagtaccggaagcttggggagtaaatgatatatgtgttttcagaagggtgacacgtggcatttctaaagtatgattaattcgggatgacctggataaaagcccttccacgaagataggcccagtccagaaggttgatgggcccgagcccatctaaagcctagaaggctcacttccgaaggggaggctcatccagataacttcccaaaatgaagtaaaccaagccctccgaatgaacactaggatgcatccgaaaagggtatttcaagaggcgccactagaagccctttgtagggtgaagtggc

SEQ ID NO: 6797 - DNA, 1551 bp, Cannabis sativa
agagggggcccgttggagaattggaaatggcagaaatattcgaattcgggaagataagtggctcccccgaaccaatggaacaatcttgtaccggcacccgagggttgctcctaactctacagttcacaagctcctaaataatgaaggcgattgggataaagaggctatccatatctacttcaaacaagaggatatcccttggatattgggcacccccgtcgacactcaaatggaagacaccttgatatggcctttcacgactaatggtgagtatgtggtgaaaagtggatatcgagtggctcgggaaatcaactttttccaactcgttgttcgaacatggatcaaatccgtgagtggtgaaaaagatggtggcaactccaacttccccccggatcaagttgtttggttagaagctttgtaataattggctttcggctaaacttaacttgattcataggggcatgtcgattgacccaatttgtaatatggttggcaggtacgtggagtctctcactcatgctatgtggacttgtgctaaggttaaaccggtggggtagcttctgcctcactacaacctcattcgggatagcaaaggttgcaccatgtttgagctgctcatggaattcaggaatcagctgtctagagcagagtttgaggaggtaattaaggttctttgggccatttgggagaatagaaatagacattggaaccagaagcctgtcattaatggagcaagattaattgagtgggtgttcaatagctaccctaatccaactactattagggagaaggattgcaagcttactcctagccttccttctaatgggagctggttggccccccctgaaggtacgttttgtgtcaattgtgacgctgctgtgattccaggcaaggagggagttgggctgggcttcatttggagagattggactggaactaccctctcggctgggatgctttttctcccttctatctttccagtggtcattgcagaagctaaggcgattgctgcagcattgaaggcttccccgattggtgctcatcagcagtttgaaattagatccgactgcaaagttctggtggagagcttcaaggatacaagcagtccattaagtgatgttagccttgttattaacaagattaaaagacaccagttttttccctattgtacaaatcttactttgtaaaaagaatgaataatgaaatagctcatagtttagctaagaaaagccttgagagtaagataactcaagtcttttctcattctttacctgagtggttggctaatatttgtaaatctgacctctctaattctttgtaatctttgtggctttgtgaataaagatgttatttttccgaaaaaaaaaaaataaactaacagactctaactgaaaattaataactaactttgatacaccaaacctttgttacaactaacaatacacgacactcttaatactcccccataagatgtggagtgaatatttttcaatctcatcttgtctttaagtgtttgaaattgagttagaaacaaaggctttgttaggaaat

SEQ ID NO: 6798 - DNA, 704 bp, Cannabis sativa
taagatgacatagcttacaatttatctttgttgatgtcctaaaaaaaaagaacaaattattaaggtttaatttatgtcatgaaaaaatctttctggtacgctccttaattgttgtttgttgctatatcaaaaagttaattattaaaataaccactattaaccttttaataactctcttcactacttttttttcctttaaacataattaagacactaaaaaaacaaaaagggacccaatatagtatagaatatattttgctttctaattaaacagtactgatttcactttcaattttcttgtcacttttctttatgattgtactttcaattttttaataataataataataattttgttcatatttatttctggtcagggtgtcaaaaatctatttacaagagggaccaaatgaatatgataatgacaaatatagttccaaacagtgactcaagctctataccaatactagttaggtgtatctatatcaatatttatatatatatatgttttaagaccgattatcactattcatgtacttagcatgcaatagtatattttagctacatattacattataataactatgctagctttacatatataaaggtatagagagtatgtgtgctacattacttcattgaataatagttggtgaatataacaaaaataatttatgtttttatgcaaaacaattcttttctta

SEQ ID NO: 6799 - DNA, 2003 bp, Cannabis sativa
gattttacgtaatattatttttttaaaatgtatcattatttcaatttatgttcatgtttaatttaatttttatatgtgattatttatcaaaaatattatattttttcctcgcttttttattttttattttttccctcttgttctctatctaaaaattcttaaaagttgttcttcaaattaagacctttaatatttttctttaaaataataatgcaaaaaaagcaaaaaaataacttatgtacatctctcttctcttagatcatatccactaaaaaaaaatttgtacatctgtctcctgtcagattatatgtattaaaaaaaaatttgcattgttctttaactttgcaatataaaatttttgaatcttaacctttatttttcttttaaaaacaaatatcaaaaccgttaattttggttataattttgagttctttaagaaacaatttttaagaacttttagagagaaagagagagggagaataagaagagagaagtgacacaaaaattaatagtatttttgacaaataacataattatatataaaaaaaaaaataagaaaataacattaaatacgaacataaaaaaaataataacacttcttaaaaaaaataactttatatgaaattatttttaatacctctatcaaagtattatcttataataataattggaaactaattaaaattaaaattgattcattaaagcaaagataaagattgtttagtgggcggctgtggtgtgtttccgtggagcttgcattgcactatttcaagccacaattttattcatttatttttattaaaaaaatatatataaaataaataaacattttacctaattctatgtatctatagtataataatacttaagttatataaaattttgtaagtacatgagagttaaaaaattaagtcatattccacgtgttatttttttattagtatatttaattaattttttttaaaataaaaatttaatgatttactaactgaagttctaaaattataacttagagtattattaccgcaaaaaattaaacttaagtatttatttacaactgggagttaaatttatgtatttatatcacaaattactttgaaatttactatcacctttaaaaatgaatctccactctttctctctcgtcattattaatgataaatacaatttttttttttttagaaaatagctttaaagaacactaacaaaaagcaaagagttcaatgggtcgagagctaagaaattcattattttaaaacatctgccaaaataaggtctctaatacagagtagccaaatcaccagattgtgcggtagcagaaaggaaaagcttcacaagagaattagcaataacaatgatagttctaagataatatttgaaacttacaactaaaaaataagaataaaatgatctcatatcatccaaaattaaattcaaagaagaatttaaaacaagagaattattgagcttgtagactaaatttttgcaattagtgtcgagttgaatgttggtgagactaatagtgatgcattgagaaatgacattttgaattgcaaggcattcgaccatctcatgagagagaatactttgaacctttcataaatactctccaatgaagttcctcacgaccatgctaagaccacaagtcttactaatattattgatggcgacattcgtgttgatcttaaatattaaattgattttaatcacaatgattttttttaaaaaaaaataaataaatgaataaatacatgtatcttatacatatacaaatataaaaaaataattagtaaatttatctcttgaattttcgataaatctgatcatgccccttgaaaaattatactcgaatctctatttttttttatacaaatcaaaaagttctatcattaagtgctcaatagtcaatagccacttaatttgtgtaagttagtctcgcatcgcatgtataaaaatataatatataatatgtggtctattaattctattatttcaattgattt

SEQ ID NO: 6800 - DNA, 1517 bp, Cannabis sativa
aaaacattatttttcaataattttcaataaagtttttgttattatactttcaacaaaagagtacatataataataacaattgttatattttaataacaaatatttttaagtggaaccatagaattgcatatttatatttaaaaagaaaaacatatatacatattataaagtaataaacaaataaaaaaaatattgacctatttcaagacttttggaagtttgacaatttcatcaaatacttcacttgctatattccaatcataggtcccattgaaactgatctattactattcgtagtattactagaaggacatctattattattactattcttaggccaatcacaaaacgacgtcgttgtagacaaattacgacaactcacagactcgatatcctcttcctcttccatactcaaatgctcctccacttccacgtcatcataattattatccaaaccaaccgcctccacattccaaagaatccaactctgtgttgccgtacggtaaggtacatcgtaagttactgtattcctccaaggtggcgttcccccattggctcgcaagtatttcctcccttttccacttttaagcttgatctgttggaacccctccgttctgggttcccattcaaacgacgccgtattagaagaactcgcttctctgagtagtaccttttttccagtcatacccaatagaaaagcgtcgtctgaggccgtgaggtacttgccgttaaagcttttgagacggatgacgtggctcttaccctctacgagctcaaccgtccaccaagctcgtctggaggagccattgttgtgggtttgacggactgtttcttcgtctttgtcggcgattaggtactttcccaagtggcttttgagtctaacggctttggctttgttgaaaaactccattgatgggagatttagggcagtgggtttttgggttttttgaagatgtgatttctttaatttggtatttatagtagaaatttcatgagccgttggattggtatgactggaaaaatgagttgactaaaataaaaaagtaagaaattaggaaggtgtgcggatgattccaattcacatgtgaggatttattttaatttttttaataattaaaagtaaataaaatatattttaaaataacaattggctgcgagtgactttaattatcaactatgtacggcagaaagaggcaggagagtaagagtgataccaaaattggtaatgaaattaggacaactaatatgactaataattaaaaaattaaaaaatgacaaagactatacaatttgatttgaaactattattttacttttaagaggaatatatataatattttttttaaagaagaggaatatatttaagagaaatggtgtaaaactattttaaaatgtgtacatgtgtcatttagatttgtggtggtaaataataacacatttttagtgcatgaaattagaaaaattttaaaggtcaagcattataagatgattactcgagttctatataatctatatat

SEQ ID NO: 6801 - DNA, 1005 bp, Cannabis sativa
ctctatccaatgacctcctttttgttgtataggtcagaagtttggattaatgttgagggcatgggtcatcatagaggggtctattatgatcatgtgtcaataagaccatgcgaagaggtctagattttcccttagaaattttattagaactgattttatttttggtgctaaactgttcttgatcttcagtcttctacctgaggaagtgggatcaacctccacttcctccaactcttcgactggtccaaagctatctgtaggatccctaaagcaaggatctatgtctgcgtccctactttaggctggatttcattgccctttgttgggctcttcttcagagcttttggcagccatcttctctttcttggctttagaaaggccaagttgtaacaatgacgggaaatttattggtctcccctcaaacatcctatcccatgccttgttgggaattttaagtagaggtggtagatggatgtcaccgcctttaggttgtacaggtctggttgacctatcatggcattgaaagtcaagggaatgccaattacaacaaaatgagccatcagagttctggtagttggattttctctaacagtgatgggcaatctgatgtacccaatgggtgcaatgccttggccaaagaagccatacattaattgagtgcaaggtgccaaactagttatctggagccccatattttcgtatgttgatttgaaatgaatgttggaggaggcttcattttccacaataaatcttgccaaattcatattctcgattggtgcaataatgaccaaggaatcattgtgcgggaaactgacttgagtagcatttccttatgtgaaagagatattgatctctccaagctttggttgcttgaagcccctttctttgacgaccgggatgtttcttttaggcctatgatggagtgtctgagcatagctctccctagccttactagtctcacctgcaatgtagggtctgccaataatgattctaagtgacccccca

SEQ ID NO: 6802 - DNA, 746 bp, Cannabis sativa
gtaacgagttagggttcctcaaaacgcgccacacttgtttcgcccaaatggctttgttaaacagcttaagatctttgagtcccaaactcccaactccttagggcactcaatttgtcctaagatccccagtgggttttctttttcttttttgacgacccccacaagaagtgagcagccataccatggagctaattaatcatttttttggagccaaaacacccccatagtgtagcaaggaattgcctgaataactgctttgattagcacttctttgtctgccaccgagaacagacttctcttccaccctctaaccttattccacactctcttttcaatagcatcgaaaagctcacactttctccttcctataaagattgggattccaagatacttgtcaaagtgctccactgccttaaccccaaacacgtcaacacaatccttctttgaggcctcgttaactgtcttcccaaagcacattttttattttccgaaatcgatagtcgcgcctgatgcagcttcgaaactagcaaggatctttttaatttagttacactcctctcagttttcttccacaaatatcaaattctcatctgcaaaaaaagagatgagacaacaagatttgtaccctcctgaacttcaagccatgtgtacgaccgttatcctttgcatcaagaattagactagatagagcttcagcacagaacagaaagatgaagggtgataatgggtcgccttgacgaaggcct

SEQ ID NO: 6803 - DNA, 1279 bp, Cannabis sativa
ccgaaataaattaataagcctcgcttatagcggaagaaaaccatattacaaagagatacataggatagttagcacaccaaagttgcagagaatatagtacgggtggatttcctttacaacaatgcattccaatctctacataaatctaagaaagataggtcctcgaaaaacttggttttaaaaaccagtaactgtccaaaacttaactttctcccacatgtccaaaacttaacttagccatattgaatttacattgtgcgatcatagtggtggcacggtataaatttatggtcgttttatggtcacatagtgtaattaaaacaaaactgcaacgccattgcagcagctaaagtcaaaaattaaataattaagagataagcatggcagattataatcatagagagaaagagaaatgttgttatacctgacaacgagcaactatatcgaagtgttgggccaatatgtcgactagtttgcctttaccttcgtcaccccactggcagcctaacacaccagagacctgactcaatgagtcaattcgactagacttatgggtagcggactcagcaacactgagtgatgaagctgccggggggttgaaggagcagacaacgatgtttctaggacgagaaacatgggtccgaaagtgggctttgaaggccctgcatcgaggggtggagagtagattggagtccagagttgtgagggaggagaggttcattgtagaagctagagtatttcagcagggcaggttctgcagattaggcctcctattttttgagatttaagataaagtcaaaatcaaattatgtatatttgcatgccatctcaaaatacacaaaggtatataaatatacaatctttttctcttcaaatcgagcagacaagtaaggtttgggtacaattagcttagtatgaatactgagcttcaccatcataaatttttcgatatgttttcaagggaaaaaatagatatcagtagtataagtttgccaccagacaaggaaagctacaataatagtttacacttcctcctcactaaacaaaagttgcaaattaacaagcacttcagtcatcttcaaccactttcaagtaatcaaatataaagtgctactatacatagaaaacttaagaaaactgactgaaacttaaatatatagttcaaactgaaataaaaataacatagagaaaaacttacatacaggaaaatacagatcaaagatagatcaatatccttgcaactccaacatagatcaataagaaaataacaaagagaaaa

SEQ ID NO: 6804 - DNA, 763 bp, Cannabis sativa
ttataataaccttaataatttttcgaacccctataaaaactctataattaaccccatatttatgaaaatatgtggttcatccaattcaggtagatgggctaaggtttgccttgacggcattatttgtcctatgggcttaaaaatgtgtattgggccgggcctcatgaagcactaacaccaactttctagtgaaaaaaataaaataaaaaacggaaacacttaaaattgggaagaaaagaaaagaaaagaaaagaaaagaaagagaagaaaaatggaatggaatgtattggtaagcaattcgtgaccatttgagtctttacggtcattccctcattctctctgcgctcgctccaacactttctgctcattcacgcatagaaacaggtttttgattcctttaatgtaatttaattgatcaaatataatcaattagcatttcaattctctgttaattttatagttttttcttcttttatttttggggtaataatccgattcagatcggatcggatcgaaccagacctaaatggcggcgtcgaggcggctccgagatctgcaatcgcaatcgggaaacaagacctgcgtcgattgctctcaaaaaaatcctcaatgggcatccgtatcatatggcgtcttcatgtgcttagagtgctccggcaagcatcggggtctcggtgtgcacatctccttcgttcgatctgtcaccatggattcctggtccgagatccagattaagaagatggaagccggtggcaacgaccgc

SEQ ID NO: 6805 - DNA, 810 bp, Cannabis sativa
taattattcaatgatcagtccaaagcgcagaaattgtaaaaaccgcaccgcaccgcagtattttttgcggtgcggtgtctacgattttttagttttgcggtgcaggtgtggtttgaaaaattagaaaaattgtatgagcgggttggtttaaaaaattggtcaaaaactgcaccaatcgcatcgcgaacactcctaatgtgtagtgagaagtatgagattctatatcttagaatcaattactgagattataaagtgatcaagtacctcatactactaaattaagttgcaacatactatcaaatcaatgtaatagtctttaataacttttataagaagggtgcttaattagtatttaaaataacaatagagcagtgcagttgtggatgagagtgtttggttttggcattatataattggtgattaatcaatgaggagtatatttatgcttttatagcttgtttggccatttaatagagatagcttgtgccttgtaccatcacataatttggataatgattttgggctataatattatttttcatatattgactggactattgatctatattatactatattttaattattagtgaatatggttatgatgttgtcttgattaaagacattattattagttggaagtagtgtgttattatatattactattctctcaaatatccaagaatgtggcagctctagcaaaataatgtgatatgaactccttatttattgcaatagagggattctccttgtttataatttaagagctatatagaatcagattctagtgctgctgaaaattttgtaagt

SEQ ID NO: 6806 - DNA, 585 bp, Cannabis sativa
tgagatgacacgtgtctaaagccccgccaatttagccagtacgatctgacatggataaagacaacacggaaaatgtgccacctaccaatacaacggtggggattcatccctacgaagatccgttcaagacgatttgggcaatggaatcagcctataaatactctaactgatgcacaagtgaagggatccagacccatcctctggactctcacctaaagatcgaagaccttcacagcacactttaaccctactaataacttcagaatattcccactaagcttcttcttctacaagaacatgggggaatacgagaaaagtccatcattatgtatatgtataaataatctcttgccaaagagcctaatataatggactcgtggactaaggataggtaacacctgaagcacataaaaatattttgcttgttattgcattatccacgcattcattactttctgaagatctgaaattatttggttttcgaaaaacttggaaaacaatttagaactttcattgatagttgaagaaaaagatatgcacggctaccaccgatgcaagcctgtttcaagaaggtccatgtaagga

SEQ ID NO: 6807 - DNA, 852 bp, Cannabis sativa
gaacactaatcacatctctattttgcaatatgttgtttataaaatgactacaagattattttgaatacttatatgatttagtgagaaacatgtatattaagaatatatatggttttattacgaaattaaatgaagatatttatgttaattaatatgtgtcaattatgtaagttaattcatgatatacaacttttgtttttatgatcattttgaaaacaaattaaagaaaaataatgattgtgatagtactatatatacatatttattctatgtaatactaaatcaattatcattatatgctttctttattaatactaatttaaattttagtgatatgtactttacttttcttttttaaatttgttatttttgcttagttatattatattaataattattaatacttacatatatacaaaaacaaaataatcaatatacactttaaaaaaaaaatgacaaattacaattaaagatattttattgtgatcaaagttaatttgaggaataaaatgtcaagttgttttcttaaattaacaaaataaagaaaatattaaagtgagaaataaaaggtttctccacactaaatatataatatggtatggattattatcccccactgatttggtgttcccttttggatcatattccacactattttggtatataatttgtactaataaattgttcattgatgctcttctattcatgtttgtagaaatgtaataatatgtattttgtgtaatatgagagtttgttttcatttcataattctaattttctcatattttattctagctttgcaattaatcaattaagttttgatagtcctatatgaacaaataaaaatcttca

SEQ ID NO: 6808 - DNA, 1137 bp, Cannabis sativa
  modified_base (733)..(736): a, c, t, g, unknown or other
ttggccgattttgatggctccctgtaatcgtggattgcagacagctgtgttagtgaacttcggtagttttggttagttatttagttagcttgttttttagttgtgtccttctcctttctgttctgttgtttgtttcagccttgggtttgtattttttcttctgttctggtttttctttctggtgttgttttgcttggctgttatgcaactaatcaaaaaaaaaaaaaaatgtgtgctaaattttgctcacactaaaaattgtgtcaaatttaacacaaaagataccataaacaaattgtagcccaataaataccatcattttaattactacttagacactcattaatacatttatcaattaaaaaagctttttttatttttaattcttattttaatctcaaattttgcaacaataaaaaaataaagttagtcatgaagaaaataaaataaactaattgtattatacattttcaataaacatcaattacttttgactgttttttttagctattttgctctttgtgtattgaagcacaattataaaaaattagactaaatattaggggtgttcgtggtacgggtggtgcagtttttgactattttttaaaccaacccgcacaaactaaaaaattgtaaaaactgcatcgcaaaaaatggtgcggtgcggtgcagtttttgcggtttggactatcacaaacacaaaaaaaacgtgagcaacacttgtcaaaaatannnnaaggcttgaaaataaatatgaaaacaaattttaagtttcaacaatacaataattagtgggctttaggctagacattcacatattagacttaaattaatataaaaattagtattttataatgtgcggtgcggtgcgatttgaactgcatattaacaattcaaaaccgcaaaccccgcaccgcacagtgcagtttaggaaaaattcaaacacgaccgcaccgcaaagaatttcaaacagtatttttttgcggtgtggtgcggtgcgaacggtttgagcggtttgatgaacacccctactaaatataactttagtgcatattttgggctaaatttagcataaattatacatcttgcattggagataatcttaggaaagatctatatagcttataggatttatta

SEQ ID NO: 6809 - DNA, 686 bp, Cannabis sativa
tataattattattaacatttttatatctgaatattatattttttttctctaataaattttacaattttatatttttatgaatagtattcataaaaaataataacttataatccaattgaaatgtgtcgattataattagaattaaaaaagaagcggattagaattagaataagagtcaaataattagttgtctaattttcaaataccgtttgacaaaaaaaaaaaaactataaataagatcagataaaaaaacttgtagcatcacaattaactttaagaacacttatattccagttttatctactgcttaaaagatacaatagtagaaattactgtaacatgttcattcaattttatagtttgagcacttaattattatgccaagtatgtaactgcactactataacaacaccttcagtcatagaaaacttattatttttaactactaatagcaatttgatagcgagtcattaaagaataaagaaaaaccaataacaaaataaaacaaaataaaattatgtcacacaaataaaattaaaacacttaaaaattatatcatacatacaagataaaaacacccaaaatcatctcagaaaaacaagattaaccacaataataaaaataaaattgtaataataaaatccaactacgattaagccacacttataccaaaaaaaaaaaaaaaa

SEQ ID NO: 6810 - DNA, 548 bp, Cannabis sativa
acatcagaagaagagaataaatcatgaaaatagtcagctattacctccgataaaccgctgtcccagtccactctttctccatcattattacaaaggcttgtaataagattgtttcgtctcctggcactagctgatgcgtggaaatacttggtgttttgatccccttccttaagccacagttgttttgacctttgacgccaataagactccttcatcccaagtaacttagaaagttgatcattagcttctttataagcctggcacgagacatcatctctcttatttttcagctgtttgatgtccttcttacatttagcaatttggttctttaaattccccaaaatatcattcccccattctgccaacttctcgccacaaaaagacaatttatctttcaattctaatcccccttgagactcccaacaatcctgaataatttggagacacataggatccttcaaccaagcattctcaaatctgaatttacgcttactaggagaaggagcatcaggattaagcatcaagataatagggcaatgatcagaagt

SEQ ID NO: 6811 - DNA, 849 bp, Cannabis sativa
ctctctctctctctctccgaagcacacccacaaaaactttatatatatatatatatcttgcttttctctctcaaaacctaagtaaaaaaatgaatgaaaggagtgagcttcgtaagtttttgaaacaatgaagagtggggtggagagttttatgtaaagtccttggttcatggtctttatcttagacaccaatctcaagaaattttctatagacaccaacctacaaaaaaagatagagagagaaacaaaatacatatataaagtcttgggaatggggatcacgtgggtgggttgtgctcaatatcaaatttaagtaaaaaaaattgtcagaaaagtgatgtaagctatcaatcaattaaacacatataaagagaacacatatataaattttaaagatgggattacatgaatgagtaggacttaaattttaaatttaagtaaaaaaataaaaaatttgacatgaaagtgacataaatgtcatcaatcaatttttgcaaactttatataagtatatataaatatgcacatatatattatcaagttaaattaaatagccttgctcaaaattaaaatagaaaaatcagcatagagtgtaaattttttaataaatataggaggtggctggccttttaaaaaaatattactttttaagttacatatatatgagaatttttttctcttacaaaaatacggggagttctttttttttttgctttttacattttttatgaatttttttctctcatatgttaagtatcaatgtatatataaaagaaaaaaataagatggtgacatgacactttaaaattcgttcaaataggtctatatattatctcctaattaattctt

SEQ ID NO: 6812 - DNA, 1167 bp, Cannabis sativa
ttgaagtggccattaaacaggattcgcctgagcttatagagtttgaggatgaaaatgggaatgatacaacagtggctctaagatacaaatgtaagctaactgtgatggaatggggcattctacaagagattgcaggaaaagagagccaaaaaaacagcagcattggatttcgaaaaaaccaggaaagcagcatgctgggttaaaagagagcgagaaagcaggaaatgttgatacagaagggttccaacctgtcatcaaaggctgaacaataagataaggaatggaaaatgttgctgcaactaccaacaactcctttaaaatcctgggggaaacagagaaaaacagtagtgcagaagaaatagagatacatggtaatgaagatcatgggaagaaagggaagcaatgggaagcagatggcacaggagaggggggaggtccctctcataataatggataagatattgagttggaatgtctgagggatcaacagccagctaaaacaaaatctagtcaagcatttgattggaaatcaaaaaatagggcttgttggtcttctcgagacaagagttaaggctcagaacttgggagccttatatgttcgaatattttcgggttggtgttttacgtcgaataatggctggcataaggatggaaggatcatagttagttggaaccccaatagctttagtgtcactatcttaaagtgcacaagtcaactcatccatctctttgttgaaactatggatttaaaacaaatttctttgttacttttgtctatggttttaatgatgaggttgggagaagagacctttggggagatttgagagatattgaaagtaatgaagcttggattgtcctcggggattttaatgatattccttgcaaagaggaaagaagtggaagtagagttagaaataaaaactctattaagtttagggactgtgtgaatgactgtcatcttgaagatgtgaagtatacggggaatttttaaacatggtgtaataagtagagaagagaggatttactctccaatagacagggtccttgctaatccggcttggttgaactcgcactctgcaactgaggttttttttaaaatgagggtctctttgaccactcctcagctgtgttaaccattttcacaacccctcttggtggaaagaagcc

SEQ ID NO: 6813 - DNA, 525 bp, Cannabis sativa
tgagtgtaattcaaggtcgaaattgcactatttttgtaatgcgcattttttaattagttccaacacatggttttgagtttagtgaattattgaaatttcttgatttgacctcctatctctagatctaccttgatagtttgaccttctgcgtccattccctatggttgaatttttcctttttgactctgtatgaaaaattgaagagaggttgtttattcacttgactctgttaaatctcttcacttagaactagattacgaacatcatcaaattttgacttattgctcctcaatgtagctcctcacgtgatagtagcatttcaactatctaatagagaaaacaaaagtatcaatgctcgtacttcatcatcaaattcatttccaaccgaagtcaactaggctcatggtattgagatgttgagttatcccatcctcaaattgaataactccacacctcatcaaatggattttgttagaggctgatgggttctcatatatattggagagagctgccacaagacccgtc

SEQ ID NO: 6814 - DNA, 627 bp, Cannabis sativa
attttgaaggcgttgaaactaaagagttgaagagcttcatcattgtctagttgctcaaccatatggatccaatcaaccccaataatcttaagcatttgcttatttctacttgttacaatcaccctacttccatggcttaaccaatcgcgatcgccaattaaatactcaaattgttctgtatcatctagatcgtcaagaacaataagtacctttcgacgagaaagtctatccttcacaaacttgttgatgatcaaatctcgatttccttccttcaataagtcaccataaagtttattcctcaaatcgagtttgttatgtttttgccattcttccctaatattttcgagaaagcaatgaccttcgaacttatcgtaagtttgagtaaatagggcatgtgctagagttgtcttgcctataccacccatgccccaaattcctacaatttgagaatctaatgatgatgacttggtgagaaacaatgattcaagatgtttaattcgtctctccattccaactaaacctttcggaagattaatacttaatgacatgtaatttaattttttcaagatgtcattgataatttcctcaattaactcggactcatcacaccttgaataatacaaccaa

SEQ ID NO: 6815 - DNA, 1258 bp, Cannabis sativa
ataattttacagtaatttgctactaattttttttacatatttatatatctacatatatcttaattaatatatttttatatttatatgtaaatatattaatcaatatttgatatatgcacatcaataggaagagaaagaaaaatataggaaaatcattttttttttaaaaaaaaaacatagaggctgtcatcaaagctattaattatctatagacattgattaataatgttctattataataatcgtgcaaaatagtaacgtttgtacttagtatcatcacataaaaaaacaattcgatctacttaaactggatatatatatacatattaatattatgtatgcttctgatggaattataactcaacattgcatataattaatatatagtatatagtatatatatatatgtatatatattacttaaatttgaagaaaattggacatggaaaaatttagagagctaggatcggagtgtttgatattaatgtacgtatatatagcttaattagattattgtatggaaaaagagtaatttatataagaatttcttgaagatatatgcattaatatttattaataatgtataatatgtgaattataagactctctcttttgttgaagctaaattaattatcatcatcattttcttggatttttatatttaaagattacaatgaagttccactcaagaaaaaaacaaagattacaataagttaactatgaatataacttatatattaactaattctcagttatatataaatatgtatattgaagcaacatttatcagttatatgtatattgattactgattctctcatgcttatgcatagtttttcttttcttttccatgtaactaatgctatatatatataggtgactcatcacctctttgaggctttggtcccattgaattattaattttattgatcatcattgcacctttctatgttttcatcatggcatatctagctataaatatatgatctctttttaatctaattttgagcggagatttacgtaattataattctttttatcctgaaaagaaaatacatataattattacataaaatactcactctgcataattgaaagacacttattgaacaaacaaatgattgtgccaatattttctcccatttacatttgatagatgtacacttaacattttctgatcactcatatgtaatttggcaaaatcatgatctgcgccccactaatattattacacttgaaaaaaatatatatttaataa

SEQ ID NO: 6816 - DNA, 649 bp, Cannabis sativa
catattttactgccattattagtattagtataaatatctatatatagaaaaaatatatcagtattataatactatttatacttcattctattatttttctttttcttttttattttaaaccacgttattaatatctcgttcatctaaagtttgaatagggaataaaacgtttatatatgaaattaactttaattattgaagtgtaatatttgttggagaagtgctaccgtcaactttctattacaatctttagtcaatctttatgtttgaaaatatatgtcggaatattttttttcaattttttttacgagagtattcgttatgcttacaacatcattcctgtaaaatttttcgaatagtttacattgccgaaaatgtgtttgaagttttttgaactcgcgtggtaaactggaacatcaagaactctatttttggtactgtaaactattcagaattttttaaaaatttacaaagatgatactgtaattataacgaataccgctataaaaaaaattaaaaaaaatatttcgacatgtgatttcggaggtgaaaattcactaagaggttgtaatatagaaaattactaattagcactcctctatttgttatgatgaatgcaatgcaataatgaaatgattaatattattgt

SEQ ID NO: 6817 - DNA, 2209 bp, Cannabis sativa
ttggaatgtttgacaaagcatgatatccagtcaaaatagatgataagatcatgaaaatttctcagggatcacaagttgcaatcgaaggtcatttgaacaatgatttttatttcttggatggtgagactgtaacaggaaatgctacaacagactactgaacctcaggcttggaaatgctagtcagaaaggctttgaagaattggacagacaagggttgttcatagagaaattgaaagagaagctcgagttttgtgatgaacgtgtgcttgggatgccccacagggtgaaatttaataaaggagagcacaccaccatagagagacttgcctatgttcactttgacctatgggaaccagctagaatacctaccgttggaggggcatacttccttatgagcttaatatatgattttagtaggaaagtatgggtctagttgcagaagaacaagagccaggcccttgatactttcgttgagtggaaaataattatggagaaccaaataggtaataaacttaaggtgctcatagcatataattttctagaatattgctcaaataaattcaaagaattttgagcaaaagaggaaattttgaagcataaaatagtggtaaaaataccacagaaaatggtacaaatgaaaggatgaatatgatatcgttggaaaatgtgagatgtctactgttaggtgatgaatttgaaagactattttggggagaatatctcaagataccatgctaactaatcaacagatgtcccttagttgctaacgattttaaggcacatcaagatatgtggacagagaatccaaacaaatttgaacacttgagagtatttgattgtaaaacttatgttcatatcaaagaagataagttacagccaataacattgaagtatatgtttttgggctatccagataaggtaaagggctacaaactatggtgccttgaatcaggacacaagaagtgcttgataagtagggaagttgtgtctaaggaagatcggagatgtccatgaaagataaggttattcctaccaatgttcaaactgtccaacaagagggtatgcacattaaggtgggccattcacatggctaccctacaaaccaagatgaaccagaagagatgactgaatgtaagactagtcatggtgaccttagcagttgccaactagcaagagatagagaaaggatagagagcagaccagcaaacagatttggctatgctgactttattgcttatgccactattataaaaatactatttccgttagtccccaaatctatttttggactgtcactaataaaaattcttgactggttaaaatcattgactatagtggagtattcttaacagttttaaacaattgtttaccattcctaacagtttaaaatggttacaagagcaaataacaaaatcgtgaaccaactaaatagacccacaataataaaatattattgaaaaaaaaaataacaaaacaaaaagaaaaattcatggcaataaattgagaaaagacttattcaacgccgccaaccttccaacacgcatcatataccacatgatcccttagccgaaccctagctctcgctccacactagcctacaaaaaccaaatgcacccaagctaaccaccctctatgtcgaaagaacctaaagagaaaggtcgacgaccactccaaccttcaaatctcgaaccaaagccccctagatctggtcatcccgcttgataattaatgaaattaaaatataaatattaaaaatcatatgagattcatatagcaatcaaataagatattttaattttttggatacataacctaatttatttttatttcttttaatgctcctccaaaaatcgttttgtgttattttttttttaaaaaaataacacaatattgttcttttcttttttttgacgcgacacaatattgttcttaatcgtacttaatttaaaattaatctttgatcttgatgcctcaataaaaatatgaaaattactaaaaagtacgtgtttaacactctcttaaatgtcatactattattgatgtaattaagtattaaattccatataataatttaagaaaataacttttagggaatattgctaaccaatcgtgaagcgtcacctataaaaagtgttgggcaccaatattattcaataacaatgctctaaaaatatttatgtctttattatattaatgatatattaattaa

SEQ ID NO: 6818 - DNA, 646 bp, Cannabis sativa
gttaagtgtatcataataaaaaaaaatggcaacaaacataaaatttgacttgtagaataagtaatattcttctgaattatatcatctttgtagagttttaatttcttaagttaaattaaattttatttagtgccaataaattaaattttatttagtataaattacttaaaaggccgtcgtaatgtaattatatttgtgagtatgtaatgtaactaaagagagatatttgtaacggtttttatagttggaataatttttttttttctaaatatgaaaatttcagagaacaaaactacaaatattcatagttcgaggaaaaaaattatgtttaaaggaatatttcgatatatagaccccataataaggttaaatattttgttgtacatgtagttattttttttattgcatggtaaatatttgtctgacctttaattttaacgctgtaaaaattattctgaattttctgaaaagttacagataattataattaaataactacaaattatgaaaaataaaaaagattaaaaagttttcgtcgatgtagaaatagatagggagtttaccaaaatactttttaaaaggtgtaataatttttttttttccatatatattaaatggaataaaactactagattaaaattgttag

SEQ ID NO: 6819 - DNA, 527 bp, Cannabis sativa
aataaataatataaaatataacaaattcaaagagagaaaataaaaaattgtatgtataaagaaatgtgtaattttgtgttagattatattttcattataaataaaaataaaatatacttttgatctattaagttttaaaatttatttgtatcatgatatgcattaaatttttaatatatatattttttttttaaatatataaacatggacagatttgatacgttatttttatatgtcaatcaaatttgatttgcacaagtgaaattttaattttttcattccaattcaatctacacaagtgtaaatatccaacagattaaattgaatattttatgaatactcttattccagttgctcgaattatttctttatgtcttttgtatagttttattgtctaaattttttaagacaattgtatcacgtagaagtcttattgtgtttttaataatttatattttaacataatgtgtcttttagttagacaatgagctattaatttcttttttttaaactaaatcaaagacttc

SEQ ID NO: 6820 - DNA, 1215 bp, Cannabis sativa
atgttacagaagaagtactataagggcccccggcctgttgttttcacagtcaacaagtcaagccagtttgtccaagctccaatagttacgctttctcaggtacgtgaagggtgctggttttaaaagactagtaatacttagaccatgccataatggatttagaaggatattcacatgtgaattgagctagttgccctgagtccaacactgaaattgtttagggtaattcactgagtcgctgataaataaatttcgtgctttagcaaatgccacggctgaaatcagatggattgtttccttacttcctgagttgcatattgctttacccaattcccctatactatgggttgataatcagggtgattcagctctctgttaagggggaattaaaagtcaattaaagattcagttagttctctgttacttttgttgtgaagttttttatagagcacctcagcctagagctaaggtttttcccaaatcaatttttgtagtcccctctcttatgttaacactttcaaacatgaacatattaaaaaatacatgaagccactattccacaaaaaatctaataatatgaagccactattcaggcaattctgcacagaaacaatgtacaatagctctctccagtttacgtaaccaacaaaaccaacataaaaaaacaaattgtaaagaaagatcatacaaatttgacaaagttttgaaacaaaaaattttgaataacataaaatcgaaataatttttaagtacctcagaattgcagaatataacatcaaggcttaaaaagccaattcagtcccgaaagatggtgttaattggtatatgatatcctcattggtactggaaaatgttagtataacttagcactaaaaagaaaaacaaaaataaagaaaatgccttagatttgcatattaacagcaaggcccaaagggccattcagtcccgaaagatggtaattgatgattgataccatcatgggcaatatatatggaaaacatcaaagtaaattaatgaaactatggcaatacatacaaaaacagtagcaaatagaaaaagatcaaaacttagtaacaaaatgtaagccccatggcaagtccaacgaggtaatggcagcaaagccgctccacaaggtgatggaatatgagacaaatcaaatcggaggaaatcccaaaaggaaaaccattaacgatgttgatattgatatttgacgtt

SEQ ID NO: 6821 - DNA, 672 bp, Cannabis sativa
tacttcatcaaaaatcatcaagattttataacaatgggtccaataatagacaagggaggatgaaagtatatttctcacaaaacaaaaccaatcaaattagtagtagaatccatgtagcatgttcattaagcaacttaaggttactattctttcattttatacatcacagaaaataatttttggaatcgtcaatattgggaaaaccagtaatcgattgaaccatatggcattgaccacatgatcattagtaaccttggtgatcaaacagtcatcaatggcactattgtagctttgtaagtataattattgttgtgcaaaaaatttattattatatgtattctaaatcaaataaaataataataaaaaatcacttcttatgtcccgaaccactggttgcagtagatgcctttcttttctgattagtggccaagccactacctcccccgccaaagcctgatgcagtaggggtaggagcctcgccaacaaccgaagtcccttgctactctaaagtgcactccactgcgccctcagctcgcagtgccttatccaccattttagaataggtggtactctcgttagtagtgatcatcaagtgatgtctgatcttcgcagtcaacccatcaagatttttctctttcttgcagaaattgttggcacaattctcgaggccaa

SEQ ID NO: 6822 - DNA, 572 bp, Cannabis sativa
  modified_base (118)..(129): a, c, t, g, unknown or other
agccacaccgtccaaattgcggccacataattacgcacgtccctaaattttttttactaataacattaggttaattcggtgtgattattaattgagattttttttatttttatacttnnnnnnnnnnnnttttttttttttatttttacgaaagtttatatggaaacccctattgcaattaacagagcaatttaaatcgtaattaaaaatcgtataacaaactacatagaaactattggagaaaccactttagaaactcaaacagtaaattaaaaaaataaataaataaaaaaatagtatataaaataatttcccttaataatttgtgtgtgttttatttcatattatttatgtattagtgattaatttgtattagttaccttagatgttataaaatctttgctctttttcttcgtggacctagtacaattattagttaataatgtgttaattaggtttagaagatcccctatatcgattataagtgttgatgatatatttattagtaaaaactaaaaagcatattcaaagtttgaaaaatatatgtcattttagaaaatgtatgcacatca

SEQ ID NO: 6823 - DNA, 884 bp, Cannabis sativa
tgtgcctgcaatttcggtaagtggagatattaagtaggagagatttgtttggaagtggccgagtgagattctgctcattcatcggtaataaacttacgggaatcggtcccaaaatgaaagcggccactgagttttataaattacaattgtatattggggacattattttggagttgtttattgcatgatgttgtataaaaacaagacatgttaaataatattttagaaaatgcccactaacttcacagcgtgtaaagagaaccccaagcattgattggaactaggggtaggaataggatacactttcttttcttttctcttttgtattcggatttagtcaagatttcatcatgattcataactcaatagtgttgggttgtataattgtattacataatcttgttgcttgtgccacctaatcgtgttggataccatagtctatggacccatgcaaaaactttttctgattcaaaagtagtaccatgcttaaaagagagtaagtagtataatccttttccaataataaaataataataaaaaaaagagtagtattatgccttctataatcactcttaacttcccattcaaaagcaaaataaataaatataaaaacacttttgtttgtttagctctatttaatcggtgttataacgttggattttcgattcaacaatattatgaacaagttttatttatttatcggtgctatgttatacttatttgtgtagtgatttaggaagttgattttagattaagaaaattagccggctattattattattattattattattattattattttagttaattatttttgtttttcatttttatatatttgtttttttaacttttacgttaaaagtaaattttcgtttaatttt

SEQ ID NO: 6824 - DNA, 745 bp, Cannabis sativa
agtatgtttgatcgccattattgaagctcttgtacctttgctgaataagatatttaaatggagagttattagcagccaaaagaagacttctcgttagatattccattataagaacaaaaagcaaaggagagatagaatccccttgtcttaactttttttcaccttcaaatttgccttgaatcctgccattcataacaatcgagtaggaagttgcccttaagcaaaccataatccacttgataaatctttggggaaatttgaaagttgccaacaattgttccaaaaaatcccaactaacattgtcataagctttgcttatatcaattttgagggagtatctaggagaaacatttttcttgttgtagttcttcaacagatcttggagaatcatgacattatgggcaatcgatcttccttggatgaatgctccctggttttgattgatcaaactagggagcaccccggctagtctagaacacaaaagcttggatatacatttatagatcgtcgagcaacaaacaattggtctgtaatctcttgcatttgaaggattctctgtcttcggaataagagtaataagggttgaattgagatcgttaggcatatttccattaataaaaaaatccttgatagctaaacatatttcagctccaattttgggccaaagtttctttaaaaaacctgaaccaaaaccgccgacattaggagattttgtatctggaatgctgaaaaaaaaaaaaaaaaa

SEQ ID NO: 6825 - DNA, 788 bp, Cannabis sativa
ttcaaataagtttttggagccttatggacaaatgttaatcgggagggaagcctcttcagttgaggcaccttgggcaacagcttcagctgccccaccctaaagacggccctgactatcatggaagtttggataagcttttagattgctaataaaagagctgtggtgaaaaaaaggaaacaaacctcaaatatgaaagtgtgatccttagatactttcagtacttccagagccttcaagtaaggttctgggtgtggcttggcatggtcacattcgtctccaagaatgagaacatcgaaaaaatctgaaagcccaagaagtgagatcatgagttcagcattcggtcttggagcgtttgtaacagcagcgcgttttaggccacgatcttcgatccatttcttcactttgtaaagaccttccacaggctttaattgttctgaagccaatctggtatgttacataatcgaaagagttatttagcttggagtttcaacagaaattcaaggtaaatatgaagagcgaaaaactaaattacctgcgaaacacaacttccttttccactgtaagctttaaacctcgttcgaaatcatcagggaagattgccctggcaatgtcatgattatgcttaccagcaatatttttaataaagaattcatcatcaataggaactcctccattataacctatctgttaaccaaacaagattcacattatgaatcaacttagactaatatttctcagaatggttaagttaacaaaagtatcaggttgggtaaacttcattattgtca

SEQ ID NO: 6826 - DNA, 2004 bp, Cannabis sativa
tatggaagagagccaaattacaataaataatgagtaaataaacattaccattatatttagttatattcttaatttttattttggttacatatatgtttaattgtataaatagttttatttatgttattcaataaacatcatatatttcattagagaatgtttcatttaagtgatatttatatatataaaaaaaatatgataatattcaaaatttgttgttaattataattttagttcagtcgtaatacttttaattttataatttttttagatatgtgccatggtttaaatttgaaatgcaatgttaaaaaaggcacaattaatatacgatgtaaaagataatacagatatttagaatttaaatttaaattgtaatattttaaaaagtaacagtactttcagttatatagccacatttaatataacatagatatatatatattttttaatatgctaaaattattttttgaacaaatatgctaaaattattaattgtaaataaatacaattataaataataaatatattttattaagatatagttattatatagagatattttcttaataagagacttataaagtataacactaattacaatttaaaagttattattatttataattgatctaaattgagatttttttttttataataattaaaaattattctagagtattcttagataaaaaatctaccatactatataaaattttaagaacaataaattaatcttaaaatgttatgaagatgtatcaaaatcaaaccaattataaatttttaaaaattaaaagaaaataatgtttaaagttttgaaaatttgagagaaaatggttgttattagctgattcttctaatgttttgagacagtgaagagcatagtgtaagatttgtatcactctttatttttttagattcgcatataattaaattgttcattttttactaataatttttttatgacatttcgaacaaattggcgatattcttacagaaataattttaaatattttttgaaaacctatattataatatagaatatgtaacaaatacaatacataaaattgtatttttatgaaatattttactgactgaattgtaaaatgggagaatattttctccctcatgtctctgaacataatagcgtctaagttttttgcggctaaattctcttaattatcactctacttgcatttaaccctgtaagtttaaatttttatgctaaaatccttcaaactacttaactgtttataaatttaaggtgtcatccacttcttacagttaactgccaacatagactaattatgtgtacactcttatacacatgatacgtttatattaatacacctaatattattattatttaaaaaaatatttcaaattttataatattctatttttataattttatttaattttaaataaattttgaaaataatttttaaataataatattcattataccaatataaacataccacgtgtaccagagtatgcacataagcagtctattgtggtagttaatcggataacaccttaaatttgctactagtttcgtaatttagaaagtttaatcgtcaaaatttgagcttagagggttaaatgcaagtgaaatgatagttgagaaggtttagccgccaaaaattcaaattttttatattatcttcgaattttacatatatgtcatagctctaaaaatgtatttagaaaatattagtgtcaaacattattgttagcttgccaattaagtttttgatgtaaataaaaggcttgtatatcaatcacctttttttttaggagaatgtgttaatattaaacaataacgttagacctctaggtcattacaaagtaagttcgaaggtaagtcgctaacatcgaaatagccatatcgattgtggatcaaagtccacttagccacaatatgggctacaaaattacaagatcgaaaaatattaagaaaaacacaactcgcaaattaataagaagtacttaaatagtgacttg

SEQ ID NO: 6827 - DNA, 1546 bp, Cannabis sativa
tagtaacttggggggggggggaatgtttacccaaatcttaacgatgatgatgtgtcaagagtaggaacacgtggcacaaaatatcgcgactaaattaatgaataatatgagtcataaccgttgggatgaccgtcaagcatgaagggtagtcatgactgttagagtggaagtcagacggtcacccttacccctaacttgaataaggtggcgtctccaggtagatgccactctttcactagttatgtaatcaacaactttatttgtagaggaacctgagtagaatatagaaacgaatttagatccaaggatctgaaccacaatctatttttaaaccatcaccaactttcactctgagaccctctttcaataaatatcttccccaacaaataccctgccatgtaagagatgacaaataataaatgaatatataaataaataaataatttttcattatagaatatttgttgccaaatttatataagtttttgacacactattaaagcacatatttttttactaggcgaattatattttagttttacacttattggcatctcaattgaatatatgattatatatatcgaattaaattaaataataaatatatttttgtctctaattaattatactaatctacgttatactatgtattgtgtgactttcgttagtttttctcttttgcagcaaatagagtgttttatttggcacaatgtggatagtaataagttagtgtcaaatacaaaatttctatctcatgccggtaaagaagtgttgatcaaaacggttgcacaatctcttccaagctatgcaatgagtgtattcttattacccttggagatcactcgggatatggagaaaactatgaataagttttggtggcaagggtccaacaatgtgagaaatggaattcattggttctcttgggatcgactttgtatgcataaatctaaaggtggaatgggtttctgctatttgagagattttaatttgtctatgcttggaaagcaagggtggaggctcattacttgtcctaactccttggttgcaaaagttttcaaagctaggtactttcctaatggcaccttccttacggctaagttggggagtaactcgagctctgtatggcatagtctccttgaagctcaagatttggttagaaaaggaacttgatggtgtgtaggtgccggggaagatattaatgtcctttatgaacggtggttaccaattgaagagcaactatttgttacttcaactcaccctagtttgattggatcaaaggtgattaatcttatggttataggaggtgggagttgggattctgaaattttagatgatttattcgaggatcgggacaagaagcttataatggacatcccattgcatattagtcaaggcaaagataagctgaattggatttatgaaacttcaggcttttactctgtcaaaattgcctacaagcttcttcagaaactaaatggcagatggcatcaagatgaggacgagcaaactaagctcttgataaagttttggaaactaaaaatccccc

SEQ ID NO: 6828 - DNA, 1150 bp, Cannabis sativa
ttaaccgctgatttttcttggttaactcttgtatgggatagagatcttggaaacccttgcacgaggtaatggtaataattagttgaacccaaaaagtttctaaccttagtgacaatcttcggccttggtcaatccctatcgaattaattctttctcggataactcatgatctcgtctttactaataatgtgccctagaaaagatactcagaatagccaacattcatactttttaatttaatatatttagtctatatttctatagccactacaaaacaatctgtagatgttgctcatactttaattctgattgaaagtataccataatatgatcaatatttactatatatatcacatctatcaaggaaatccttgagttctctgaacaccaaatctagtatgataggcagtccttaagatgtcctccacttggattctcaactaatgatagcctgagcaaagatcagtcttggagaagactatttttctttgaaaccgatcaaatcagccattgatcctaaatggagggtacttattctttattatcaacttgcttggttctaaataacaaatacacatatgaatcgagccaaaattcatcctaacaaacatgaacactttccagactgatacacagggtcaggtaaaccctaaatcaagtgttccataaaatcataactttaattccttaaattttgttggagctattctatagggtgccttagaacccacctttgctcgaaatgcaaaaacaacaacaaagtctatctttgttgtagtggtaatcctaaaagttcttttggaaatatatcaaacaactcttgtaccactctaatatccacaagtcgagctgcctcagctaggtggtacataataccaccactaagaattctatgtacccattgcgtgataggttttttaactcttatcatcattatacctggatttttagtaccttgagctgatattataacacaaatggtccttctccttcagttgaaaagttaccacttccacttgcaatcaatactagcagcgtactcatacaagaaatccattttaagtaatatctcaaactctactatacctaaagttatgagatcagtgttcaacttctatccttcaatctaattggcatagacctaattcac

SEQ ID NO: 6829 - DNA, 745 bp, Cannabis sativa
ccattatggtagaaggcaaaaagagtagcagtgaaaggcatgaccagaataaccagaaggagaatgaggaatcgcaaggtacagaaagtactaatgtccctagcattgagagtggtcattgtcaccagatgccaaagcccaatgggcttgtctccgattctaatcaccaggcccccacctattcatcttcacctctgggctctcaagctaacccggttaaatggccagccattagttgggcccatcataaaggccgggagctagttatgggctcacttaccatagacaaataccacagggagcccacgctatttaaccctcttaatgatattgatgatttcagagtgggggaacatcttcaaggcccaaggaagaggagggcctcagatggaatacgtttttatccttcaacccaaggaagtgcaaagggtcaagatgaaattcagacgtctgggactattcaacggcccaaagaaatatccactacaactccatccaagtcaaatgtggaattgactgaacctaactcaacggtaaacaacccactgtataccccccccccttctcacctggaagccatgataactcccctgcacctagaagaagaggcagaccccgagggaaagtcatctcagagaaggactcgagtgagggtcctaggaaaaggggtcgtccaccaaagcgagatacctctctatcggcttcccctaaaacttttaagtggaggaatcgggctaagaccaaa

SEQ ID NO: 6830 - DNA, 659 bp, Cannabis sativa
tatcaagaaattaaagtctcaacacgtttcaccctcaggcaagtcaaatgaaaaatataaatacctgcagcttcttggccagtcattgcatccacaacaagcaaaacttctgtgggattcagtactcgctttacatctttcaattcatccatcatagctttatcgatctgatttcaaaagggcaacaaacatcatacaagtaaaatcaatatctggagtaaaattggcagaaagtgtagaaagcccaacacaaaattagtcattagaaatataaatgtattacctgaagtctcccagcagtgtctactatcaccacatctatgttcttctttttggcctcctctagaccttgcttagctatttgtgagggtttcacatctgttcccgcagtgtatacaggaacacccacctgtcgcaagctagattttagtataagaataaaatcaaagacaaagttagttgagaaacaaaaaattgcttacctgtttacccaaaatttcaagttggtcaatagcagcaggcctgtaaacatctccagcaactagcatgcacttctttccctgcagttgacttgacattgtattagtaaacaagcgaaatagtgtacactggacatgactataacacacaatgaaaatcataaaagagatggtgtttgc

SEQ ID NO: 6831 - DNA, 988 bp, Cannabis sativa
aagacagctactctttgattatgtcattattgtaatacaataaacatttgatgtggattctccattgaaatatctacagatatcattgatctcagtagtgatatcataaagtcatcaatattgatttaaagataatattaaagatcatatgatataatcgaaatgggatacaaaaagctacaaaactaagaagaacaaattttaagtacatttccttttgggttacaacttacaaaaatcgcatatgacaaaggcacgaaataagaaaaggcaaatagcaaagatgtctaaactacaatctcaacagacactatatagtgaggtcaattttgtcttcaaaccaaacccttttatcctcagcaacttagctataagcaaagtaaacaccaaaaatatgaacttatcatatcatttgcaggtgtagatcagctgcctgctgagccagctccaccatcattgcctcgtcaaagaatttgttgatgctcacgtcctcactcattccctaatagatttatttttttttcaatcataacatgaaatatgttagaacttggatatcattcctcattttcggtaatttagaacggctgaagattatgggcttaagcccccattacaaataaggaagtgcagaccaacctaggatggaacttggaaggtaaagcaaattactctcaactgacatgtaagattaaaaaaaaaaactaggtctctgccaaaccttacaatatttggtgattaagaaactaaaacaaattgctaagtacctacaatagactcaaatgtaagacatttttgggaacaaaccacatgtctaattgtttgaactacttcctcagtaaactcttaatttaaggtcaaatgcatacagaaatctgccccctaaatttatttcagtaattttattgaaactgaacttttttcctcaatctataataattaactaaaaactataacaattccggtacaggtatctaaagagactcaa

SEQ ID NO: 6832 - DNA, 1409 bp, Cannabis sativa
tccttggcaaattgatgactaaatataaataaagtttttgtaatgagttggcgaatgtcaatccatttggctccggttgctttattttttgctttttgatataagtaatgaatttgcattttggtattccaactcaataacaaatatagtaaacaaaacaaaagaataacttgttaggagtgtatataggtatatagttatagtttaacatgttaaatataacatgatctttaattctatttataatttctcaagacaactcacaaaaaatacatataagaagagtatagaactttttcacaatgagagtgacaaaaataatagcacctctactttaagggaccaacactaccattttgaaaaacaaatatggcatgtatattttgtgataaattggggtttgaactcattttatttgcaaaaataaggttaaccactactttgtgcaatctcatttttaccttaattatttttgtggatgatttggtccaatctcccattttgaatcaaaagatagatatgagggcctcaacttagggctattaattcatcatttttctcaacagtgcaatgaaatgagagtttatggtatgtaaaataaatagcatgggcaggtgcgtgtgtgttggaggtcctgaattcgagtcccagattatgcattgtaatatatgaacgcttaattcaaaaaaaaaaaaaacttgttaggagtgtatataggtatatagttatagctcataacatgttaaatataacatgatcttcaattctatttataatttctcaactcgagacaactcaccaaaaatacatataaaaggagtgtccaacctttttataatttctcaactcgagacaactcaccaaaaatacatataaaaggagtgtccaaccttttcacaatgaaggtgacgaaaacaataacacctctattttaagggaccaacagtaccactttgagaaacaaatattacatgtatattttgtgataaattggggttagaactcattttatttacaaaaataaggttaaccactactttgtgcaatctcatttttaccttaaatcaatcaaaatatgcatggcttcttattttttgtttggtccaatctcccattttgaatcaaaagatagagatgagggcctcaacttgggggtattagcactgggttctcaaaactaagtatggtattaattcatcatttttctcaacagtgcaatggaatgagagtttatggtaagtaaaataaatagcatggaactgaaattaccattataagtttttgacgtgtacgcaaattttagtttcattaacttaggaagaaatgtaagtataaataaaaagcattactaaaaacactaatggcttctttagcaattatcatgtgtagagaaaataaaagtttactaa

SEQ ID NO: 6833 - DNA, 1155 bp, Cannabis sativa
tttagggttttgtgaactgaaatttcagtagagctcctcttggggagcgaaagagactacgaatggaggggattttggggttaaattacccaaatacccccacttttaacaattttttttttttggccctcgagttgatttacgtattattgtgtgaaagagcttatctaagctatagagtctacaagaacccaatttatgagaattaagagaaaaacaagaaatgagaagttgttacaaaattccaaaaaaaaaaaaaaaaagttgttacaaaaattgttacaacagtacaaaactaacagtattaactaactaacggttagtttagtaaaaatagtagttgtatcatccctcctcaaatgaaaaggtatttagcacacgtgaagcttgtgcttgaggtagtcaaaacgttatgtggacaagggcttcgtgagaatgtttgttgtttgatcacatgatggaacatagcgaacttcgacttggttggctataatttggtctcgaatgaatgtaaatcgattcttatgtgttttgatcgagcgtgaaacacaagattagcagctaaggaagttgcacctaaattgtccacccaaatgataggtgtgatagcagattaagtttaagttcaataagaacagagcatagccattttatctcagctactatgtttgcaagagctcgaaactcgcttttggtactcaatcgagcaactacttattgctttttagcataccacaagactaagtttctcccaaaaaagattgcatagccacctgttgagcgtctgtcatctagacagcttgcccaattagcatctaagtaggcctgtaagcatagtcttgttgctggtctgatttaatggtaccttgaagatatctgaacaaccttttgcatgcctcccattgtgttgttatgggagcatgaatgaatcgacttaatttgttcacaatgaatgctatttcatgccaagttaatgtcagatactttgaagctcctagtgtgttgtgatagagagtgtgatccatgaatggttgaccatttgtaagagatagcttgtgagtggagtttgttgggtttggacatggttttgtcccttccatgtgtaacttgactaatagatcagagatatacttggtctgagaaagatacatgtca

SEQ ID NO: 6834 - DNA, 553 bp, Cannabis sativa
acaaaatatgcatccaagtcgagtgtcgaagcatcataaaaactcaatccatgcactaaccttttggcaaagattacggataacagaaactgtcttcacacgcatcttagcatcttctggcaactcaaactatagcaagaaaatataatgtcaaacacatgcttatgcaatttaagcttcgaaataacaataaaagaggattaatgtgcctagagattccaagagatagatttacacccacttactttgtacaacaacacatggggtataacacactgatgaaaattgtttgattgtaaataggataatatacaattagcatggtgtatatatatatatgaataatacatttacaaagacttgaaaccttgaccactcacacaatcacctgcccaaccccttgagttagccttagtatacagttcacatgtcttaagaaaataagcacaagactgggaagcttaatgaattctctcaataaacaagtctctttaaggacacttcgacaggaaaaagatgaacatcccccatcacaagatgtggttatatgaaa

SEQ ID NO: 6835 - DNA, 866 bp, Cannabis sativa
acagtattttaatttagcaaaaaaaaatcatcttactattttatctttatgaatatatatatattttaaaataaataaaaaaattatttgcactgaaatatttttaacgtttataattattacacataattttaataaaagaaagtgatggcaaaagaaatttattttacaatatgttgcaatcctactttttttttttgtcattaagtgtcaattcaaaaatatgtgataatatattattggattatatattaaataggttaaaaaaaatatgttattacgtatttttaagctagaacttaatgagtttaattgatacttaatagttaaaaaaatatatatgactgtaataaaatcgtaaattaaaatatttttactgttttttttattaaaattatgtataacaattataaatattaaaagagtttcgttgtactccggttagaaaatcaaacttgttgagttggtaagaacagttacgagtacggcgattatataaaatttgtctgttagttgtttttttatattttattgttgttttatgtcttgttcaataaatagatgttacttttaaagttaactaacaattaacttcccctacaatttgaatcgagatccacgtaagaatttaatattataatatattttcgtaaaacacgactctcgtttcatattcacgaagacagttaaaaaaaataataataataataaaataatattataaagtgtcaataattattatcactgaaaatttcatcaccaataaaagcaaaaaaaaaagtaaagtataaccataaattggcgccaccgttcgcacctaatccaattaaacaccttcaacttcaatcaaccttccattttggata

SEQ ID NO: 6836 - DNA, 675 bp, Cannabis sativa
  modified_base (108)..(118): a, c, t, g, unknown or other
tacattgtattttaaccacttgagactacctcaagtggccataggagggtgtgtgtgttagaggtcttggattcgagtcccaggtaaaacataattgtaatatataannnnnnnnnnnaaaaaaaaaaaaaaagtgaaaaatgagttcttaaactcaatttagcccaactcaaacctaacagccctaatttccatccaattcaagcttaaacaacttaacttaaactccaaagcatgctttgaacttaactcaacaccacaaccttaaaattacaaagtcccctaaccaaactcaacctgaacctcaaaatttaaagagacaaagaggaagaaccttaccccaaagcttgaacaactcctaatccttcttaattcaactaggaaattgtgaaattgataaagaatgctctttgttgcaactggtttctagggcttggaaggaaggagagaggaagaaggaaagctgtagacttttcttaagtttgtctttttatttttctaagtaattaactaaataaataaaaaaagaaataaaaacctaatattaatctttagtttcagcctagaaacttacttaggacaaaaatctaaataccatcaaatgactattttaccccttgcaagaacacaaaataaaacataagttaagtgcatatttggtcattttctaactac

SEQ ID NO: 6837 - DNA, 1568 bp, Cannabis sativa
taaatacgttttaattcgatccactgcagtgaagtcttacttaatttagttggcatgggccaccgatattaatttagttacctttcatttccaaaatcagctattcagtggagacagggaagaattatgagaccctttacagaggtcttttcattcaactgtaatatattaaatctctctcctcttacgtacgtacaacactacacatttcaatatcatattgatttcagattaacgttaatagctgcggtaagatgtagctatgtagccaaaaacattattagaaagtagcttcacaatatatatagtcccacatataaatgtaatcatatatagtttaataacataacatgctttatggagttgtatgatgatcaccaagacatgtccaccaaacccctcgacctttttccgaacgagcctctattgcttcgttcacttgaaccttcgtataataatgattattctaatcaaaaccctattaatatacgaagtggatcagacgatcaaaatgatgacgatgttactgtggatttgaacattggtcttccggaataccactcatcagaatcagacaataataataatgaaactgcagcactggcgccatcatccgacgtcgttacagttgtgcaggaatactggattccaacttcacaacaaatacttgttggcttcactcacttttcttgccatgtttgcttcaaaacatttaaccgctacaacaatcttcaggtccagatatatatatatatatatatgtacagaaaacagtaaatatgtgtgtttttcacaaaatattttactgttgtttctgttattgttattaaaaaataattagaatagttaattatttgattatatataagttttggagtctttagtagctttgcttttgtaatatgtatatagggcatttttttagtcggtgatgttattagacgttatactattgttttttttaaaaaaatatattttttttaaaaaaaatattattaatctttctaatccaattgatgaatgaatatacattacaaaataattatgttattataataaataatcaattttcgaggagtcacaaaaaaaatgtttttgaaaaatataatgagaattgttaaaagagattattggtgtctagtatccttctccatgtcatactgttattgatctaattaaaatatgaagtctcatataacgtaaaaaaaaaaaaaacttttaaagaatataactaaccaatcgtggaatacctgctagacactactattgtctaataacaatataattaattcctgtcaaaagatgaagaaaaatatctataaattatattttatgattattattcttattattatatattgatcattcatatatatatgaatattatttgacattaataagtctaaccgtttaattttaactaattttaacaatgaaagaaaaatacatagattttgttttatacatggttgattttataagaggaaataatatataggaagaaaaggagaaggtaaagatacgtgtgtaggttttaattaatagtggggaatattattataattaat

SEQ ID NO: 6838 - DNA, 1570 bp, Cannabis sativa
ttggatttttatgagcattaattgtgttcattaattcttattgattatagaatgttcattgtgtttaaatttataacatatatattctgttatattctgtaaaaattattaatttttattaatttgactatttgactctctattttgttaaataataaattagacactatatttttcttaataatacaaaatagaaccttgagctaatttttttattaaaataaaacttaataataactcaatctagaggtattatgacttgtctggatatattttctgcatctgttcgtgctagaatttatcttcaagttggttatactaaaaaaaaagtcaaaaatacaaagtccaatttgttgtcatttaacaaaaaaaaaaaaactcgatcaatatttttttgcaaaatataagatctaaaatgttattaatccttttttaaatgacaaatcaaattttatattttctaaaataatataaagtagtactgtgaactcaattttcatctatttttttaacataaataatttgaagaacgtttctagcacgaaaaaatacaaatcatgtaatcagtttggccatagatactaccagcttagtttaatattaagttttattttatattaataaaaattaagtttaaaattattttgtactattttaaaaatataaaatctaatttattatttaataaaataaccgatcaatcaactttataaaattcaagatttacaaaatgtgacattttaagataacatatacatatatatgaaacatatataaaatatattataaaaatttcatgtgacaaaattgtagaaaatgtttgtattattattgactcaagttacccaaccactactacatgtaaaattagtgtctgccactcaaagtggaaacataaatcatcatcaccgcataatttggaggaaaaatttccaaaaacttaacctttagagagaaagtgagaggaacatttatcttacatttaatttttgtggtataaacttgcacccaccatttatatataatagacatgttgaatgaagtgatgtattactttttccgtacatatatataaattttaggaagaagtgcttctgaaaacaacattaaaactaactcaccaacctaacaagtttatttatttatttatttttatgtgcattgtcatttagcaattgtagacattaaattttctcttgtgttggttaattgcagctttttaaattttccttttgttttgagtgtgtggatattaaattaaatgcgccctagagtgggggggccgatgacacaccaagattaagacacttttcttataatcataagattagaaaatatacactaccaagaaaaacaatttttttgtgtagttgtcgtattatttacttaactaatttcttcccttttcgtttattcacgaattactatacctaattatttttaaaactcatatatttccaataaaatctaattgatttatgagggagagcaaaatagttcaaatacaataacagcatttaaagtctctgcacgagataaataaattctcattttatgaatttgaattatt

SEQ ID NO: 6839 - DNA, 769 bp, Cannabis sativa
caaaggaatgatcattttatctaatgtttgattatgtccaaccaaacatgttagtttagccaacttattgggcgtcaatatatttgtaaattatattatgtctgctaaacaacattcttgaagctttcatttcactaatgtataaaaacattctgaaagctgagaactccaagtttctttaactgcctcttattggtaactcattgaacttagctttaaagagttcaccaaggccaaccatatgcatgggcaggtcttgtctaacccctcttagcttctgtttggtgaaatccaagcacctccaaataagccgttttgtctccacaactgctttccattgtagagaagagatcatcactctctgttcaagagggcatatcaaagaagcctttggaatactcaagtctcaaatatggtcggacccatctgttttctccaacttcctccaagcttccgtactaagaaaatcacttttcatggggaaacaggtccattctttgataatcacatgtgggtgttcgaacacgtttgtttctaatcacctcctaaacatgtactccaaatttaatgacttaaaaagtgttatgacgctgtttgataatatgagtaggagaaataagatgtcctgtaatatagtgatcaataggtacgttcaaagtggtgattttgacagtgcccgcaaagtatttgacgaaatgccagatagaaacgtcgcgacatggaatgccatggtggctggtttgatccaatctgaatttaatgaagaggg

SEQ ID NO: 6840 - DNA, 760 bp, Cannabis sativa
atgaagaccatgattccctttctcaaagtcccaccaaaaatctcggaccaaaatatcgatccaatagataagacgattagagagttttgtggcttgcatgtcgtagataggcagcgatagacccacagacttaataagggtagcccggcccgccttggacaacgtttttgccttccaaccctacaatttagaagtgagattgtcaaggatgaaattgaagtcaacatccttttatcttgatttgaataggggtaggcccaagtactttataacaccttccggagaatcaatacccaaagtttccttgattcctcttctcatgtcgttaggggtatttctgctaaagaagattgacgttttgagctcattaactttttggccagaccaaatgcaaaatctctcaaggcagtttcaataacaattaacttcgttcaaattggcccgaccaactagaataaggtcatctgcaaagaagatatgggaaagaactggacctcccctactcagcttaatgccttgatattctcttttccaatggcctcttccaagagtcttgataagacttcagcatcacaaatgaagagatagagggacagtgggtcgccctggcgaagcccacaggagggcataatcttgccgacatgacccatattaagacatattttgagagtagtggtggagatgcactgagaaactcaattgcgaaactgttgggggaatccaaaacaatcataaacactatcaatgaatctccaactta

SEQ ID NO: 6841 - DNA, 785 bp, Cannabis sativa
aatgcatgcagggattgcacagattgaaaatgcgacgtggctcataattaacgacaacgacacgcatttaattcaccccaacggccctctttactaagctcttcactttcatcccaaataaacaatcacaatcccctagaaatcatcgaagatggcgcaccccatatcagaggccaacgacaccagcccttttggctcatccacgcctgaacacttctacgctcaccactccgtggcccacgattcacactacattaccaactctcgtggcctcaagctcttcacacagtggtggaccccacttccccctacacccatcactggagttctcgctgtcgtccatggcttcaccggcgagtccagctggttcgttcagctcacttccatattcttcgccaaggctggctttgccgtttgtgccatcgatcaccagggccacggattctctgatggtctcatcgctcacattccggacatcaaccccgtagtcgacgattgcatcgacttcttcgacgagttccgatcccgccactccccttcacttccggctttcctctacgccgagtcactcggcggcgccatcgctcttctcatttctctccgtcgtccaggatcctgggacggggtcatacttaacggcgccatgtgcggtataagcgccaagttcaaaccgccgtggccgttagagcacctgctcttcctcgtcgccgccgtcatcccaacgtggcgtattgttcccacgcgcgggtcgattccggacgtgtctttcaaggaggagtggaagc

SEQ ID NO: 6842 - DNA, 1121 bp, Cannabis sativa
atcatatcatatgaatattgcaatatataccaagtgtcataagaattctatccacatgttaaattcttattgttgttatttgctataacaactagttcttacagatactgagctagcacagaagcactttttcccaattcaaattgtcggaagctttcaatcatttctcactttcatttatattttaataaatttagataatcaatgtttagtacagtattaaactttaaacaagcatccccacacgcaaaactaataatgataagtaataatagtatgcttaatttcacatgggcaactcttcattaggcttccattatatgttccctttggcccttgcaagccttaaataaatgtaactccaactaatattgttactaattctagctacgctaaagtacatgtgtaaggtactggtttaatgtttattagtgattactactttatagttggattaggcagcattttagataattagcttaagaattttttagtactggcttatcaacagtaccttatgggtccactaacactaatagcaagtaattaagtggtggatagttaacttagaagtaataataataataataacaaaatttcttaataagtgtgtagtttcatttcatttctttatgttgattttgaattttttttttccataaagaaatcatgggaagaataaagaaagttaaaaagggaagaatcttttagtagctgtacacacaaatttttaatggtggtccaaatccaatactttatgagtttaacactaacaagaatccagaactcaataacacatatatatgagtttttttagtattttaatggaagacatttatgaccaatggttaagttcaaaaatttggtctgcctccaattgttaggattaaaataaaaaattgaatacaacggctgtgaactttaaaaccaattgctgataaatacacaattttaataatgttatcttttttcggtggaaaattttagatgtaggaaaatagctttgtatgatacagaagtcaacgattaaagatcccattcccatttttttttatcaaaatgattacacataaacgtgaggttgacttcaaagagaaggaggaacatattatatttgaaat

SEQ ID NO: 6843 - DNA, 626 bp, Cannabis sativa
tacagctgctgccgcttggttgtctttgtggccttgtgcctttgcttgtttttgcttgtttctttgaataaaattcatttttttcaaaaaaaaatatattatactacaataatatacacatatatatttatacatatatgtattatatatacatatttataatacacataaatatatatttacacacatatatacacatatataaactcaccaaaataaacacattcatatacacatatatacatattattctaactacaaacaaaattaaactaaaatttctatacactaaattaaacctaaatttatatatataaaatttaacccaaatttatacacaaataaaacttaaaataaataaaatataggttaccttgactgaaatgatgaagtgtgagagtaaaattcgaggctcgggcagcagttgctgtagggtgcagcgacaggttgtcgacgaagttcggtgaaatttttgtaattattttttttaaaaaaaaaataagaaaaaaatggatgagaaagagagataaatgatagtagagattacgatggtaaaaatagcagttcgggatggtaaaaattgtggttcgagtggtgaaaatggggggaacggcgggggggtcggg

SEQ ID NO: 6844 - DNA, 811 bp, Cannabis sativa
tttgggaagtaaaaacagaactagacttagaattcaactgagaattcgactctatgacagcagcaaacggtctactaacagagtaggcagactttcgacatttatttaaaagggttggagacgtattttgagatgttgagagtgatccatcaagctagtacaatccatctttaagcttcccccgtagcaccaccttccttgttgccatgtccttcacaaaacacatatcagaataaagttcaacgaaaactttattatcaatagttaatttagatatgctaatcagatttttggcaatttcggggacatgtaaaacatcttgtaggattaagtgtttgccacaagaggaagtaagtataccagtccctatgtaagctatgtcaagttggttaccatcaccaactgttaatttgtcattacctccataaggtgcccgagtggtcagattgtcttggtcagaagtgagatggttgtttgccccagagtcagcataccagctatcattgtccacaatatcaggagtagcaacaaaagaattcggatccttcttcacttggtgattgttcttatttggtggtgttgatcccatgaatgtctcatcatatctgttgtagcagtgtgctgctgagtccgtatctaccacagacctgacacgttggctttgagtttcaacctcctctgcctctgccaccattagagcttcctccacgattattcccatagttagaccctcgacctcctccactgtttggtgggaagttatgattcttttgagggttatagacaggttgtttgtgttgggttttgtgcc

SEQ ID NO: 6845 - DNA, 1020 bp, Cannabis sativa
gatcttatataaagcatcattgcaagtcaaccgttttagtttactaatataatcgtgataaattgttaatttccaaacctactggacggtaaagcaaccaaacaaagcatgcgctaaggtttctttgtgactatggcatcggtaacacattggggatctcactattccacggtggtaaaggttcaagctagtaggaagggcatcaaggtaagctcgccgtataaagtgtttgattttcaaaggtatcttcaaataccagatcaactttcaccacttctcttggttagtagtaatggagggtgtggattcaaattggtggagaatggcataagcatgatggtagccagaatttacagtgtaggttccatgtgtagtgtaagactagtaaagtcgatcttgagcaggtgggggaaggagtgggatggattgtatagcttggcaagcatcactttggaacgtggtttgaatttgttgtatatcccattctcctttggctttataaggctagatacgttcctgtcaagggtatttagtgtttgaaggttggggagttttccgtaatccgagatccaagaatacttaaagatggagttggaggtaccagtacccactatattgcgtaaacccgacaagaggagtgttttgccccaagaaatgttgttccaaataagagaaggatggtgccctttactgaaattaaggaaactagaatgagggtattaccgggccttaagaagatgggcaacaagagacggagaagcctaaagaatatggcaagcctgtttggctatcattgcttgattaaaagctttcattgatcagaaacctaggccaccatggaattatgatttgcaaaagtgagaccaactcttccaatgaactttccaattgtgctcagttcctccccacaaaatttgagccatcatggactccattttttgtggaagtagtgaggaagtaggagacaagccatagcatcagacaaatttgcttgaattaccgatttgagaagaatttcct

SEQ ID NO: 6846 - DNA, 4273 bp, Cannabis sativa
aaatttcttgggcattcgaatcttttttattggaaaaccagccctgaacttcgtcttcccacctatgcaagttgtttgtttctaacaatctagttgacctaggtggaaaattagaatgaaattcattaacaccaccatattttctatctaggtaatcgagattcgttgttctaaggttcgagggtatgtgaggcatgctcgagtcaaaatgctcattattatatagaagtcctttgtcgaacatatctctaacaagaggcctacaatcgttactaagtttattattagtatcaacctggtcacatgttattttcctcgatgattgctgttttgatctctcattgaatgctttcttccttctaggactctcatgataccctctgttgttggttgaagaagagtgttccttacatcctcctaacccaaccactccaattacatcaccttttttattatcaatttcaaaattttggggagatcctgccttgggcatctctattgctgttttgatcttgtttcttctattaggtgatcgttgctttgatttctcatcgagttctttctttcgaacaaaaccctcaacattcctttcgctactactaattgaaggaaagtatttcttacaacctcttattccaaccactgctgctacatcaccttcgaggttttcagtttcaaaatgcttatcaatgtttgcataagcatatccttttctcttagcattaacccgaccacttcttttcatatgtcttcctattctaaacgccccttgtacatcacctctcaaattaacgtttgcacgtggagatactttgtcactaccctgtttgctcctagattagtcagccaattattgattttctcttattacctcgctttgatttctcactagatgctttcatagtatcaatcgagccgcttctttccatacatcctcctattccaaccaccccttgtacatcgcttctaagattctcactttcaaaatgatgattaccacttgtatatggcgatactttgtcactaccctgtttgctcctagtattagtccagccaattattgattttctctttttacgccactttgatttctcactagatgctttcttagtgtctatcgagccacttctttccatacgttctcctattccaaccaccccttgtacattgcttctaagattttcactttcaaaataataattaccacttgtatatgaaaatactttgtcctgtttgctcttagtattagtccagccaattattgattttctcttattaccccacttcgatttctcactagatgctttcttagtatcgatcgagccactattttccatacgtcttcctattccaaccacccgttgtacatcgcttctaagattttcactttcaaaataatgattaccacttgtatttgaagatactttgtcactaccttgtttgctcctagtattagtccagccaattattgattttctcttattatcccgcttcgatttctcactagatgctttcttagtatcgatcgggccacttctttccatacttcctcctattccaaccaccccttctacatcacttctaagattctcactttcaaaacgatgattaccacttgtatatgaagatactttgtcactacccagtttgctccttgtatcagtctggccagttattatttttctcattatttttctctcatcattggatgctttcattcccgcaagactctcatgatttcctttgtcactattgattaaaggagagtaatccttacattcttctcctccaaccaccccaagtacatcacctacattatcactagggtcaccaagagcatgcttaaaaatattaccataatcattacaatcaaccattgcatgatcaggtatttcaccaaaatcatcatggttacccatcgaatgatcatggatcaatgcagcatctgtcacataatcttctttgaaaatatgagcatgacttttagctatttccatgtgtgtagcagaccaatcagaacgactccatagataaagcagaggtggcttcgcattccattgttccattagtttgtcctttacatcagctgatccaggaatataaaatgactagaaggacaaccaaacatccagcatagttaattagttatcatattttaaatactacatttaaatagggttacaattcatcaaggataataaaaggaaacaactcttcacctttcctgataataaatggtcatcctcccaaaccaaatcatacggtaattcctgttcatctagcctgtacaaaaatgtcacaaagcagaagtgatatccttccctctagatgaggcaataatacttcaaatacatgagatgaataggttgataacaagtaatacctttcagtttcagtttctggtggagcaataagtataagaagttttggtttaaacccaagagccttatcaatgaacttcttcgcaaattttgctccaactccaaagggaggatgtaatcccatgatctgtccaaaaccaaaataaacattctaaagaccccggcaatcaatatatctttgatgtgataaaactaaaatcctttcgctcttaccaattttgatccgcttggcaattcctttggcttgacagtcatccagtccctctcctcaaaacaaaaatcattctgccaatcaaaaagataaaatcatcttttccccttttaatacagaacatacaattgacttttctcttggaaatacaatcatttccgaatgttagcacgtcaatattgaaagccatcattaaaccaaacgtacacttacttggagactcaaatcaaaacaacaaagtttgcttagagtttaagttgcactaagttcaaatgccaatattcaaattatgggaagaacataaactcaaacagcctaaaattgaatgccattttatttcatgtctagaattaaagaagtcagacaatactatctcaacagtttaggttttctaatgtatacatcgtttccataagaagatgaagaagaagcaatgaaagaatgttttatcagaaaaatgttacctttggtggcataatgtcatagtttttgaatgagcacttttttcctgtctcgtcaagcttttttctcattaagacactgaaatcattagcaccacagcaaaaatccactatctgttcaaggaaacaagtgctgatcagattattaacatggattatacaaatttaaaacttgactattgaaaacagcaaatcgaattgacagatccgtcaaatttatagcactgccacaaacccatcaaatacccaaagaataataataacaataacaatgataactgaaatcttaccatgtcaccatcttgtacgtaccagtgtagcttattgataatctgcaaaacgagtcagtgcaatgaaataatgaaagtataatgaaagaaaaatccagtctgcaaacatttgaggaaagaaataatctgacaaattaaaatctgtgataaagttgtacaaataatatgaaaaatattaagattgcactctccttaattttaattaataatatttaactgatattaaatttattcaattctattcttaatccaatacacaaattaaaaaactatatatactattaacttttatactcaataaattttattccatcatatccctgtccctatccttatccctatccctatccctatccctatccctatctcccatacaaacatatatactgtatgaattagcataaatatgctttaccactttccaaaaggaaaactagcaactgtctttttcagagcctaccatttctgagacagacacaaggaatttctgttcagaactatccctagataatgatttaattggcttccacactgacaaaaatgagcagacaaaacacaatgtaaaatatcaaaataaacctgaattcattcgaccaaaataatggtaaaggcaatccattacttaaaactacaacaaaacaaaaggaatggaataaaaatggattccttttgattaccaccaaccccaaccaaaatatccagtgtagctgtttaaggcaatctttattatattgacacaaaaaagtttatttaccagaataaaatagctactttgtcttggatttaacattgagaaaaaaaatactttacttgtatcattaaacatgtacagccatgtaaacaggaagccactttgataagacggcaagatcatgaggataaaatagaaattaactgggaaacatgtacattacctcttcaagtttctcc

SEQ ID NO: 6847 - DNA, 1362 bp, Cannabis sativa
gcaatggaatgagagagagagagactgataaagaaagaaaagtaaggtgaaagggtttttgttaggtttttacttttctatgccaatatcttaatatcccatacttaaaattttgtaaacaaacttcaatggaggaaaatgtgtatttctattagtgctttcttactaataaaacatagatcaccatataatatattttcaaactaaatactttgtggtttatatttgattggttaatggtttccatttcatttttttttatttccatttttctccattttgttcggtcaaattatttttatttcctatgtacattttgaggttaaatcgttttcatttttaatttgtgttgtttccatttttaatgttaattgtttatttttttaatgatattttttccatttcaaactatagtttctatttcgacgttaaaatatttctattttaaatttgtgttgtttctattttttataatattttatccatttcaaactatagttttcattttgaggttaaaatgtttttattttcaatttgtgttgtttttcattttcaatgtaagttgtttctattttttattatatttgtttctatttctcttatatatatgatgttaaattcaagttgtttctattttgagattaaattgttaccattttacacacatatatatgaagttaaactctatttgtttccatttttatggcatttgttttcattgtagttaaattctacttgtttttatattttatgatattgtttccatttttaatttgacttgtttctattttcaatgtgagttgtttctatttattatgatatttacatatatgtatatatatgagattaaatgccagttgtttctatttcgagattatgttgtttctatttttaatttgagttgtttccattttcaatgtgtgttgtttctattttttatgttatatgaggttaaatgctagttgtttctattttgaggttatgttgtttctatttttttatgatatctgtttccatttcacatatatgtatacatgagattaaatgctagttgtttacagttcacaaactatagtttccatttcgagattaaatgatttccattttttgagattaaatgccagttgtttccatttcacgaactatatttttttattttgaggttaaatggtagttgtttctattttagaaattataggttctattttgaggttatattgtttctattttttgagattaaattgtttccaatttcaatgttagttatttttattttgttatgatttttgtttctatttaacatatatgaggttaaatacttgttgtttcgatttcacaaattatagttttcatttcaaggtt

SEQ ID NO: 6848 - DNA, 1366 bp, Cannabis sativa
cgaagcatccgcttccaccacaaatggcttgctaaaatcaggtaaagcaaggacaggtaccgtggtcatggctgtcttcaacgcttgaaaggcttcggtggttgatgtagaccagttgaagttgtccttcttcagttggtccgttagtggccgagcaatactcccacccataatctttgacgaactaacttgcgataataccccgtaagaccaagaaacccccgtaattccttgagcgtagctggcacgggccaagataacatagcctggatcttggtgtcatccacagctactccttgtccacttacaatattacccaaatattcaatttgctgctgtccaaacgagcacttcttgaggtttgcgaagaattcatgatcaaggaggagttgtaaaaccatttcaaggtgttgcaagtgggatgtctcatcagggctatacaccaaaatatcgtcaaagaatactaacacgcactcgcggagcagtggcttgaaaatggcattcatctgagattgaaaggtcgctggcgcattggtgagtccaaacggcataaccaaaaactcatagtgtccttcgtgggtacgaaacgcagttttgtggacatcctcgggccgaacccgaatttgatggtaacccgacctcaagtccaattttgagaacacttgagcaccttgaagctaatctaacaactcatcgatcaccggtataggaaacttgtccggtattgtctctcggtttaaggctcggtagtccacgcaaaacctccaacttcaatcttttttcttcactagcaaaactgggctcgagaataggctgttactgtcttgacaaatgctagctgccaacattttcgttaccaaccgctctatctctcctttttgaaagtgtgggtatcgataaggtctcacactcacgggtgctgcatcggggcgcaagttgatggtatggtcgtgttgtcgtggtggtggtagcttcgtgggtacctcaaacaccttgggataccgtgccaacaaggaggaaatatccgcaatgtagtgtatctctattgccaccactgccgtactgcctagttcaatcaacactccttgtttttcagctcgtaaaatcccaagcatagcctttaatgaaactggtatcttatgaagagaaggatctccttgcaacacaatttttttactgcctaccatgaactccattttatgatcttgccaatagtgagtagttttcttcaaagtttccaaccactgtacccccaatattacattcgtgctccctaatggcagaggtagaaaatcttcccttatgtatatactttgcagctctaacggtaccgaacgacacaccccagcccctttaaccgcctgcc

SEQ ID NO: 6849 - DNA, 740 bp, Cannabis sativa
atatatatttaacatgtgaaactgatatttttaagtaaacacaaaaaccatatcaattacaatcttttgaatttattttatttatgatattaatgttcctatttatactaagtaggattttatgtctttataactcataattaattatataatatattattatgtattacttaccctttaaattgatgcctttgactgtgagaccaagatgcattttgactctacaaatttttgtcctcttatagttttgtttttctcttaggaaatcaaaatagaataattagctacattaattatatatttatgtatataatatttgggatatagtgtgttttgtaatttgtgatcactcaacattaaatattagtatttttttatttgattaattacatttcaatactttgtaattttcacattgcatatatgttcaaattacaaattcaatttttggactataattaatagagtttatactattttcagaccattacgggtttctttatttatacatatattactttctaaaatttaattaaaatatttttcaatgtaatctcatcaaaattaatacctgtcaaaattttcactcataaaatttaatatcaataatattaatttgaccgaaaatcacaattttcaatttttacatgcatataaacttcataacataactttttacacatatattatttaatatacgatatcaataaatgaatttataaataatttttctataaatt

SEQ ID NO: 6850 - DNA, 660 bp, Cannabis sativa
ggtaaaatttttgttcaatctgctctgagttataggttcctttacttgttttgagagagtatatggtcaatcttagggcaacaatagttttggtataaagagaaaggtggtagagcatggcagctatttatcttcattaattctcattgtcctccctgattacacacgccaacggatgccttcctcaataagctcttttccctaaaggatacttctccacacataagagcaatagcctcctcgtttagcctccaaaaaagaaccattagtgaagtatcatgccttaaggacccgagataacatagaatacaggttgttaattattaaatttagtaagatccttgaagcccattccacctttggtcttggcttttagagttggttccactttcctcaataattttttttcttagaatccaaagtcccccacaaataatgagccatcatggaatgaatatcttttatcaattccttaggtagccgaaaagagctcacaacatagtaaggaattgcttgtgtaaggactcggtttgacggagtcaaaaagtgaaaaaaattatatgtataataatatttaataataataataatatatgtatatataatacaatactagcaaaaaatagaacccccctctcgtcctctttctcactcactctc

SEQ ID NO: 6851 - DNA, 846 bp, Cannabis sativa
cataatgctcaaaccaataaaggatcaagcttttcacgcatgcatgcatgggatggcccaattatttaaaaataatcaaaaaaattaacatttattcaattaggtagtgttaaaataatcatcacatataagatatatatataaatataatgtgtatacctggtcaaatatgctgcaatgcatgttattttaaggtttctaacattaatttgaaaattagtaattaacaggaataaagaataagacacaatacaggctgtgtaccattatcaatagattaataatattaattaatagctatatataatttaatcgttgtgcaaatataaattactatattacttacttttatctggtttttaaatggcaataattgaatcccattggatgaatattataacaataaagaaacgactccatctatgattctgatgagaggtctttgttttataattaaattacattaattggatgaatattattataacattggttcaagttttcactctctaatctctattcttttctctctttctctctcaatctttgactcctgtgtgtaactgagcttcgttttctcccatggctgaacttgtgattggtgctcttctctctgcttcttttgattttttgcttgaaaaggttgcttctccttatgttgaacacttcttcttcaaggccaaaaatgacagtccatctgttgtttctgagaggtttttcaagttgaagtcaaccttccattctcttgctgcggttcgttttgaagtggagaacaagagagtcaaaaaccctgctgtggagaactggctggacgatcttcttgatgctgtcgatgatgctgaggac

SEQ ID NO: 6852 - DNA, 565 bp, Cannabis sativa
ccaaacaatttttgttatactttcatcttatttaatattttatttatacattaataatttttttcataatttaagggctcgagacgtacgcctagctcgtctacgtagggcgggccctgagttgaaatggaccattagataaaaaaaattttgggcatttactataaagataaatagtatttttaaaaattattaaaaaatattaatattatatatttttaaaaggtacgatttttatttaggcccctaaaatgagtgggccttaggcgcaggcctagcccgcctatacctaaggtcggccctgcgcctaccctcaaggccggtatggatttcgggaaatatcttgtgcgcgttttgtgtttttgtgatgtggttacattttggggttttggcagtttcaagcagagcacaaggagagtttacatgaaattacataattttggttgttctcgtgaagtcagcccatctgctgattagacagattggatacgattgaattggtcaaaatcgtgacctataattgtgggtaattattcatgaatttaattgcttgatctccatttta

SEQ ID NO: 6853 - DNA, 613 bp, Cannabis sativa
aagaggaggaggagattgtgcaggtggtggtggaaaaggaggaagggagcgtggggatggaggtgacggaggtcctgtaggtggtggtggagctaaaagcaatggcagttgagggattgaactctgatctcaccctgaccatcgacaaaacaaccgacatagttaacaacgaggtgttcgctgctgtcgagctccctctccaaaccaagatgagtccatccccctcccggcttcgaatcaacaaatctccaaggcaaaaaacaatcattgtcgcaattgacaaggaagagaaaactttgatgaataaataatagatttcttttctttcaattattgtccttctcttttctagtctattaataagctcgaaccgatgacttctaccacatcatggtgacactctacctctgagttatatccctttccttgtaccccatcaagaaatagaactgactaatcctaagacaaagggtcgagaaactcaataccactattcttgaacaacatggaatcgtgctttccttttgcactattacgaatacgaaaatagtgaaaaaaattggattaaattgtcaactattcctatcggaaagcttctataaatacagatacc

SEQ ID NO: 6854 - DNA, 561 bp, Cannabis sativa
aaaaaaaagtaacagatcatcataatgacgtggaccaaccaaaacaaagtctgtgaaaggggtccacctccacttgcccttaatattctctctctcccccccttaacaccccatttaaaatgcctcttctttttttaatttcaaatatcaaaacccaaaaaccatagcaaaccaacaaccactgcgcgaggtcctccgacctccgcgcctctccgatcaccaccaccaccggcctacgccatcatcagccatgtctgataattctcacgaccaagatcctcctctccaagaccatgcctctgcctcctactctgctctccctctccacatggtctttcgtcccgtcgcgcacgatccacacgcgccgcctcccctttccctccacaagcagcgatcgtggtcgccggacgcttacagagacgaagcttggctgaggagaaagaagagcaacaataggaagaagcagaggagcaagagcgttactgacgaagacgttgacgagctcaaagcctgtatcgaactcggattcggattcgactctcccgaggccgatcatcaacg

SEQ ID NO: 6855 - DNA, 1256 bp, Cannabis sativa
ttaatatttttttttattattttgatgatatttggatattattttattgtaacttttttattatttttataaaatactgtgaaaatatatttaaacgtaaaaatataaaaaatttataaatataatgatttatgtaattgatgattgattgggctttaggttgggtgaagacattgtatttttgtaaattacacaaaaattagaaattatttcataaatatccaaaaaatgataaatatttatattttggagagttttatttacacctcataaaagtatataaaagtattagtacactctattttaataatttttattttatatgaaatatacatctttaatttgtaatagttttttttttctttcttatcatgttcttaaaaaatatacctataaaatataaataaaatgtattttaaatattaagacaaaaagattaaaataaaaattatatatgattttattaaaaaaaaaatcatacctaattttttttttaaaaaaaaattgaaaataaaaatgaaactaactattgcattaaaagaaaataatgtgaaaaagaaatttcaaaaaaatattaaaaaagattttaaaaaaataatttaagttaattattctcttatattgggtgctataaagtgcaaataaattttttcttatattttaaagaatatacaatttttttaaatatttttacgaattttaactatttatttttacaaaaaattacagtgtattcatctttgaaaaaaatgtttttttccaacaagtgaaaaacctatcggaaaatgtttttttttttttttttgaaggaaatgatgtatcacattaaattaaatcagctgttacaggagcactaataaatctaggacaagcatctgtccacaaatcaacccctacagaactagtaacagactttgctagtgcatgggccacaccattcgcaacacgcgaaatggcacaacaagaaccaccaccaacagcagctaagagagaaataatctcctcaacaatgttttagtattgtgctttcaagtttgctatcttctgtctaggtatgcacatttttctcacgggaatggcctcgtggggacccgctcttaatgggacgagaattccttgtttaaataaggaacgaggtggggatggagattaatttttgttctgaaagttaaacagggtggggatgagaaggacacttaccatcccaatagagacccatttaatattttgtgtatcttttaataatattttatatt

SEQ ID NO: 6856 - DNA, 551 bp, Cannabis sativa
aaaaaaaataatagtaattgatacttaataatgttttaggaacaataacatcaaaacttttagttttgagggaaaaactatgggtttaagatggtttgtgatgaaatgtgataatagctttggtgagacataatttttcacatttgaagcaatgttttatttatttatttatttgaaatctatacatttagaatatgcattatcttaaatatagagtgaagaacaagaaatttgagttacattatgccttaatttttttttaatcaaatctcatcataaattatcgcaaaattttttatcgttcttgcctcaaaacataattttcattaccatcgctaagcatcaatttactatattttcacctgaaatatcacttctcatgacaccatcattcagcattgcttttgcataaagaagtcaagttctaactacatcattgttaaagtattagctttaataaaagaaatctctaatttaatggcaccatcgataagcatcgaaatattattgttttgaatatttatgtagttttaagttgtagtttacttttt

SEQ ID NO: 6857 - DNA, 1194 bp, Cannabis sativa
gtctcagactttgcttcctcctccatggctgtaacggactccgaatatctcctcaaaatagactgtctcagttgttgtatatcgatccgccaccccttgaacattaagtcgtttctagctttccaaataccttcaaacaagcagcccacgaaggataggagactatcctcgaaccccgttgaaatttcatctaacattctctctagtctttccttgatcgagccccctataacagcccctccccgagtagagaaaggattgctgaaccagagtgcccgtgcacaatgacaatcccagaaaaggtggatagcagattcgacgtcttctccacacattgagcaaagcttatctctaacaaaaaccaaccgctctctagttggtagacaatctgaaatgcctctccatatcataatcgagtgcctaaagtgcacttccaaagcttacgatccgaattcggcctaaggacttgggttgcctcataacctctcttcactgtgaacttcccatccgccgagtctttccacatacatccccattgtcgtcaggtaatcgacaaattttactaattctttcacccaaagaatcgccaaacatttcctttagaagcctcaaattccagcaaccattatcagtggagatatcagctacagagttcaaattaggaaatcttggtcttacttgctccatgaggcgaataaactcatcatagccaagccaaggcacccacggctgcctccatatatcaaccgtgttccctttaccaactaaagtcatgccacccctttcaataacatctctagaattgatgattcctttccaaaaggctgagtcattttctctgggtttggcatttcagaaagatgacttcttacaatacttctctgcgagacacttaacccacggcctatcgaaattggaagccatttgccaagctaatttcgcaagaagtgccttattcatgtcctccatctttctaaaacccaaccctccttgagtggtaggagcacacaacttctcccaccccatcaacgaaacaaaacattatataatcgatatcaatatcatcaagttccaatgcttctaactccttctgaagataattctgctactaatttttcatggaatatttataatattaccaacaataaattcttagagtcaaaaattgtggtaccatatgataaacgttttggt

SEQ ID NO: 6858 - DNA, 1267 bp, Cannabis sativa
gtactatccattacaggtacacattcaaaataaaaaactattagaaaaagatcgtaattgaaagttaaccaacacttgctactcctcacatttaccttaataagctactcctcccattgctaattgattttggaataaaacttcattcatcttattcttcaaattcagaattatataatacaatgtttcagtgtttcaccatatataaatgcaggagctgaagctttatttgccgatgtgggacatttttcagtgaagtctattcgaataagcacttgttttataacttacccagctattattttagcctatgctggacaatctgcttttcttcgcaagcatcctgatcttgtttcagatattttttacaagtcaattccaggtcaaaagaacagcagatcgacttaagcaattttctttcttctgaattctaatagtgaataattaattaaaaattgtgtttgtatatttttgtttaggtcctatgtactggccaatgtttgtggtggctatattggcagcaatcatagctagtcaatcattgatttctggaacattttcaatagtccaacaatctctttctatgggatgttttccacgtgtgaagattattcacacttcggctactcataaaggacaagtttatattccagaaatcaattatcttctcatggtggcttgtgttgctgttactttaggcttcaaaactggtgtacaactcggcaatgcctacggtactacatataaatgctctattattactaaagatatacatgtactatctactatgtatagagctaaataatactcacagaactttgtatggtataggtatcctttggcttagttttctgtacgtaaactatttttagggttttagaataaaaaataaaaaaaaaattaattaattaaaagacttaaaaaaggactccagagagaaattgttttcataattagaaatttagagtaatatacattatgtttaatttattcatacttactgagaaatttttttatatatcttatacttttagctataaactatttttttaataatatccaaactatttttagggttttaccatacttaactaatgcaatgtagtagttagtctcatctcattacataatataatttacaaagaaaattacataattgatatactacatatgattgcatatatttctcattaccttttattagtcataacattattattatctcatgccatatacagggttggcagtggtgtttgtaatgataata

SEQ ID NO: 6859 - DNA, 1071 bp, Cannabis sativa
tatacaaacaaaccaaatagcatcacatattttgtttttttaatgggcattaaaaatttcatgaatgagaaacattgtttgttctttaatgcacagctacacctacattgatggctgacagcatctaagaaatgtaaagcggagtatacaagaacaaacaatggcttgctagcattgcataataaaaccaaataatgaaataagaaaaagacagtgaagaataatagctaccattcattaatgacaatgatatctatggctttatccaaaagttaatggaatgttcagcaataaaaatctcagaactaaagtcataaagcaaatattatatgtatatatatatacatatcaaaagattcagtttcaaagcaaaagagttctttagtatatggaatgttcagaaaacaaaaatctgggaattaaagacacacacacacatatataatacaaaaattgagttataaaaaaataaagaaagcttcttcacttacttgaaacaaaaagttcatagctttcttcttcttcttcttcaatttctggggagaaaggctaagcttggttaccagccatggatttcatctgaatgtgattatgatcaagtggagtagtagaactaacagtaggcaaagcttcatacgaacccattctcctaaccccaacactcttcgaaaccagagcataagtcaccataacaatcacaaaaacaaacagcacatgaaccaaaaacgccagatccagaaccgccgcagctctcaagctcgattcctgcaaatcgcatttagtggagccttcaacgccgctaacaacgtccaacaaccggtgacaaccttccggtatgaatgcctcaacgtacagcgagagaccagtctgaagcatccacaatccgtggagacaaacggtcgcaccgagccctaaatcagcgacaaacagtctagggttacaagctagcgttatagagagaatcgaagccaaagcggaagtacgagccgagacggaatcgcatttggcttggagatcggaggtttggagcgaagcggaggaagcggagagcgaggagagaaggaagaagag

SEQ ID NO: 6860 - DNA, 1345 bp, Cannabis sativa
ctctctaactgtttcggctttcaacatcaattttttgtcagtatattagtttatttacatattaaattgggtttggctaggcttaaagttcttatgagtaatgagggtagtttgtgtttgatgactgatgttttaaagctgtggattcttgcctaactccatcaactttttgtatgatatgtcttgatggtttaaacagttcagaatggtcttagttttgtttttgttgtcttccatcttcacattaacattagctgtgatttttcaatatttacatgtattgtaatataagataatatcatccttacaatttatgttgcttacaagtttattattgatttcaggtctacggttgcctggtgaccaaaggcaggtgacacctacacttccagtgcatcttgtggatgttctcagttcaggtgatggaatgcaaactttctctgattcatctggtaataatcagtcactgtttcaaacaggaatattgattatgcttgctcattagatttcttcaattaattttaagcttgaacactatttcttgcaggtatgtaccataagaatacccctccctcagcaaataacttggctgctcaaagccctttgttacaggttggatcatacgcttcctcatgaaatgggttactcttctatgagaactctttgatttttttttttttcctttttaaattaaaatctcttttgtccacgtccacccattgccagtctgttccttcactaaatgctcctgttaaattgtgcttcaaatgcttgtttggatccatctttcatgaagattatattttaatgctcttcatgtagtgttatttttaaatcttgtactaaactatgtcaaacaggcatctgggtcacaacttcttggaagatcagctccatctcccggggctattagtgctacaaatttcgataacacaacaacatctcctcttccatatgctaattccccaaggtctaatacaaacatgatgaataccccatctcctcaacaacaaagtcaacagcagctacaacagcagcaacaacaacaacagagacagaaaataatgcaattaccgcagcagcagcaacaacaacttcttgctcaacaacaatttaggcaacaatctacaatgcatggattgggacaggtaagataatctctacaaattgtttttttttttactttgtaaacattaacttttgggatgaaacttcttaacctagcagttgaagaatataattcagtgattacaacctgtttagctagactagtggctcttgatattcatttacaagttttgtatcttcttccttgcatatttgagatagattttgttttcataac

SEQ ID NO: 6861 - DNA, 1001 bp, Cannabis sativa
tatttccttttatgtatgctctatactctatatttccgtgatatatgctattttgttctcgctggttttctatttaacagttaactgctttgtctcgtaacaactatgtaagattattgatagttatttatagagaaggccgagcgatcaatgatcaaaaaaaaaaaggaggggaattttaggtaaaaaaatggttgcaaggatcggaaaccaactgatgaagatggtgggaaaaatgtagaagagaaaagttcaaaatgtaaccgataaaagttgaggagaagttgtgataagttataaaataaaaatattgtgcctggagctaaaataaaagagagaaagtctgaaaaaagttgagattggatacataaatttgagaacatagtataaatgtaatgaaaagttagataaatgtaaaataatccttgtggcagtattaaagatacatttggacaaaatttggtaattgtgtaaaattctcatatttcacacttcggtagtggagagaagaagaaaagagctggattaggcttcttttgggctgaccttgtggggctggcgggaaacgagctgggccattttgtggtgctgagccattgtactatttcattgcaagaatatcaacatttaagttagcctttcaagcttcaacaatatgattttttattattattatttattttctctgcaaaataaatataaactaacttaaaatgaaataaaaaaaaacattttacattataatttcataaatacaataattcaaacttaatttgttttaacatccaagatagaataaaatgtatgtttcactacgaaccaactagtaccaagtttcttttaaaaaataaaacaaaaaaatcatatgaaaaagagcccgtacaaataagttgcctagaagggagtgttggtgcacagcacaactcaactctcaactctcaactccacaagcaagaaacatgacaaaataaattaatgctcaccggtgctgaaacatgtga

SEQ ID NO: 6862 - DNA, 761 bp, Cannabis sativa
gatcaaaaaactttaaaatgacggctgatatctcccctcataactccttccacatgattttaaagaattttgaagcataaccatccgaacctaaaatcttcagctcatgaatagagaacatggcttccttaacatatttaacctgaaatggtctaagaagttgaagttgttgatccaatgacgatctagggccctctaaaatacaatcctagtttagtacctgagacaccaaacttgggttgcccataaaagacctgaaataagagatgaaatgatcaacaaccaaagggtactcatccacaatctgaccactcgagttaatgaaagaggcaatcatgctctcttctatcctcttcttaaggtttgcatgaaaacaaagtgagtttgcatccccaaatctcagccaatcaatcttgctttttgttttaggaggctccctaaagttttacaattttgagtcaaagcaattatgtttgtatcttcttgaattaggagctcctttgaatgaggattttactgtaaagccatctgtgattgattatagttagattgagccatcttataattttcacgaacatctcaaaacttgcttttgttaagaagtcgaagaactttttgcaaccagttcaatttgaacataatggaatatagatctttagttctgaccacttagatccaactcaccaacactttgcttatgaaatcagaatgatcagatcacatattaaagaacataaagggttgcacacccaaatgaccaa

SEQ ID NO: 6863 - DNA, 722 bp, Cannabis sativa
  modified_base (516)..(527): a, c, t, g, unknown or other
aaaaaaacttcacttttgaggacacatctcattaaatgcatcgacgaaagtattacaagaatttttacatttgtcgatgctgtcaacaaaagcatgtttcactagtgcaattttaaaatttaccgacaaaaatttactgtgtacaccgccaaaaggtgatttttttttggggaaaaacacatttgccagcgcaatatagcaccaacaaaaatgttgtaaattttattggtgggaaatagtgttgtcggtgtattaacatgcgcctaaaaaattagcgtttaatgaaatgaagtgtttgatttttagggttttttgtaatgttttgctaaccaaagacgttgagaaaacctaatcgataaaatcaacacgccagggaccttcttcctcattttttttctctcctctccaccccttctctctatcaactatcaacgttcgtccaccctatttctttgtcattgttccttcaccccttcttcgccttcctccacccttaatctctctctctctctctcnnnnnnnnnnnntctctctctctctctaatatatatatagaaaaatccaaaatgttcggcaaaagtgagaagaaaaaaataacttatatatatttatattattaagaacttatgtcaatgcatgtgaagtcgtcgacaagggtttcttgtgcaaaaactcaatctgtgggaagcctttacaaagatgttacatgcatcgacaaagat

SEQ ID NO: 6864 - DNA, 1118 bp, Cannabis sativa
agctgtgctcaacttcaatatttggatatttctgagtgtatttttttgaaagatgttgaaatattgttgaagaatttctctgctttgaaggttgtgcctccatttaacgatgatgatgattatgattatgataatggcttttatgatttctaagagtcttatgactacctattcctatagtactatgctctcaaatatatctaatataatagtattatttatttttttattgtttatgtttttgtaatgtagttcagcttagtttttaagtaagatattttgaaacggacgttgttgttttctctcatcttctgaactaatttattttgttctctgaatatatatttttaattaagctctaatgtaatgtttattttacattttggtatttggtgcttataatattttattagaagttgaaacaaatttctaaaataattttcaaaaaaatttgtattcataaacatctagaaccctttactcaagagtcaagaccattctacttatatataatatacttgtaaattatttaagctataaatgtctacagctagaaatttagttagaatgttttgaaggttgttgctaatcttaaagggtggtctaaaaaggtaactatgtagctattttttgctatggaataccaacaatcaaacatagttccattgccaaacccaaatggatgctaattaattaattagtgcatgcattttatctttcttatttttttttttttcattctaggaaacagagtactaactctgttataagctcttgctttggtttttatgtttcgtgtaaatatgagtgtttaatttctttgaggtatctttgtaagtgtatttttggttaaccttttttttttagttgttgttgcataaaattgagtcttaaataattgtggtgattagcaaaagcttcaactaactcatgttattatctttaactaaaaacagagtactgccaatctccaaattgattaaaacataccaaacacaagcaagcatccaataagaatgagtttcgatacaaagctccacagactccaataaaacccaaagcaattccaatttcgagtccaatgtaaaaccattacatgtcaaaccatctttgatcat

SEQ ID NO: 6865 - DNA, 769 bp, Cannabis sativa
gacgagaaacatatacattttgagagagtacttatatatagggacttaatattaatggagcccggaaaagagaaaacaaaagcatgaactaatgaatttttacgaacgagtagttctttatatatatatgtatgtatatgtatatattaccttctatattatgaagtgatgtagtagctcctttataagcaatagattgcgaaacgacacagtaattgtgtgtgtttttctttcattgagaatgagagagaatagatgcactagcatgcagtacttaataataacaagctagacaaaagaattatccaataccaaataaaaataaataataaataaggtagcgaatagtcaatgcagctttaggaccgatccatcgagtttgacatggaatattattagtttatttatatgtgattatatattgtaatttttattattaggtttcatcaggagagaaataaattcatgttaatatcgatcagaagcaaatgggaaatggccgggtatatacatgtttgaaaattatataatataattggtggaattcttatttaataattaagtgacttatggggaaaggaagatataacatgcatgatcatttgaataattaagcacgaaacaaatccatgtgactgctattatgttccttcttcaattaataaatcaactaatcaacaaccattatgctgtctgacccatctattatattagctaagtatatgtacttttgcaagcccggaaaaatctatacatggtcttttttttt

SEQ ID NO: 6866 - DNA, 727 bp, Cannabis sativa
ataaatataaatgacatgttcttatgaaaacgacagttacttggatatcaatttatgaaatgtcacattagattacattgcttaatctctcttgctttttttggtaccactttgctttcagaagagtacatacatatattttgtttttatttatttttttttataaaaaaagttaaatatcatatgctatatattaaaagcagtgattagctagcttggaatcatgtacgattaaacaattttttcaagccatcaaacaatttttcaactacatcaattgttttgaaattaagtgtttatatatattctatataaaatataattatgtaacgaaattttcagtttaactatcttttaattttcttacgttaaaaagactattttttattaagtttaaaatattattatgtatttaaaaataaaaattatacagatattttatatatataaaaaattaatttatatttttaaagtatatttattaattttattggtttaattttaaaataaaaaaagaattatataggtattttatataaacaatttaaatttaaatttaaaatacttaaaatattgtaaatatttttaactatatttctaattttattggcttaactttaaattaaaataaaagacaattttgcttaatcggtcacacaacaactcactattatatctcacttaggttttattatacatataaaatgcgtatacatataatcacaaa

SEQ ID NO: 6867 - DNA, 917 bp, Cannabis sativa
acagcccaatccaactgcataaaaaatgagggactcgactcacttgaggtttcgctgatcatgacgaaggcatgaacctatttttgttgatgccatcaattctttgaacgggaaattttcacaaccaaattagttagggcagatggaaagtgtggaacccaaaattcaaataaccattaagttggttacatggagctagctaaagagctctactataaagagcatgaaagtgtaacgaaaggggttggattctctctctaaattcaaattttagttttcctgtgttttctctctctaagctagaatctcttctaatttagatatcgaagagtttttgtcgaaaaaccccaaggctccagtaatccaaacaaaggatcaccaaagaaaaaagtataggaagagcttggagaagattcggagggatccatggtggattagagaatatttactttctaaatttagcaagtattcatccatcaaatttttaccacgaaacaaataaatatcacaatttttatttacttttgtcactcaatataactgataagtttttacattttatttatatgtttaatagtttatagatactttcaataaaatttaatatttttattgactttttcgtaatttttaaacccaatgcattgaagctcaattgtaaagtttgaaccaaatataacattagtttatttttgagtcttctactctcataaacatgaacataaattcataataacattagtttattttgcaccattcattggagattgtcttctactctcataaacatgaacataaattcataatattatattgtaacttggctaaaaatattatttttttggtcattatctataaaatactctcaattttcataaattattactttaattaaaattttagttttcacacttaat

SEQ ID NO: 6868 - DNA, 789 bp, Cannabis sativa
atcaggaactgggtccacgtgtcagctcctcggaagactgtactcgtatttctaggcaaaaagtttgcactataacacatgcctttagttttgcgatgatagttttctgtcacgcggtgaaactatctcgagggacaggagagttgacctgtcacatcgtgctgatgcttgggtatcttattaagggatttaaaatgacggttataattatgatttgtcctcctattatgccacaacattaaaacccgttggggtttgcgtaggctcgaccttggttaactgtgcgatcaggcatcctttggtatacaattgccatgtgtcacgatcccaatgagtgacgacaacaattataaaaaccctctgtacaaaaatgagatttccattttcctctcattctcacccgcacacttgagtttttctcttaaacttcctgaaattccaaaaattttatcctaatttttttacaaaccttctaagtttcctcgaagacctttgctgttaaatcgctcgagattacattcaagttcttctctagaaatcacagcttttggataaaaaagtagattctttaaacacttcagttattttttgtatgaaagtttgaataatcgcatacattcttatttttaggggttgaaaatagataaaactgataggctattttaaaggcagtaaaaatttaggctaaaataaattaaaaaagcaattttttgggaaatttttacctctttttgaataattgcatcttcttcgtaagaactacgaataattgcatgtttcatgctagaa

SEQ ID NO: 6869 - DNA, 1655 bp, Cannabis sativa
aacttcaagtattcaaactctcttcgatctacataaatagtgtttgcttcctctcaaggtaagacttgaaacactttctctcgaaagcttgaaaaaccttctcccaaaggtttatactttttttttgtcttcttggttgacttgattacagagtaaaagcaatagcaaagatataaacactgaggtagagttgaactcgctctcctctacaaagcaaatacattattttttcacaaaataagaataaatttcaaagagatgggaaatctggctgctaatataagtatttatagatgatatactcgtattattggacaactcatacacgaattagacacgtccacaactcataagaaacttttctaaaaaaaattcttcaaccagcccataaatttcttgttctgtacttacaaaattttgagcaataagtgcaagttccattttttaaaaaatgaaacttccaaattaattttctccaattaatacccgatcaaatctttagcaaatggtcaatatacaatcaacacacatctagatacaaagatataatttttttttatttttatttaccgagatttttaaaatttaatataaaatatgtaaaagctaaataaatagataaataataaagaaataagatcatagtttttacgtgattggcgcattaataggcattagtttacgagtcaatattattaggttaagactagaaaagctttaaattttatacaaatatttgaaccctcaaatttaactgagcaattaaaaaatatgattctaaccctttgcataatattaaatatttatatgcatatataaatctacactaaatatagcaccatataaaaatataatgtaatataatttaatataataatatacaatataatatgttatacctttttaacattataattataatacaaatatataaaacgtatataatatatattaaaaaaatatgtatctttatttatcattattttttttctcgaaagtaattttttatgaaattctccaaagtaatttgattaattgaaataaaaattttagattaatgcatggcctaaaactttcaaaaaataaaaaagtggcctaataaattattatgtgtaatatagttaagaaaaaaaatatatattatgcactccttaaaaggcagtcctcaaataaaataagtaaatgcatttattggatatcttgggatagattgagctgatctaagtggagcggaggcatgggatttcgaaatttgaaggactttaacttagcactcttggaaaaataaggctggaggctcttgactcggagtaactctcttgctggccacatttttcaagcaaggtattattctcatggctctatcttagatgcctcccttgataacaacccctagctttatctggagaagtatcttagaatctaaacaattggtcaaggcgggggttcgatggtgtgtaggtaacaaaagtcttatcaatgttttatctcaattgtggctactcgaccctgtgcatccttgcgtgcaatcgacacactcggtcctttcaacggcaaaggtctgtaacttgatgagggtatatggtggtagctgggatgagaaaattcttgaggattatttatcgagcgtgactgtaaattgattctcagcatcc

SEQ ID NO: 6870 - DNA, 1585 bp, Cannabis sativa
gtaaaataaattccaacaattctcgctaatctaccaagcgggtgtggctagatatttatgtctagatttctatgtcaatattttcgtgctttcattgggagccacaactcaagaaatcacttacaagatggttgcaacatggtcctcaatgttgaaagaagaactacaataactggcaaacagattaggggtatgccagtcactagagttggtgatgggactgcacttgcatcacagatgccaagtagatgtcttaaaaccaacttcagaactcatctggtaaggccaccaattgctactggtattgaaactagtgaacaaattccacctaaggaaccacatgtgtggaactagaagacctcgaggaggccaatcctcaagttgaatagcttagccaaaccgtggatgacttgcaacaaaaactacaaaatcctctcgacaaataacacaagcagtttcagaactggtttatggagaattgagaaggaacaacgaataactaacctatctcaacaattcacagaagcttattgctctagttgcaagactactcctcataggggtatttctgagttggttagagagaatccccatcggccaattggccacgtgggaacaagtactcaaggggaaacccttaatgcacggaatactactaccatgcccagtaaccgtgcaagtactaagcaaacaacaggtattgagcctccctagagggaaacaaaccttgagcaagagtttgaaagggctcaagcttaagcacgctaaccaatgggccctccccctgatgtggaatgaccacaaactactgagaaaacaaatagaactcctccactaagctctccttgtcgctctaacaacatcaggcctcgagacccttcaaagggaaagggacttgctactgacactaaagggggaagtcaaagactctacttcaaaactggaggttatgagatccgacgagtaaggactaatgaatcgcttcatacttgaaagtatttttgagatgagagaggtgagttgtgccattactttgtccatggccccgatggccaacaatatgagtacttccctctagtacatggagaagagttgaacttgagcaatctattcaattctcttcacaattgtgatcctattgaagactatttcgagagaaatagtcactacaatgttcagaatgactgctctcgcagcacatcatcgcaagacgacctgctctttaatccaaaaaatcaccaatgttgccttcatgaccccgtggtcaagagacaaaaataagacataagtcgacaggggttcatgatggacttggaagaccgagagacttgcatggcaccttaaccaagagatggttgtagaatttgggagcttctagcgctaaccttgattgggtagaaaaagttcctattgggacgaaaaccaccaccatggtgtcaataggacagagtttgacaatctagcagccttggtgaaaggaagaacgaccccaaagctgttaaaatttgaaatggaaagggagcgacgtcactgctcttagaccgaattaaagatctatcgatccctccatagttcaagaatcctt

SEQ ID NO: 6871 - DNA, 781 bp, Cannabis sativa
aaaaaaaaaaaaatacataattaaaaaaaacaaacgtatctatgcacaacagagttttttctatgtgttgtaattttcccctcaacagtcaagccaataaaaaaaatccactcaaaatatcaccataaatattcatcaaaatatttcactattatatgttatcatgttgataattaattgatagttatgtctaatttgttgtctcaaacacaatattacatcatggattttataaattaaaaattaaatgattttcgttattataggtggcagtgtaacaactcagagtgtcatcacatcatctgatttcacaacagattcattaattgatgagtctaaaaaacgacggttcacatattctgaggtgataaaaatgactgataattttgaaagaattcttggtagaggtggatttgggactgtatttcatggttttatagatgatggtactcaagtagctgtcaagatgctttctcattcatcggatcgaggctatcagcaatttcaagcagaggtatacatatgtttaccatattgttagtcgatacattttaatattaaaccttatacaatatgaaaaatgacttaaaaatactctttccatataaactttttattgaagaaaaaaaaaaaaccctaaacactatatgtactacttcatctacatactgttatctaatgttaatatatatattgtacttggggccgatctatatatatttcattcattttggagttatatacaacattattaatggtcatttaataatgaaattacaat

SEQ ID NO: 6872 - DNA, 1426 bp, Cannabis sativa
agctaaagcaatgaaacaagagaaatgtaccttgagctcagatgaagctgggtgccattctggaggaccagcctcagtaagaagtcccattgcaagcggagaagcactgattacgccgacacctttgctcttcaagtatggtattaaatcatccaaggttgaatcattaacactatagtggcagtatgaaagaatcacatcaactgttcctggtggtacccgatcaagaacatatgtaaaaacttctaatggaagcccagtaatgccaatgaagcggattttcccagcttccttcagcttttgaagggcaggaattgtctcattgacaatctatcaacaatagaaaaccaaagatctgagcttaataataaccttatatcacatttcataacattctgagaaatagatattgaataacaaacaccaaacaacccaagttgatataaagtgacatactaaaaaaaaaaatccacatcccacatgtacaaatctaaaaattcatagaaacatataagcacctgatctagattgccaaactcaatgtcatgacattgaagtatatcaacataatctagctgcaatcttgccaagctctcatcaatgcttttagtcactctctcagcactaaaatcaaaaccctcagcataccttccacacttggtggaaacaatatactcatttctagggacattaagtgctttcagtgtcttcccaagtaccttctctgacaaagtccctccatagtacctgaaaagaaagaaaaacaggaaaaggaaaaagaaaatagtgaaatttaaggaaagagaatcttttgagtaccaagtttctattgattcctaatcccaaaggcaatgaataccttcaactttacatttcttaaacaagcttagagtagtacatacggagaggtgtcgaagaaattgatgccgagactaaaagctagacgaacagaggcgatagcgtcgtcttcagagactggaccgaagacattgccgagaggagaagcaccaaatccaacgcagctgagcttgaggccagtgttgcctagggttctaagctcaactttgcctagtgaagaagccattgtttcagcacaaaactcaaaatcaaaatcaaaagtctcgagaattttccgggaaagttcgactgatcagaggaactcaaagaataaaggagttggtacggtacaatgtcagacactcgttatttatttatttatttttatggattttctcttaagaaagacattaacttaggtaccagatccaatctaatatatatttttattatatcatctaatcaaattagtaattagattaaaaaaaatgactataagatccaatctaattaccttaaaaaaaagtattcaatctaattacctttcaaaattcactctgatctagttagtaattagattatctagttt

SEQ ID NO: 6873 - DNA, 577 bp, Cannabis sativa
gactaaagtcgagtgctcccgtaaaggttgtggatttctcactaaattcccgaaggtctcttagaatgcgattagctgagctataacctcgtctcgcggaggctctacctgtacatgtaagactatgaacttagtagctaggctttttaaagtacaacatcagggtttatcctccacgatacaccatagtaaagagcatgcacgtccaatcgtacccgcctaagttatccgacgaccactgacaagggaaattcaaaaaggaaaaccctgggatgacacatgtatgatgcctagcctgtacaatctgacacccttaaatgccagatggtgaaaaagacacctaccaaaccaaccgttggatctcgtccaaaggcgatcaactcaagctagcgcatggagggaagctgacctataaatacccctccatttcataggatagggagaaacttggaagataaaatggactaaaatgaacgtttaccggccaatgagcctaataaaatggactcatggtctaaggatagttaacgcctgaaccacataaagatctcatattagttatttattttgttatttt

SEQ ID NO: 6874 - DNA, 1061 bp, Cannabis sativa
gtataagattaagggaactcgataaaatagaaacaattaaatttaatctcatatatataaatgcttaaaaaaatatggaaacaagaaatagaaacaactagtattatgtgggtctaaaatagaaataactagtattatatgagcgtgtgtgaaataaaaataactagcattaaaaataaaaacaatttaacctcaaaatgaaaaaaaaaaaaatatgcatttaacctcatattacataaaaaaaaataaaaacaactcacattgaaaatgaaaacagtttcatctcaaaatagaaacaactagaatttaacctcatatgtataggagaaatagaaacaaatatcataaaaaataaaaacaacgaaatagaaacaagtcaaatagaaaatggaaacaatttaacctcaatagaaactagtatttgaccacatatatatatatatatgtgtgtgaaaataaaaacaaatgacataacaaataaaaacaactagaatttaatcatatatatatgtgtgaaatggaaacaaaaataataaaaaatggaaacaaatcacataaaaaatataaacatcaaaatggaaatatctcactttgaaaatagaaaataactcaatggaaaatagaattaacaacataaccttaaaatagaaacaactactattatgtgagtgtgtgcgtgaaatggaaacaactaacattgaaaaatattaaaaatggaaacaatttaaccccgaaatgaaataaacaacaagcattttacctcatattacataaaaattgaaaataactcacattgaaaatagaaataatttcacctcaaatggaaacaattagaatttaacctcatatatatatatagaaaataaaaataaatatcataaaaaagaaacaagtcaaattaaaaatagaagcaactcaaattaaaaatagaaactagtaatatttaacgacatatatatgtgaaaatagaaacaaatataataaaaaatggaaacaactagaatttaattacatatatttatatggaatggaaacaaatatcataaaaaaaaaaaaaacaa

SEQ ID NO: 6875 - DNA, 1267 bp, Cannabis sativa
ctaagatcttggggtgctcagatgctgggtgtttgtactaattaaagtaaattgtttctcttttccttagagaaaagaagctacttagtgggtctttagatatatagttgcatgtataattattattttaatttttgagagaggatcttgtactcttttaatcactgatttttttaattcatgaaagctgacaatttaggtgttcattgtttttacttctgttttcactttgccatgtatatcttttatatgttttacttgttaatatgacaggttctggattttaggagttggggctggtcaaggattgaggtcaaggctgggaatgatttgccatctccagcaacagtagccccatgtgcgggccattccttggttagtataaaacatcttattagcatttcttacacttctgtgcgcaaggctctgtagttgtctagctgatatgatttctatccatctttttctccttttgttactaaaatcctgaaactaagccaactttcaattctgctttttacttacgccaccattccaaatattctaattcatacttttgaattgtttcttggttttatagataccttgggagaataaactcatgtcagttgctggacatacaaaggatccatctgaaactattcagggttggaactactttcattcttaagtactttgctattactgaacagtctctgtgctttggtgatttcttgtcctatggatatgatgtatacattagtttttagaatcaatttatcaatcatagtgtacaagaattaatgtagtcattagtcaaacttttgcgttcacaatgaagttctaacttcataatataactcctagacctagtctatctttttatgcaattttccttaggattgtaacttttgctcttctcagtaacgactttgatgtaatgtttctcacttttctttgctttcatactagtgactcgctctttcctccctctatttccttttctatttacttttatctaatgcattattatttctttgcccttgcttttttatgacagtgatagcatttgatctacagacaagcagttggtcacctttgaaaacttatgggaaacccccggtatgaatttattttcttgagaacttatatctttgtggggaagtgcacataagacatatatactcttgggtcaacttgagttggactctaatactgcctcttagaacttattcgtctgttagcttaataactaaatgtggagatattttactggctgtaagctggc

SEQ ID NO: 6876 - DNA, 715 bp, Cannabis sativa
tattatttctctctccattttttaatgactacatttaagagtaatttttttttctttttcattgagttaccaaaaagtaacttatattttacaattaaacaaaatttaatatgcaaactaaattcacgagttactaaaatacactttattatccataattaaaatttattatataataacaaattaatttctacaataaactaaagttaccaaaattttaagtaatattaagatatcataataaattttaaaataactaattggtcattagtttagatgtctaaaaaaatttacaataaattatgtgatttattttactttattgcaacacattagtttcttaaataggattgaaggtaatataaatgttattaaaaaaaataaacatatagttttaaaagtaactaatctaaaaataactttgaaggttactcaaatatattaatataagttaaaaatgattaattgagtattaaaatttatacaaataaatttttgaggtaagtaaaatgtatttcaaaaccaaattatataatatataaatgattttataaaaaaaagtaacttattgattttttattagtatcataagtaactaaaaagttacttttttcaaaggtagaaaaataagaaaaaagcaagattttagaattatttacatttcaggtatattagtttgtaattaaggcagattttaatgatgtggcaaggtatt

SEQ ID NO: 6877 - DNA, 832 bp, Cannabis sativa
tgcaaagttctcacgatttgtacaggtattattgaaagaaggagattgacagaaattttatttaatatatgtctataatatatttgattttatatatacattatatatataatgtaacagaaaaatatgggtaaattaagaaaatacttagaatcctaaaactattttatgtaacagaaaaaaaaatgtataaaaaacatacaaccatagaaagtatatacctgtgagatttagtgtgaacccaccacctaacactaacggcaccaccatcaccaccatcgacccttcatagaaagcatatacaaatacaaccctaaccctgtgcgcctgtaggaagaagaataagaaaataaaattttcttagtcctagaaaataataggtcccaaaatttgtagccttctttcattaagaagaaaaatattcctcaaccatagaattgtagatgctgccgtgagaagaaaggagaagaagagtttataattttggattttttttttagaaaataaaatagtggctgccgtatgtggtaagagggaaaaatagttggaagaagatcttgaggcgcctaacctctactggaaaaccctaatattgagtgtgaggaaaggatagaaaggagggaaaaattgttagggtatagcatttagggattatcttgggctgatcttacctattgggttgggttgaattgttagttttaaaatatagcatataattgttagttttaaaattttaaaccaaatgaaattgtaaaaagagtaatttttaaactagattagttgggctgggttttgtccaacattattatctttaggctaattagtaattttt

SEQ ID NO: 6878 - DNA, 705 bp, Cannabis sativa
ttaatagcatataaaagtgacatgggggcataaaagtcaacaaaagtttaatacttggacataaattattttgattctatatgttgaaattaattatttcacttagagaaataatcatagttcctcatataatttaatatgaatcctacttattttattttatcgtaaccatttatataaggcattaccttataataacggtgggcgtcataataaataatagcaatgttcttttagttaaaattaaaatataggaaaaagatctttagctgagagagtcaatttctgtataaaacccagaagctttcataatattggacaagtttgggtttgggctgtctgcttaaggccctctttgcgagctgtgttagcttacttcaacctgaagttacagaaataattaagatcaaagaaactttaagttgaataaagagaaaacattaagctaatgtcataattgagactaatacgttagtagtagttcaagctataaaaagctttattattatgcctttccagtttaaatagattgtcgcattttaatttcttctttaaataatgtgtttttaacttttgttaaacaaatctacaaataaagtagctcattatattactaaaaggttttatttttagcccgattgtaaatttagtgagattcatgatccttctcatcttcaaactattgttactactgattgtctttga

SEQ ID NO: 6879 - DNA, 845 bp, Cannabis sativa
tgaggtaaaagaaaattattttatattgttgttttttttctttcggttatgatgactgttgaaaaaagcttgacaacactttttttttttcttcatattattgtttgtcttcgagtttcaatgtattaatacatttagtattaatttatgttaataaattgtgtaaaattataatatattttcaataaactcaatctaaacaccaaccacggtccaagtaaaattacaataggttaatgaaagattcccacattcaatagaaacacaagtttgaagacaaacatcatgaaagaattattcatttgtgggagattcagttaacatcataatcatcttattattatcactcgtggttagccaatgtataaaacacactaactaatattcaacatttgaaataaaaccaaatggactgacttgactacttcttacacaagtgagaatgaaattgaaacctgaccaattgccacataaattgtgcttagtctccatcaacaaaaagacaaaagcacaggaccaaaatcaatcagctaggatattatggatgataagattaaaagaaacagaagtccatcgtcctcatcctcatagcttaacaggctatgctgagaataatcgtctttaggtcctagaaaccaacaaaaatacatttctgtcgaatcattttccaagtcttccatctcaggtgtttacaatttccctaagcgcatgttaatttctactacaggtccaagaacaaacgtaccctctcatgcagtgatgatttcagaaatggccaatgaaataccagaccgggggagacaggaaacaacattctacgcctctccattatgctgcaaccaaat

SEQ ID NO: 6880 - DNA, 778 bp, Cannabis sativa
tcttattttataactctccaccccaccatcactcaggcccaatcttaaacatatacggattaggtttgtggctaaagctcacctaagttaggaatctaaaaatatttcttcattttaaattacacatttttttattagttttaaaaaatgccacatttttttttttattttaaataagggcttaaaactatttttttatgacccgctttatttcaagatcggtcctaccatcaccatcgcggcctcctccttatgtatgcaaatacctctctcaaccatcaaagccatcgtattctaagttgccttacataggtaataaaatatagggaaatttacaaaaatattgaaatttgggttaacttttacaaaaataccgtcacacggaattctttttaaaaatactgtgtttttataaaacacaaaatagaacaactcaaaaaaacagtagaacaactaaaaaacaccagtataacaacagtgaaaacttaacacaatatactgtagtatgaaacttataaaaacacacagtaaaaaagtaaaaaataccgtctgacagtatttttgtaaaaaaatagtaaaagttagtaaagcatatagatttccctacaatatacatgtgtaagtaaaaatgtacttattatgtagttgtgtagtcataaaagcaatagagatagaaatccatgtcattaataaacaaatccatcaccaccactactaatgccaaattaacaatgtcctggttctttgctctccagttaaaagaattattttttatatt

SEQ ID NO: 6881 - DNA, 818 bp, Cannabis sativa
actgagcattggtatgtgccacagtcaaacagtaactaggtgaatgaggatgttttgatattcatggaagaccaaagttatgggatggccatggtagcacatgatgataagggcttgctgatagaaggatgtacaaagcttttcaaaggacatgtttctgccgaattagttgaggcaatgagagctcgagatgagcttagctggatcaaaatcgacccaagaaaaagagtggaggtggaatctaaatgcatggtattgatataagctttataaagttcagtcacgaatatgttttctaagtttagaatagttattcaaaattgtaaagctttattaagtgaattacaaaatgtgcctatttttttgttaaacagtcagctattatagtagctcataactttgctggagtatcacttttacatcctaattgcatctttagtttgagagatgttccaactaaattgcttttttttttttaatagcaaaatttgatggtttccattcataaaaaaatgataaatcattaagttaaaatggaagttagaaattacagtaggataaggtatagatttctcctaaaataatacatgtaaatataaatgtgaaaatttataatatacatctgagttgctttggtaaattctttatctgttttagcattcaaaatagtttctatgttcactttttttataattgtgcacattgtacttatttaagatcattggtaaattaaattttttttggtagtttacacagcgaaaaataaagttcaaatagttactttccaagtgtatacaatcttaaataactacaacgta

SEQ ID NO: 6882 - DNA, 1863 bp, Cannabis sativa
cgaatgtctactattaatagtgcatgtgcaaaattaagggcatgtatcaaccaaattgaaaataaaaatccaagtggtgcttcagctaaagatattgtaagtgttggttattataatttatttattgttacgattttatttttcaatttttattaacgttattacttaatttatattataacagttaattcaagcgaagatgttattagcccaagataaaaaatacgacaaagattttaaatttgatcatgtgtggcatatcttcaaaggtattcagaagttttcaaatgatgacaacattaatgcaccacgtagattctaacatgaaggtcctagtttcacttcatccaaatcatcgtcttacaattttgagtctccaatatcagcatccactggtatgagtttatttaatccaaacatgaacaatgaggaaatcaatacttatcgaacaaatagaccatgtggtgtgaaaaaaacaaaggaaaaataattaggtaatgatcaattccacaaactaatagaacaaaataaaaaactcattcaaggtattgaaaaaagtaacaaggatagaaatgaacgtcccaaaaaaaaggataaccaaaaaattttattcacagagttgaaattctatatccgatctagagtttcatcagtacattcaaaacgaagaaagacgaatttacaatgaaagagcataaacatttgaaattggagaacaaggagaaggatctcaatatcagggatattcatatcagtgatttcaatattagggatcacaatatgagggatcacaatatcgagcatctcaatatttgggacatggcgttgaagatgaaggccaacgatctcaagatcaaggtgaaagagctgaaaatgactcacaagtttatagtccatattatgtctctctcggtggatcacgaaatagtcttatatattatctcattttatttctgaaagttcatatgtacggtattattttgccttttaatgtgtttggtgtatttaattttaatttttaaatgtatgtttaagtttgtaatgcttttattatatactattgactgtgctttaattttatattgttctgtgacatcatatttttattaatcaagatttcacatactttatattacataatagaacattataaaattaaaggacagtcaatagtacataataaaagcattacaaacttaaacatacatttataaattaaaattaaacacactaaacacattaaacgacaaaataataacatagatatgaactttcagagataaaatgagatacaacaatttaataatatgtaagactatttcttgatccgccgagagagacataatatggactataaacttgtgagttatttttagctctttcaccttgatcttgagattgttggccttcatcttcaacgccatgtcccgaatattgagatgctcgatattgtgatccctcatattgagattattttccttgttctctaactttggatgtttgtgctctttcattgtttttcgctttgaatgtactgacgaaactctatatcggatatagaattcaaatccgtgaataaaattttttggtcagccttttttctctgatgttcatttttatccttgttactctattcaatacttcaatgagttctttattttgttctattagtttgttgaattgattattatctaattgtttttcttttgcttttttcataccacttggtctttctgttggagaagtattgattttctcattgttcatgtttagatcagttgtcacagggacaaatttcactccccaaatttcccttgcgatggcctagattaccacaacctagtcagccaacacaacacacaa

SEQ ID NO: 6883 - DNA, 778 bp, Cannabis sativa
attcttttatgtttattttttttttgtgaatttgatgcatacattaaatatcattgttaaatatgattagtgtacatatatatacataaaagtaaaatttcgaagttaatataataataatttaattagtatttaacggtaatatttcaaactaacactttaaatttataaagaaaaataaatataaaagacactaaaacaaataagagagtcaaatatataaaaattattgaaatatgaaagaatttttattctgtgctatatatgtgttgccaatttgataaggtggaatgtagagacacatccacaatagaaaatatagacagtgtgtactatgtagttgttgggaataattatcacgtttataatttaaactttatattgtttacgagatagttgaactagtttggattttacttgttgcatttggctgctttggtagattttttcttctcttttctttgtgaccatatatataatataatttttttttgttttccgttaggattttatatatataattaataccacagccacaaagcgatgtatcattgtttgtatatatacagatccagcatatataattagtttatgtcatcaacctatatattcaacaagtaaatagatctatctatcgaagcaaatggtatgacacacacacatataattaataattaataattaatctatggagaataattaattatgtctatctcaaataataatatattatatgtgtaaatatatacatatgtacaggggtcgacgtcgtcagaat

SEQ ID NO: 6884 - DNA, 962 bp, Cannabis sativa
aataataacaatattgttttcatagaaaagaaagttaaatatgttaccctctaataattaacaacacccaaaaaagatccaaatttattacaacaacatcatcaagagcaaataattacacacattttttacactgaaattctacacttttctcaatcggtcaaatgttaaaaagaacattatcacctaaataaaggtaaaatttcggcgtaaaaagtatgtgtgcacatatcattactcgacaagattatttggaataattaacaccagaagttgtggtagtgatggcttgaaatgaagggaagagtgcttgagaaacacaagcttttcctttggggaaaatagggcattcaatgaagtttgaggctgaagagtccacacataagtaaacttggtaaagcattgattcaccatctgtgtttttgtgacatgataatcctggtgtgtacccaacttcattctttattgcctctttgatcttctccacttcataaaactttccatttggctctattcctataaatattatatacaagtcaaaattaaatttaacattagtagtaacatatttatgtgaaattcgatactaaacaatttagatacctgattttttaagagcttgaagaaggtctacactgtttttaaggttaagacttgcttgaaaataagcatgttggtcaagaatagactcagagcaagttccatgtttgttccattgtatttcccaaagctcagttccatcattgcttggacatgataaacttgtccattcttcttccatagactttatcaaatcagatatctacatacatatatacattaatttgtcaaaccctaatttcttagtataaacattttctgttcatgtcaattaggtaaacacgaacacaacacaatatagcacgaaatacaacacattgatagatataataattctcggggaaaatgcaactaaaccctaa

SEQ ID NO: 6885 - DNA, 643 bp, Cannabis sativa
gcaactaacggagcgatttaaattgtaactaaaaattgtataacaactcacatggaaactactgaagaaactactttagaaaaataaactataaatttgaagaaaaaaaaattaaaaactagtatataaggtaatttcctataatatattattaatactattttcttttttttctaataaaaataaaggtaaataaatttaatttataattaaaacaaataatttaattatagtagaatttttgaaagttgttatattattagagtttttagaaatgtgtataaaaataatataaaaaaaataaaataaaatattacatttttaaataatgtaaatatttttgttcttaatatagctggtttgaacatgaatggtggagatgagtttctcattcgagaaacgtggtcctcagtcaattacttggactttccacgtattcttttttatggtcaactgaggtcaactattctttcttttactttttctctttttccaaaagaattgaagcattgaccttctgaaagactgctacacagcgccatcatcaaccgttcaaatctaaataatgggtttttcgttggagtgtactgatacatttttatgaatttcagtatttaaaaaaataatttagcttaaatttttt

SEQ ID NO: 6886 - DNA, 1361 bp, Cannabis sativa
tcaatcctcattgcatagtgtcatgtagaggcaatttaaaactaaaagcttatactttcaagctccaataaactcgagattactattgatctcattaataaaataatctagtattaattctattattactccactttaaatatggaatgcactcttagacaatataaaattatacttacaaaattcttttttgtagtccattgatataatcaataccaataatttatcatccaatttattaattcataattaaagctagtcaaaattactacaaaaactacgaacatcctaactcaatttctattcgtcttcctttaaaaccaagaatccacattccacacaaacttaattgatgtgatgtgatgtgcgatctttaattgttttaagatcatgaatgcacattattaggcattttacattatggaacaattgaaatacgattacaacaaaatattatttttcactaccaaaaaaacaaggctttgatttagccattgtaggtgttggagttggagctaaggggtgccaatgagtcaatgacagtgatcagattttagaggttagtaggagctgtggaggcattcgaggaactcactgaaggtgtccaagaatagatgagcaaacccataacaagaacaatggctccagccacaaagccttttggcagggatgatgccactccaagatatggaagtggcagtgtaaagagatacacagaaattggtactgccatgtatgaacatattgattagtataaaacaaattcccacaagaactaaagcttttattaaaagataataaagcccacaaaagaagctaaaataatcaagcagttctataacattttaacaaataatggaacaaaactttgtggcaaccttttaatgaaatcttgcaaaatgctcaaactgagtcgatcaactcaatagtacagcataatttccgtagtatcataactatttattgctcatctgtagcatcttattaagctaatcacaataatatctaatgattttagactcttttagaagttcaaacccttcctcaggttcataaatccaattctcaaatccattttgagccaaatgtgcgagttggtagtcattggggtgttaaacttaacaacttaggatcaaatctcacctttttggccaaactcaggctagtgtgatgtgggttgtgtaagtggtaagagagagaacattaaaacagtttgagcatcctatatagcttatataaccttttcaaacccagactgaacttgtagtttggtgagcaaaggattttcctaccgtttcatccttttcactttctaaacttgtgtttctttttccctgtctacatgtaattctctctcaatg

SEQ ID NO: 6887 - DNA, 774 bp, Cannabis sativa
aaaatgaaaaagccccttaaattttgacataagtatttgtattaatttaaggaagtatactatatagcactatatattcattagaaggttcatatcattttaaaattttaataatctatctaataactcaatattatatattttcactaattttaataaataaaattttgataataaatctataaataaaacattcattcttccatttaatttttttttaaaatataaaatatgttggggttgtagtacttcttggggcgtttctggctctatcgcatgagtttgattactgttcttgttctatttatttttatagtattatgtttgttgtttttactttcaataattgttacactgctttgctatggttagtgtagtagagtttgtttcatttacagtaggagattttagccttgtaaattggtggatcggtggtgctacatcgattagctcatgtcacttttgcatggccggcatgactccctctttctgtagtcaagtctaagagatcaccagattgttattagccctatatcttgggattcagtctttcattaggatcgtcatttatatggttggtcgttttattttcttctattaattcttgttttaataatagagttattattacctaatcttttttgaagattttgactgatagttattgataagattgatatgtcactggttcatttaagttgcaaacttagtattctttacactcaaaaaagccctactggcttggctttaataaaattcttttttttttttttt

SEQ ID NO: 6888 - DNA, 1121 bp, Cannabis sativa
tctttcatattatactaaattggagaattgataagtgcaactccaaatccaatttatattgaaaggtggctgtcaaaaaatgggaccaagtgtccaaaaattgttaacttttcaaccttaaatataaccttaaatataagatataaggagctacgcttctgtcattttttttttctttcaattagttagttttttaatattttattttaaaaaaatagaataaaaaagacattcaccaatgtaactagggttggagctagcctaatcgtatgataccaagtactataaagtgtggcatattattattattattatcaagtatcatataatttaatttaataaaagctaattaaaatttttatctctgaacttcgacatataacaaatatcccttaaatatttttagtcattaaaaattcattatgaacttttgagattattgtattgaaagatttttgtccaatttcatttaattttactaattcgataattttctatgtaataaattatgctctcaaactttaacttgtaccaaattatatcccttaaaactttcattcatgttaaacttcccttattaaaattggataaaaagtcattaaatccaataatttaaatagttcagaaataatttttaacggtcttaaaagtttaaaccaaaagtatgatttggtatatgtcaaaagtcgaaaacaaaaatcctaactaatttttaataaataatataagaaaccgctaatcaatatcacaacgtgccgtatcagtatgcatgtgttaggcggcataaagtaactaataatgctcatactaaaagataataatactgtttttcttcagtagagaaactaggtgactcgctttatagaatggtacatcattaatcgatccactctcacctctactttaccaggacttcaatcacttatttataaaaaacttaaccatagttcatcacatagcttaaaaatgtaggaaggaaaacatgaacatacacatatataataaaaccaatagattcaagagatgaagtcaatcttgatcccatcgatcttaactttgcccttaccactcttgggaactaaagtcactttcaccttgtcatcatcatcagctccgatatc

SEQ ID NO: 6889 - DNA, 631 bp, Cannabis sativa
gcattcttgactgaagatctaatgtaatgatcaacacgatctcgagatgaatcgacgaccaccacagtcatgtctctcttatctttccctttactaccactcccaccttcagtgattgtaaaatcctctcccaaaattctcgaagcagacaaagccaaaggcaaaagattctcaatctgagaaacattacctttcaagaaataatcatggtaacgaagcattctcttttcggcccagcccaaaatcgagcccaacacagacgacaatatcttggcccaaaccacatccctatccagctttttagcgtcgcttgccacctcagccaacatagtgtgagacgcatacagcagatcctgctccaccatagccgttgccacgtattggtgaaacaaaacccacgtgaaacacacgttgtggatttggcgcgtgataccaagcgttgaccaagtcttcttcattaactccaaaagctcgtccacctcatcaaggactaaagtctcatctctcacgtcgaagattgactgaaggagtgccacgtagacgtggacgttgaccgggaacccgtcggcccagtgacaaacgtcggtgggtgttgacccgttggggctccgccaagaaagcgagacgacgg

SEQ ID NO: 6890 - DNA, 1233 bp, Cannabis sativa
  modified_base (791)..(798): a, c, t, g, unknown or other
tccgtatcacattcattaattatcagatcccataatatcaaaacttaattcgcaggatcatgtccagaatcatatcttccaaatattgaaataaagtgtgttaatcaagcatttatgtatctttattatccacaaaagtaggacacaatttgacaactatgaacatgatgtggcatccatatcagcagaagatcaatgcctcatgggccgtgcttcgttaaatgagcccaaagtcaatgtattatttgtatttaccccatcagtgggcaatatgtacatactagaatcctaacactataaatagaagaaaattcattcatgcaaaggggttagaatctcattactcgagtgctcaagcaaattctagaattcaaacacttgtgtaaatcaataagacctttttcagttttatgatattgactcatgaactagatgtccttaatctttgtaccacgtaaaaactctcatttcattattcgtttattatatttcattagctttattatattttattagtttttaaaaatcttgataaacaatgaaaaaatagatatggtaggttcaatttttttatatttattttttattaattataatataaattaaattcgagaaaatattgaaaataaagataaaatagataaatatgtttggggttttagacggccatctcaccacttcaatcataaataattttatttttatttatttttaaaattagtatagattgttaattttgagctaattgtgtggttaattaattttgttaactctttttatatatatatatnnnnnnnnatatatatatatattaatttttcattaaattggattgacttctgttttaaatttcttattttgttaatattcagtaatttttttatttattatttctttattgttattaaaaggtttttaattctttctaatctagtcttgtttttgtgcaagttatttgaatttcttttcttattttacttatatgttatcactattattataatttactttcatttttatttttacgtttttacaacttatttatgttttgtatttttataaatatatatttttatatttggctagtttgtgtcttttttagctagtttgtgccaattttggctagtttgggctattttactcggctattttgttccatattttgattagtatatgttgttgatgtgtttgcgcatgaaggcaacctgaaagagtcacagataagttttaaat

SEQ ID NO: 6891 - DNA, 826 bp, Cannabis sativa
acaagaagctgatcttgaacaagtaataaaatgtgctgatcaggatgataataatgaaggtggtgatctgagtcttatcaagaatagtactactactggtactacttcattaattgatgatgattatgatgagaatgaaaaagacaatgatgatgatggttgcagcgattacattttgagtaagcaagaagcgagtaattttgatgaagagttgataagtactgatgaactcaacaaaaagattgaagagttcattaggaaaatgaaggaggaaatcagggtcgaagctcagcaacaacaacagcaacaactaatagccgtttaattattcataataaggttatttacaaatttaattttactaataattatttatattgtatctttgcatgcatatatgcactagattgagtatacgtgttcttaagtcttttgaatttaattatagctagtgtctttttctacttcttcttcagaagtactacttctttttagattagtgcttttgaggatgtttcaatgatcaacatcatcattacgtaccaatatgttaaatcaatttcttagttgtgttttaaaccaaattccatatagttctcatatttcaagattttgatgtaattaagaagtttaattatgatttattatttatttaatgtgtgacgggagttttgtagaaagaactagaaaaggcaagactcgtctacgtaaaaaatagggacataaaatttacagcaataataataagccgtacaaatacaaaagaatatgatatatctatcaattaataatttgggttgtgtgaggaggaagcgtgattatataa

SEQ ID NO: 6892 - DNA, 720 bp, Cannabis sativa
ataccggccttggatcgtgtgaccattgtatgagtggactggggtggtactggtttggggagttgtggctgctggtatgtggtatcgggtggcaaagttgattgggttgttggtgatataggtactgatggtgactgagaagtggtgtgtgggagtaatggtgacatggatataggtgagtgggatgagacagatttgggagtttgaggagaattattctgattgctggatgtcacagatttagtgcctggccgtgaaggagatcgttggggaatgggagaacaatgagcagtatcaacttcagtagcagcttcttcaggtacctgcgagacaaatggtaaccactggctatattgtatttgattagaacaagtgttgatgtctgaagttttgaaatgagcaacagtaaaatcagatgcaaatggaaaatctttttcattaaatgtgacactttgaacaatgtagattcggccagatgggtgcaaacatttgtaccctttgtggttgggactatatcccaaaaagacacacttggtggaccgaaagtcaagtttatgttggttgtaggctcgaagatgtgggaagcatgcacatccaaacactttgagaaaatgcaggtttggttgaactctaaagaggacttcagtaggagatttatgatttaaggtgggtgttgaaagatgattaataaggaaagctgctgtactaaaggattcccac

SEQ ID NO: 6893 - DNA, 815 bp, Cannabis sativa
tttccatgagatcacttttgctaataaagatgccatgacacagtcaaaacagctaagtttatctttagaaagcatcgatgcgacatcaatacaggtaagattactcctatcagtttctctatacactatcttttaaaatacaacaaaatatatatatgtatatatatatatatatatataatttccaccggcggtaagtgtttattttttgtaatcgctcagaccgcaccgttattttgtggtgcggttttgaggtcttgtttggaaatatgctaaattagcaaaaaccgcaccaccacctctacccaaaaccttataatcatggagggaaaaaaaatatatgtgaagaagtggaagagtgagataaataagtggggaaaataaggaaaagagaaatgtggagagagaaaaaaaatgatgaaaacgtgaatatagtaagtactactagtgatccaaatttgaacattatcttgtgaaaccttctagcatggtgactacaaaacctgactatataatataacaatcgaacttgcactgaaaaacatgaccataggataccgaactaatattagaatttccaccaataaggggataaggagctttattttagtgtagctcacagtcacacttactgtaaaaagaaaggttttaaatattgttgtataaaagatgtcctatttgtacattttttttaacctcgttcatttttttttctttaatgattcaagatttccgtctattttacaagttccacttatcatcaatcattgaatctaggtactcaaaattttaacatttttcctgtttattgcaca

SEQ ID NO: 6894 - DNA, 763 bp, Cannabis sativa
ataacatgcattgaataaattggtgaaaaagataacctacatgcacaataaataaattttgattgcatgtgagattaggtaaaattgaaaaattatgtgattttgtattattttgtttcatcaataatttcatttcattttattttctataaacaacaaccatattttttatattttgttttaatggacattacctacttgcctttagtattttgacctaatagcttggataagaactattcaaagaaagaaaggaaagaaaaaaggtcaccatcataatcaccaaatattccatttgttttttcttttttatttaggatttattaatgtataagtttttttaaaaaaaattaaatgacactaataatatctaacatgtaaaatttgtattaatatcgaattttatatattttaatttaataattattatatataaaaaaaaaacatttatgaaaattttgtaaattattctttcatatttttatttttttattttttttaaaagcattccaatgcattggaattcaatgcgtaaatcataatagaatgttttacaaataattatcaaaaaaatattattttattgattaacattaacaaaatacatatttcatcatttactataattaattacttttttttttcaattttcaattttaataaattggttaaaattacacctggattttttactccattcaatttcaaaatttaatttatgaatttttgaaatttaatgtgtcaaattatatattctaaaaaa

SEQ ID NO: 6895 - DNA, 1697 bp, Cannabis sativa
aataaatatatatatatagatatttacttgttaattaatttgcattatgcatgttttaataatcatataaattcattatataagcaatgtcatatatatatatataatatagcgtaaatactattttggacaatgtgttttacaaaatagactctatatatatattataaaatggtaaaaatagaactctgaactcaattttcaacaattttatttttttaataaaactaactttaagacaaattctaacacgaacagatatagaaaaagtgactaattttgtcataacatctctagatcggattattatttttatttttgacaaaaaatcagttaagggtcctaattgtataccttagaaaaatacaggatctattttatcatttaacaatgcaggatctattttatcatgtaacttattagtacaacgtgataggatataaatacgtccatatggggcacgacagaatgtggtgcatataacatattattattgggactgacactctttatgtcgtgccatttttttttcctttttttctttaaaaaaattggagagaagtggcccaacacaatagcattggacacaatattgtcgtgctccaaaagttaaccgaacgttgggtcaagcatgctttttctcgcatttacacatggtcacgacagacacttgggcacaacattgttgggccaaggtttcgtccccccgcctttaaaaaaaaaaaactagattcgagaaccccatttaatttcctcttcaaccttgctttgatactctctctctctctctagtctctctcactccatttccttttcaaccttcacaacactacaataatggcagtctttcttcttctaaggccctcacactgtcgacgcacaaggccatcactatggttgtccctcaaaaccaaatcggcaatgcagggcacaaggtaagttcacatttttattaatttttttttcttagatttgatttgattagatttttactttgttcacgaagctcatttttttgtccattttttttttgcgtccagatccacaacaactgactcattctatttttctctttgctagaaaaaaaataagaaaggatttcaagtaagcattcactcttatgagaacctcatgcactactacaaaaaaaagctttagctacgaagttttgcaatcactaaaaaaacacattgttatagctaaaagagaaaaaaaaaatctcagaagccctttagaggcaattatttggaccaaccctacctgcttggtaatatgctggtgggatactgcgaagtgtcaatgatgttcatattttttacaaaagagaagcaatgttgtgttcttcggcttcttagtcgtgtctttaagtccaaaatcccaaaatagacttcaaatgttgtatttccctaccaatttgtgaacttgatcttggagtgacatgttatatatgttgtattggaacttttcatgagaaacccgattttgatattgacattgagattgaaattttttgtagtgccctccaggctgttaatttgaagatgaaacaacatcgtcaggttaatcttgagtgccctttcaaagaaccaaaaagatgcattagccgaggtaactgatgtcttaagagcaatatgtcatgcacatagatttctccttgctttgactgggattccttgtctcaacaaaggaacttctaa

SEQ ID NO: 6896 - DNA, 779 bp, Cannabis sativa
atcatcatcatatttttcttctccaaataccagaaaagaaattaacatcaagatccaatcatgatgatgattatagtactggtggtggaagatcggtcatgacacatcaaaatctgctacctcaactatctctccttctttattaattttactactactactacctagctatagttgatttagttcttcatcaaattaatcattcatatatatatttatatatataaatatggatgcccattctcttccaccaccattccacacaagagattttcatttccaccaacaacaattccagcaacaacacaactctgaagatgaacaaacaggaagcagcataaacaacctcatggccaaaaccccaaagagagatcgcggaggagaagaagacaacgacagtggcggagaccactccggaggcaaagacctagtctccggctcaggagacgaccaagacaagatgatgtcaaggaggccaagaggaagaccagccggatccaaaaacaagcccaaacctccaatcatcatcacccgcgacagcgccaacgctctccgcactcacgtcatggagatcgccgacggctgcgacatagtcgacagtgtcgccaccttcgcccgccgccgccaacgcggagtctgcattatgagcggcaccggcactgtcaccaacgtcactcttcgccagcctgcttctccgggtgctattgtcaccttgcacggtcgttttgagatcttgtctcttgcagggagttttcttccgccaccggctccgcctgcgg

SEQ ID NO: 6897 - DNA, 626 bp, Cannabis sativa
tagaatacgtttttggacaactttcattatcaaaactccacctccatcgtagggtcgcagctactactacctctttttaaaatttattctcaataattcatttatgctgacaacgcacattatgatgtagaggatgatatcatggttcatatgatattttattttattggattaatttcacttgatatataaatgtaaaatgcttgtcaatccaatggaaatttatagaggacttggtgttgattggtttgtgactgataaatagagttttctataaagggattttgaaacaaaaattttgaattttgaatgtgaaaaattatttctaaaattatatttggatgtagtgttatttaatacttttaagttttgtgtaattgtttgagaattttaaaataaaaaagtgagaaaatatttttacactttttggattcaataatttaaaaatatagaaaacataaaaatgataagatacaccatctcgatacactctttatttgtttcaacatataagatatctttttagtttgatttgttttcatgatcgtatacattgtaattttttaaaactataaagtttcaaaaaattatgaatagcttacattgtcgaaaataaaatttaaata

SEQ ID NO: 6898 - DNA, 993 bp, Cannabis sativa
tttttttttactaattataaaaaacacaatattttctctaaataagagctcaaaaaaaaaaaaatttcttataatccattaaattttaaagtcgatcctaattattacgttaaattattttagacttgttatttacttatttattttttaaaatagacatgctacttaattcaactaattgcgatacaatattttaaggggtgctaggtgtcgtactccttagcatttctcgttttatttactcttataagattgatcgaactattttttaaaattattaaaaaaaataaagtacatcaaacaaaatttgtaacatattaaattttgatcaaaatacattaaaacaaaaccaatagtacataataggatgcaatgcatttgggaaaaaatccattgcaaacattttttcaataatttattttgctatacacaaaacaaaaatatgatgatcagtagctaatctctgttctctttataaaataatttaatacacaattttacagtgtacctaataaaaataaaataaaacttaaactaaatatgaaaataaattaaacaataaatattcatcacaccctcccaaatgatgcaacttattagattaattgttaatttgtaatccgtacaaccattaacacatatattatatcctttgataattcaaattcttcattcatttcgatttaataaatcacacaacggtatagtttatgttgtctatatatccttattatttatttatatattttctaatataataataaaaaaaaaaatgttagatacattgcatgatagttttgtgcattaaactaatagagagtacagtactcttaatttcagtattttaattaattttaataacataataaatgggtgttttcaatttgttttttctcctaattttttaacttacatatatataacaatttttaatgaatattactcagaaacggttattagggttactaataagtaaatttaactataaatatt

SEQ ID NO: 6899 - DNA, 576 bp, Cannabis sativa
acaaccacatcaagacccattactttcttagcatgtggcctcctcttatccaagtcacaaaccggcataatcggataccaatgagcataccaatcaaatttcccatctggggtttgagtttcaacctcaggcttaaaagggtcagaaagttctgtggaaacagaagatgaaatggcagtgaaaagcttggattttgacacggaattcgaactgggtattggattaaagctcgagcaaaagagttttgtgaattgggttttgtctagtcttgatggaaagccaagagaatgaacaggagaaactctgagagcttccatggctgacatgaatgaaaacaattagaagaagttgaagataagagagattaagaattggattaatggttaaagatgaaatctttgaaggttagaggagaggtaggtggggacagagataatgtgtaggcgtgtgaatagttcagttgaggcatttggatgtagtagcttagcttccattaatacgcttctctctgcatgtggttgtaaattaaacacctctcacattgatatactcaaaggttcacgagaaatcctaaat

SEQ ID NO: 6900 - DNA, 838 bp, Cannabis sativa
atccatattcctgcgtgattttttttttgtaaattttcgtttactcatgttatgtttagtatacagtaaaaaaattgttcatggtatacaatctagaaaaataaaataataaacatgtgacatgaataggtgtagcgtgaataaactaagacttacgatatactataaagtcgatattcaattgtacaaatgagcagcatgcattttgagctataataggggagcgattacaattataaagggttatagtttattgttaacgtaaaagtacttagtacttaacaaagtttacatgattgcacatagtgatttcattttaatatgatgcattttaactctttttagtaatcgaattgtataatgtgttatagtataatgtgatttcattttaatatgatgtattcatgattatttgtatattttacctttttcagtaattttgagatctagtttttgatgtcgaacttgcaatcgtagttctcttcgtcgaagctacgggcttttgtgattagcagataggtttattgatcgattgaagtattgatcaatttagagagatgatgatttgtttgttgtatacaacaacgaacctgtgttgtatcttcttctctaattttcaaatctaccgagttcttcgttaatggaattttctcattcaatcttgtttagtttgtgttttttgaattcatttttatgatatatataactttctattttaatcttgaaaaccatgcccagggaaggctaagaaaagtgcagttatggacgcgtcacttttatcgctggaagttctaaaattatgtcggcatccacaatattaagggtgttcgcggtgcgg

SEQ ID NO: 6901 - DNA, 1753 bp, Cannabis sativa
ttaccttctcaagttagggctccatcttcacctataaggcacttgaatccgtcagctagtaccacactacaaacacctagacagtccaattctcgtagtagcacaccacatgctgcaactagagagcataagcaactgatcaccgttcctcgcgacaaccatgttcatcaaaggcaagaacctcgtgagacaaaacaaaaagcactcccaaggcgccaacccgctcaagatgatagctaagtgtaaaggtcaaacacaatcttgacactatactctgagccatattttgagcaactgctgcttgatccccatcatgtgcaatgacaaaggacaatgagctttgcaataccgatcttaccctaggagtcagtccatatgtgttcataataatgcgcctcacatttatgaacactgcaataacaataatcacccaagggatgtcaaaaagacctaacttgtaggaaaactttatacaagcagttttattgtaaaggtatacaccaattacattataataactacatgatttaaaattaatggtaaaaaaaacttctctaccgataaagaactttgctcgcgatcggtcctatcataatcttgccatatatatattctgaaataaaaaagaaaaaaaaaacaaagtttgtcaaataaaatctttatttattgtttttttattttttttttctatatcaacgtttttcatctctgaacgttaaaaatatagaagaagattaatattttatttttttacatagtatattatacacagtggtaaaaaaaagttactcgtaaataaaataaaataaatcaattatattttataattttaataaatataattacttattatttttgttaactaaatataacttttgtgtatatttttttggcctatattaacataaattatacatgttctattgtgtaaatatatatatatatgagtatgctctaaatgggtattacccataaataggtattttattattggccattagattaaatctaatgattcacattaatagtattaattgatattttaaaatactcaaatttattttttaaaactagtggaagggttacttcatgacgtggaggtaatttattatttgataattcttttcttattcccatctcattacctctttactctaattatttcattttttcccaatttaatatatatatttttggtatcttctttgataaaaacaaaatcttcaattaagatgacagtaaaagaaaaaaagaaaaaagaaatcttcaattaagatgacagtaaaagaaaaaaagaaaaaagaaatcttcaattaatatgggaatttttaattttgataacaaattgtgttttttttttcacgtacttttgacatattcttacattcttttgaatacattatctgtccattgctaacccaaatatacaaactcgttcgtttgcttcatgtgaatgatgaatgtttaaataagtaatatataattctaataggtatatccagggccagccctgacttttagtgggccatagaaaaaaaagttattttgggcccttatttagaaaaaaaaatatagtatttttcaaaatcagtaaaaaatggtataattttaaaaggtaaatatttttttttgggccctaggcacaggcctagcccgcctatgcccatgaccgggcctgggtatatcaacctagcaagtaaagttaatggatatcatcactagtacctttctcataatagttcttaataagcct

SEQ ID NO: 6902 - DNA, 801 bp, Cannabis sativa
acacatggtaattcactatcatcaaatctgtcacataaaatataataacataatattattattattgagccacattttctaacaagccaaacaaacaatcactgtaaaataaataataaatcttattcaacgattaataattgcttaattaatttaagaaaaatttataaaatagaccaaaaatctgaagaaaaaaaattacaaaattactttattaataagattttttttttactctttaaacttttatttttctaattattgagaggttgatttttgattttttttagttgttttcttattttttggtgagcaaaataaattattattggaccacattttctaacaagccaaacaaacaaggattacaacaaaaaaataaataaatcttactcaacgaataataaccgctaatttaatttaacctatctttgaagtacaagctgtcgagataggataggatgcccttatctcgacagttttcaattgtcgagaaaaatagtttgagatagtaacaataacaatctctcttctatatgtttttttttgttccataaattgagctaaagaacatattattatatggtaaaaatttaagatagatgaaacttgaaataatataaattccactaaaaattaaaaaatacaaaattaaattctaatttcgtaatcatttaatgtagttactagctcaacatgttctattcgatacaagtaaaagaagaccccgattcattatttttaatttttgttcttcgaaaattcgaatcaacttcttcttcttgcaccgaagatcttacc

SEQ ID NO: 6903 - DNA, 726 bp, Cannabis sativa
agacctctttatatagtatttaggttgatcacacttgaaaatcaaataccatccacccatggctattataggctcttaattagatgtaaaatgaattaaaggaggtggtttgggggttacacaaaagctaggaccaaaaaccaaactttcaataatgtttttgtacaagagactacttcaggtgacatgatgcatgattaacatgtcacctggtgcaattttcagcaagcttatttttggagttttgtaactcccacttggcccaaactaaatccaaacatttctaactcatttctctcatatgaattagtattaatcaaattcttaacaaccataacatagatgtaaattccaaaaacaattatttccgtaataactcttttattacacttaaattctaatcaaccaaagaagaattacacttaaataaatcatacattatataatttatttatcaaatactctatagaaacaatacttaaagttgttttgtttaaacaatactttcacttatatttccaaacaagtatatatatatatatacataatcatattgaagtagtttccacatcattactattgttttgttttcttgatcttcttctcatgatgattagctccttaaccatttaaacaactttaatttattgcgatacgaatcatatgaagtaatgaaatcactaacataactccaacccaacctattactaaacacgtgctcacatt

SEQ ID NO: 6904 - DNA, 686 bp, Cannabis sativa
ctcagtccaaaacaaagttgaaatttacactttttaagtcaataatttaaagagaactgatattgagcattattggtacccaacatcttctataagtatgtcttacaattagttagtgatattttataaaagttattttttttttaattttgtacgtgactcaatcattaaataatataataccgaaaaaaatattgagcattaataataatttttaacaattctccaatttaaattcatcttataaatcatgccaattttcattgaattcgaggtgaggtagatataatacctttgactttttctttcttattttatttcatttttaacaaattttggaaaagagatgatgataatatgttctttataaaaattaaaggcctttacaactggcctcttcaagaagatgttgaccaatgtctactttaatcactaaaacacaaacaaaatagtgatctttttctatagttgttatattgattacaaaggtggatggatgatatcatgatattgtgttatgtatatttttgttagatttttacagctatcctatttctgtccaaatatgctacattttctcattgaatatatcattcttctttacatgccattttaattaaatttcaatgtcatattagtattgatattagggataattttataatacacaaaaattataaaaatac

SEQ ID NO: 6905 - DNA, 709 bp, Cannabis sativa
ataaatagcacgtggaataaatgaatgggcgggaaagggattgagaattaggagggaaacatattaacgactcattcttctctctctctattcacactctcttcttcaatggcgcaaatcgaaaccctagggataattcaagaccttcaatccctcgtctctgatcaactccaagtggtacccattttctcccactctcaatttttattttcaatgctgatttcgtgttatttctatgatttggtcgtttcgtgaatcttactctatcaattaggttttctcttttgaattatctgttgccaaggcgttaatctcaacaaaagtagggtttttttattaatgggttattgaggtatgaattgggctctgttgaaaaatcatatcttttggtgtttgatataagtttaaatttttgtttgagattttttttttttgctttatgcttatcacaatcttcatatttagactcttattcagactaagttttctttttgattggcatatatgtacttgaaaacataaatagcaacaaatttctcgacttctttgacttgttaacattgacatttccccttagcagtgtaaatatctcaaatttagtcaagtatgttgtatttgagtaattgtttcagctgggatcgttgttttgttacttatattttatttggatgaaagtttgattagtattagttttgtttcatcaggtttc

SEQ ID NO: 6906 - DNA, 574 bp, Cannabis sativa
ttgtatatttaggagcataaggtagtagtactacttacgctaatacaactcttgtgacaagaatcgcgttgtgcacatggtagcacgagtctactccaaactggatctgataatcatacacaaagagaataatttatataatatcatgatcaacatatatatatatataaatatgtattatataatactgaatacttataattaatgtacataatcacagccttatttattataatttgagattagatgaataaagttttatttcaaaaccaattggtaaatttgtaaattttaaaataagtccaagactccaatattgaaattagcacacatatggctctttttacggcttatcttttgaactagtggcattttagactcacaacggatcatatttctgataccatattagaatttaagataagataaataagattccatctcaaaagtaattgacaatggagcggctcattcatcatatatattttattacctttccacacattaacaatgtggaactaactctaacactactaaataaatgtaataataaagctttcttttataattaatt

SEQ ID NO: 6907 - DNA, 568 bp, Cannabis sativa
aaaaaaaaaaaaaaacaatgtcaagttcgaatctttatcctcacacgatttcccaaaccccaaaaacccaacctttaccgtcaccggcgacgaaaaaccccggcgccgtgaaattctcattcccacccagttcagattccgaccccataacaatcccaacaacccctttagtcactttcctcgaaagggttcaagaaacagcactccaaacattcgggaagtcaaactttgaccccaaactctacgttgatttgtcgttaaagaccgatttgaaggctgccgaagccgggttgaatcgggtcgtggaaaccgggtcgggtttgagggaatatatagaggaatattttgagggtgcaggggaagatttggtgtactgtgaagcagaagattatgtggctgagccagaagggtttttggctaaggtgaagaatgaagaagtgagaaaatgggcattggaaattcattcactttggggaaatttgagtaggaaagtttccggtgaggtgtggcggcggccggaacggcatactcttcttcctctgcctgaattggttatggttcctggctc

SEQ ID NO: 6908 - DNA, 582 bp, Cannabis sativa
ttttcgacgattgccttcacattcttctttgaattcgtgtaagagcaaagctagaacaacacctctagacctgacgactcctcttaattctagatccatcgagactgctggatttctaggaaaagattgacaaattgattgcttgggcttgtgagcttcaggccagactttgctgtctcgacgaggttttcgttatcgtgtcagcgacgcgactctttccacccccaaatccttcaagctacactagcattttttgcatctaaccggagatatctttttgtgctgccaatttttgctgagtctctgcaagttctttagccatctgatatacctcaggatcttgctcataataataatcgtctttgtactacccatctttaatctcattgtcgtctccaccatcatcctcatcgtcttctttgccctcaggttcttcctcttagtcatccatctcgtcttcgttgatggagttttcattggtcgatttctcctaatgctaagcttttttggctatacggacgcaagctttggatgttttcccggtctctcgcagtgcttggatgggcgtgcactgtgggaggt

SEQ ID NO: 6909 - DNA, 1416 bp, Cannabis sativa
aaaaaaaaaaaaaattcaatataacaacaataacaaaaaatattcattaacactatatcataataaaattatttttgaataaatataatgtttgtacatgtattacaagttagagtgaaatcattaattctacataaataaatttattaactatatgtatatattttattaatatataattattcttatatgaaggtatattttcttaataagtgacataaaagatgtataactaattacaatttaaaagttatttttatttataattggggcttaatttttttcataacaaattaaaagttattcttgaataaaatattcttaaatagaaattctactataatttttgattgtaagtaaaaatgaaaaactctgacaaaatgtatttaacaaaatagaaaaactaaggtagcagttggtgacacttttttaatcagttttttatttttcaaattgaaaaagtaaaaatatttttcaataaatatgtcttataagagtgttttcacttttcaattttttaattgagaattaaattttttttaaaaaaaccactttcaatatttttttaaacagttttttttttcttaattaatattttaaactccaattagacccgaatccaaactttgccacgaccctagcgccaaacccagctcctgagcaaaacacgaatctaactctggaccgagacccaaattaaataaaatcaaaaaatgaaaacaaacttaatacacttttattttttatttttaaaattgaaaacaacagtgattatagaacacatttttatttttcaaaaattaaattttaactttaatttttgtgattaaaaaatcaaaaagcaaaagtattaccaaatgacacctaaaagtgcacaacactttttaataagttttgtgttttaaaaattaaaaaagtaaaagtattttccaaaatcatattctataaacctatttttactttttaattgagaataaaaaaatcactttcaaaatttttttaaacaattttttttcttaatcagtataaactccgaccccagacactcgattctcgatctcagcctcaaacccagacctcacttgcataaataacaaatgaaaataaaaataaaatttataaaatacacttatattttttgtttttaaaattaaaaaataaaaatagttacagaacacgtatttatttttaaaaacaaaattttacatatatttttataattaaaaaaaataaaaatacaaaattttacttatatttttataattaaaaaaaatagaaatattacaaaacgttcacctaaataattataattaataaattaaaaaacttagctggtcctccaaaattcccaacctgttaaataagacaatttatacaatagaatgttcttcaaatatagcaacaacattaaaataa

SEQ ID NO: 6910 - DNA, 1120 bp, Cannabis sativa
gctttatctgaagttgaactcgagttgggagacacgcagaacaaactcgccacaagaagtttttaactttctggggtatctttagttgccataattttacccaaaaaccagaggttttagcacctgacagcctttctcgttggtcttcaaggattttgtatgcacttttgtctgaaaaagcaccagaattttccccacgccaagaccagaaatcctcaacagcagtaaaactgattggcaaacttaagattaaatcaatgtcccgctgattgaacatatccttaataagatcaatatcccaattcctactatcaaccataaaaagagaggagactggttgattaataagaccagggtgagttgtagtcacataaggattctcattgtgaggaagccaaggatgagaaagaatatcaacttgcaaaccagtacccacaatacgacgagccccaagacgaaccaaagattgagaattccatacactacgccaaataaagctcgaattggcccctaattcagccgataaaaaatcaccattagggaagtatcttgccttataaatacggccgacaagagaattcggttgtatcaacaaacgccatccctgtttggccagcattgcaatattaaactcatgtaagagacgaaaacccataccaccaaactttttgtctctagccatgcgttcccagctcatccaaattatgccccggcccctactagtcgaagtcttccaccaatacttcgccatcatcttttggagctcatcacaagtctttaaaggtaagaggaaaacactcattgcatatgtaggaagagattgaacaacagtctttaagagagtctccttacccgcccgagacaacaacttttcatcccaactattaatgcgattcttaactttttcctttaagaatcccaaaatagcggatttattacgactaatgatattgggcagccccaaatacttgctatcctcggttgcctctaccataccacgagtaccacaaatttgctcacggatatcgcattagtgttcagactgaaaaaaattgaagacttactagcattcactttctgacccgaaacctcttcaaaggcagccaatagattatgaaca

SEQ ID NO: 6911 - DNA, 529 bp, Cannabis sativa
aaaatagaatgtaagaggcgttattatgtaaaactcacagcattaatgtcaagagtaagattaatccaattaaaacagtgacaaaacttatccatacgaaatccaaaaatgagattagagcagcagcagctaaggtgcatctattgattttagggaatataggttgtgttttcatgaaaaatatatttggtaccctatattttcaacaatacttaattagtacttcatattttttaattatatatatttggtatcctaaagaaaaatttaatcaatacagttttattaatttaaccaaacagttctcaattatatacaatcaaataattaaatttaaattgagaattcataaaattttacactgttaattgtattgataaaatcttattaaaaaaattaaaatttaaaatatcaaataggtataattttaaaatacatgtactgaataaattattaaaaatacagaatatctaacttatatttagttaaataaaataaaaagtagcaaatgtgtgaacacccttcattt

SEQ ID NO: 6912 - DNA, 716 bp, Cannabis sativa
tgataggttcttcaagtaatccatgagctctgcctacccttttattatatcagtctagccttgcttcaaggcaagctgttccctcttaacactctccaatcttgccatatatggcaaaagatattggaacctgaagttgtgaagtgcggggaagagatgctaactacggcatagatacagaatggggcatcgatgtagatggtggaacagaacgggcccctgatggttgagagggtggtggtgtatcctctctgaagattctagcttccttcactcgcttttctagggtttgtgtgagctttgaagcctggctacacaaactatcctgagtaggttgtccatcaataccaataaccgattcctcgatatctacaaatagaggcgcttcacctccagtgacattgcttaaaaactttgcctcattaggtcacagacataaaacagagtagactagcaactgtaaataagaacaaaaagattattagacttagattaaaatgaaataaataaataaaagtgaacaaatacaatgaatcaaaaaacgtacatttttcgcaaacgatctaatgacttcatccttgcctagtaacacctccttactttcccagttcaccattctaggaaaacgatgcgattttctgatcgcaaatttcttagaaagcttttggatggactagtaagcccaatattgtaatgctacagcatatccataggtc

SEQ ID NO: 6913 - DNA, 1092 bp, Cannabis sativa
caattggcttatattcaaattctacaagaaaatagcttatggtcatttttcaacctcaaacacaaacctatattgctattgaattatcgcctcatctattctctttgatctttcagcttctatgccgtgattcatggcctctttgctgcgattcctcactttttgttgatttgggtgtaatattctgacattggtttgatatttcggtgtggttctactttagtgtggccaaataaagatgaaccccttcgatggttggttctccaattcactgtcttgaagatgagtgcttgctttgccaaccaaattttctttggaactattgcagttatccgagcacaattgggacatttttggcttcaagcaggtatattcagattatctttctctttattatgatcataatagctagataatatatatttatattgatcgctggtcttaatcaattattacattaattgatagaatacattgcctaaaaattgttaatttattctatgaactggtttgacaaaaaaacttcaaagtgatgtaatttttgatacaacaaatatttttgaggaatgactataattactggtctaacctctctctatggctttttaatgtttcgtgaaatacaccccctaaaagaaaagaaatatatacaccattttcttgatatatactattgttcatatgttagatttgaatatgatttcctcatgaagtgtttgatcctctattataattttgaattattttatttattcaacttgtgatcctctattatgattttgaattattttatttattcaaacttgtgatactctaatcaacagttttttcatgtgtgttcgtctcttaaggttggaaggatatatatatacataaatttatgatgtataccactcaaattgataatctttttatttattattatttcattgtacatttatatttatatttggagtttgttttttccttttattttaattttgctcttgattttcccatttaaatgttcaatttaagattatgtaaagtcgtccaataccgaggcaaaatagcacagtacgtttggcgagtattgatcaaagaagcccaaca

SEQ ID NO: 6914 - DNA, 1218 bp, Cannabis sativa
tttttttttttgggggggggggtggtggttgtttaatgtatagttttttcatataacatttattgaatctacatttcattgtgcagaaaactgctcaaaatggtcttcattttcttcttggaggcatttgtgctcttacggtagtagtgttctttcgctttgtaagtaccttggacatttttcatttgctctgctctgtagggttcctgtttgcgttgagcattatttagtttaggttgttcaagatttaatagataattgggcttttctatgccaatcctctaacatgattgagtgacaagaaaaccaacaaccttgtttaactaacaagcctaaattgccacagttaatgcaaaatagaatgcttgtactgtatttacgtggttctttgggagtgaagttggcttaccttatatataacactgtagtatcttgtatcaaaactacaatttatatatataaatatatatttcccttcgtttttagacttaatactttgcatatatcccaagagagactattttttccacataatgcatgagaaatcttctctttttagaaagatgtaacttgtccaatcttttttttcgttgtttgttttgctatgatctttgttttctcttccaataacaatcaaagcttctcaaaatcgtttgtgctttatcttttgttcgcagtttgcactagaagtcggttaacataattttttttgttctcctttgcgctccattgattactatcataaagttgcaactgttaactcaaatgggatgtaattgaatatggttttgaatgttgcagtttgtacttaccagaatcaagtatggacctgctcgctattgggcaattttgtttgtgttttggtttcttgtctttggtatttgggcttctcggacacatggtacacattctacttgattctatttgttagtgttatttattatgctacttaatttagtgttttcctctcttccttcttttattctgtctttgtaaatcattgggaaatttagtctgtaagtgaagacatcaatattttatggtggattgtggttaattgttaattaagctgttcatatagcacagatctcagtgcattgtaaagggaaattactgtataagtatctcgttaattgccacatttcttttctttttgggcggagttgtacaaatagttttgttttggacttaaatattattatattgctaaatatatgt
